United States Patent Application Publication US 2026/0103690 A1 - sequence listing, part 83

SEQ ID NO: 409406 - protein, 396 aa, unidentified
MYYVGIDVSNHHHDATVIDATGQVVIAPFRFFNTRQGVTTLLARLQTLDAQVRIAMESTGHYWLPLYEALIAQRYSVSVFNPFQIKAYRQIGLRKTETDAVDSLWIADFLRIGRGQPMVIPTPPVRQMRELARFRFTLLQRQGNIRRRALTIIDRVFPEYPTLFSRSFSPTSRTLLRQAVTAETFAAWPLEDLTQAIRQASRGHLGLDRARKILRLAQDSLGIRSLGPVAHQEMQLLLDQLALLNDQVATLDEELDHLLQQTDTYLITIPGISTTLAATILGEIGDIHRFANLKQLVAYAGLDPSVHQSGQFRGSHARLSKRGSVYLRRAVWMAASVARRYDPDLKALYQRKRLQRKHHNVVIGAVSHRLLARIYVILKEQRPYEVRDPATKGSPA

SEQ ID NO: 409407 - protein, 334 aa, unidentified
MALNTLAIDIGKHSFHLFGIDDDGVIVSRKVSRLKLVATVDRLDPKIIAMEACGSAHHWGRMFQEAGRMVRLINPYFVRPFVRGSKNDATDAQAIFEAAGRPTMHFVPVKSLECQDLQSLHRIRDRLVHNRTSLINHTRGLLAEYGIVLPQGAKRFTLQVRQAVVEAELSDLARELFEELLDQLGDLDRRIAHIDKHLIAICRDKAACRRLVGIPGIGPVVATALLAAVDDGRQFGSGRDLAAWIGLVPRQYTTGGEPRLGGIGRRANHYLRRQIVHGARAVMSQAGRRSDPRAEWMKAVAARRGFNRAVIAVANKMARAAWAILVRGEAYAAA

SEQ ID NO: 409408 - protein, 347 aa, unidentified
MDALNTLLNFNRKGMKDLSDIKHFIGCDVSRATLDFAIYEKGNDYRTFQHIQVPNSTEGFQAMRKWLRTFKINIKEAVIAMEHTGVYSIALSEWCHKKAITFVLLHPLDVKNAGARGRNKTDKADSQFIADYVYTMREKLSPSSPEPTTIKKLRELRNERQLAVRARTAYLNQLKMITDKSTFNRMNKVTEMFTAQIKNIEAELRKIIESDAELHRNYKLLISIPGIGIINAVTTLIATCNFTRFQTARQYAKFCCVSPLSRESGTSVRSGDHVSHAGHNEIKSILTEGVRSAIHHDAQLKAYYERKRAEGKPHGSVLNAVKFKLICRMFAVIGRQKEYVNVEAYRR

SEQ ID NO: 409409 - protein, 428 aa, unidentified
MSNQEIIRRRQYCQIVKEITGSDQYLVVGIDVAKEKHHAFMGSATGKSLFRKLIFENNLDGFSRLLKTAEAIKSQNSLSKIVYGLEPTGNYHKPLARHLIRCDCNVVLVSGVAVKRNRELLNGRWDKNDTKCAANIADLVSRRRCLYYDCPSPSIIEIRSLLSLRRRLKREEHGLRMRIRNNLLAQYFPELDRFYNACESESLAIVQWILNPDTISAMEFGEFFHMVTTTRRGIAQTLRLRKIHGLAMESVGCPMGPAAEFEADLLVEKLKQVRRQVKKTNDLIEDFCLEFTEYSYLLTIPGFGPYISARVLASIGDPFRFENRKQLIKLAGYDLCADRSGKKSDKAIPVISKKGNGELRYALYQAASVATARVDLFRTYFTRLLRGRERERGIKTKMRVKLATKMLVIAWTLMKKREVFDPAHLNIE

SEQ ID NO: 409410 - protein, 351 aa, unidentified
MIIIGVDYHPSVQQIAYVDTETGETCERRLNHSDGEAEHFYRALERRQVSVRVGIEATGHARWFERLLAELKFELWTGNAAEIKAARVRKQKTDRQDALLLLKLLVEDRFPRLWVPSPENRDLRQLIWHRHRLVQMRTRAMNQIQATAMNEGVRRKKALWSKSGRQQLESLLLAPWATRRRQDLLELVDRLNGTIAELTTAIEQEAHKRPEVLRLMTHPGVGPITALAFVLVIGSPDRFACGKQIGSYLGLIPCEDSSANRQRLGHITKQGSSLVRFLLAESAQAAVRWDSDWRRRYAHLSMRRDRRIAKVAMARRLAISLYWMWRKGYDYQQSLKFGSHAGEPGYRHGVK

SEQ ID NO: 409411 - protein, 394 aa, unidentified
MRPPFAEMASGGTNYQAKSIKSSNNSRIWKFFRIFYKDSRLFRGSLEEIEVILGVDTHLDVHVGAVISEAGRLLGTRSVSTSTAGYRDLLSWASSFGNLKRAGLEGTGTYGAGLCRFLIDCGLVVLEVNRPDRVKRRLQGKSDPTDAESAARSVLSGVSTAIPKQQSGACESMRIASVARRSAVKARTQAINQLRAILVSGSQDVRDKLWKVKASDCVNACLRVRSLGNGVLLETMTMTIKSLAKRWLTLSKELKELDKKLEELTKTYAVQLRARFGVGPNTAAILLSVAGDNPERLKSEAALVALCGVNPLPASSGKTIRHRLNRGGSRAANNALWTIAMVRMRSDPRTRVYVERRTKEGLTLKEIHRCLKRYIVRELYPLILGDLKAVAENV

SEQ ID NO: 409412 - protein, 365 aa, unidentified
MKKIAYVGIDYHQNTLSIAVRVQGKHKIYDTVRIRNEDKIIRMYLKKLSEKYTIRACYEASCSGYFFQRKMKSWGYHCEVIAPSSLPKKRGDRRKNDFRDALNLAQNYANGNLSIVHLPTEEEESVRSLVRCRSAFKETEKRAKQHINSLLLSQGLRWPRSKWTFQHRKWLWELKMPNEYLQQVFDEHLAHLDYLQSRIKHLDQQIEQIAQSELYAPAVKKLRAFKGIGTLSAMLFISEITDFRRFPNPRALMAFLGLIPSENTSGDKQRGGPITKTGNPRCRTQLIECVQHYVKKPQISYPMKSDLAQVDPHSAAIAIKCLKRLHKRYWSLTMKGKIRPVALTAIAREFVGFIWAMMQPQAVYA

SEQ ID NO: 409413 - protein, 402 aa, unidentified
MNCVGIDVSKGKSMIAVMRPFGEVVVSPFEVRHTASELSELARLLKNLDGETRVVMESTGNYHAPVAWLLHGAGFYVSVVNAMLVHDYGNNSLRRGKTDKKDAVKLANYGLDHWLTLPRYVPEEDTRLMLKTCYRQYQQYSKVQTMLKNNLISLLDTAFPDANRLFTSPPRADGSEKWVDFVATFWHCECVCGLSKKAFTAKYQKWCRKHGYNFSQDKALDIYASACGRFGVMPKTNTAKLLVEQAISQLQTTSAALAALKQEMQSLAASLPEYPVVMEMFGVGPTLGPQLIAEIGDVRRFHSKKALVAFAGIDAPPYQSGQIDVRSRSISKRGSASLRRTLFLVMGVLLQCAPMDEPGYQFMNKKRSEGKPYRVYMMASANKFLRIYYASVKAYLDSLEHD

SEQ ID NO: 409414 - protein, 365 aa, unidentified
MLSRKVENDEADLRKLIGEVLPLAEEITWATDQPGGTAALLLALLWERNQKVIYIPGLTVDRARDTYRGESKTDAQDAYVIADQARMRGDLSELQANEGELAELQLLISRRRDLVTDRSRTITRLREALLALFPALERTLDLNNSSALTLVAHYQTPTALRRAGYKRVATYLKNRGIKRADTLAKKALAAAESQSAVLPAQDVASAIVAELAREALVLKQRIERVDEELKHRFFIRPEASILTSLPGMGPVLGAEFLVAAGDLSAFSSADQLAAYAGLVPAAHDSGKRAGNDHRMRGGNKVLKRAFYQSAFASLRTSPVSRAYYDRKRREGKRHTQAVIALARRRVNVLWAMLRDGTTYKAPSAA

SEQ ID NO: 409415 - protein, 411 aa, unidentified
MLSVGIDVSKGESMVCALNQFGKVVLTPHRYKHVKSALGSLVERLRSFGDNDIRIIMEATGIYSLPVAKYFKEQGFFVAVINPYAMSRFRIGGQGSLRNVKTDKADSMTIAGYGRQCWDTLMEYNPAAETYWKLDYLLRLYQKILAYRVSILQELYGIIEQTMPGIKEIGIKSPQVSTAKDILLDFAKTFWHYDQITGMSEKKFISRYLVWAKKKGHRPDVGKAAAIYAMAKDGIPCLPADPIVKQSIHTNIEALERVGTTLRDILSQMSGLAKTLPEYDIVRAMGGVGDVLVVKLIAVIGDIKRFRKAKSLVAYAGIDPPPYSSGKFEGNKRRISKRGSTLLRKIGYEIMKSLTRNKRPEDGAVYDFIRKKEEEGKAKKQAKIAGLNKFLQIYYARVKSIYKKTTEGKAA

SEQ ID NO: 409416 - protein, 371 aa, unidentified
MLTNEHGVAGIDPHKKSATIAVLDRRGGVVGSESFPISEDGIDRLLTFLLGTELTIDRIGVEGSAFLGRPLVLALTAAGYDVREVQANRTAERRKRRRRGKTDIEDAEAIARETLADPQLPPAGKHATPSPAWQTLTVLRDWRASLVLQRVRLLTEAEAVLVTLPVTIRDTLPATSRVLPQLVALADGHTAPGRLAPADRLKLERLATSLLDITTLTKRIKELDRRIPALLAELGSTLTDLHGIGVVTAMDLLVEIGDPHRFTNEAQFARWCGIAPVPASSGEGHGPARRHRLDLGGNRAVNSILHIIHVTQARCHPPAKKYLARKISENKSKREARRCHKRQLANVIIRHMWHDAERHAQTTTIDRTAAA

SEQ ID NO: 409417 - protein, 393 aa, unidentified
MICVGIDVAKDKHDCFILNSEGEVLADVFTIPNNAEGFDRLLQTIRRCARPEDKMKVGLEATGHYSYNILGFLLNEGLPTYLINPLHTNLYRKSLSLRKTKTDRIDARTIAAMLMSDVDLKPYTDTAYHNEELKSLTRYRFDKVCERAKLKQSVSRLVTILFPELEKLVPTLHMASVYALLSEFPGAKQVAGAHLTHLKAVLYDASRGRYGRDMATTLREAARCSVGSVMPAKSLELQHTIRLIRELDAEIEDIETAIQSMMDEIQSPITTIPGIGVRMGAMILAEIGDFSRFDSPDKILAYAGMSPSTYQSGQLSLSGTYSHMEKRGSRYLRYALYNATKYVCLWNPTFAAYLVKKRAEGKHYNVALSHAAKKLVRLIYAIEKSQKPYCSAA

SEQ ID NO: 409418 - protein, 327 aa, unidentified
MNYIGIDVDSQNLVCRMRRCGEDCPETIFANNAAGHRRLIRWATKQGHSARICLEATGVYSLPLALALHQGPGIEVMVVNPKAIKHFATAILQRGKTDSMDAACILEFLQRMPFRRWTPPAEEILEIQHISRRIVQLGTELTRERNRHAAAQRLGTWGHAVANDIAVNIRHLERRITHLEHVALERIERVPALSEKLDLLTSTTGIARKTGPRILAELSTLPGDMTARQWVAHAGLDPRPYQSGSSTHKPARITKAGNRYLREALFFPALVASRYDPNVKAFYDRLIARGKKPMQAIVAIMRKLLLAIWGMFKNNERWNGEKFYRTA

SEQ ID NO: 409419 - protein, 312 aa, unidentified
MTRIICGVDISSLSLEARIGPEGAFASFSNNPQGIAALAAFCQAHQVELVAMEATGGYEQQALALLSEQGLPVAILNPRAVRRFADSMGQMEKTDRLDAGMIAWYAQTRHSQPVCLTSASQQQLRALVTRLRQLTEVRTAQMNQSRLVTDPAVLALIEELLAVVARQIRELETSIAALIAQDPLWQHLDRVFRTIKGVADRTVARMMAEMPEIGTLSNKAISKLAGVAPLARDSGNHQGKRAVRGGRASVREILFIVASVVGRHEPDFIVFQQRLSAAGKPRKVIRIALAHKLLVRLNAKARQVRQQLEAAA

SEQ ID NO: 409420 - protein, 388 aa, unidentified
MFKTVERPDAPAAIRMDIGAIFVSLELSRSTWLLTSVSPGAGEKMSQHATPAGDLRQLFECLAELKRKAMARTGKTYPIIVIQEAGLDGFWIHRALEREGIESHVVDAASIAVPRRRRRAKTDRIDGKMLLRTLMAFKRGEPRVCAMAKPPSVEEEDRRRLGRERKTLIAERVEHVNRIKGLLFTQGAIDYQPLRRDRRARLEALRTGIGDPLPARLKGLISRELDRLELLLAQIKAVEAERDALLAKQSGQAPAAAAMLLAFKGIGPEFATVLWLEGLFRSFANRRQVAAYAGLAPTPWRSGSIAREQGASKAGNPRLRATLIELAWLWRRHQPKSALTLWFEDRVKTNGGRVKKTLLVALARKLLVALWKYVTTGLVIEGAVMNTA

SEQ ID NO: 409421 - protein, 435 aa, unidentified
MKITQIRDHTAGIDIGSEHIFIGLDDESVYQFGTFTCEFRAAIELLTAHGVQSIAMESTGVYGVILHEMLQETGFDVWLVNPAHLRYVPGRKSDVADCQWLQQLHSFGLLANSFLPDPAIKALRAYLRLRERYISESAAAVLHMQKALTLMNIRLHQVISQIHGASGMRVLRAILAGERDPETLVALCDKRIQDNKHDQVVASLEGHYRPEYLYELADAIDCYDFYQQKLRECDRQIDGELTGLAARQPVPADYGKAKPIRHHKPAIDQLHQKVVRTMNGVNVNELPGITDYSALRLVGEVGVDLSPFPKEGHFTSWLKLAPGKKQSGKHIRKHKYKSAPRAAEIFKQAAQSLLESKNHALGAFGRRVRARRGPAVAVKAIARKLAILYYRAMTQGMDYVEQGVEAYVKQYQQRRLHTLHKQAKQMGYALVELTE

SEQ ID NO: 409422 - protein, 365 aa, unidentified
MFNETVVGLDVHADSITAAILPPQSEIPEVVKLSGDLMQVRRLFRRLSAEGPVRSCYEASGAGFVLQRLLAYDGFPCEVIAPSLIPRKPGDHRKTDRLDAIMLARLYRSGHLTPVHVPDEDHEALRRLLRLRETYHGYCTATMHRISGILRNHGHVFKQGKSTWTKKHRRWLGELRQSLQGALQTALAAELQHLEYLETEQAALDAELERYAALPHYRRTVEALCCLRGVKTLTALTLLVEIGDVRRFRSPRSLMAYFGLVPSEHSSGNREYRGSITKAGNVHVRRLLVEAAWNNRHNAGAALVLKRRRQGQPPDIVAIAMKAQLRLVNKFFRLDKRKHRHVAITAVARELCGFVWAILMAVPEH

SEQ ID NO: 409423 - protein, 460 aa, unidentified
MTKRKKSPVNVPVLDVLEQINIHAAGLDIGSEEIYACVPADRDEQPIQVFPTFTADLYALADWLAACQIETVAMESTGVYWIPIYEILESRGFEVYLVNARHIKNVPGRKTDILDCQWIQQLHTYGLLRASFRPPEEICALRALARHRDNLIRYRSAHIQHMQKALQLMNVKLTQVVSDITGVTGLSIIRAIVAGERNPFRLARLRQSGCAKTEEEIAKALQGNYKPEHVFVLKQALAQYDFYLQQIQECDAELEAMYAALPTTPPKDQGSPPPKPQGRKPRKNQAHFDLATSLYQVVGVDLTAIDGIDALTVHTIITEIGTDVSAWPTVKHFTSWLGLAPHNDKSGGKVLRSRTKKTKNKATLAFRVAAQSLSRSQSAVGAFYRRMRAKHGPAKANTATAHKLARIVYFMLKNRTAYMDPGATYYEQQYRDRTIRNLKRRAAGLGMAVVPVPAEPATVS

SEQ ID NO: 409424 - protein, 344 aa, unidentified
MDHCAGLDVSVKETSVCIVDDTGKIIREVKVASEPHALLAVLTNPAYHFKRIGLEAGPLSQWLFSALAEAELPVICVETRHMQAVLKAQINKTDRNDARGIAQMMRVGLYRPVHVKTLRSQKLRMLLTHRKLLQSKAIAIENDLRATLRNFGLKVGMVGKVRFEGRIKELVENLPDLAALVEPLLVVRRVLREQIVILHRRLLAIVREDDVCRRLMTTPGVGPVVALTYRATVDIPARFRKSKAVGAAFGLTCSKYQSGEIDRSGRITRCGDEMMRVMLYEAAQSMLYSKKWSWLKAWAMQIAKRRGMKKAIVALARRLAVIMHRIWVDGTEFRWTREQVPAAA

SEQ ID NO: 409425 - protein, 369 aa, unidentified
MEDRITYVGLDVHKEGIVVAVAEGGLRGEVREYGRIANTAAALDRLVRKLGGEGVRLRFCYEAGPCGYGIQRHLSARGHECVVVAPSLIPKRAGDRVKTDRRDAAGLARLHRAGELTAVWVPDAQHEAMRDLVRARLDAVHALRRARQQLSGFLLRQGCHYGRPAWTKLHRRWLAGLKFEQAVHHIVLEDYIAAIEAAEARRDRLTAQIEAMLPDWTLASVVAALQTMRGMALVNAATLIAELGDLSRFANARQLMAYLGLVPSEHSSGASVKRGGLTKAGNKAARRLLIEAAWCYRFPARVSRELRLRQEEQPKPIREIAWNAQLRLCARYRRLARSGKPANVVTGAIARELAGFIWAIARCVPPAAG

SEQ ID NO: 409426 - protein, 491 aa, unidentified
MDRQRRLVGIDLGIASAHTVRVLDGFGREVCRRRCEPSVASLTLIEQAALVGASEGARLEVVMEPTGPAWLPIAVFFTARGHAVYRVSSQKAADLRRFLSRHAKSNGVDADTLARLPLVDPDGLTPLALPAGERAALDRRVRACDRLTMQAAEHKVRLKDLVRQLMPLTPLTGDVGQADLAVLEQWADPRALLRLGKAQLTAVIAKASRNHLGAARAEQWLAAAEAAVQLYGGHPAAAFVHLAAEVATEVRLIRAIEAELAVHAAERETAYRWADPGQLARTLPGLAEVGGPTLAAVIGEATRFPTSAHFKSYLGLAPRASETGDTDRKGQPMSKAGSRLLRSTLVRAADHARKQDPQMARIYYVQIVERGAGHLKALCVVAGRLAERAWAVMHRRMPYVICDTTGQPVTPEQAKKIIAEKWAVPAEVRTRRRSRKTTKGKAPQQVHPGHDKPHARGAGKRGDLPHPRSSSRTTNTSSPAGGHALDDGTSR

SEQ ID NO: 409427 - protein, 431 aa, unidentified
MLKINPLSTLYVGIDVSSKSNYVCALDFFKNKYINSSFANNQPGAEELALKILECLNQHPDLTMVVAALESTSVYSIHIANYLSSCEELMRFKPYVFVLNPKCTANYKKSYIGLGKSDPIDAFVIADYARAGNIESEPWRGSQFLALKRLTRHRLHLVECMTREKTYLISNLYLKFSELQMLEGDDQPFCDIYGATSSSVLMEYLSPEEILASSEEDLIAFLAEKSRNRIKDISKTADLLKKAARDSYRLDKALYEPLNGSIASSFNCIETFKREIKVIDNAIEKEIKGLNPNAFIILQSIDGIGPVFAGGIIAEIGDITAFHSSDALAKYAGLTWKSNQSGDFDGEDTPMIKAGNRYLRYYLGEAANSMRKHNVEYGAYYRKKYNEVPKHQHKRALSLTSRKFVRLVYGLLAKNQLYSGVSLDTSIKDSN

SEQ ID NO: 409428 - protein, 352 aa, unidentified
MPKHTRIVIGGVDTHGRTHHAAVLDTQGRLLGDREFPADRGGYQQLLSWLGRYGHVGVVGVEGTGSYGAGLACYLLAQQVRVIEVNRPDRRARRQHGKSDPIDAEAAARAVLAGTATAAPKRRDGIIEAIRVLRTARRGASKARTAAINQLKALLITAPAPVREALEDLSASVLITTCARLRPDQTLLADPAHATKAALQAIARRIQLLEAELELADQRLATLVGRAAPRLLALLAIGNDHAGQLLVTAGQHPERLRGEAAFAHLCGVAPIPASSGKTRRHRLHRGGDRDANKALHLAVVVRMRFCPRTRAYVERRTKEGLSKPEIMRCIKRYLAREIYHALVADFEALHAT

SEQ ID NO: 409429 - protein, 459 aa, unidentified
MRKKNQNQKKAKQKVSINQEWPLINPHAAGVDLGAREHWVAVPTDRDPRPVRGFGTFTEDLEALAKWLKDCGITSVAMEATGVYWIPLFQLLERQGFAVLLVNARQIKNVSGRKSDVLDCQWIQRLHTYGLLGGSFRPADPYCVLRSYLRYRDELVAGRSTQTQHMQKALQQMNLQLTQVLSDINGLSGQAIITALLAGERNPLKLAGMIHHRVKASQKEVAKALVGDYRAEHLFQLKIAFELHQTYERNIATCDEVLIKELDQLPDRVKESAQPLPTQSGHKCVPEPLRLALRQKLGVDLTAVEGFGTQVALTVLSEVGANLSRFKTEKHFTSWLGLCPDNRISGGKVLSCRTRRVVNRLSDILRMAATTLERSQSALGAYHRRMKAKLGGAAGITATAHKLARILYALLTHGEAYVRQGMDDYEQKYRERKLKHLQATAKNFGFQLIQMQKVPESVS

SEQ ID NO: 409430 - protein, 368 aa, unidentified
MARLAKVDSFFKNINLTSDDEVFVGVDVHKKSYHVALFLNDTPAVDFRMCAEPKQLNNKLGPLACSIKDIVYETGPTGYGLARHLRKNKLPANVVATSKIPRSAGADDKTDKLDSIKLAQYAAKGLLRSVKIPTPKQEADRQLYRMRHRQSFQFAKVKVQIKSFLLMHGIKEPDGLENWTIAGINELRDMRLIDTLRLSLDELLSDYDYFNSRVKTLNKILAGNLDKGLLGRRMDLLKTHPGVGPVVSCQFATELFHYRDFNSTRQLYKYLGLSPRVSQSGERSSSGSINKAANRRLRNNLIQAAWSWVRTDIEAKKCFYRICENCGGIKQKAIIAMARKMSGHLWAMLMNDQPYDKEKTKSKLKKER

SEQ ID NO: 409431 - protein, 423 aa, unidentified
MDNNYYKVYIGIDVHRRQHKVAILPIASTPSVNLAWNKLKIMDISNKLDDFEILHNTIKKYSQYSNEAIIAVDHTGGHYSEPLVYFLQRKNYNVCHLEPKAVKLARDRLLDQEGKSDTIDATCAAYLLYLRDTQGLSFRISAIVPELGGRASILRSLILQRQQYVKTATQVTNRLHQFLLSIFPEAEAKYFTKLLRIIPHYPTPEDIVNSHGLKGVKYISTETEQTILKLASNTIGVPGKLYRDIILVLSRQREDALARCKSIDKFIEKEVITHPYGATLLSFPCIGLITAATVISVVNDINRWPDKKKLKKALGIYGVLRQSGARRGKYRLGKEGSKHARSALFRVVSRCIQEHAPNSDFKDYYLRQVGRGKPKLKALFSTMGKLAEVIYHCLKTGELYEYRGIYQTSSRIRNPNRKLNPQT

SEQ ID NO: 409432 - protein, 369 aa, unidentified
MEDSNAFVGLDVHKDSIAVAIADAGRDGEIRMYGTIANSPDAVSRLMRKLVQRHGKIEVTYEAGPCGYGIYRQLAEMGIVCRIVAPSHTPKRPGERVKNDTRDALMLARLLRAGELTFVWVPDATHEAMRDLVRARQVASQDVRAARALIQMFLLKHGLRCKSKAWCLRYRKWLTSLPLEHPAQKFALQSYINRLDQAEARKAEIEGQMVHLIPGWTLAPVVHALQVFKGIGMVIAATLAAEIGDFSRVASPRQLMAYLGLVPSEYSSGSKLRPGGITKAGNKIARVMLVEAAWSYKWPPKVGVLLMLKRENYSQALKDIGWKAQVRLNQRFRRLESRGKRSTVAAAAVARELVGFIWATAISAMPKAA

SEQ ID NO: 409433 - protein, 472 aa, unidentified
MAKRKRKRKSVQKASQTFADLEQLNLNAAGLDIGASEIYACVPRDRDERPIRSFGTYTVELYLLADWLEACGVETVAMESTGVYWIPAYEVLEARGFDVCLVNARHLKNVPGRKSDVLDCEWLQRLHTYGLLRSSFRPEEEVCALRALVRQRKQLVESRSRQIQLMQKAMEQMNVKLTEVVSDITGVTGLSIIRAIVQGERDPKVLARLRNHQCRKSKDEIAMALEGTYQFEHLFALQQALAAYDFYGQQLHECDRMIEAQYDSMPDTPPGDDTSPPKGNNQKPRKNQPDFDLASSLYRLVGVDLTEIDGIDALTAQTVLSEIGLDMTRWPTVKHFANWLGLSPNSKISGGKLLSSRTKKTKNRATTALRVAAQSLHRSDSALGAFYRRMRARNGPAKAVTATAHKLARIIYFMLRDRTPYRAPSVEEYEQQHRERLIRNLKRRAKRLGLQMIPIETESDNTPFSLEQALVS

SEQ ID NO: 409434 - protein, 455 aa, unidentified
MTKTRTADRPELKLVNIGAAAIDIGSKMHMAAVNPACTDVPVRTFATFTQDLHSLADWFKTCGVTSVAMESTGVYWIPVYEILEQRGFEVILVNARYAKNVPGRKTDVSDAAWLRQLHSYGLLRGSFRPDAEVATLRAYLRQRERLVEYAAAHIQHMQKALMEMNLQLHHVVSDITGATGMRIIRAIVAGERNPDVLATYRDVRCHSSTETIRAALVGNDREEHVFALTQSLELYDIYQAKMLDCDRKLEVLIAALSSREAKPVGKLSKPRVKTKQVNTPTFDVRTALYGVLGVDLTEIHGLGPSLALKLVGECGKDLRAWPSAKHFTSWLCLAPGNKISGGKVLSSRTRRSSSRAAALLRLAATTVGRSDTALGAFYRRLSARAGKSKAVTATARKIAVLFYNTLRHGMSYKDPGASQYEQQYRSRVLANLQRRAKSLGFVLQAIPADAEPAVS

SEQ ID NO: 409435 - protein, 413 aa, unidentified
MKPWKEQTHFAALDWADDHHDLVVVDAGGQVVLELTFEHDAEGWQQAQQALAQWPEVPVAVETSAGPAVDQLLQRGFSVFPVMPKAAARYRERKRPTGCKDDLHDAWSLADALRTDGHAWCALSPLDPLTSELRTLCRDEVTLIGQRTALVNQLLAALKEYYPAALEAFEDWTAPYTWAFVLAFPTPAALKAAGKRTWEKFLHTHKLWRPQTAIDRLEIFARADQFKGTAAITAAKSMLVQSLARLLQTLEQQLAAYRARIQMLFDQHPDQELFGSLPGAGSKLAPRLLAELAGVNWRQLTQVQARAGTAPVTYQSGQAKRVKIRRACILPLRATLHLWADLSRHSSAWAAAFYRAHRDKGQSHACALRCLAHRWLKIIGAMIQTRTTYDAAKHLFQIQQHGSYVFQLLSPQL

SEQ ID NO: 409436 - protein, 343 aa, unidentified
MGEVSTIGLDIAKSVFQVHGVDDAGAVVMRKRVGRSKVLEFFGSLSPCLVGIEACPSAHYWSRELQALGHTVKLMPPTYVKAYLKRSKNDANDAAAICEAVTRPSMRFVPIKTQEQQTGLMLHRTRQLLVRQRTMLSNAIRGHMAELGIISAKGRNGTAELLQIIADVADDRIPSVARFCLELLARQYLALNAEVSAVDKRIHAWHRSCQESRRLEAIPGIGPIVATALVAEIGDWGAFRSGRNLAAWIGLVPKQHSTGGKERLGSITKQGNRYLRWLLVTGAMAVIRYARTHGTKRPWLTRIMDRRPAKVAAVALANKIARMAWAIMVRAERYKEPKLLLAA

SEQ ID NO: 409437 - protein, 370 aa, unidentified
MKKLAYVGVDYHIKTVTIAVYLADEKQFHDTRHLTNDDKTIKKYMKKLSKLFQIKICYEASSSGYVFQRKMQALGYHCDVIAPSLVPKKAGDKRKNDFRDSQKLAKNYANEELTIVHPPTEQEESVRSLVRLRLSIKESEKRVKQQINSFLLSQGHRWPKSNWTQQHLNWMATLQLSDSNLLLVLQEYLGHLEYLQSRLGYIDQKIKLLAQTELYATSIKKLKAMRGIGTLTAMILIVEITDFRRFPTPRSLMAFLGLIPAEDSSGGNSKEVGLTKTGNHRCRSALIESVRHYIKKPYMSAAMRQKLSQADAHSAVIAKKCMHRLHKRYWTLVMKGKIANKAIAAIAREFAGFIWALMQPAPVVDGQTKA

SEQ ID NO: 409438 - protein, 446 aa, unidentified
MEMLYARCAGFDVHKKTVKVCLLIRQADGQLHKELRTYGTTTQELFILSDWLKEQGCTHVAMEGTGVYWKPVYNLLEGNFSLLVVNAQHIKTVPGRKTDVKDAEWIANLLQHGLLKASFIPSAPQRELRELTRYRVRLTEERAREVNRIQKTLEDTNLKLGDVVSDIMGKASRMILNALANGETDPARLADFAVGRVRADQQQLEAALTGSVDEHHRFLLREHLTQIEHLERAIERVTAEVARRFTPPPEDAAPGQSDAETNAEGFAPSEKEPPSSPHAVSWAEAVVLLCSIPGISERAAYGILAEIGIKMQQFPTAGHLASWAGVCPGNHESAGKRLSGKTRKGNPWLRRLFIQVAYAASRQKHGYLAAQFRRIAARRGGKRAAMAVAHSILVIIYHLLTNNTSYEDHGETFFDEREHQATEKRLIRQLERLGHHVTLEPVAQAG

SEQ ID NO: 409439 - protein, 351 aa, unidentified
MASSITVGMDMGDKNHSVCVLDSECEVQQRTSVTNTARAIQKYFAKLPSCRIALEAGTHSGWVSRILEGMGHEVLVGNPRKLRAIWDSDEKDDDRDAEMLARIAKLDPHLLYPIHHRGQEAHTDLAVIKARDMLVKSRSILIAHARGAVKTLGQRISSCSAEAFHIRLLEQMPAELLPALEPVMKSIEELTTRIRHYDRLLENLCTAKYPETAGLRAISGVGPITALAFVLTIEESSRFDKSRAVGPYLGLVPKRDKSGQTDKQLGITKAGDAYLRCLLVGCAQYILGPFGPDCDLRQFGLKLAARGGKNAKRRAVVAVARKLAVMMHHLWKSGAAYDPFYRQSLKQKKVA

SEQ ID NO: 409440 - protein, 378 aa, unidentified
MGGDSTVVGLDTHKAAIHVAMLLPGATEPVQWQLANEPAAVRQLVRKLRRATDGEVRCCYEAGPCGYALQRQLEAAGVSCTVIAPSLIPVKPGERIKTDRRDARKLAELFRAGLLTAVAPPTAAEEAVRDLCRAREDAVEDRLRARHRLGKFLLRRGLIWRGGKKAWTQRYRDWVRGLRFEDAADQAVVASYLLAIEQVEERGRTLEAQLEVVAQEEPYRERVGWLRCFRGIDTVTAVTLLAELHGFQRFTTPRALMAYLGLVPSEHSSGEGQRRGSITKAGNLHARRLLIEAAWHYRHPPAIGKALRQRRQGQPARVLAVADRAQQRLHRRFGRLSARGKMANKVVVAVARELVGFIWAALTPAADVRAPRRAARAA

SEQ ID NO: 409441 - protein, 313 aa, unidentified
MKKTICGVDVSKAKLDVCIEPGHRFASFDNDAAGIAELAKFCRENAAELVVMEASGGYERRAFVELWGHGISCALTNPRSVRRYAEAMGVLEKTDRIDASVIARFADAKNLAPTPLPSQAQQRLKALVARLRQVTGDLIVQKQRRSSVIDNAEMRASIDEIIALLKRQSRSLEGEIASMIDDDPLWAKLAGTWREMKGVAGRTVARLHAELPEIGTLSNKAIAKLAGLAPIADDSGKRKGKRSTRGGREGVRTILFLVAAGVARHDENLRNFRDRLVKAGKEKMVIRIALARKLLVVLNAKAREARAEYALAT

SEQ ID NO: 409442 - protein, 352 aa, unidentified
MNNIKFIGMDVHQATISAAVVSEKGALLLETVIEAGEKCIVEFMQRWSGPVHVTFEEGTWATWLYELLQPHAERVLVCNPRKNGNRRNKSDKIDARKLAYWLRSGDLSPVYHHDCGVRHLQELSRGYLALRKDVTRIMNRIKALYRSWGIACGGMSCYGQRQRSQWLAKLPQRGVRQRADQLYQQLDAVRPLMQAARKTMLAEGKKHMVCGRLKQIPYIGPVRATLLIALLQTPHRFRTKRQLWAYAGLGLVTEVSGEYRMVQGKPQRHKTPLIRGLNPDCNHELKYVFKSTANRASGGQGPLHDFYENLLTQGMRAEMARLTLARKIAAIVLVLWKKGVDFDPQQLKRQAA

SEQ ID NO: 409443 - protein, 350 aa, unidentified
MIVLGADTHKRSHTVGAVAAATGELLGEQTVPVGLRGFGALLRWARSLDGERAWALEDCRHVSGSLERFLIERGERVLRIPTHLTANARRSARQRGKSDPIAALNVARAALREGLESFPAAHLDGPELDLRLLVDHRERLVRHRVELNSTLLWHLRDLWPELQLPGGALFSKKWSTRISRRLARAEQTMRVRIARDELRRLRELTQAVTGLEREITELVGQLAPQLLSEPGFGPRSPPSSSARSPAPSAFATPARLARAAGVAPIPASSGNTQRQRLDRGGNRQINAALHRVIVTRARCHPPTRDYIQRRRSEGKSTREAIRCLKRYLARRVWRLLQPPTPSEKSLNLLT

SEQ ID NO: 409444 - protein, 416 aa, unidentified
MEKVYGKCCGIDVHKKIIVACFINGRKQEIREFGATTKELTKLAEWLKEGGCEMAAMESTGSYWKPIYNIFEVYDVKAIIVNARHMKAVPGRKTDVKDAAWIADLLQHGLLKASYIPDKEQRELREMVQYRKSLTEMKAAELNRLQKFLEGGNIKLSGTVNDINGMSSMNLIKELLQGNTINEETIKKMRAAKKISNHLKSSDQELADSLEGVLTKVQKEIITELLEHLEELDKHIKILTEKIDATMKPEEKKAKEAIKDIPGIGDINADAIIAVIGTDMSRFPDSAHISSWAGVSPGNNESAKKRRKQKTNKGNQLLKSTLVVAANSAVTCKKSYFYSQYQRIMTHRGKKKALVAVAHSILIAIYHILKDGVPFRDLGANYYNQFNREKKANVLIKKIASLGYKVTVTAITDPVA

SEQ ID NO: 409445 - protein, 464 aa, unidentified
MTDVKRGNKRKQTTKAGPATLPVLQPMVAGVDIGSTEHWVCGPVRADGDPNVRVFGTTTAQLNELADWLVEQHVTSVAMESTYIYWIPVFELLESRGLEVVLVNARQLHNVPGRKTDFADCQWIQLLHSCGLLRGSFRPSEAISRLRALQRQMANFVAERSRCVQWMQKALDQMNVQVHRAVTDLTGTTGMAIVRAIVAGERNPARLAMHRDRRCHKSVEAIAQYLTGTWREEHLFNLAAALRLYDSVQDTIASYEAHLLAQLEALQPPERQQQDVPRHPNRTKEKTIRQRGEQPLRTSLWRFAGADLTRIDGIRAIAAQTVLTEVGPDVTAFPSENHFVSWLRLCPRTPISGGKPVKKRRNGMGANRIAAALRMAALGIQRSKTAMGASFRRIARHKGKAVAVFATARQLARLIYRMLRYGQDYVDIGEAAFEAKFEARRLAGISEAARSLGFTLTKNEAAAG

SEQ ID NO: 409446 - protein, 340 aa, unidentified
MKLYCGIDLHSNNSVVVILDEADKVVYQKKLNNDLASILTQLSIYKDKITAIAIESTFNWYWLVDGLMEAGYTVKLVNTAEVQTYSGLKHTDDKDDARWLAHLLRLKILPTGYIYPKEERAVRDLLRKRSQLVRQSTTNILSLQNILARNTAQSLSSYKIKKLDDVQAEKLLDDPNTTLALKCNLNVIRCLQSTIAEIETTVLQQARIRAEFKQLLTVSGIGEILGLTIMLESGDMSRFPKVGNFSSYCRCVKSERLSNGKKKGEGNRKSGNKYLAWAFIEAANFAIRYNDKIKAFYQKKKVKTNGIIATKAVANKLARACYHVLKDQVPFDVNKSFSRW

SEQ ID NO: 409447 - protein, 374 aa, unidentified
MYRILKIGMDVHSKTYTLCAMEPMIGAEDRILANIQVTADYKNILLFIENLKAKLGSQDTYDIQCGYEAGCLGYSLYNQLTEAGVNCVILAPSTMLTQQGKRIKTDKRDAHVIAQCLSYGTYHPVYVPTADDDSVKEYIRMRKVHKDKIKEMKQRIGAFCLRKGLKYDGTNWSLKHLQWLRNLKLSALNREILDEYMATFGELTAKVERFDARIEELAAQERYQEKVKRLGCLLGIQTHTALSLIVETGDFHRFAKGNIYAAYLGMAPGENSSGDKVKRTGISKAGNNHLRKLLIEASQGICRGSVGYKSKVLRARQAGNTAEVIAYADKGNVRLRKKYYKMIRGGKKKNVAVAAVARELACFVWGMMTDNISI

SEQ ID NO: 409448 - protein, 369 aa, unidentified
MVENTLFLGLDVHKKTISVATVDGSARAEVRFYGTIENTPDAIRLLCKKLSKDGRRVHACYEAGPCGYNVQRHLTRLGHRCDVVAPSRIPRKAGDKVKTDRRDAMTLAQTLRAGQLTEVWVPDQAHEAMRDLVRLRSQAMRDLRKTRQHLLSFLLRHERISPFGHWTKMHRRWLGELKFAHPAQHLALEEMLHRIERAEELCERLKQAIGELVPQWSLAPVVQALQALRGISLITAAVLVAEIGSFERFDNPRQLMAYLGLNPSEHSSGATVRRGAITKTGNALARTSLVEAAWTYRFPARITQIIRDRLKALPEPIRAVAWKAQVRLSARYRALIARGKSAPIAIVAVARELVGFIWAIARMVEPKFT

SEQ ID NO: 409449 - protein, 377 aa, unidentified
MGDYSDAFIGIDTSKLRNSVAIADAGRGGEVRFLGEIENTAAATAKLVRKLAAKYERLTFCYEAGPTGYGLHRQIKGLGYECTVVAPSLIPKRRGDKVKTNRRDALSLAKLLRADELTAVWVPDGRHEAMRDLTRARETAMLDLRTKRQHVSAFLLRLGRPYPESKKTWTGAHMSWIASQKLDHPQQRLVLEEMMLAIRQAQDRLARLEQAIAAAVPEWSLALLVTALMAMRGIDLISATTLLAEIGDLSRFQTPTELMAYLGLVPSEASTGDTVKRGPITKAGNRRARRMLVECSWSYQHPPRVGQAKQPKVDAAPPAVREIAWKAQCRLYRRYRMLIRKGKLKTVAIVAIARELAGFIWAVARAASTTRIAAATN

SEQ ID NO: 409450 - protein, 343 aa, unidentified
MKYIGLDLHKKSIFATVLGEDGNILSRTKIGPNTRDICYYLKSQGSRDELSVAMEASYNWPYYYRAVEEAADTIVLAHPLKTRIIGEAKIKTDKIDSSVLAYMLKADMLPAAYVPSRDTMENKMLLRARISLVRIRTQVKNKIHAIVDRNRDSYHGLDNMADIFGKTGIKILRDTTICPTDHKILIGYLDLISEIDKKIKDIESQIDKRSIKDRDIELLKTIPGIGTFTAFLVKSEIDDISRFTSKEKLSSYAGLIPSTHSSGERLHHGRIVKQGNKFLRWALTEAAQTSIRCSEYFRYHYSKIRSRKNANSATIAIARRMLEVIYVMLKEGREYIEKPVDIK

SEQ ID NO: 409451 - protein, 355 aa, unidentified
MDSIKYVGMDVHKETVSIAVRNQAGKIVMETVIETRANAILDCIQGMRGELHITFEEGMWAAWLYDLLHPHVARVVVCDPRRNALLTEGNKGDKVDAHRLAALLRDGGMLRQVYHGEHSLRSLRELARSYLVITQDVTRVMNRTKALYRGWGIPCGGQQVYAAHHREAWLSKLPETGVRRRAEHFYQELDALRALRQQARRDLLTEARKQPATRWLRQVPYIGPIWSALLVALLQTPHRFRTKRQLWSYCGLAIRTSSSADYRFIDGELKRSKKSPLLRGLNTNHNHALKNIFKHAAMGASCSSGPLREFYDAQVAQGKKPAMARLTLARKIAAVTLAVWKQEGGFDAAHLKLQA

SEQ ID NO: 409452 - protein, 350 aa, unidentified
MRRPTDKVIAGIDLHGNNLVIGMVKQDGTRVMHRKLECRLEEVLEFLKPFKGRLQSMAVESTFNWYWLVDGLHEQGYEIDLANPAKIEQYSGIKHADDKHDAFHLAELQRLNILPKAYVYDAELRPVRDLLRRRTNLVQQRTALFLSFKSLYARTTGQTMPLKTLKGMEPKEAKGLYQHPANQLIAKIQLEHIGSLDRSINLIEKTVLASARELPLYQKLLTLPGIGKILGMTITMEVGDIARFKSDGDFASYCRAVDSRRLSNGKQKGENNQKCGNKYLSWAFVEAANFAKRSDEHCRRWYDRKKAKTSAVVATKALACKLAKAAWHVMAHKTDYEARRMFPELAVKTK

SEQ ID NO: 409453 - protein, 334 aa, unidentified
MQNVTLIGIDLGKHSFHVHAQDKNGNALLRKKFSRNQLTAFLSTCAASTVVMESCAGAHYMARHISQLGHQVKLISPQFVRPFVKSNKNDFIDAEAICEAASRPSMRFVTPRTEDQQAMSALHRVRDALVRERVKTTNQMHAFLLEFGISMPRGIAVIRRLAAVLEEHELPPYLARLLMRLHQHYAYLSEQIEELEQELKTHMADDDTAQRLLTIPGVGLITASLLATKLGDGKSYASSRDFAASTGLVPRQYSTGGKSTLMGISKRGDKNLRRLLVQCARAFMQRLEHNQGRLADWAKAQLLRHHSNVVAYGLANKLARIAWSVTTHRTAFIQ

SEQ ID NO: 409454 - protein, 323 aa, unidentified
MNKDIKYFGIDISHHVFDVTDSSGNYYQFKNNEFGFKKFSKLLNIKSHCVMEATGYYHYQLAYHLLESGIKVSVENPLSVKRFIQMGLSKVKTDKSDSKLICAYAEQVELKLWKGNSKEEIECLQIVRMLSVYIKQSTMLKNKLHGEAVLGNPSKLVVRSLKCSLRQITKAIKTLEDALLVLVKQTHQDLFTRLKTIPGIGPKTAIMLVVLTGGFDRFTSASELCSYAGLTPVIRQSGSSVKGRPRISKMGNQKLRNLLFMCSFNACKYNKACRDLYERIVAKGKSKKLALIAVCNKLLKQAFAIAKSGLIFDENYKSTLVKN

SEQ ID NO: 409455 - protein, 373 aa, unidentified
MPPAVSTPDRHRMCPPTLGLEVGSRMLADQLDYVVGVDPHRDSHALAIVHVVSGAVVFEAAVDASSDGYAHALKLADQHAPGRRAFAVEGTGSFGAGLTRFLTGRGEWVLEVGRLRRERRSGGKTDALDAVRAARSMLTSERAATPRAGGERQGLQALVAAREGAVNAKRAGLCQLRDLLITTPEPLRSELRPLTRARLLQRLAATRPGGGRDPELRGSMLALRSLARRVLQLTAEERELAREIEALTRKLAPQLLDQPGVGPHAAAQLVLSWSHRGRISSEAAFARLAGAAPIPASSGQTIRYRLDRSGDRKLNRALHMILVTRKRSHPATTAYIERRMQEGKTRREANRCLKRYLARSLYRLLEHGTPIAT

SEQ ID NO: 409456 - protein, 338 aa, unidentified
MSIKVLGIDLAKNVFQLHGVDHKGHTILQKKLSRRNLMEFIATLPPCTIFMEACSSANYWSRQFESFGHAVKLISPQYVKPYVKYHNNDKNDAAAIVEAGTRPSMNFVPRKSIEQQDIQCLHRIRSRLVKNRTSLINQIRGLLSEYGIIVAQRIGNIRRRLPEILEDASPELTQIGQALFADLYDQLVDIDKKITEYEERLKHVFKHNETCQRLAQVEGIGLLTATAIVSTVGDAKVFKNGRHFAAFLGLVPRQHSSGNQHRLLGISKHGDTYLRTLLVHGARSALRVAHKKMDARNRWAVDIRARRGENIACVALANKQARTVWALLAKGESYQRVA

SEQ ID NO: 409457 - protein, 341 aa, unidentified
MGQAHTIGLDIAKRVFQAHGADASGRVVFRKRLVRAKVLAFFAAQPPCTVAMEACAGAHHWARELGKLGHTVRLIPPAYVKPYVKRHKNDRADAEAICEAAQRPSMRFVPVKTEEQQANGVVFRARDLLVRQRTQCINALRGHLSEYGSVFPQGITHAEAVIAHVEDPDSAVPESARAVLKVLIGTFQALEAQIQALDAEITQRAKADPVARRLMTIPGIGPIAATAITALVPAPEGFRAGRDFAAWLGLTPLQKSTGGKQKLGAISKMGERTIRRLLILGASAVVRWAGQRGKPAGSWLARMLARKPKMLVTVALANKTARIVWALLVKGGVYRAPAPAA

SEQ ID NO: 409458 - protein, 395 aa, unidentified
MKRQENKACGADIHKRFLMACILSRDGSKVLNRFDMTVEGVLCFASWLKDNNCKKVAVESTGNYWHLVYQVLDDEFEFILGNAFKTRRHSGAKTDKRDAEWLAELCLNNQIEPSMILPKEDRELRALTRARKGYVDFRSKLKARTIQELEACTIKLASELSDVFGKSGRHVLQGLVDGRSADVIVESIPSKKVKKNKEMIKQAIIAGLSPISIFLIKSHIQMIDEVDKKLVQLDAQISRLLKARKRDVEIAMSIPGIGFVSAAAILSEIGDYRNFASGKKLAAFSGLDPSVYESAGKRYNGKITKMGSKYLRRMIIECAHALSRTKAKTQLKRFFLRIMARRGKNIATVALARKMLVVLHHLLINQEMYKDDGLAKPKNVKVSFSEESKLDPSSL

SEQ ID NO: 409459 - protein, 441 aa, unidentified
MEAVYRRCAGLDVHKDVIEVCVLPPAGQSGSPQRRRFATFTSDLIRLRMWLVSLKATEVAMESTGLYWVPVWRQLEGHIGKRLLCNPQQVKALAGRKSDRRDGQRIAEFLQDGRLDPSFVPPKEIQQLRELLRMRVSLVQEHNRLSNRVEKLLQSYGVKLSSVASDILGKTGQRILTALAAGQTDPDRLSWKAVGSLREKEAQLRRALRADFDEHSCWMLGVLLGQLKENEQWREQLEQRITEGMKPYEPIVIRLMTIPGVDRLTAWSMVAELGTDMSVFPDQRHCASWAGVCPGTNESAGKQHSTRTRRGNRYLRRILTQSAWATSRCKRGYLRAAFHRIAQRRGHKKAVVAIAHKILVAAYFIIRDQTTYLELGEDYFDLLHPERTARRLARRLERIGYQVTLTKAAATAPRSSEGQQPKKRGRPCKCAERGIDCKHKR

SEQ ID NO: 409460 - protein, 338 aa, unidentified
MSIYAGLDVSDKSTHVCVVDSEGAVLRREVLASDPDVIAKWLGRYCPDLVRVVLETGPLSAFLYHGMIARDVPVECICARHAKGVLSARVNKSDVHDAEGIAQMARTGWFKRIHMKASATHFDRAAIRIRAQLITARTAMINQLRGLLKLFGLRLGSARAPGKRTERLVVLYAQRPDLEALFAPLMASIEVIEAQLRASNRILEKRAASDPVCARLMTVPGVGPITALTYTMSIEDPRRFARGEDVGAYAGLVPRRSQSGERDTQGHISKAGDPMLRRSLYEAANIILSRVRQPFALQRWGRKLAEAKGPKRARVAVARKLAILLHSLWLNETEFRWV

SEQ ID NO: 409461 - protein, 410 aa, unidentified
MRYYLGVDWADKTHAVWVVDEQGAKVASRAVPHTAAGLSEWGRELDEWRAQGIELWAAIERPEGRVVDFLLDHGVVVYPVNPKALDRARDRFRPSAAKSDPFDARVLAEFLRTDHRHLQALQPSSEAAQELKYLTEDYRRHVRQQTRLVNQLTATLKAYYPRALEVSELTTALARQFLQAYPTPVAVAALTEKRWQRWASAHRLSDARTQELWGILQRPQLPVPDHVVRAKARLMLTLVEELTAVVAAVGQYREAIDAFFAGLPEAQWIRTLPIGDHGVTAPTLWALLGDAPLRWESWQHLQGHAGTVPVTIRSGQQRVVRFRFACDKALRYVVDQVAFLSLGKSEWARAYYDQQRARGHDHHPALRALGAKWLKIIFVMWDRQIPYDEQHHLATMTRQQLRQRGQKKVA

SEQ ID NO: 409462 - protein, 347 aa, unidentified
MIWIGVDAHKQVHQAVAPEGDGGLSERTIGNTPEGWASLLAWGQQWPERRWAVEGSGSLGGGVAQFLAEHGERVHEVCPKWTAQRRRTLRKPGKSDRLDALAVAHLLREEPTTLPLVLPDEEAVATVQLWSRLRKDVVADMTRVRNRLHALLLLCDPEYKARIPDLTTRTGIRACQVYTAPGQGALAREREQAVRQVAAQLALLADQERQLEDAVAGRSAPLQAIPGLGPLTAAALVAELGAPRPGLGESQLAALAGVAPLEASSAGGVRHRLNRQGNRRLNRLFHQITLTQQRVYAPAQRYLARRKQEGRTPREARRALKRLLVRSIWRQWQACWTPAPAFASSTT

SEQ ID NO: 409463 - protein, 328 aa, unidentified
MQGKVSSERTAMATVYVGIDVCKEWLDIHLHPLGRSFRVTNDTAGLRRLKRELDALDQMPRSALRIVMEATGKWHRAVQRSLHADGFYVSVVDPLRARLFAKACGFLAKTDRLDARLLAIMGEALKPAQTPPPDQALETLQELVNARSAANGERTALSNRMKTAVTAFLRKELTRRLAALDTHIARLDAEIERSICADPELRRRLDILISIPGIGAVTAASLIAGLCELGACSGKQAAMLTGLAPLACESGERAGHRSIRGGRPAPRNAIYMAALSASRHNPDLARFAERLKKVGKPNKVVLVAVMRKLIVLANTLITKNRIWTPNPP

SEQ ID NO: 409464 - protein, 372 aa, unidentified
MDRVCGLDVHKDSVFMCILTANGEKIEDVFGTLTPELDRLRDTLVSHGVGKVAMESTSIYWVPIWRILECDFDVKLVNPYFIRQLPGRKTDIKDAQWIATVLQKELIKGSYIPDSKIQELRQYSRRIFHLTRRKQQAESAIDLTLQRCNIRLSNYVSDIGCKSMRKVVNALICGETDSEVLALLVHKRIRNKHCHEVIKSSLTGIVSSSDRDMLKMSLEEVELYDRQLLECKEKMRIICEGHYAEELEILQTAPGIKEESAMRIIAEIGVDMKAFLTASALVGWAGLRPRNDQSAGKIKGRKTLHGNKYLRVMLTQCAWGACRTQTSKFYSRYHTLKKRMNHNKALMANARKLLVVIWNLLAKKQPYMPFVN

SEQ ID NO: 409465 - protein, 364 aa, unidentified
MKTYYIGADVHSNSTELAIEHKGSIVSRYSVPTTIPAIRNVLSSIDGEKHLTMEEGPMAGWLYRNLNNAVDEMIICDPRRNKLISSDGDADDRIDAGKLASLLRGGFLRAVYHNDDMNRVTLKEWVCLYYDRVRDAVRMINKIRARCRMNGISIPRAVIREPSKRKLWLSEIHNSALAAQLNMLWLNYDSVVKQVKISKRQLAILSRQHDIIKLWSELPGIGTIRAITLFASLDTPWRFKKKNKLWKYCGVGLERSASGTDKKGKPKPAFLQLAWHVNKVLKYVVLGAALSAINQNKNVFSCYYERMLHEGIMPSNARHTVARKMLTVMWGMWKQNSRFRENMVMPVSKSSAVSPARGKWTTLS

SEQ ID NO: 409466 - protein, 345 aa, unidentified
MSMVRMIVGGVDTHADQHVAAAIDANGGVLGIESFPADHAGFEELVGWLMSHGEIQVVGVEGTGSWGVGLSRFLHDHEISVVEVDRQNRQNRRKVGKSDTTDAVAAARAALSGSASVVPKTRNGPVEQMRILLVARRSARSQRIETLNQLRHLVFTGPEQVRARFKDRPKTGLITEVAKMRPRIGSGPVLYTTMVTMRGLARRIQHLNAEIKDLDSMLTELVNDTAPSLVGLFGVGTDTAATLLVAAGDNPDRLSSERSWAHLCGVCPIPAGSGKTSERVRLNRGGDRQANAAFYRIVLTRMSQDPRTKAYVTRRRSEGKNTAEIMRCLKRFVARETFTHLQHVT

SEQ ID NO: 409467 - protein, 355 aa, unidentified
MLNTKYIGMDIHKETISIAVMSAAGKVVMECVIETKANTVLQFIHGLRGDLHVTFEEGTWAAWLYDLLKPHVTEVLVCDPRKNALLKQGSKSDKIDARKLAELLRLNHLKPVYHGEHGVRTLKELARSYLTITQDLTRVRNRLKALYRSWAIPCSGTQVYALRHRSEWLGKITEAGVRRRAEYFYQQFDALRPLRQEVRRDLLTEGRKHKAWKLLRQIPGIGAIRATLLIALIQTPHRFRTKRQLWNYSGLGLETYDSAQYCVVEGQLQRSKKPVTLRGLNKNHNHDLKAILKGAALEASSGAGPFHDFYEALLAKGRKPSMARLTLARKIAAIALIVWKKEVSFDAKHLKQQAA

SEQ ID NO: 409468 - protein, 360 aa, unidentified
MDKYIGFDIDSKKTVVCIVQKGKKDRFTTFNTDIELMKKFLQEQQTSSEKLHLTFEISGEAGYRFDMLADLVDDITVSNPTKMTWIYRTSKKNDRIDARKQAILLSIGEIPKVHIPSKEVRQWRVTIQHRTKVVSKICQVKNRIRALLKANGFVKPAQQGSWWKVANRLWMRSFVTETSITAAELWRMSLADMLEQLGLLENQLKRVTKYLDDYLAKHPGGKLLMSIPGVGPRTSEAVLAYTDDIRRFSRGKQYCAYFGLTPKLDESGLTRRLGHISKQGPSVVRWLIVESAWRLIKKSPSFRTFYERVMSGQKNRKKIATVAVARKLLSIMRAMLLSGELFNEELVSRECGSIDVKKSA

SEQ ID NO: 409469 - protein, 337 aa, unidentified
MKYCGIDLHWNNSVVLVSDEKDRIVLQKRLPNELGQIQAALEPHRDELVGVVVESTFNWYWLVDGLMDAGYRVHLAHPSAIKKYEGLKYSGDFADAGYLAQLLRLGLLAEGYIYPREERAVRDLSRKRLQLVRYRTPQVLSIENILARQTGARLSSEAVKRLTAAQVEELGFAPDVALAVEANRAVSQALAQQIAALEQRLKERVRLRGEFKLLKTTPGVGDTLATTIMLEMGTPTRFAKVGNFSSYCRCVDSLRESNEKKKGEGNAKNGNKYLAWAFVEAANFARRYCPQAKSFYERKKRKTNGILATKALAHKLARACYHMLREQKPFDVSRCFG

SEQ ID NO: 409470 - protein, 434 aa, unidentified
MKSDFAAFVAIDWADQKHAWMLQTASSTARQAGTIDHTPEAVAIWARELRLRFDGRSIAVAVEQSRGSLVFMLSKYEHLVIFPVHPTTLANYRKSFRPSGAKDDPNDAALLLDLLTLHYDKLRRLQPDTPETRTLQFLVEERRKFVHERTRCSNRITSHLKLYYPQVLEWFDEIGSNIAAEFLERWPSLDKLQRARPATIERFFVDHNSRNAESIARRLDQIRKAVPATTDSAVIASCAAAVIAWAALLKQLVLTIESYDKNIDALARQHPDYALIKSLPGAGPALTPRLIAALGSQRDRYQTAHELQCYSGIAPVVASSGKQRWVHWRWCCPRFLRQTFHEWALHSVAYSTWAREYYDRQREKGKRRNTVIRSLAFKWIRILFRCWKDRTPYNEATYQQAIAKRHPNKAKGAQAVDLRWKKIAGFSKIMAVSA

SEQ ID NO: 409471 - protein, 346 aa, unidentified
MKVFIGLDVSLASTAVCVLSETGEIVQETVVLSEPDALISAFRELPHMVLAIGLEAGPLSQWLYKKMADAKFETVLMETRQVKGALKAMPIKTDRRDAEGIARLLQMGWFRPVHCKSISAQEIRAVLTSRKAIKQALINLELSVRGILRNFGLKVGSISKSNFETWIRELADGNAMLEAAVEPILRARQTLRQELAAMEKLVRDLAKDDPVCRLMMTMPGVGAVVGLTVRSAIDDPARFRSSKSVGPWAGLTPSRSQSGERDIVGQITKAGDKGLRTALYQAATVLLNRGRQNWLTSWALRVAQRRGKKRATVALARRIGVVLHRMWRDGTPFRFFAEDTSQTAMT

SEQ ID NO: 409472 - protein, 352 aa, unidentified
MRSQAYFVGIDLHKELIQVCVLDAQGEKVMEQRFPGGSLEQGQALVTGVLTRWKKGGRYAVEAIGMNRWLVNAMRAQKMDVVVVDAVKLNLRMLGKKTDRHDAYEIARRLWLGDIDRNAKTYYPDEEQYGCRKLLRTRHKLVEVRQKLVNQVRGLLNAYRIEAPKGELSSKKNLEWLERVELSSSLLTQCLRSLAQALRSIQSSIEALTKRIEREASQTEVSSLLENLEGVGPQTALTLIHELGAVERFTSTRAVASYAGLAPRVANSADTAHHGKITKRGNSELRWILSEWAVRLMTRNELVRRWAAPLLRRMHKNKVRIALARRLLIGVYFMLRHGVAFSLERCLAIKAA

SEQ ID NO: 409473 - protein, 462 aa, unidentified
MKPFYMGIDVSKGYADFVIINPKKKPVTQGFQLDDTFDGHKALYNIVARFVSNHPDSRLFAGMESTGGYENNWYNSLVAFQGSLNILTARLNPLGVKHNSQAGLKKNTTDKISAQNVAEYLVAHPEKVNYQQQDQLAGLRKQWGFIQMLTKQRTQFINQFKGLLYSSNPELLRYCQTETPAWILKVAVTYPSAARLKRAKAKTITKIPYVTLKKAQQIVSDAQRSVASATDTTTEQLIVATAQQVIHLNKTIDAQTRRMIEACAMPEVELLKTFAGISNKSAIGLMIEIQTVERFANAKKLASFFGVHPVYKKSGDGVGGIKMSKQGRKAPRHILYMSTLAAIKCNPLIKQIYEKHQKNGKHNMAAMGVCMHKILRIIYGMLKHKKAYDPKIDTANQHRSVNGRNAAPRKNEARRFQAYDIKAPVSRRQTIKRLERDRSHSVLDTKSGITVPIPVGDSIAKM

SEQ ID NO: 409474 - protein, 378 aa, unidentified
MRNVCGLDVHKDNVFVCIDKENGEKIQFKTGILTRDLDSLRDFLVKHDVGEIAMESTSVYWMPIWRILESDFKLYLVNPFAIKQLPGRKSDVKDAEWIATCLRKDLIRGSFVPTDLIQQLRQYNRRVFDINHQMVYIQNKMDALMQRCNIRISNYVSTVDSKSYRDIVTKITEGETRATELVKEVHGRTINRCGRDTIVAALDGVIRQTDIDLLKQYKEELDMLRRHKAECLLKMREICEEHFKDEFERLQTVPGVSGQSAMHIIAELGVDMSTFQTPAMLVGWAGLKPRNDESNGKFKSRKTTHGNKYLRKTLIEVSWPASKKKGCFYNKFSYHQIVVRRKGKLKVQVAIARKILVAIWNILSKGIPYIEYAKVEET

SEQ ID NO: 409475 - protein, 350 aa, unidentified
MKYVGLDWAYRQAQWCALAPGGEIASEGRVAADRDGLARLVFELGDEVKACVEMMSGALWVRDELVACGWQVEVADARKVKTLAPLAAKTDKVDARLLAELSRRDLVPALWLPSLDERALRERLRRRMHLVRLRTSAKARIAGLQTQWGVRVSLHRLRHADGIELLERAGMPAVWRRSVSECLAVIDFLDARIEPLDQELKPFAHADPRAVLLDTIPGVAELLALTIAVEVGEIGRFAGPEKLVSYGRLAPRVHQSGQARPRSGPLSKSGSRLLGWAAVEAAQQAWRESNPWHDLYTDVARRSHNKNSAKAAVARKILIAAWHMLSRNEPFNPAPRTTSVSASSRFALAA

SEQ ID NO: 409476 - protein, 349 aa, unidentified
MNLKKERRPKMESNKKTYYNQYLAIDWSIVNVEIARMSAQGAKILTKRFAPDIKQIKKYLTPIKGKKIMTIEESTSSHWLYVELLDCVDRIIICDPYRNSLLSEGPKNDKIDARKLCLLLRSELLKEVYHSLDDDYKIRKFVSAYEDLVKAGVRVKNQKSAIYRAEGLRYKKDKIKKQDEILSFIEEQQNTSIRHYEQEKEKYESKFREIKKKNKLIKMLCGISGIGTISAVKIYSKVIDANRFENKYKYWGMCGLVYYKRESGGRNYGRKKPRYSRTLKSVYKTAALAAIGGKNDIRDYYEVLLKQGYSTSEARNQISRYIAKVSYGVMKNRTPYRAYQWRELKKVAA

SEQ ID NO: 409477 - protein, 349 aa, unidentified
MIIIGVDFHPEFQQIAFVDTDTGELEERRLHHPDEAEAFYRALVSQGKTVRVGMEASGHGRWFERLMSELHIELWVGDAAEIRTKRVRKQKTDRQDAQLILKLMLKDDFPKIWVPSWENRDLRQLLWHRHRMVQARTRIMNQLQAVALNEGLRCKKRLWRTERPRLESFQLAPWASRGRRDLLELLDRLNPTIAELSQAVEQEVEKCPEAQRLATHPGVGPLTAMAFVLIIGQADRFQCGKQVASYLGLVPMEDSSGNRRRLGHITKQGSSILRFLLVEAAQVTVRSLPEWRSRYFHLMMRRGRKIAKVAMARRLAVCLYWMMRQGWDYQQWVEFGSYAGQPGNRHGVQ

SEQ ID NO: 409478 - protein, 346 aa, unidentified
MKKIFIGIDFSKEKFDATLIKAEGLKECAPSVHEVFDNKTSGFRRLVKWAKAQSESVSVDSWLFCGENTGGYSIGLSNHLYASGYDMWLECAYKIKHSVGIQRVKNDKADSRAIAEYAMRNYDKMILYKPQSASLTCLREVFLYRHSLVRQKVALAVRRDEKRLTQEKSDVRAFMSFTSKHLVTEVNKAIAKCDQKIKDIIAADDELREIFDIITSMPGIGVQNATCLMVYTDNFQKFDLNARKIGCYYGIAPFGRQSGTSVNSRPQVSPFANRMIKSLLSQAALAAIKFDMNVHNYYQRLIGRGKHPLLVHNNIKNKMLHILVAMVRDRIKYNPDYVYQTNKSAA

SEQ ID NO: 409479 - protein, 337 aa, unidentified
MQTIAVVGLDLAKTVFQVHGVAADGTVVVRRQLRRGQVLAFFQSIGPCLVGIEACASAHHWARELIALGHDARLMPPAYVKAYVKRGKTDAADAEAIAEAVTRPTMRFVAVKSTAQQAVLMLHKTRDLLVRQRTMLINALRGHLGEYGIIAPQGHAGVRVALKALRDDDQNLPDLARSALGGLADQLEQLGAEISRLERQILEWHRQDVTSRRLATIPGIGPITASALAASAPDPKLFRSGRQFAAWLGLTPRANSSGGKERQGGISKMGDGYLRRLLVVGATAVLRMARQRGREGWVGNLLERKKPKVAAVALANKTARIAWTLMARQEDYRPMKA

SEQ ID NO: 409480 - protein, 355 aa, unidentified
MLNHYQEGEGHINKVTIGLDIAKSVFHLVVMNQSGRVLKKKKLKRYQVLSYFSQLEPSIVAMEACGSCHYWCRELTKAGHEVKAIAPQYVVAYRKSNKHDYNDAEAIAEASQREGMRFVPFKSQEQQDIQLMHRIRERMIAQQTALSNQIRGSLAEYDIVYARGVATVVKELPFTLEEADNGLSMLARQLFQGLFNDLLVLRERIKEMDKELKAFAQNHPVCERLMSMTGIGPLIATALYAGIGQGQAFNSGRHLAAWLGIVPKQHTTGDNPRLLGISKRGNTYLRTQMINGARAALRHIGDKTDKVSQWCRACLARMSFNKACVALANKMARMAWAMLHHQQDYLPGQINKAAV

SEQ ID NO: 409481 - protein, 345 aa, unidentified
MAEASTIGLDIAKTVFHAHGADARGQMVFSRRLTRAKLLEFFAAQPRCVVALEACGGAHHWAREIASLGHEVKLIPPAYVKPFVKRNKNDAVDAEAICEAAQRPSMRYAAIKTEAQQAAGMVFRTRDLLVRQRTQLINAIRGHLTEFGWVAPKGPSHINVLATLLEEGEEIGASLPEAARAMFLVMTGQLEQLNEQIKLLDKEIARRAREDEAARRLMTIPGIGPIAATALLALAPPAEGFARGRDFAAWLGLTPRQHSTGGKERLGAISRMGERTLRRLLIIGSSAVVLHASKRGAPRGSWLEQMLARKPRMLVTVALANKTARIIWAVLMKKEDYKAPVAAAA

SEQ ID NO: 409482 - protein, 419 aa, unidentified
MQAIIERCCGLDVHQETVVACLLVGAPGAQPTKEVRTFRTVTRDLEALRDWLREAGVTHVGMESTGVYWRPVYAVLEGHFELIVGNARHMRNVPGRKTDVKDSEWIADLVRHGLIEKSYVPPQPLRELRELLRYRRKLVESQAAERNRLLRLLETANIKLASVASDVFGVSGRAMLRALIEGEASPEAMADLARGQLRRKRTDLILALDGRVEEHHRFLLAVQLRRLEAIEADIAALDLRIGERLEPYSAPHALLMQIPGVDWVVAAVLIAEIGVDMSVFLSVYHLSAWAGVCPGSHESAGRQKSGRARKGNIHLRAILVGAAMSAARTKGSYLKDKFHRLKARRGALRAALAIAHKILVCAYHMLAKNLPYRDLGEAYLDQIGQTRTVANLKRRLERLGYRVILEPNAPAQATPAPAR

SEQ ID NO: 409483 - protein, 307 aa, unidentified
MDDSIGIDVSKDRLDAFRLSDGQYKSFNNNLVGFRALRRWVGTRAIRVVYEATGPYHGAFERAFSGDLALVKVNPLQARRFAQARGSRTKTDAVDARMLALMGDAFALQPDRPVDAKQHELKELQIERNALIKDRTRLLNRIKTQTMGVTKRHTKARIALVKRQLGAIDAEIEARLREHKSKQLDILTSIPGIGPITAATMLIECPEIGTLGHKQIAALAGLAPMTRQSGQWRGKAFIQGGRKFLRDALYMPALVATRFNEEMKQKYQSLKAAGKPSKLAITVIMRKLIELANTLIKQDRKWMPKTA

SEQ ID NO: 409484 - protein, 343 aa, unidentified
MNKNWFIGIDVSKKTLDASIFVAGEVINRFPHTQVRNDKEGFKELLKWLKERGVRLQDALIGLEFTGYYSDALEQFLTRKKLCYTMLPTTVVKHYQRGTREKNDKVDSAKIADYLFRFQGTECIKQRVLPSKAMQELKVLKSERKFYVRHRTDCENRQKVAKSKDEQKNLQKLIDLYNKEIELIEQKMAEVVTSDDEIYLTYTRLLTIPGIGPVNAINTIANTQNFTAFETARQYAKYVGVAPSEHSSGTSVRWRSRPSPHSDLQAKADLSMAAMRAVEFSIEMNIYYERKLGNRPDDKDVKRKALNAVKFKLIRQMFSVAKQHKNFILMQQAEIHNTDQQVN

SEQ ID NO: 409485 - protein, 438 aa, unidentified
MSNKVIFNLDELFISVGIDVGADFSWMSIALPNQQFVGKPYKILHNSIDSLTTAVSKIKEAEELYSLESRIFLESTGIYHYPLFCYLRDKGFNCSVINPIITKNSTNINIRKVHNDRFDSKKAALVGLKPDLKVSLIPSDLALNCRNLCREYYDLMDNRSAYVNKLQGELRMAFPQYLGIFSKVTINTSLTLLETYTSPSAFLKADKQEIIDIIKSTARFGLTYAQNKYNALIQAATDANQFGYIIDSNIKRIRLYISFIRKYDEEINSILESLHELVDANEDSDFVKQIHLIETFKGAGFLSAVSIMGEIGDFSAFSKPKQLFAYFGLDPSVKQSGKFEGTKVQMSKRGSAIARRVIHTLTLQSISISRNREAKNPVLREYYLKKCDSKPKLVAMGAVSHKVCNMIFAILRDNKPFEIITPQEHIKQYNASKCDMAA

SEQ ID NO: 409486 - protein, 323 aa, unidentified
MMLFIGIDISKLSFDVAYLQEGRYVNTHFDNDLTGFKAFIKHIKTDVNDTLICMEATGIYSFGLATFLAEKSFKIIVVNPVSTHAFSKMELNRNKTDKADAQIISRYCEHLFVTGDSEQLFYTPKSPDYEALQRLVTRLEQLEKSKTQEKNRLEASRNKHTSRSMMRFITFINAEVKKTKSVISKLINANDELNMQVNLLTSIHGIGERTAWSILAYIGDVSFFDNAKQVASYAGLTPKITQSGTSVNKSALSKLGHKKLRKSLYMPALVAVRYNPLMHTFYERLLAKGKPKKVALVAVMRKLLVIAYGVLKSEKPFDLNYTG

SEQ ID NO: 409487 - protein, 413 aa, unidentified
MRVVYERCCGLDVHKETVVACLLRPRAEGPVQREVRTFSTMTASLRALGAWLRAERVEQIALESTGVYWWPVFNILEEAGHAVMLVNPQRMKNVRGRKTDVQDAAWIADLLRHGLLRASFIPPEAIRNLRELTRYRTTQVQQRVQEVNRLHKVLESANIKLAAVASDILGVSGQDMLHALLTEEAPDPAVLAELAQGRLRTKLGLLRQALEGRVKPHHRVLIARLLAHIAFLSESVAQLEEEIERAMVPFQAAATLLRTIPGVNEVAAATIIAEIGTDMGCFGSAPQLASWAGLCPGNNQSGGKRRHAQTTKGNKWLRGILGEVAWAAIRKKGTSFGAQYRRIARRQGKLKAVVAVAHRLLRVIYYVLRDQVPYRDLGADHLAPQEAQRQIHRHVHQLEHLGFTVTITPKEVA

SEQ ID NO: 409488 - protein, 521 aa, unidentified
MPHPRTRRSAKTRKTFLLQKPAGILTPLVQAVGPEHFGVVAIDCAKARSRYLFADFYGRTLVVPTSLPHTAGDFKAAMDRIRQAARQHDIRDLVVAIERTGEYHRPVLRAFRQARFETRLVHPFTSKQYRQPADPGNKTDDTDLAAIFRATTQGFALGEPTWPDLYVRLQLLRRHRRDLVNKTTILCCQIREILHAAMPGYAECFDHLWTTPTALLLARHTTSSQAVRDAGFEGLQSLVKEANLVCHRNTLHKILAWADQAPPGHDHCLQLRRILHVLDDDRLAKTQQIIDLERTLAHLIVHTPYALLLRIPGLNRVTIADLAGELGPIELYLHANAITGRAGLMPSRYQSDQVDCADGPLQRRGHRRLRAVLMQGASTLLQCNHHFQARAELWNRAGKDPRWIRVKIAKSLSRLLFAIVAGRQLFPHPCCQPRHYILGKLLTFHLEHHTPTEEMRQDLEAVIEQLPSSARAEEATPLQELLEEQAKRRRGPQPLATILPLVLARLGLAVVQSESSEGAGP

SEQ ID NO: 409489 - protein, 354 aa, unidentified
MSQEKYIGMDVHQATITVAVRDGGGNLIMECILETKAATILEFIQGVRGSLAVTFEEGTCAAWLHDLLQPHVSRLVVCDPRKNALLKDGSKSDRIDARKLAELLRGNQLSPVYHGDHGVRTLKELGRSYLTITQDLTRVMSRIKALYRSWAIPCSGTTVYAARHRSEWLAKIAEPGVRLRAERLYQQLDLLRLLHQEARCELVTESHKHPAVKLLRQIPSIGPIRAALLVALLQTPHRFRTKQQLWAYSGFAVETHDSGEYRYVRGKLRRNRERISVRGLSDNYNRDLKNLFKSTASASTRPGPLRDFYLALLAKGMRPTMARLTMARKIAAITLTIWKKGVDFDAKQLDPQAA

SEQ ID NO: 409490 - protein, 413 aa, unidentified
MLLFIGDDWAEDHHDLEVEDETGRRLAKARLPEGLEGISRLHALVAEHAPAEWAELPSEEVASRVYIGIETDRGPWVTALQAAGYQVLAINPLSSARYRERYSTSGAKSDAGDAHVLAEIVRLDRDHHRQIAGDTDLVDAVKLVARAHQTAIWERTRQVLRLRSTLREYFPAAIEAFEDLAAKDTLLLLARAPSPARVAKLTRSQVVSALQAARRHHVQAKADAVLAVLRAPGLRQPATTEAAYAAVVVGQVGIIGALNEQITQLQEVVAEHFGRHPDADIYLSQPGFGVVLAARALGEFGDDKKRFRDARARKNYSGQSPITRASGKKTVVLARYATNRRLGAALHAQAFSALAASPGARAYYDALRARKIGHHAALRQLANRLVGILHGCLKTGTKYDENTAWQHQIVVAA

SEQ ID NO: 409491 - protein, 344 aa, unidentified
MIYLGMDISSKSFVIHGIDSRKRVVCKEEISPDRDSLLSILERLGKEPKLVVFEAGNQMKWIAQTLMKVEGVEVHIVHPNELKWISQSSGKTDKIDARKMAELARGDLLPRKVHVVEGHVRQLREILSGRQMLQSKRVAMINSIRGMMLQEGVRLPEKFFTRVDWWERLDKAPISESTKAIIAAFMRGITGLQDAEDELTRQIVAIKDDRLKQLESIPGIGSLSSRVLLGALDNGERFDNKKAAAKYGALTPTVYQSGNVTHHGRICRDGRHEIRKVLLQCAHTVARMKRHDAKPLKEFFERIHKRRGKKIAVVALARKLLTVAYGVLKSGTYFDPAKLSLREA

SEQ ID NO: 409492 - protein, 355 aa, unidentified
MTSAKYIGMDVHKESISIAVLNSVGKVVMECVIETKASVILQFLNGLSGDLHVTFEEGTASAWLYDLLKPQVTRLVVCNPRRNALLKVGNKSDRIDALKLADLLRGNQLQSVYHGEHGLRALKELVRSYLTISKDLARVMTRVKALYRSWGIPCSGTQVYSRLYRVTWLSKITEPGVRMRAAFYFQQLDALRTLRQEVRQELLAESKKHKVWKRLCGIPSIGPIRAAVALGILQTPHRFRSKRQLWSISGFAIETRSSADHRQVNGRLQKVKKRVSIRGLNQNHNHDLKNLFKGAAVIASTKPGPFQEFYEALLAKGMRPEMARLTLARKIATIVLIVWKRGVHFDAQYLKPQTV

SEQ ID NO: 409493 - protein, 293 aa, unidentified
MANTPEGFKQFDQWLEKHAEPHCWVLMEATSVYHEALATHLHQQGYQVCVINPARIAKYAQSELRRVKTDKTDAKLIARYAQRHLEELRPWEPEPESFRQLRGLVRRLADLKALAQMERNRLDVSAESAQASIRIHLKHLEGQVALISTAINDHIDNDPDLREQKRLMKTIDGVSDGTAATLLAELGSPLRFDSARQLAAFCGLNPRLQESGIYRGKSTISRTGSGRLRAALYMPALSAMTYNPVIKAMKVRLAERGKTGRLVVCAAMRKLLHLIYGVLKSGQPFDPIRALAH

SEQ ID NO: 409494 - protein, 367 aa, unidentified
MKKNTTVNQSLSSTDLAACTTVAVDLAKRVFQVAGEDAQGKVLYEHRIKSREAFHTFLCNLPAHVVVLVETGPGAQAWARQLLEQGNQARILPAQLVANHRAGAKNDRNDALAILRAGRDGNIAAVPIKSAAALAMQALHRARQGYVRRRTAISNQMRGLLLEHGVALAQGDLAVSQKIPRVLEDPSVPLPEMLRELIDELLGEWRHMGERVNVLTGRLETAANADSTAKRLMTVRGVGPITATALLAKQTQPERFANARQFAAYFGLVPDQNSSGEKVRLGRMTKRGDSYLRSLVIQGAHAVLRQLRPDSDQPDDRRLLDWLSRVGRKEAAVRLANRNLRILWKLLQNDETYRRQPAKSLEAAMSH

SEQ ID NO: 409495 - protein, 402 aa, unidentified
MNAVGIDVSKGKSMVAIMRPFGEIVSAPFEIKHTASGINSLVELINSVEGESRIVMEHTGRYYEVLAHQLSEANLFVSAINPKLIKDFDNDSLRKVKSDKADSVKIARYALDKWQNLKQYNVMDELRNQLKTMNRQFGFYMKHKTAMKNNLIGILDQTYPGVNTYFDSPARSDGSQKWVDFASTYWHVDCVRKMSLNAFIDHYQNWCKRKKYNFSQSKAEEIYGKAKELVPVLPKDAITKLIIKQAVDQLNSASTTVESLRTLMNETASKLPEYPVVMAMKGVGTSLGPQLMAEIGDVSRFTHKSAITAFAGVDPGVNESGSYEQKSVPTSKRGSSDLRKTLFQVMDVLIKTHPQDDPVYQFIDKKRAQGKPYYVYMTAGANKFLRIYYGRVKEYLSSLPES

SEQ ID NO: 409496 - protein, 318 aa, unidentified
MMHPILNVGVDVAKDAVVVACVDHRFPVQQIPNQRAALRAWLKSLPAGSRIGVESTGDYHELLTDLAQAHGHTVFLLNPLETRHYAKAMGHRAKTDRVDAELIARLIAQEHTHLRAYVPPTATQRKLDRLIRRRATIVRLQGTLKLTMRNLGGFAAELKAVLDNVAALLAKIDAAMLALAARSPQHLAAQQRVETIVGVGPLVGISLTNTLERVPFHKADAFVAFLGLDPRANDSGQKVGRRRLSKRGPAELRRLLFNAAMSASKTNVWKPIYESYRAHGWSTTASLVIIARKIARAAWSIHHYRTTFNPEGITKCLT

SEQ ID NO: 409497 - protein, 352 aa, unidentified
MRIVVALDVHRRQITYKTLDRESGEVRRGRIAPATRGAVREWLERFAGREAEFVLEGTTGWRFVVEEIERAGHRAHLADPAETASKRGRKRRAKTDNADCDLQLKLLLAGELPESWIPPAHILELRTRVRTRKLLIDQRTAWQQRLHAQLLHQGVAGLKPRTRAGREALARAELSPAGRELVALALRTMDAIDRELAPLDRALRSFAHRQPACRALIANLYGVGAISATAILAELGDCRRFASSDDAVRHSGLDVTVHQSDNKRSAGHLSHQGPELLRWALFEAAHQSARRGSPDHDYYLQVARRIDHNRACLSVARKLCRRSHHILRELGDAALAPVERERQTDEVIQAAA

SEQ ID NO: 409498 - protein, 343 aa, unidentified
MQTIKTIGLAIAKSAFQVHGIDAAGSVTVRRQLKRRYVLAFFEKLAPCLIGIEACASAHHWSRQLQALGHTVRLMPPAYVKPYVKRHKNDATDAEAICEAVTRANMRFVPTKTAEQQSGLVLHRTRHLLIRQQTSVINAIRAHLAEFGIVAPVGRHGMEELLHIVADTNDKRLPEVARACVAALGGQLRMLKAQILHFDRMIIAWHRGNETSKRLDALPGVGPALATALVASVADPRAFRSGRDFSAWIGLVPKQNSSGGKQKLGGISKQGDRYLRGLFTAAALAVIRYAKIHGTGHRPWLTALLVRRPTKVAALALANKIARMAWAMMARGERYREPVALAA

SEQ ID NO: 409499 - protein, 341 aa, unidentified
MEQATTIGLDIAKHVFQVHGADAAGHVLFRKRITRAKVLGFLAAQAPCVVAMEACAGAHYWAREIAKLGHHVRLIAPVYVKPFIKRQKNDAADAEAICEAAQRPSMRFVSVKTEQQQANGIVFRARDLLVRQRTQCVNALRGHLMEYGYVFPKGISHVETLVAVIEDLQSSLPDSVRVILKLLVDTFTALEAQITALDAEIRQRSKSDPTARRLMTIPGVGPIVSTAITALVPAAEGFPAGRDFAAWLGLTPLQKSTGGKQKLGAVSKRGERTIRRLLIIGASAVVRQASRRGAPKGSWLAQMLARKPKMLVTVALANKMARIIWALLVKGGTYRTPAAAA

SEQ ID NO: 409500 - protein, 383 aa, unidentified
MRIVCGLDVHKDSIYLCILSSTGEIIEKVFGVLTCQLQEMRDLMLTHHVEEAGMESTSVYWIPVWRVLEPHFRLKLINPYFIRQLPGHKSDVKDARWIAECMMKELVRGSFVPPERIQQLRQYDRRIYDLDDEIVRKLAKLDAVVQRCNIRLGNYVSNTDSKSYKSVIDRICEGVTDPKVLVEEIHGRIINRHGKDTIISSLTGCVTECDMDILRQLKAEIDMAGQHKQECMDKMQAVCEREYSAALQNLQTIPGIKMRAATSLIAEIGTDMGHFQTANHLTSWSGLRPRNDQSNKTIKSRRITHGNRYLRRTLIQCAWGASRTQGCFFNRFSYHQTQVRRKNRMKVQVAIARKMLVCAWHILSRNVQYKDFDNRIGTSDENG

SEQ ID NO: 409501 - protein, 407 aa, unidentified
MKKIAGIDVHKQVLMVVIADAANPELVLQKGKFGTGQAELERLRMVLQQAEVTEVVMESTAQYWRPVWSEWEPHFTLHLAHAQSNRAPKGRKSDWADAKRLVKRFAAEELFLSFVPEPEQRDWRMLTRARYALIRDHVHLQNQIEALLEQASIKLSSVVSDLFGVSGLRILWALSQGQTDPAKLADLADGHLRCGREVLVDALRGHFGEVHRHLLEQALQRLRMLSEQVAALNKLAAKRMQPHASTVQRLIEVPGVGAEAAQAIVAEIGPTAAAFPSSAQLASWMGVCPGTQESAGQNYSGRCAKGNRYIRSVLCQVAHAAVRTKGSHLQTVFRRFLAKLSCYNKAIWAVAHKICKIIWHILHNGARYLESGGALNPKAVQKAIQHHLKALSRLGYVLPSPTPDPQV

SEQ ID NO: 409502 - protein, 356 aa, unidentified
MRERVQVVSGSDVYLGLDISKTSWHVTARSGGETLMSASFPPKREALKGLLERLEGCRIHSAYETGPFGYGLHDWLRSRQVDSMVVSAAHVPGEIGNRVKTDRRDGLKLARTLEAGLLRPIFVPEVRQRADRELVRQRQRVQRDRCAAMLRIKSFFLTYDIEVPDEAGAHWSGDFETWLRGLKFEQPSLDRVFEELRSIYFDLDVRVDTLTKELRAMAKSADYASMVELLSTIPGIGWLTALTLVVEIVDFARFADGEALSSYAGLTPSEYSSGDRIRQGHITRQGNPVVRAVLVESSWILIGKDPQMRRFYDRIKVRRGGKRAIVAVARKLCHRLLAIALSGQPYRVNFSRTKEN

SEQ ID NO: 409503 - protein, 416 aa, unidentified
MENGMEKIYDTCCGIDVHKKLIVACLRKGNRQSEIREFGATTRELLELADWLKDNDCEVVAMESTASYWKPLYNILESSDLNAIVVNAKHMKAVPGRKTDESDAEWIAKLLQHGLLTASYIPDKDQRELRELVRYRKSLVQERNRELNRLQKMLEGANIKLSGTIKDINGKSARNLLELILSGKRIDSAKYDELYEQNVISHNLKASREQIIDDLNGVLSSIQRKMMRVLLDHIDELNKHISELDDDIDNFMKPKEKDAVSMLEEMPGIGTRSAQAIISVIGIDMERFPSDAHISKWAGLCPGNNESAGKRKSGKTSKGNQLLRSTMIVCAHSAVKKKGSYFYAQFQRISSHRGKKRAYVAVAHSMLIAIYHMIKNGDMFKDLGSGYYNQFNKERKINSYLKKLKALGWEAPAVAT

SEQ ID NO: 409504 - protein, 429 aa, unidentified
MNCTQNKKIEQVKETTMIVGIDVGSEKHYFRAFNWRGIELTRKPVAFSNSMEGFNSFYNTIVELMQKSELEEALVGIEPTGHYWFDLGQFMGEKDIKFVMVNPHHVHKTKELDDNSPSKNDRKDPRVIAGLVRDGRYFYSYMPTGAYAELRNASNRRFVLVEEQTRAKNRLQKWIAVYFPEYKGIYTHIDAKGGMLVLKKAPTPEEIVRLGVEGIIKIWKDAKLRGNGHKKAMLILAAAMRSIGLKAGLTEARMEIQDLIEDYELQTKRLERVNDLIKGLCQQVRYADKLLEIKGIGITTVAGFIAEVGDITRFDSTKELQKLAGLELVSDSSGKHNGKTKISKRGRKRLRYLLFEAAISVVGKNEEFKEIHRYYTTREKNPLKKMQSLIVVACKLIRVFHAILTKGIRYDASKMLKDIRHPGEQLKAA

SEQ ID NO: 409505 - protein, 341 aa, unidentified
MGQAITIGMDIAKQVFQLHGADEAGSVVFRKKITRAKVLVFFGSQPPCVVVMEACGGAHHWAREIVKLGHQVKLIAPKYVKPFVTRQKNDMADAEAICEAAQRPTMRFVAVKSEAAQASGLVFRARDLLVRQRTQIINALRGHLTEHGWVVAKGPAHVAKLIDHVDDPACQLPQVARTILKVMISSLKDLDAQIDLLDREIGKRAKGDQIAQRLTSIPGVGPITATAISALAPPVETFKRGRDFAAWVGLTPLQRSTGGKQKLGATSKMGERTIRRRLIIGASAVVRHAARRTPDGSWLGRMLARKPRMLVTVALANKMARIVWALLTKGGVYKAPIVAAA

SEQ ID NO: 409506 - protein, 347 aa, unidentified
MQKHNRKRQSSKQRKAAPRSYVIGMDLGDKTSRYCVLEEDKISKEGSVATGKEGLEKVFGSLSASLVAIEVGTHSAWVERKLRELGHEVIVANPRQLRLITHSSNKTDKMDARTLARLARADRELLRPVRHRGEEAQLDLMRIRVRGQLVEARTGLINTARGLAKSMGERLPSCDANAWSQERLRGIATAVAEVLRPLVEQIEQLSGRIKEADEELEQIARTKYPETEGLRQVPGVGLLIALTYVLTIDDPQRFRKSRDVGCFTGLRPKRSQSGERDPQLGITKEGDVYLRKLLVQGAHRMLSRQSPDTDLKRFGERLSMGGKNKKARKRAIVAVARKLSICCTGCG

SEQ ID NO: 409507 - protein, 410 aa, unidentified
MLKIVYPVCCEIDVHKTFIYCCIATTDNKGITTYKSNRFSTFTNQLKRCATWLKEKDCKDVCMESTGKYWIPVYNILELSCNIVLTHPKYVKAIKGKKTDKRDAKWIADLFKHDLINGSFIPPADIHQLRDLTRYRNKLTIFIVGEKNRAQNCLTVSNIKLDYVFTYVFGKASSSIINALLLNPSEKITDVSKFRTRGMKSTDEEILAAIDGNICNEQAEKLKIIRSHMDSIEECKANLESVILNLAEKYLPKLNLILSVLGIKSFSAVSIILEIGVDMSVFPTSKHLCSWAGLTSQNNESAGKKKTTRISRGGAYIKPLLVQCALAAVKSNKHPKIRNRYLALKKRRGHKKAIIAIARTLLTAIYNILKKNEPYNPDLYKKSDLPPQHKTVSFDEAVFILQRQGYIITS

SEQ ID NO: 409508 - protein, 460 aa, unidentified
MKVRVGIDIACRAAHQAACADQTGKIVWSGHRFHTRAGELEALWARLPGDATEVMIVMEPTRNAWVPLAAWFRRRGATVVMVPSEQSADLRAYYAKHAKTDRLDAELLARLPLLHPDGLHPETANGPGDPLKRAVKLRAGLVRRRSACMQRLDALLEILGPDWVAALGSDMTQTTFKFLAAWANPHQVKRIGRARLARWFQRQTRKAWGQRRADAVVSAAEATLALWSPTGLDYEALAADIAVEASLALELSRQIAGIDERIFDLYCDADPDQILLSVPGVGKILAGQIRGRLGDPHRFTSLAAARAFSGLIPRQNSSGLTDVAGGPTKQGDACLREALFLAADHARKTDPTLAARYQRLMCDTGRHHTSALCTIATVLLTRIVTCLRNGTPYQLRDVDGQPVTPAQGRAIIAERYQIPPEIRAARRVVSNARSHQRGWDERTKQGVAKRSTMPPVPQPA

SEQ ID NO: 409509 - protein, 320 aa, unidentified
MEAVLGIDIAKHKCATALLTADGKVYHKTCANTPTGFAELAAWLGRRHITRVHACLEATGSYGDALATWLYEAGHLVSVVNPAVIHAYAGTQLARSKTDRLDAELIARFTATQQPRPWTPPALEIRQLQALVRRLDALHGMRTQELNRLAAGGTIDEVRVSIEAVLASLDTQIAHVQQLIRDHLDQHPGLRAQRDLLTSIPGIGEATAAVLLAELFDKPFRSARQAAAFAGLVPRLIESGTLRGRSRLSKIGPGRLRKALYFPAVTALRWNPTIRAARMRLHAAGKSPMVIIGAAMRKLIHLAYGVLKTGRAYEPTCAHP

SEQ ID NO: 409510 - protein, 337 aa, unidentified
MLKLDFCGIDVGSQEFVVKLRREGEQRTQSRSFQNTEQGRLAVGRYLSRQGHLVRVCLESTGTYGLDLALELDETAGVEVMVNNPRTVRRFAQALMKRGKSDSIDGDVLMEFARRMPFACWKRPSAQALELRAISRRIKSVTQACTAEKNRLHAASVSKTTPRIVRQDLQRSIARHQKGITGLTAAALKLIAREPTLKNNFQLLITATGIAKASAIQILGELGMLSSDLDSRLWVAHAGIDPRHESSGTSVEKKSYVSKTGNKYLRCALFMPALVARHHDPYLSAFANRLQAKGKKPIQVIVAVMRKLLVALYGMLKNQQPYDGQKLFAFPLPANNP

SEQ ID NO: 409511 - protein, 470 aa, unidentified
MCFDLTTHSQMLSFEDCTIRVVQDQSPNPFVSNIDQENQAMNHSDLKTIEFAAYIGLDWADQKHDICLQENHSHRVESLRLDHKPDAISNWAAELRQRFQGRPLAIALEQKRGALLYALMRFEFMVLYPINPKSLASYRDAFTTSGAKDDPHDALLLMEMVRLHRDKFQPWIPDDPLTREISLLVEYRRRLVDDRTRLTNRLIALLKQYFPQALNWAGKLGSLAAVDFLTQWSQLETIQQASPAEVRDFYRQHGFRLGKKIQTRLDEIKAARPLTTDQAVIAASASMMRALLGPLRGVIVGIEALDQQIEACYQQHPDRQIFDSLPGAGPALAPRLLAAFGADRERYRSAEEMQCFSGIAPVTKRSGKTTFVQRRLACPKFVRQSFHEFAKASICRSSWARAYYDQQRQRGNKFHEAVRALAYKWIRIIYQCWRQRAPYNEAVYLARLELHGSLLAKLVSSDGCKNQQLS

SEQ ID NO: 409512 - protein, 403 aa, unidentified
MNNVAGIDVSKGKSMVSVLRPFGEVVAKPFSIGHTGSELKELADHLKSLDGETRVVMEHTGRYYEPVARFLHDEGVFVSAVNPKLIKDYGNNTLRKVKTDKADSRKIARYGIDNWAELRQHTPMDTIRMQLKTLNRQQSLYTKTKTMMKNNLIALLDQTYPGVNALFDSPVREDGSQKWVDFATTFWHVDCVRNMSLTAFAERYRKWCKRHGYNFSQSKAVEVHAGAQDLIAMLPRDALTKTMVRQAIDALNAISASMERLKAEMQALAAQLPEYPVVMAMHGVGDSLGPQLMAELGDVTRFTHRNAITAFAGVDPGADQSGTHEAKSTRVSKSGAPELRRALFLVMDCLLKTQPQDDPVYRFMDKKRAEGKPYLVYMTAGANKFLRIYYGRVKEYLASLEGN

SEQ ID NO: 409513 - protein, 351 aa, unidentified
MVTAGLDLGDKYSYLCLIDQESGEVMEEGRLRTNPETLRRRFCSEQQPLRIAIEAGTHSPWVSRVLEECGHEVLVANPRKTRLIYSNKRKTDEIDAENLARLARLDPKLLYPLKHRAENSQAHLAIIRSREALVGCRTQLVNHVRGAVKSFGARLPKCPASSFHNKAAAHIPEALWPAVEPLLETIGSLTERIRKYDRQLETICQEHYPETELLRQVEGVGALTALSFVLTLEDPYRFQTSRQVGAYLGLVPASDQSGDRDPQKRISKEGDEMLRKLLVGSAHYILGPFGQDSDLRRHGEKIARRGGKNAKKRAAVAVARKLSVLLHRLWVTREIYEPLYNAHRRQEQQAA

SEQ ID NO: 409514 - protein, 332 aa, unidentified
MSVYVGIDVHRKRSQVAVINQDGEVLANRNVPNGVEPILRVIGGLPSGTPAAFEAAFGWGWLVELLEDYGFEPHLVHPLQCKAIASARLKNDKVDAAILAQLLRADLLPEAWIAPPAVRQLRALLRHRIQLVRLRTLLRNRIHAVLADHGHDRPSGYWSGPGRSWLASLDLPAVSAEVIADALALIDALESVTGRLDAEIRGHARSDPRVTVLTALPGVGPFTALVLLAEIGDITRFGSARKLAAWAGLTPTVRGSDRTVRHGHISEQGSVWVRWILCEAAQTAKRSPQFAASYQAIARRRGKKIATTAIARKLLTRACHLLTDASSDGAPR

SEQ ID NO: 409515 - protein, 350 aa, unidentified
MLIIGCDYHPSFQQIAFVDTDTGELQERCLEHREEAEKFYRDLAAQGIEVRVGMEASGHARWFERLLGELNFELWIGDATEIARKRERKQKTDRQDAQHILKLLLKDDFPKIWVPSGENRDLRQLLWHRHRMVQARTRIMNQLQAVALNEGLRCKKRLWREHGRQQLESFRLAPWASRRRQDLLELLDRLNPTIAELSQAIEQEAEKFPEARCLMTHPGVGPLTALAFVLIIGRAERFQCGKQIAAYLGLVPLEDSSGKRRRLGHITKQGSSILRFLLVEAAQVTVRSLPEWRSKYFHLMMRRGRKIAKVAMARRLAIRLYWMWRKGWDYEQVKKFGSHAGQLEPGDGVQ

SEQ ID NO: 409516 - protein, 412 aa, unidentified
MARVIGMDVHRDFAQVVVLDGDQLRHFGRVRLDKDSLTTFADRLMADDEVVLEATGNTFAIVRVLRHKVRRVAVANPLQVRLIAHAKIKTDKIDAAALAQLHASGFLPEIWVPDPETEALRRQFTRRSQLVRHRTRLKNEVHAILNANLIGRCPVTDLFAATGRKWLAEQALPIADRDAIDRGFREIDRVGNDLAALDRGLAAQSIDDKRLHHLMTITGIDVVSGLGLLATIGDHTRFASSEKLVSYLGLNPSVRQSGSGPARHGRITKRGANQARALLVEAAWAAARVPGPLRSFFMRVMSRRGSQVAAVATARKLAAIIWHVLNRQEDYVFARPSLVARKRRSAELRAGKPRQRGRRGIAAGYYCAETRAEARERLENAERAYERVVSGWRQAGPGSRPTNPSPESNTST

SEQ ID NO: 409517 - protein, 402 aa, unidentified
MTTKLMAGIDLHSNNLFCAIVDQDGQRVFEKKLPCELDKVVQALKPFQKRLEKIAVESTYNWYWLVDGLQDHGFAVVLANPAAMQQYDGLKQADDKSDAFFLAEMMRLNILPTGYICERQWRSVRDLLRRRMGLVQKRTSVILSLKSLHTRTTGRDLGTGRIKQLTPPEGEKLFRHPADRLITRLDLQLREELDRSIEEIETTILAEVKRLPEYRVLQTLPGVGRILGLTIALETVDPGRFASPGDYASYCRCVDSRRLSNGKKKGENNSKCGNPYLAWAFVEAANFAQRHDADCRRFYDRKKAQVNSIVATKALACKLAKAAWHMMSRNTAYDGGRMFPGPAGGKMAEAGKGGGSGAVGGPRSGPGRASPLRVATGGDAKEGSPGRRRRSPGPTRSAARSG

SEQ ID NO: 409518 - protein, 339 aa, unidentified
MKYTPVGVDIAKHVIQIHFINEHTGEVVDKQLRRQDFLTFFGNREPCLIGMEACGGSQHWARELTKLGHKVRLLQARFVKAFVMGNKNDVMDARAIWMAVQQPGKEIAVKTEEQQSVLVLHRTRMQLVKFRTAQINALHGTLLEFGETIHKGRAAMERELPEALERMKERLPPYLIMVLENQYNRLNELDSLIEDIEKQLTSVARQNETCKRLLDIPGVGPLIATAAVATMGEASAFKSGREFAAYVGLVPKQTGSGGKVRLLGISKRGDTYLRTLFIHGARAVALVAKEPGPWITELKKRRPASVAIVAMANKLARTVWAITAHDRKYDRNHVSIRPY

SEQ ID NO: 409519 - protein, 356 aa, unidentified
MKNTKLNFHGQNIYVGIDVHKLSWEVTIIINGMKVKKLSMDPKPQALYKYLTKHYPQGKYSSVYEAGFCGFWADRELRSLGINNIVVNPADVPTKSKERRNKTDKIDSGKLARELSVGHLDGIYIPEEKAEALRVLVRLRRQLVTDQTRQKNRIKSLLLFLGERVPEEVEEKHWSKRYITALRNLSIKQPESKSALLELLDNLESLRNQISSVVRQLRTYVAQDKEISKIIDLLISIPGIGFVMAIILYSEIIDINRFGRLDELATYVGLSPAVYSSGEKEINLGLSKQKNKYLRNYLIESSWIAVRRDPALQMAYGKLCRRMSGQRAIIRISKKLLNRIRSVWSKQQPYVFSVVE

SEQ ID NO: 409520 - protein, 490 aa, unidentified
MIKSVGIDLAGAGEHKVRCLDEEAQLCDGFGFETTPEGLAKLEERVFRDGSNPVIVFEPTGLAWFVVAIYIRARHLDCRLVRTQARNVVALRKYLRRSAKSDRIDALTLAKMPFVDIERLNEVYLPPAKVNAILRLARQRQRLESDIAGRKKRILSIIDGYLPGVRQPFSNLWSPQGREFLRTQLNPLAVVRAGEKALHRFLAQARVRGKKGANESHWVYRACQNIATIYEMSRSSGAVDDDFFADFQDEIARELRLMEAEEAESEAIAQRIEILYRELHPSDNLRTIPGVGELTAPVFLAIVGDPTRFRSQSAFANYNGVVPDSRQSSDTEAKGLRMTKAGPSIMRWALYQASQIGRRYDPQLASIYYREMVHNGKNHKQAMGAVMSHIGARILAVLQENKPYELRDIKGRPIAWEEARKLVLTNYQVPEEIKQARRRRRTVGNSAKSQRKRGEMVAHRAHEAAEAPQPGITPPIPQNLVYSISAKKAR

SEQ ID NO: 409521 - protein, 353 aa, unidentified
MDRYIGIDAHSESCTVAVMGPSGKRIRQQVVDTQAKVLIDLLKGVAGDKYVCIEEGQLAEWLVEALGPHVKEIIVMQPKEHHGRKSDADDAWALAEQIRVRAQGTYVFKPTTQYRTLREAVRSYGVAVKEQTRAKNRFRSLLRSRGLSQLDDTIYDPTIRSEWIRKLPTTYRRRAEWLGQQVDTTTEAYELAESWLKEEAKKCTEVQRLKTVPGLGDVRAAQVVALVVTPHRFRKTRQFWSYCGLGIVTRASSEWKRNCSDGRWQHVQGNVQTRGLNLNRQPMLKAVFKGAATIVLARPNPLREHFDRLLANGTSAHLARLTIARRIAAATLAIWKKKEDYEPTKHCSPQEAA

SEQ ID NO: 409522 - protein, 346 aa, unidentified
MNSMNYVGLDIHKKSVSCCVRRADGTIIQEITITSTRQALDEWMQQLPQPWMAGVEATLFTGWIYDHLVSAGSVVKVAHPAMLQAIAAGKKKNDRVDARKIADLLRCDYFPECHMGSREIRDRRRVLRYRNLLVRQAVQMKNKVSGLLMEAGVPYNQQKVHQKKYFAELLQTQKKEMPPSMPELLRLSRSTMEALTGMQRQLIRALESDALLAARVERLASIPGVGRVVALTWALEMGDISRFASVKKAVSYCGLCGAEKSSGGKTERTPISKQRNKHLQTTLIEAAKLAPRWSTELALVYEREKQKGNRNRATLAVARKLVAYLMAVDREQRPFDTPLRVAGNAA

SEQ ID NO: 409523 - protein, 396 aa, unidentified
MDTISELRVSIDVGCYHHSVAVGLPNGTLLDQFELAHGQEGFDRFFERIDRLQQRHGGEVSVAMEGYNGWARPLDTLVRARGYRLFNINNLKLARFKEIFPAAAKTDRIDARKGLELFQLREHFPMARGVLQEIQAVPLENEKLKRLTRRRRALVDERSRVAARFQADLQAVCPGLLAITKEADNLWFLNLLTHGDDLHKLARVHEKTILKIPGVGRKFGAIICAWQKNASFSHDAEWVGPMIVEDARRILQLRRTIKTLEAACKALMQDSEIARLIDSIPGFATVCSTELAGEIGTIERFRNEASLAMYLGMANLANSSGNYNGSKRPKHVNGCAKAAMMAAVDKHRKFVPESKHYYDKKRAEGKKHNQAIRALGRHLCRVIYSMLKHNREYELR

SEQ ID NO: 409524 - protein, 337 aa, unidentified
MAEVSFPSQVLRGCGIDVHLKVVVATIKGEGIRKETRSFDTFTSSLTELKEWLLQNGITHVAMESTGVYWKPVYRVLEDAIPNVWIVNARHIKNVPGHKTDKMDSEWICKLLLAGLLKPSYIPPKEQRQLRDLTRYRNKLIQHVSSEKNRIMRILEDCNIKLSSVVSNTSGTTATKLIDWLCEGKFITLQDVESIYHGKMSATPEELLKACTGFVESHHVYMLQMIRRDIDQTTVLIGELGAKIREVLSKYDNAIELLKEIPGFSDKVVEDLVAEIGFDMSKFPSEKHLVSWAGICPGNNESAGKKKRKNHPRKQTSEGCHYRGSMGSDPYKEYIFQ

SEQ ID NO: 409525 - protein, 395 aa, unidentified
MFVSKDDGGRADGFRFAHTQQGFDGLVRRLGRHGEPADVPVAIERPDGRLVDRLLEAGHPVFPVKTNAIKAWRESEVVSGAKSDAGDAEVIADYLRIRRHRLRALDPFSDATKALRAVVRARTDLVEQRVAAANQLRATLDAFWPGAKAMFSDITCNIALTFLETYPTPAAAARLGEGRMAAFLKKHGYTGQRSATELVERLRAAPAGVIAGNTASAQGDVVLAMVRVIRALNQSIKDLDRSLNARLDEHPDAAIFTSLPRSGRINAAQMLAEWGDSRQAYDSPDAVAALSGAAPVTKRSGKHHVVSFRWACNKRLRNAFATFADNSRHASPWAADVYARARARGHDHPHAIRILARAWIRIIWRCWIDQVPYDPTRHGAARAFAERDLATGAAA

SEQ ID NO: 409526 - protein, 372 aa, unidentified
MENIIYIGMDVHKESFSLCALHGTTGEIVREARCASNVSLVKKFVEKLKIKYGEDIKIKAGYEAGCLGYSLHNLLEQNGIDCDILAPTTMYSSSKNKMVKNDRFDAKMIALNLANGTYKEVYVPEEEDVAVKEYIRMLGDFKTSLKKIKQQIKAFLLRHGYIYEGKSSWTIAYMKWLKNLDLQGLFKETVAEYLLQYDVLVDKIERFSLRLEELSRTERYEEPVAKLRCLKGIDTTSAMTVHVEIADFTRFPTAKAFMAYVGLTPSESSSGEKISRSSITKQGNSTVRSILVECANALVRGTIGLKSKRVKARQKGQQSEVISYADQAVERLQRKYHRMIYQGKPRNIAVTAIARELGCFIWGLETGKIHRK

SEQ ID NO: 409527 - protein, 368 aa, unidentified
MKKRSTTKGPSAKTRKWCGGVITVGLDLGDRNSRYCVLNEHGEAILERSLATTSKGLDQVFGSMCRCRVALEVGTHSPWVSRHLAKLGHEVIVANARRVRLISDSSRKNDKLDAKTLARLARIDPQLLSPVRHRSEQAQADLIMIRARAALVEARTALINSVRGLTKSYGERLPGCASYQICEELADSLSGPLQAALAPLLTEVESQTERIREYDQKLEELALERYPEVELLKQVRGVGTLIALTFVLTVEDPHRFRTSREAGCYAGLRPKRRESGQSRPQLGISKEGDPYLRKLLVQGAHCILGRFGQDSDLRRWGLKLAARGGKNAKKRAIVAVARKLAVLLHKLWISGERYEPLRTANSPQTAAA

SEQ ID NO: 409528 - protein, 410 aa, unidentified
MDILIACCAGLDVHKDSVEVCVREVEAERKLRHQIRRWGTTTRDLMAMAEWLKAEGVTHVAMESTGVYWKPIFNVLDSDFEVLLVNARMIKHVPGRKTDVADCQWIAQLLQHGLLKGSFIPPRWQRELRDLTRQRAQITDESTRVRNRIQKLLEDANVKLGSVATNVVGVSGRLMLEAMVKGQNDPAELADLARATLRKKIPQLEEALYGNFTEHHRWMLRLLLDQLDSTAQLIARLDERIQELTRPQQPAMEKLDAIPGINRRLAEVVMAEIGPDMTPFPSDAHLASWAGMCPGNHESAGKKKSGKTTKGSRWLRQAMVQAAWAASHKKDSYFHAHARNLMRRRGATRGLVAVAHSLLLVIYHVLKRGAEYHDLGPEFLDRMREKHLVRFHLKRLQQLGLTVTVQPLAA

SEQ ID NO: 409529 - protein, 343 aa, unidentified
MKYVGVDLHKQTISLCVVMQKAGQRIIVKRETLRCNEPRRIQSWFRRLGAFQVTVEATSSYEWFVELVEPLADRIVLAHPKKLRVIAESTRKTDKLDAQVLAEFLSLDMIPPAHRPSPRLREHRALVRQRQYIQRRITSAKNRLRHILSHYNADVKCLFSQKGQAYLNELRLSAADRFVVRQLVASWHHWRSQLAEIQHELRKFAKKAPEAEREARQVLETIPCVGPVTVEVVLSELGDVRRFRSQKQVAAYAGLAPGIRESASRTKQLGITKEGSGLLRWVMIQTAWRVVGKTRRWGLAYERLKTRTGAKKAIVAIARRLLGVMVAMLQSGQRYRLSSEAWA

SEQ ID NO: 409530 - protein, 415 aa, unidentified
MKNWTELNHFAGFDWAADHHDVVIVDRPGNIVEQLRFTHDASGWELFRNQVKAFPDLVVAIETSSGAAVEKLLESGCTVYPVNPKSAKAYRQRKAPSGAKSDLLDAWSLAEALRGDGQQWKALVLQDPLIQELRMLSRDEVALIEQRTALVLQLRQALAEYYPAALEAFDDWTAESSWNFIQAFPTSQALTKAGRRRWEKFLHTHGLYRPQTYEKRLSIFSKAQEFCGAGAVTRAKSRLALALVATLITVEKQLREYRAAIQQLFEQHPDKDLFGSLPGTGPKLAPRLLSELGSDRSVFESPQSLQCLAGTAPVTFQSGQIFKVYLRRCCNKNLRQAIHLWANLSRSEVPWAQQYYQAHRDKGQSHACALRCLGQRWLKILWKMWQTGRAYDADLHARNQKKHGSWLLTLNAIPA

SEQ ID NO: 409531 - protein, 427 aa, unidentified
MNYTQNHKISQITSSTIIIGIDVAKDKHVARAQDDRGIEFGKRLIFENRLHGFQTMLDWMERQRKQNRKDHVIFGVEPTGHFWLSLAYFLTAKGYDFVLVNPMHVKKSKELDDNSPTKNDTKDAKVIAQLIKDGRYSVPNLLDGIYAELREGAKLRDQLVKQLIITNGRIQNVIQRYFPEFFDVFKDWEGKAALGTLKMFPFPSQIKEMKPEEVLEKWKPQVKRGVGIKKATKLVEAARKSIGIQAGMKFAKREIDCLLEQYELYNQQIKQLDQELESLVEDLPGARQMMAIPGLGKTTVALFFAEVGDITKYSHPQQLVNLAGLSLKEHSSGKFKGQTTITKRGRKRLRRALYLAIRPLVVHNPTFKALHQYYTKRPEHPLKKQQSLIALCCKLLRVLFVIGRKQCDFDGSKLVQGLPQIETLQAS

SEQ ID NO: 409532 - protein, 338 aa, unidentified
MSLYAAIDLHSSNSVLAVMDGEGKALLQCRRPNDLRRLLSDLAPYRNELVGVAVESTYYWYWLVDGLKDHGYAVRLVNTTAIPQYDGLKHGDDHSDALHLAQLMRLGLLPEGYIYPREQRATRDLLRRRFSLVRQAVRLMLSIQSSFSRSTGKQLSANALRRLAPSQLVDLFPDLSLRYGVLIQFKLWLTLQDQITALERWIRKDLARPDLLARLQSVPGIGPILGMTILLESGAIERFASVGDYASYCGMVESVRLSNGKCKGHGNRKCGNRYLCWAYMEAANYAVRFDPLIRRWYELKRARKHRVVAIKAVAHKLARACYHMLHEGTSFDPTRAFG

SEQ ID NO: 409533 - protein, 367 aa, unidentified
MKKISTVATKQKKNFPQQKLTIGLDLGDRWSWYCVLDEAGKIRLEQRVSTTPKAMGEVFGGMPRSRIALEIGTHSPWISRLLSELGHEVIVANARKVRLIAESRKKDDRLDAQTLARLARIDPQLLYPVKHRSVQAQADLSVIRARAGLVRARTGLVNTARGLAKSYGERLRSCNVRNLNPEKAESLSPELQAALEPLLNAIESLSERIVEYNERIESLAQQSYPQVALLKQIKGVGTLIALTFLLTLEDPHRFRKSRDVGCYLGLQPGRRNSGQSEPQMHISKEGDPYLRTLLVQGAQHILGPFGPDCDLRRWGLKLAERGGRNGKKRAIVATARKLAVLLHHLWVSGEVYKPLHNSSPTTVAAAA

SEQ ID NO: 409534 - protein, 389 aa, unidentified
MLLDHPTDGQTAIRTQFAAIFMSLELSRSNWLVTSLSPGKGEKMSKYSLTAGDVAGLMRLLADLRRKAEVRTGQSYPIITIQEAGLDGFWLHRVLQQQSVESHVVDPASIAVPRRRRRAKTDKIDGETLLRTLLAYKRGEPRVCAMVVAPSPEEEDRRRLCRERRTLIEERVRHGNRIKGLLFAQGISDYAPLRRDRRARLEALRTGDGRELPSHLKAQIGREFDRIELLLEQIKSVEAAQQALLAAARKPASEKAAPDPVTMLLALKGMGANFTTVLWSEAFYRSFSNRRQVAAYAGLAATPWQSGGIRHEQGVSKAGNPRLRTTMIQIAWLWIRHQPQSALTRWFKERSHQGRKRAIVALARKLLVALWKYVTQGVLIEGAVMKQAA

SEQ ID NO: 409535 - protein, 355 aa, unidentified
MNTIKYIGMDLHSATISVAVVNDARKLSLEATIATEASAVLDFIGGLQGTLYVAFEEGIQAPWLYDLLLPHVAQVVVCDPRQLPRHRGENKNDRIDAQQLAQWLRLGVLKPVYHSRTRLRTLKELVRSYLALVSDTTRAMNRLRAIYRARAIPAKGTRVYAPRFREGWLKQLHEAGVHHRAELLYRQLDALLPLRHEAKRRMIAESRKHPAQKILLSIPTLGPVRVAVLMAVIQTPHRFRTNRKLWTYAGLGLVCRSSANYRIVEGQLTRAGKPALILGLNLNHNHVLKALFKDAAATAVSRPGPLREFYARQLAQGSDPEIARVTVARKLVTIALTLWKKGERFNAEHLKPQAA

SEQ ID NO: 409536 - protein, 350 aa, unidentified
MELANINTKYVCGVDLHSSKMYICVMDKEGNIHLHRNMRNDFKLFNNLINQYKDSISVGVESMHSYYWLADKCIEHDIPFYLGHAYYMKAIHGGKKKNDKLDSKKIADLMRSNHLPIGYVYPKEMRSTRDLLRRRTRFMKIRAEAYAHIQTIFRQHCMNISPKDVKNKTTRRELITKMNDKYLQRNIELNLDLIDFFDPKLNKIEREIRAQAKEYDRTTHNLLLTVPGIGDMMSLVILYEIGDISRFQSAQKFSSYCRLVKCERESGGRKYKGGNQKIGNRYLKWAIGEIIIHAPRTSPVIDKYYQRITNKYGKKKAKAIMNHKFGVAIYYMLKNKQGFDENRFIQTTMK

SEQ ID NO: 409537 - protein, 407 aa, unidentified
MNTAVGIDVSKGRSVVAAMRPFGEVALPPREFLHTSEGLSALSEALRLIDGNTRVILEATGRYHEPVVMALQEAGFFVSAVNPKLIKDFGNNSLRKVKTDKADAVKIARYGLEYWEDMREYTETDTTRQQLKLFSRQYNLHMKTVVSLQNNLISLLDSVFPGINELFTSPVREDGRQKWVDFVCTFYHRDCVSSVSIAAFSERYRKWCKRKGYNFSTAKASEIYTTSRNMVVTMPKDALTKALITSAAGQLVAATATLATLKAEFVRLAATLPEYEVVRSMYGVGEVTGVQLMAEIGDVRRFANRGALIAFAGVDPGVNESGKHSSQSVRTTKRGSPHLRKTLFQIVSTHLKQSPPDEPVYQFLDRKRAEGKPYLVYMTAAANKFLRIYHAKVRDHLNALEQVDSNT

SEQ ID NO: 409538 - protein, 460 aa, unidentified
MPDGGENSSTRRKKQIEGLPVVLHNVAGIDLGSEQHWVCAPVAGGISREVADFGATTAELIRMTKWLQACGVKSVAMESTGVYWIAPHEVLEAAGLEVLLVDTRQLARVPGRDKKTDPTDCEWIQRLHSCGLLRGSFRPREEVCMLRTLVRDKANLVAECGDWLRRMQKSLDQMNVRVHRAVSDIDGVTGMAILRAIAEGERDARKLAKLRDTRCHKSEEEIAEQLSGHWREDHLFSLRQSLKMYDAIQQRLADYDREILQRLAAMQREELRQQPPPPVKNPQKAKNMKKRGEEPMREALFRMSGVDLTGIDAIGVETVQVVLSEYGPDLSRFPTEKQFASHVTLVPHKPMSGGKPVRKKRRNSASTRVAAALRMAAVTLRNSATALGAYYRKMARRLGGDVAVFATARKLATLIYRLLRWGQPYVDEGVEAFERRYQETRLKNLKAKVKELGYELVASN

SEQ ID NO: 409539 - protein, 302 aa, unidentified
MAKDTIGIDVSKDRLDAFWHSHDVALSLPNTAEGFAQLCAWLGENDGVLFVFEATGAYHRGLERYLSLAGHPFIKVNPKQARRFAQAIGRLAKTDSVDAKMLARMGIVLDLTPQGIEGEDVHDLRELLTARRALVKDQITAKTRLATATNPLVKDQLCRRINDIDTDIKALDEVVAQIAKQRGTLDERIRRLMTIPGVGRLTATILVIDMPELGHLDSKKIAALAGLAPMTQQSGKWQGKERIIGGRASLRRAIYMPALVAIRFNHDLRDKYQQLVNAGKAKKVATHRRHASHHRSGKHAAA

SEQ ID NO: 409540 - protein, 310 aa, unidentified
MMDAVYVGIDVSKDRLDVHALPQGAAFMVARNGEGVAQLVERLKALSPALIALEATGGFETVVAAALAAASLPIVVVNPAQVRHFAQALGRRAKTDPLDAAVIARFAQATQPAARPLPDEMTQLLADLVARRRQIVEMMAAEGQRERRADKRLKKSIARLRKALEKELAELDGEIDDYMRGTPAWAEKQDLLASVPGVGPVIARTLIAELPELGALDRRRIAALAGLAPYTRQSGQWRGKSFIGGGRKTVRSMLFLGAMVAARHNPVLKAFRDKLVDSGKPKIVPWSSSRKSPSTRRATRSCSTCASRRA

SEQ ID NO: 409541 - protein, 355 aa, unidentified
MISIKYIGMDVHKESISIAVLNVAGKVVMESVIETKASMILQFIDGLRGDVQVTFEEGTSAAWLYDLLKPHVSKLVVCDPRKNKSMREGNQNDKIDARRLAELLRLDHLTPVYHGEHGLRALKELVRSYLTITKDLARVKSRVKAIYRSWAIPCTGKQVYAQCHRAEWLGKINEPGVRQRAELYYQQLDALRVLRLGARRDLLAESKKQKAWKRLCEIPSLGPIRAAVLLGILQTPHRFRSKRQLWNYGGLAIEMHSSADHRWVDGQLQRSRKNVLVRGLNRNCNHDLKNLFKGAAAVASSKPGPFERFYAALVAKGMRPEMARLTLARKIATIVLIVWKTGVCFDAQYLKPQTA

SEQ ID NO: 409542 - protein, 338 aa, unidentified
MKLYAGIDLHSNNSVIDLLDEKDKVIYDKRLPNELTTILSALSPYQPQIQSIAIESTFNWYWLVDGLIEAGYSVHLVNTAAVQTYSGLKYTDDNHDARWLAHLLRLNILPTGYIYPKADRAIRDLLRKRSQMVRIQTLNILSIQNLVARNTGSSIKSNTIKRMKIEDVASHLPNDDHALAMSCNLSVLHQCHEQIKILESAILKRVRLRPEFQSLLTVPGIGKILALTIMLETGDIHRFDKAGNFASYARCVQSKRVSNGKKKGENNRKNGNKYLSWAFVEAAHFSIRYSDTIKSFYQRKCAKTKKVVALKAVAHKLARACFYVMRDNVEFDVKKAFT

SEQ ID NO: 409543 - protein, 434 aa, unidentified
MKIVHPICCGVDVHKKNIVATIAATDKKGTTRYFTETFSTLNRDLYRFSAWLLGHKCYDVCMESTGKYWIPVFNILENAGIRVLLTHPMYVRAIKGKKTDKKDSKWIADLFKHDLVKSSFIPPPEVRAMRELGRYRYKLVCMRSSERNRYQDCMTVSNIGLASILSDPFGKSAKDIMNHVLTSEVFDEAAIEKLILKSAKKKTELILESVKDCNITSDQRFKMKLAAKHMDFLDKAILKTEAELYVRMKPHMHVVDHLAAQLPGISKLSAALIISEIGVDMTVFESHKHFVSWAGLAPTNNQSAGKKKSVRISKAGQFLKPLLVNCALAAVKCKSNPYFALKYQNIKKRRGHKKAIIAICRMLMTCVYHMILTGESFNPSDLQEVCKPAPKKQVITDKAAIEYLASQGYDVSSLTKPSPVPAQTAPTPKLKKSA

SEQ ID NO: 409544 - protein, 324 aa, unidentified
MAQPTLGIDVSKLTLDVSICVRAKPQHRRFTNSDEGFRALIAWLKHERLGRVHACLEATGGYGLAAALALHDAGHRVSLINPAQIRDFVRTRLGRNKSDKIDCAHIRDYGALFDPPAWTPPSPSLRRLCELQTMRAGFVAGKVEWQNRAGSCPGDAAASGLAQATIAHFEAQIEAVNRAIAETIDHDDELRGKRDLLLTIDGVGEVLAAVILAELPAPDVISTSAQAVAYAGLNPRQFQSGTSIHAPTHISKIGNARLRSALYMPAMSAMQCNRAVAALVQRLRAQRRLKGKQIVVAAMRKLLVLCFGVLKTGKPFDPAIAMPA

SEQ ID NO: 409545 - protein, 429 aa, unidentified
MNKNEANPTEEYAALIGLDWASEKHDVWLWDVATGKSRHRVIEHTPEALADWLSELQSQYPGQRVAVCLEQSRGSLIYALMGHAFLDLYPVNPVTLAKYREAFAPSRAKDDPGDARLLCEILRLHRDKLSVWKPADDHTRLLGFLNEERRKAVNLRTKLVLRLQAALKLYFPQAIQWAGTDLGAPMACDWLLKWPTLEALQRAKPQTIRAFYYAHNVRRPDLVEGLLATIASAKPLTQDAPVIGAHRLTVQMLAKQLRTLHSSIAGYDKQIAQLFKEHPDALLFESLPGAGAILAPRLLTAFGPDRTRHPDAKGMQTYCGVAPVIERSGKSRWTHWRWNCPKFLRQTFHEYAKSSIPYSAWARAFYDQQKQRGKGHNAAIRSLAFKWIRVIHRCWQTHTPYDEARYLQALELRGSPLCRLIAAPDREAS

SEQ ID NO: 409546 - protein, 384 aa, unidentified
MQASTVDTLTAGHSGTIFVAIELSQKSWLVTMHCPDKDKISHHKLEGGDHVGLLTLIERMRERAARTLGAVPAVVSCYEAGYDGFWLHRLLLAAGITNYVFDPSSIAVDQRARRVKTDRIDGERMLRTLMAYLRGEPRVVRIVRVPTPEQEDARRASRERGRLTKEQTAHTNRIKALLRLVGMAVGNPRRRDWLTWLVKQRDWQGQTVPPQIMAEIKREHARLMLVREQLDALAQAPADLTPAAAQMAQRSELLLRLKSLGPAFATTLTSEVFYKDFRNRREVASYFGLTPSPWQSGGIDRDQGISKAGNPRARCAAIELAWLWLRHQPDSKLTQEYRRRTLNAGKRIKRVAIVALARKLIVALWRYLTTGLVPEGAMLKTAEV

SEQ ID NO: 409547 - protein, 436 aa, unidentified
MASLHHLLKEGKIVTVVYPICCGVDVHKTFFVATLITTEGIVPKYRKRRFSTFNNQILAFKAWLLENNCRDVCMESTGKYWIPVFNLLEDSINVTIANPKWVKTIKGNKDDAKDSKWIGDLFRIGLVPGSFIPNKDIRILREYTRYRFKLVSCKSSEKNRYQNVFTVCNVALDAVVSDMFGKSAASITDYIVNSDTFDSEYCVSLLQKSLKKKATEVVESIEGFQMAAPQKERTKMVKEHYDYLLNQIGKLDAAIGELATPFEPAINLLCTIPGIRCYSAITILSEIGTDMSQFDSSKRLCRWAGLTLGNNESDGKKKSVRITRAGVYLKPALVEIAHAAVKSNTTPYYRINYERISKRRGKKRAIIAIARMILTAVFYMLTTGEVWNPVDLSQIDMPHELQEKEIQKSLRRAAKLLVAHGLISSDAIQIPEAVPA

SEQ ID NO: 409548 - protein, 321 aa, unidentified
MNKCKQIYGVDISKNVFDVVDSKGIHSQFKNDGKGFKAFHKALPADALVVMEATGYYHYRLAQFLYEKNVNVSVVNPLSVKRFIQMKLSKVKTDKSDAKAICEYATVNEVPPYTAKDKNQAECLQLVRLIDIYLKQSTALKNKLHGEKTLGKPSKTVYHSLNRSLKAVQKEIKILEDRLTEIVKEEKQKQLTLVKSIPGLGNKTAIMLIVLTDGFSNFENSRQLCSYAGITPMLRQSGTSVRGRSRITKMGNAKLRNLLFMCSFSASKHNKACREIYERIIAKGKSKKLALIAVCNKLLKQAFAIAKSGLPYDEKFVSKLA

SEQ ID NO: 409549 - protein, 471 aa, unidentified
MPRRKPASSPPDPATAALLQTLNPHAAGIDIGATELWVCVPPSAVASPSAPSALAVLPPHVRRFGSFTADLHAIATWLRQCQVTTVAMESTGVYWIPLYDLLESAGFQVLLVDPRQVQRAPNRPKTDVHDCQWIQRLHSLGLLTAAFRPEEPIRVWRSYQRHRASLIEDAGRHLQRMGKALEQMNVKLPEVVSDLTGLTGMSILRAIVRGERDPHALAQLRDHRCKESVETIARALQGTWQPEHVFALQQSLALYDYYHEQIRDCDRVIEAHLKGMAFLEVPPLEPKRRVRRRKDNEVTFDARQRLHQMAGVDLTAIEGIEESTALVVLSEVGTDMSRWPSEKHFGSWLGLAPNPKKSGGRVKSSATRPGSNRAAQALRLAAKNLQRSQSALGAFFRRIAARRGVAKAITATAYKLARIVYAMLKHGMAYVAQGLEAYETAYRERVVRQVKRKAAALGLMVVERDAGAQPS

SEQ ID NO: 409550 - protein, 347 aa, unidentified
MSFNHYPLKNKIMKKYECFIGIDVSKSKLDVCILDETKKPSYCQVKNNKKDLLKFLKELIKKKKIAIETTIFCLEHTGVYAMPMCCALAELQLNYTLVAASHIQKSLGLQRGKNDKADAKAIARFIYLHHQELTLYKLPEEKLMKIKILLSHRERLMKARKMFQVASGEIAEFVDKKICKEVITESKMLVKKLNSKIDKTDKQVMALIDADQQLKQTYQLATSVPGVGPQVAFNLISCTRCFTAFKTWRQLSCYAGIAPFEYSSGSSIKGKTRVSHLANKKIKSLLSMAALNAIQRDAEMKKYYERKTKEGKNPMLVLNAVRNKVVSRVFATVTRGTPFVETQKFFS

SEQ ID NO: 409551 - protein, 340 aa, unidentified
MNIVFLGIDLAKNVFQLCGLNQAGKPVYTKRTGRKELLHTVANIPACLIGIEASTGAFHWQREFEKLGHKVKIISPQYVKPFVRGQKNDGNDAQAIAVALMQPTMQFVPPKSPEQQDIQALHRARQRIVNHRTATVCQIRGLLLDRGIPIGSAVSRARRAIPVILEDAENGLSPRMRRTIAELYDLFNNLERRIHFFDKEIETVFRQSAACQRIAKVKGIGPKTATAVVAAIGKGSEFKNGRHFAAWLGLVPRQHSSGDRQVLMNMTKKGDKHLRTLFIHGARAVVRVATNNNDGYMNQWVNQLKERRGFNKTTVAVANKNARIIWSMLRNETEYQAVGS

SEQ ID NO: 409552 - protein, 339 aa, unidentified
MKQQEHRLYVGIDMAKSTFVAACAWGGQAEVLGEFRNTQAGYQELARAVERMQKGKQCHLIVEPTGGYEQGILAYGYQMKWTMSRINPFRVRRWAQGVGQRGKTDRLDALMLARFGQATHPPSQSLLLAEADELEGLIRRKEDLEKLLRAEENRLGQLEQRPVVSEAVQESLEAMIEMLKKQIEAIEQAIQQLFSTAPMLAAQRRHLLTIPGIGPKTVDQTLLLCHRFHALTNGEGTAKQIVAFVGLDPKPFESGHSIHRRAAISKMGDQAGRTRLYLSALGAVRGKNSINIFYHQLRERGKPGKVALIACARKILVWAWTIFQNHTPFDCSRHPLPAA

SEQ ID NO: 409553 - protein, 436 aa, unidentified
MRGCRCSMIMGFTKPIEHFNLQRKKVITMNTLYVGIDVSSKSNVVYLMLPNGDKHSNFSVANSHEGSTQLVKRILSVLTSHSLDTVLIGLEATSVYGDNLVYFLREDATLAPFNRKIHVLNPKQVKKFHDAYNDLPKNDYVDSFVIADCLRFGRINKEVYMGDYRYKALQNLTRARFFAVQNLVKEKQRFMNVLFKKYSTMTQEKVFSDTFSTTALAVYDEFESAEALANMDLHELTDFIMEKGKNRFPDPDAVAKAIQKAASSSYRLPKTMNDSVNQVLSISITSMKALESQIKEFDKAIKAQMELLPNVLISIPGIGPVYSAGIMAEIGEIDRFNSQAALAKYAGLAWKQHQSGGFEAEVTRLIPSGNRFLKYYLCEAAFSLVRCDKEYSDFYHLKYKEVNRCQHKRALALTARKFVRLVFRLLKDNRLYCPAK

SEQ ID NO: 409554 - protein, 423 aa, unidentified
MEMMYERVAGLDVHKATIVACARIGTGRKVTRECRTFETTTDGLLALLAWLVESRCSHVAMEATGVYWMPVWKILGDGDFVLIVANAAHIKNVPGRKTDMNDAMWIADLLACGLIKSSFVPEEEVQELRSLLRTRKQLGREQTRHVQRIQKTLTEANIQLDSVLSDIMGASGRRMIEAMIEGMRNPRQLAALASAQIKATPKQLYDALHGRLTDHHRFLLKLHLRQWDGLDATIREIDLEVEARIARMDKEVKAGEARFCDLIALLCTIPGVSTLSARTILSEIGRDMSRFPTAGHLVAWAGLCPGQNESAGKRKPARLRKGAPWLKTMLVQCAWAAKRKKDSYYKAQFFRLQARRGPQKAICAVAASILTAIYHILRDGTEHHDLGADHFNRRSTEGQTKRLVAQLTKLGFEVKLERTAEAA

SEQ ID NO: 409555 - protein, 372 aa, unidentified
MAGKVTETAVVGGVDTHKDLHVAAVVDQNNKVLGTQFFSTTRQGYRQMLAWMTSFGALKRIGVECTGTYGSGLLRYLQNAGLDVLEVTAPDRMERRKRGKSDTIDAECAAHAAFSGIRTVTPKTRNGMIESLRVLKTCRKTAISARRVALQIIHSNIISAPDELREQLRNMTRMQLIRTLGSWRPDASEYRNVTNVYRISLKSLARRYLELHDEIADLDVMIAAIVDELAPELIKRNAIGYESASQLLITAGDNPQRLRSESGFAALCGVSPVPVSSGKTNRYRLNRGGDRAANSALHIIAIGRLRTDDKTKEYVARRVAEGHTKMEAIRCLKRYISREVYTLLRNQKQADQQHPDNGLTLRRASREASIQA

SEQ ID NO: 409556 - protein, 406 aa, unidentified
MIFVGDDWSETHHDVHVMDGAGTRLASRRFPEGLDGIRGFHQLVAEYAEDPAEVVVGIETDRGLWVHALTAADYEVYAINPLAVSRYRDRHNLAGAKSDPGDAKVLADLVRTDRHNHRPIAGDSPEVEGVKVLARAHQNLIWARARHTNQLRNALREYYPSALAAFDDLSDRDTLALLERAPSPEVGARLSVTQVRAALKRGGRQRNLDRRAQQIQAALRSDMLTAPDPVAAAFAVATKATVGVLIELNRQIAELEATLADRFEQHPDAVIYLSMPGLGDVLGARALGEFGDDPNRYADAKSRKNYAGTSPITVASGNKKAVLARHVRNQRLYDAIDQWAFCSLTQNPGCRQFYDQRRNLGDLHHQALRALGNRLVGILHGYLKHHTLYNEHTAWAHRQPRNEQAA

SEQ ID NO: 409557 - protein, 437 aa, unidentified
MLLCLNPNAAGVDIGATEIYIAVPEDRDPQPVRCFATFTEDLHAAANWLKACHIETVAMESTGVYWIPLFQILEARGLTVFLVNAHHVKNVPGRKSDVSDCQWLQYLHSVGLLRGSFRPEQAVCTVRSILRHRDSLVQMASSHVQHMQKALDQMNLQLHHVISDITGVTGVAILEAILAGERNPHALAALRDRRIKANADTIAKSLVGDYRREHLFTLRQSLEAFRHYQELIAACDREIAQYLEGFESKVDPPSGPRSQSEGEPKPTDSEPRFDLQTHLHRIFGVDLTKIPGINVLTTQTLLAEIGPDFSRFASGPELTSWLGLCPDNRISGGRVLSVKTRKVKNRAATALRMAAQSLYRSQSYLGHYFRRMRAKLGAPKAITAAAHKLARIVYHMVTTRQAYDETICVQNEVQNRQRLEARLRKQARELGLQVVAI

SEQ ID NO: 409558 - protein, 518 aa, unidentified
MVEREGPLLGLRARSRVSSFPPGLSRGLTWCTTPDNHKDDDAWHPAILNKGGNAMKSFYMGIDVSKGYADFVIINQRKQPVVKSFQLDDTFNGHSRLHQILSRFLTDHPQAGMCAAVESTGGYENNWYNTLIRLQASLNIKTARLNPLGVMHNSKADLKKNTTDKISAQNIAEYLIAHPEKVVYQQQDKFASLRKQWGFVQMLTKQCTQLLNQLHSLLYTANPELLNYCRNEMPAWVLKLLLKYPTAANLKRARDKTVAKIPYVSLTRAKQLITDAKLSVASATDALTAQLITATVEQILQLKKTIAAQTDLMAAQCDVPEVKLLKTFVGIGDMSAIGLILEIQSVARFKTVKNLASFWGLHPVYKISGDGSGAFKMSKQGRVNPRKILYTVTLSAIEHNPVIKPIYQYHLQQGKHKMDAIGICMHKILRIIYGMLKNNTAFDPKVDAANRQRSLPNMTIDPKKTKNRRFQNYDSKAPVSRRQRKKRLEREQSHSVITDTRSGISAPVPIGDIISDML

SEQ ID NO: 409559 - protein, 316 aa, unidentified
MENKSSVYGVDVSKAILVIGRYGADEVLSISNTPEHIARWLSTIPRDSVVAMEATGAYHQVLASLAHAAQMRVYVLNPRALKHYSEAIGQRGKTDPVDTRMIARYAMHEHPKLRAWQPPTPEADKLAQLLQRRERVVTACQMVSQSLAGVSALKAEREELLANIKRMIKNTELLMRAELAKAPQLAELHKRLTTIVGVGFVVAAQLVAALTRLRFTRADAFIAYTGLDPRPDDSGQRRGRRRLSKRGPPLLRCRLYNAGMAAAHSKLFKPLYQGLRARGLRSTEAIVIVARKIARIAFALYRSETTFDPAKHLQAA

SEQ ID NO: 409560 - protein, 339 aa, unidentified
MKLYGAIDLHSNNNVTVLIDEQDQVVYQKRLPNDLPLIAQQLSGYRDRLQGIVVESTYNWYWLVDGLMDQGHRVHLANTAAIQQYEGLKYTDDHSDARWLAHILRLGVLPEGYIYPKEERAVRDLLRKRSQMVRQRTTNLLSIQNLITRNTGSSIRSNRIKTLDTEQVDELLPNPDLALAVKANLAMINCANGQIDILERTVIDRIKLREEFSFLKTVPGIGQILALTIMLETAEIKRFPTVGDYASYCRCVGSQKLSNGKKKGSGNTKNGNKYLAWAFVEAANFAVRYSSRIKSFYQRKKAKSHGVVAIKAVAHKLCRACYCIMKDRVPFDVAKAFAG

SEQ ID NO: 409561 - protein, 388 aa, unidentified
MPATKVYAEATAPTAAGNETTVCASLELSHKTWLLTVLSPGTPKISKFSVPGGSGKALIELLERLRSKAETTTGGPVGIAIIQEAGLDGFWVHRLIADRGIESHVVDPASIAVPRRQRRAKTDVIDGETLLRTLLAWRRGEPRVCAMVVPPSPDEEDRRRTCRERAILLRERIRHVNRVKGLLSGQGITDYEPLERDRRTRLDELRTGDGRPLPTRLKAELLREIEVIELLLRQIAEVEDERDTASVPDTAEHPSPVATLTRLKAIGPQIAATLYMEGLFRTFANRREVAAYAGLVPTPWRSGTIAREQGISKAGNRRLRTAMIELAWLWVRHQPDSQLTQWFRDRVGEERGRVRRIAIVALARKLLIALWRYVSHGELPQGAVMKPA

SEQ ID NO: 409562 - protein, 395 aa, unidentified
MKTVCGLDVHKGIILMCILKENGEKIIREFTSLTIDIVSMRDLMKEHYVQEVGMESTGIYWIPIWRILQGHFELKLINPWFIKQLPGRKTDVKDAEWIATVIQKNLVRGSYVPGRQIQELRQYERRYVRLCEQSTRIEQAIDRQLHRCNIQITNYVSRIGSASVIRVVKALIAGETTAELLEKHIHGRIRNKHKEKITASLNGIISTSDRFILNQHIKEYELILAQQEECLHEMNQLCQKNFKKELQLLCTIPGVQLLSAMIIIAELGVDLKTFITASALTGWAGLRPRNDESARKIRSTKITKGNKYLRRILVQCAWAASRQKNSWLKTKYEQLCVRKSSKKALIAISRKLLVIIWHVLSKQEPYKEYIPKIDPQQRKKKIDYHRKKIQELEIA

SEQ ID NO: 409563 - protein, 344 aa, unidentified
MSIVETRLVTGGVDTHLDVHVAAVVDDLGGVLGVESFPTTTAGFVALHTWMIEHGSLRRVGVEGTGAYGAGLARTLRRAGLEVIEVDRPNRQARRRDGKSDSLDAIEAARAALSGRARGIAKSANGNVEALRAIVVAHRSGRQARTRCLVQLRHLGFCAPDDLREQFRGTTIAKLTAEAAGLRPNIDGDQIMYATKLAMRTLARRVHDIDNDTTLLDVELARLVQATAPSLIALHGIGPHSAALLLVAAGDNPERIRTEAAFAHLCGVAPLDASSGKKPRRRLNRGGNRHANQALWRITFTRMGSDPRTRRYVERRLTEGLSKPEIMRCLKRYIAREVFHHLPH

SEQ ID NO: 409564 - protein, 249 aa, unidentified
MEAPVAGIDVSKDKLVVYFQGKYYEFQNNKQGFEGVKQVLPKGCKVAIESTGVYHINLAKYLGKEYDVRIINPLILKKFKDIRGKKSDKNDKKLAELVVSMGSEFTTSEAKELTSQWDFITRSIVRVKNRLRRDLILLGYKDSLSKKNLNEVLRGEDNIVLSEVRFLLDELERLEVRKREIEEELEDLVPKDSLIFTIPGIGRTLGCIILARVGDVKRFGDKKRFVAYCGLDPLVESSGKSVVSRGISR

SEQ ID NO: 409565 - protein, 503 aa, unidentified
MKTTPSSQSVGSIYRNQNALLRALFERAADPRKVLCVALDYAKHKHVALCCDGNGDILRQPFAVENTVEGVAFLIEQISATSRRRKIPKCDIFLGGEDEPSYVANFTAALRARQYLVLRVNAAEAAENRENQIASTDLLDLLGIAKTLLSRRARATGPAAPIGSKNKNPSQDIYFEIRELTRCRRTLVRQQTAASNRIHAMVDQLFPGFLEHSKSGLTPFCGASMALMKKRFSAPEIARRRPRTLVTFLGRHAVRQPHEIAAKLIALASSALPPTPHRLAALQRTLSATVDLRECLTRNANQLREQAAILLASTPYAMLTSISGIGFTLATGMAAELGNPIRLSPVDSLCAFAGIVPGTFQSGGPDQPACQGHTPTRCNHILKDWTVQSAQKIHLFGPPELKDRITRWNANGQHGIFAGARRYLRLLRSLVLNQTPYLDPRSRSSLASDQDRADAALHAWLILIRKWRTIPDGIALIAKETTPLGFWRRVVMESRSIHLPLQP

SEQ ID NO: 409566 - protein, 346 aa, unidentified
MVEYVGLDVSKEETAYCVKDERGKVLARGKVASDPDALFAVLREHCLCPERIVLETGTLSNWLARELRKRGLPVTVIDARQAHAVLRLQHNKTDENDASVLADLARTGFYRSVAMKSESGQRHRALLKAREHLVGQLRSRGNAIRGLLGTFGIRLAKGTAKFDLRVRAALAERPDLAAIFEPLVGERAALLGAIEQLDRAVDAEAEADPACRLLMTAPAVGPVTALAYVATIDEAGRFGKSRAVGAYVGLTSRRNQSGEMDYSGRISKQGDRMLRALLYGAANSLLTRVRRAHPLKAWARKVKRKVGHKKACVALARKLAVILHRMLITGEAFAWPQDDAKETATA

SEQ ID NO: 409567 - protein, 352 aa, unidentified
MIVLGADMHKRSHMIAAVTAGTGELVGEQTVDVGTRGFAAALDWGRGVGGERVWALEDCRHVSGAFERFLLVHGERVVRVAARLTAGERRSGRDRGKSDRIDAIAVARAALREGVERLPVAELAGVELDIRLLVDHRERLVRMRVALYNDLLWHLHDLWPELAIPGCSLLYKKWATRIARRLARAEQTTRIRIARDELRHLRELSHTIDALEAEVSELVAQAAPQLLAEPGFGPLTAGKLIGEIAGAQRFSSDAKLARASGIAPIPVSSGKTNRHRLDRGGNRQINAAIHRVAVTRARCHPETRAYLDRKRAEGNSTKEAIRCLKRHLARRIWHLLQPPHPVAETPPSPSIS

SEQ ID NO: 409568 - protein, 358 aa, unidentified
MSNGSRVQLKMTAGLDLGDKYSHMCLIDTDTSEVIEEGRLRTTPETLRRRFDSEQPLKIAIEVGTHSPWVSRLLEECGHEVLVANARKLRLIYGSKRKTDKLDAENLARLARLDPKLLYPLKHRSEASQAHLAMIRSREALVGSRTQLINHVRGAVKSFGARLPRCSARSFHKKVAEDLPKELVSVLGPLLETIGELTERIREYERKLEEITSEHYPETELLRQVAGVGALTSLTFVLTLEDPHRFSKSRSVGAYLGLVPGEDQSGDSDPQQQISKEGDEMLRRLMVGSAHYILGPFAPDSDLRRHGLKIAERGGKNAKRRAVVAVARKLSVLLHHLWVTGEVYEPLHNAQRSGDQAA

SEQ ID NO: 409569 - protein, 347 aa, unidentified
MRFYTQQHKHYCGIDLHARMMYLCVLDGAGAVLLSRNIECSPKAFLLAVKSFRDDLVVAVECMFTWYWLADLCQREGIAFVLGHALYMRAIHGGKAKNDRIDAHKIAALLRGGMIPQAYVYPPEMRATRDLLRRRNHLTRKRAELLAHIHNTVSQYNLPPLEHRIDKRCDRVGLLSHFPDPQVQNSIALDLALIEQYDVLLPKLERHIRACAKQHDRKSFVLLRSIHGADLILPLVILYEIQDIGRFARVQEFLSYCRLVKPTRESAGKLQGHAGGKIGNAHLKWAFGELATTFLRANPAAQQLHQRLKNQHGKGKALSVLAATLAHTVYFMLKRGQIFDAHKIYQD

SEQ ID NO: 409570 - protein, 326 aa, unidentified
MSGGTVVYVGVDVSKASLRFDAGSYFTGDVKNTPAAVRRALAALAGKLPEGCSPHVCFESTGRYARNLSGACRAAGVPASTLNPHKVRLYARSMSVAAKTDPVDARMIRLFAEHRRPRPDAPPREGGDESRELAGLRALLGKQLTALLGFLEGAGPARVRKIVRAQIRALRLRIAAVDARLRELRDADADTAGVCAELAKISGVGELTAMLVCTLAPELGTLGRRRAASLAGLAPHPDDSGTIRAPRHICGGRFNLRRVLYMAALSAAHFNPELKPVYGRLVGAGKPRKAALVCVMRKLFAHMDRVAARWRRERAAAGMPPAPAQA

SEQ ID NO: 409571 - protein, 338 aa, unidentified
MRVYIGVDLHSNNSMIVVIDETGKVLYEKRLRNDLGLIVSELERYRKRCAGVVVESTFNWYWLVDGLMEAGYEVHLANTAAIQQYKGIKHTDDRSDARWLAEMLRIKVLPEGHIYPKEDRAVRDLFRKRHQLVRQKTSQMLSIEDIVSRNAGVGISGNDVKTITESGLDQLLPDPLVARAAKSNLRVYKCLAKEVIDLERTVLSRAKAVPGFEELLGVSGIGKTLGLTVLLEAGDMERFPGVGNFASYCRCAGSQKLSNGKRKGKGNTKNGNRYLAWAFVEAATFAIRYKPRVKRYYERKKAKTNGVVAVKAVANKLSRACYHVLKEGVPFQVERAFA

SEQ ID NO: 409572 - protein, 429 aa, unidentified
MSEVEFIKQEPEFAAFLAIDWADKKHVWCLHAVGAEKRESGELEHSPEAVEAWVGQLCQRFAHRRIAVALEQSRGALVFMLSKYEALHLFPVPSTMVASMRQALYPSGAKDDPRDADLLLDILLQHRDKLRRWVPDTEATRRVQNLVEERRKLVDEKTEQTNRLTSHLKIYFPQILDWFKRLDTELACAFLLRWPTLEQLQKVPPAQMRTFFRKHHCRDQEVIERRILAIRQAIPAIRDRAVIEAKSTVVKVIMRVIGSLLEGIADLDEKIEEAAAAHPDFFIFNSLPGAGAVLAPRLLAAFGSQRERYGSAGEVQAYSGIAPVMERSGKKKWVHCRIACPKFLRQSFHEWAGHSIARSVWARSYYQQLRSRGKGHHAAVRALAFKWIRILFRCWKDRVAYDESRYLATLARRGSPLAAVHVAIVGKSV

SEQ ID NO: 409573 - protein, 342 aa, unidentified
MNLTTIGIDLAKAVFQVHGADDKGRAVIKKQLKRAQVLPYFANLTPCRIGMEASGSAHYWARKLQALGHNVQLIPPQYVKPFVKRNKNDAADAEAICEAMMWPNMPAVPIKNAEQQAILSVHRARQGFIKARTAQANQIRGLLAEYGLIIPQGISHIPKQVPEIIEDGENDLPGSFRVLIARLVDHLKELDRQVGELETEIQRWHRDNAASQKLAKIPGVGPLTATAMVASIGDARHFKNGRQLAAWLGIVPRQHSTGGKATLLGISKRGDTYLRTLLIHGARAVIRVAERKATADSWIKNLLVRRNKNVAAVALANKNARTIWALLAHDRDYETGYVKAAL

SEQ ID NO: 409574 - protein, 366 aa, unidentified
MKKISTVAIERIDIFKENQLTIGLDLGDRTSHYCILNEAGEVILEHKLPTMPQGMEEVFGRIPCSRIALETGTHSPWVSRQLTQLGHEVIVAHARTVRLIGESSRKDDQRDARTLARLARIDPPLLGPVRHRSAQAHMHLTVIRARAALVSTRTALVNAVRGLTKSHGQRLRKCGTEQMNREMAQGLSQELGDVLDPLLAEIETLNERIAEYDRRVEQIAQEVHPEVALLRQVKGVGPLIALTYILTLDDPYRFRRSRDAGCFVGLRPGRKNSGNSEPQMHISKEGDRYLRTLLVQGAHYILGPFGEDSDLRRWGLKLAERGGKNAKKRAVVAVARKLAVLLHKLWVSGEVYEPLRNNHKVESAAA

SEQ ID NO: 409575 - protein, 372 aa, unidentified
MNDTIFVGLDVHKETIAVAVAEGRRGGEVLQLGNFLNRPAHIEKLVARLAKGNRTLSFCYEAGPCGYGLLRQLVALGHDCTMAAPSLIPVKAGDRVKTDRRDAVMLAKLHRAGELTAVWVPDDAHEAMGDLIRARATAVRVLGKARQHLQGFLLRHGRVYAGKKGWTRAYRRWLTTVRFDHVGQQVGLQDYIHAVTDAEARVERLLRQIEDLAQNWSQAPVVAALQAMRGVAFIVAVTLVAEVGDFSRFANPRQLMAYLGLVPSEHSSGRTVHRAGITKAGNALARRALIEGAWTYRMQPRVSRKLHDRIEALPQGVRDIGWKAQVRLCARYRRLAAAGKPKVVVTTAIAGEMLGFVWAIARSVQIAPLRTI

SEQ ID NO: 409576 - protein, 381 aa, unidentified
MVNPTTLPDRTLEQACTMVLFMALELSDKKWKLALSDGTKRRIVTIAAGDLVALGEAVAKAKARFGMHGVVPIVSCDEAGRDGFWLHRYLLHCGVANVVVDASSIEVNRRARRAKTDRIDVEQLLRLLIRYHHREKRVWSVVHVPSVEEEDARRLHREFERLKKERTGHRNRIQALLVSQGLRLQPRHDLLERLEAARLWDGSALPPDLQAEVRREEARLRLVDEQIRALEAEQARRLEAAATPCHQQIAHLMRLRALGLTSAWVFVMEYFGWRQFHNRKEVAALAGLTPMPYASGDSARDQGMSKAGNRRIRTLMIQIAWGWLRYQPHSALSIWFNTRFALGGKRMRRLGIVALARRLLIALWRYMQSGAIPEGASLKPL

SEQ ID NO: 409577 - protein, 406 aa, unidentified
MDVVYSHVCGLDVHKKNIVACTITPEGKEIRTFGTMTDDLILLVDWLKVKECTHVAMESTGAYWKPIYNLLELEEIETLVVNAQHIKNVPGRKTDIKDAEWIAGLLRHGLLKGSFIPNREQRELRELIRYRRSLIEERAREVSRIQKVLEGANIKLSSVASNVLGKSGRAMIEAMIAGETNPEALSDLAKRKLKSKKADLKRALNGLMGPHQKLMLGAQLRHVDYLDEEIGRLDEEIKKRMLPFDEDLELLDTIPGVARRTAETILAEIGSNMNQYPSAAHLCSWAGLCPGQNESAGKRLSGKTRKGNKKLRSTLVEAAKAAARTKETYLSSQYHRISARRGANRATVAVAHSILSMVYYILKRKQPYIELGPTYYEERKRDVIIKHSIKKLESLGVSITVNTAAS

SEQ ID NO: 409578 - protein, 413 aa, unidentified
MSFTPATVPARVCAGIDWAKDDHAICIIDPHGEVLDRFFVNHNTAGLKTLVHRLLKAGVEEVGIERGDGPVVDALFQAELTILVIAPGQLKNLRSRYGSAGNKDDRFDAYVLADVTRTDRHRLHPLVRDSAATTAMRTTVRARRDLVAHRVGAANQLRAHLQLVFPGAASLFADIDTAISLSFIERFPTQTHADWLSPKRLGTWLRSVSYSGRTDPEVLHTRLLAAPHGTTGPDAVVHAATTLAYVAFLRVLNTQIALLEDNLTAQLTIHPDTHIYASLPRVKTLRTARLLAEIGDARGRFPTANSLAALAGVAPSTRQSGKVKAVTFRWGCNKQLRDALCDFAGDSRHDNPWAADLYNRAIARGHDHQHAVRILGRAWAHVIWRCWHDNLSYDPSQHRALQNILANTTNEAA

SEQ ID NO: 409579 - protein, 447 aa, unidentified
MTKFKEHGKSFAAHIGLDWADKKHFWTMQTADGKRSRGELKHTPEAIDAWAAELAERFGGRPVAITLEQARGALIAILSKYAHLHLFVVDPSRLNHYRKSVSPSGAKSDPVDGDLILDFQLKHPELLRCLEPDTVETRSLQFLTEQRRDLVNQHTGQVQIFNSWLKQVFPQILEWFDDVSTPLVGDLLKRWPELAKLKKARPETLLQFFHDHNCRSVERNQQRLEAIRTAVTATHDAALLKAANLMIQTSIQLLATLRTAIEQFECQIQAVFATHPDRFIVESFPGAGPALEPRLIAALGTDRSRFQSAADMACCFGIAPGTESSGNARWVHWRWACSKFVRQTFHEGAACTVRQEGWARDHYERQRAKGKGHHAAVRSVAYKWIRILYRCWRDRVPYSEQRYLEALRTHGAAKGKPAANAAEPSIGLPTVQWKNCGGFSKPTKFSS

SEQ ID NO: 409580 - protein, 456 aa, unidentified
MNNYFLGCDVSKGYADFVIIDERKYVVEKNFQLDDTFNGHNQLFQILKYFIEKDSEAFLYAAVESTGGYENNWFQTFKKFSRELPVKVVRINPFAIAHSNKAAMKRVTNDRISASTIAEYQIHHPEKLQYNQDDAYQTFKRLVTTTLMLKKTKSQFVNELETLLYVANPEIIKYRKSKIPQWLLRVLQHFPDVASLATVSVEALSQIALIKPARAKEIIQAAQQSVASASDEMIRLAITSTVETIIALDKKIDQHIKLLQKQLMVPQIELLQTFKCIGLLSAIELYIEIGCIERFPTVKHLVSFFGVHPVYKESGDGIWGVGMSKMGRRKPRAILFMVALNAIQHNELIRSVYQRELKKGKAKMSALGVCMHKILRIIYGMLKNNTAFDPEIDRTNQQKRVTKTKKEKIDNKRRFQKEDLNAPISKKQTRKRKERKLSQSDNITINGISVPAPSNV

SEQ ID NO: 409581 - protein, 400 aa, unidentified
MRAVFGIDVSKASSEVAILVNGEKVHGYTMSNDAIGFARLLGDLRTVHKPEIIFEATGVYSRRLQTFLEDNGYAYTRLNPLEAKKQLDSLRVRKTDQIDAEKLAQSQFVLNRKPTYVQEEVYQNLRALSRFYQNLTEDIVRAKNRLHKVLQVTFPEIETVLSKPTGEQYWNLVTAFPYKDFVLDLSKDELLESIRQSTSKRISDKRVAYLAEKLIALANQSYCAVKKTSPMLEEVRYYGKELLRLSEQRQTVLDQMVELAQPLPEYDILLSIPGIAETTATSIIGELGDIRRFQSANQINAFIGIDLRHYESGNFLAKEHITKRGNPYARKILFKCIHNIASASHTKPCHIADFYEKRKRQSQTTSTKPHTIASIHRLIRTMYYLITHNKLYDYRSTQNQ

SEQ ID NO: 409582 - protein, 315 aa, unidentified
MEQPASTPSFVGIDVAKDRLDVHVRPAGETFAVARDGKGLEALVAALQGRDVALVVLEATGGFELSVAAALAGARLPLAVVNPRQIRDFARATGRLAKTDALDAEAIARFAEAIRPEPRPLAGEDAQALSELVVRRRQLVEMIGMEKNRVRQARARRVQKSLAATLRVLEAQLAALDDDIDGAVRGSPAWRAADNLLTSVPGIGDVTARTLIAELPELGQLDRRRIAALVGVAPVNRDSGRWRGHRAIAGGRVGVRNVLFMATLAAIRWNPVIRDHYARLTEAGRPRKLAIIACLRHLLTILNAILRTRKPWQHT

SEQ ID NO: 409583 - protein, 414 aa, unidentified
MLFIGDDWAEDHHDLEIEDEDGRRLARARLPEGLEGITRLHALVAQHAPVVWAELPPEQIAARVIVGIETDRGPWVTALRAAGYQVFAINPLSAARYRQRHSTSGAKSDAADAHVLAEIVRLDRAHHRAVAGDSDLADAVKLLARAHQTAVWERTRQVLRMRSTLLEYFPAAVQAFEDLAAPDALSVLGRAPSPDRAAKLNRGQLVAALRTARRHHVEAKAGVLLTVLRAPALRQPPTLEGAYAAVVLGQVGIITALNEQIAGLHEVMAEHFGRHPDADIYLSQPGFAVVLAARTLGEFGDDKDRFANSRARKNYSGQSPITRASGKKSVVLARYATNRRLGAALHLQAFAALSASPGARAYYDALRRRDIGHHAALRQLANRLVGILHGCLKAGALYDENIAWPQHQITTVAA

SEQ ID NO: 409584 - protein, 336 aa, unidentified
MSHYCGIDLHSNNHVVVVIDEEDKRVLEKRLNNDLSLTLKALSPYRKSLQGIAVESTFNWYWLVDGLQEQGYDLQLVNTAAVKQYDGLKYSGDHQDAFHLAHLMRIGILPTGYIYPKEQRAIRDLLRRRLSLVRAASTQLVSAQSQIWRSTGIRIKSGELRKPVFVAPPVDDYTRQAVHAVLAVYQAIQCEIDGLEESAYQAVKLTDDFAILQTITGIGKILGLTIMLETGDIHRFASAGNFASYCRCVDSKRTSNGKNKGVGNAKAGNKYLSWAFSEAAHFAVRFEPLAQRFYERKKAKTNGIIAIRAVARKLARATWMMLKHQVPYDARRMFPG

SEQ ID NO: 409585 - protein, 414 aa, unidentified
MEVLYPRCAGLDVHKESVVACIRIASGGEVVTEVQTFNTTTASLVSLSEWLASNGCTHVAMEATGVYWKPVWHILSDSAFTLVLANAAHVKNVPGRKTDINDATWLADLLAHGLIRASFVPESETQDMRALLRTRKQLVREKASHIQRLQKTLEDANIKLDSVVADIVGKSGRAIIDALIAGESDPAKLAALADTRIRSSQNKLREALSGRIRRHHRFMLNLHLQQINALDAAIIEIDREVDANLAPFRTGVELLTSIPGISTLSAQVILSEIGTDMSRFPTAGHLISWAGLCPGNDESAGKRRSTRLRKGAPWLKTTLVQCAWSASRKKASYTQAQFHRLRARRGAKKAVCAVAASILTAAYHMLKDGTQYRDLGPDHFNRRSKQQQTNRLLKRLADLGFAAELTPIPIAVSL

SEQ ID NO: 409586 - protein, 450 aa, unidentified
MKKEEKASNLVKKNRVFNGLTVSNPNSAGIDIGSRHHWVAVAPHLTTNNIRKYSTFTSDLNEICKWLKECKVGTVCMESTGVYWIPLFDLLEKSGFEVFLCNATQAKNLPGRQKTDNIDCAWIQKLHSYGLLTNSFIPDLTIRNFRSFMRHRENLIHDQSRYKLRMQKLLTQMNILLPKVLSNITGQTGMLIIKAIISGNTKPEQLLKFKHYGVKASDNTFLKALQGNYDKSLIKLLHIELKQFESTKALISNLDDEIELVLAEMLTPDSKKISSKTKLSDKEMLIAYTGVDLTEIPGVDVLSARKLICETGTDMSKWKDSAHFASWLRLSPHSKISGGKLQSSSTLNHKPRAAIIFRQCADTLKSNKSYLGDFLRRKKSQKNYGKALTATARKIAIIYYNMLKYKTPYVELGESFYSLSYKTRSIKRLDNYAKSLGYQIVKNDENIAVL

SEQ ID NO: 409587 - protein, 337 aa, unidentified
MTLYCGIDLHSNNCVVAVLDEQDRTVFEKRLPNDLETITEVLCIYQAELAACVVESTYNWYWLVDGLMDAGFPVLLAHTSALPEYSGLKYINDFSDARYLAHLVRLGLLPTGYIYPKEERALRDLLRRRLLLVRQRSLHHVSLQSLIARHSGQRLNTLQIKQLTKGQLADYLQGHALLGGEITHQARCWLETAVKRIEQELQHHIKPREDYQLLQSMSGVGPVLGTTIALETGTIERFASPGNYASYARCVKSEKISNKKRKGQGNKKNGNKYLAWAFMEAGHYGAIWDPRIKRFYQRKKAKAHILVAKKAVANKLARACYHMLKRGEVFDVTRAFS

SEQ ID NO: 409588 - protein, 410 aa, unidentified
MRYYLGVDWADQTHAVWVVDESGMKITARAVPHTAEGLGEWGRELDEWRAQGVELWAAIERPDGRVVDLLLDHGVVVYPVNPKALDRARDRFRQSGAKSDPFDARVLADFLRTDHGHLRPLQPSSEAAQELKLLTEDCQRHIRQQTRLVNQLTATLKAYYPRALEVAALTSALAREFLPAYPTPEALTALTERQWQRWARAHRLTEARTGELWAVLRQPQMPVPAHVVRAKARLMRSLMEQLMPVVATVTQYRKAIDDFFASMPAAQWARTLPIGKHGITAPTLWARLGDAPGRWESFRHLQAHAGTVPVTKRSGKQQRVIQFRFACDKALRYVVDQVAFLSLLSSAWARAYYDQQRARGHSHRQALRALGAKWLKIIFLMWERHVPYDEQYHLATMTRQQLRQRQNQIA

SEQ ID NO: 409589 - protein, 402 aa, unidentified
MNAVGIDVSKGKSMVAIMRPFGEIVSAPFEIKHTASDINSLVELINSVEGESRIVMEHTGRYYEVLAHQLSEANLFVSAINPKLIKDFDNDSLRKVKSDKADAVKIARYALDKWHNLKQYSVMDELRNQLKTMNRQFSFYMKHKTAMKNNLIGILDQTYPGVNAYFDSPARSDGSQKWVDFASTYWHVDCVRKMSLNAFTCHYQNWCKRKKYNFSQSKAEEIYGKAKELVPVLPKDDLTKLIIKQAVDQLNSASTTVESLRTLMNETASKLPEYPIVMDMKGVGPSLGPQLMAEIGDVSRFTHKGAITAFAGVDPGVNESGTYEQKSVSTSKRGSSDLRKTLFQVMDTLIKTKPQDDPVYRFLDKKRAQGKPYYVYMTAGANKFLRIYYGRVKEYLATLPES

SEQ ID NO: 409590 - protein, 340 aa, unidentified
MGIIATIGLDIAKSVFQVHAVDAAGEVVVRRKLTRGRVLAFFAGLPRCLVGIEACSSSHFWARELTALGHDVRLLPAQYVKPYLKRQKNDAADAEAICEAVTRPAMRFVPVKSPEQQSVMMLHRVRLMLNRQRTQISNALRSHLSEFGVVAPIGRNGIEQLLVVINDENDTRIPADARLCLRMPEAQLKVVKEQILENDRRVRASARETELGRRLMEIPGVGPLLASAFVATVADPHAFKSGRCLSAWIGLVPKQNSSGGKERLGSISKAGNRYLRQLLVVGAMAVIRYAERHGTRRPWLVQLIARRTTKVAAVALANKTARMVWALMTGGERYREPTIT

SEQ ID NO: 409591 - protein, 414 aa, unidentified
MSEIEQHESVEVFVGVDVGKGTHHAVALDRKGKRLLDSALPNDESKLRALIGRLKEHGQILLVVDQPATVGALPVAVARAEGAWVAYLPGLAMRRIADLHAGEAKTDARDAYIIAEAARSMPHTLRSMKLADNEVAELTMLCGFDEDLAGQINATSNRIRGLLTQIHPALERVVGPHLDHPAMLDLLERYPSPAQLGSLTQKQLTNRLVKLAPRMGKTWAADILQALSEQTVVVLGTQAASIVLPRLARQLTALRAQREEVAKEVERLVLAHPLHPVLTSMPGVGVRTAARLLIDVVSRAFASAGHLAAYAGLAPVTRRSGSSIRGELPSRRGNKQLKRAMFLSAFAALRDPISRAYYTRKISQGKRHNQALIALARRRCDVLFAMLRDGTFYSPPQPRKLIDNHIGAPPLKHQ

SEQ ID NO: 409592 - protein, 384 aa, unidentified
MSAKPKGAADVVMTGVRSPESADVEVVLGVDTHLDFHVAVALDNLGRRLGELTVPTTTKGYKRLVSWAEDFGPVRCAGVEGTSSYGAGLARYLTATGVAVAEVERPKRRHLRRNGKSDPIDAEAAARTVLAGETAGAPKSADGRVEMIRALRTARRSAVKARGQAANQLQALVVTAPDALRDRLRWLSTRRLVTAACRFRPGTRPETPEAATKLALRSVARRHEALSEEIAELDVQLDRLVAEAAPELLALPAVGTDHAATLLIVAGDNPERLRSEASFASLCGASPVEASSGKVVRHRLNRGGNRDANRALHMICMVRMGQDRRTREYVARRTAEGKSKREILRCLKRYVAREVYRVLVVAVEASPLTTGYPGASSGRLSVMS

SEQ ID NO: 409593 - protein, 379 aa, unidentified
MPQITDTRDVCCVALELSQSKWLCASAPPEGGKASLHTIKAGDHARLVEWLGRQRVRTELALGRPLQLAVCYEVGYDGFWLARLLLKAGIRTVVFDPASFLKPRRGRWAKTDRLDAEEMTRILRSWLGGDSSVAREVRVPTVEEEDAKRLGRERKTLVNERTRLVGRIKGLCALHGIMVPGKRIGRRWVAHLDEHRTGDGRPMPPYLRREIGRLLRRYEVIEELIAEVELDGQVAIIEPASSFPAKEKVQRLAMLGGVGHTSALLLVAEVYQRSFENRRHLASFIGLAPTPHASGDVSRDRGIGKAGSKLARQTLVELAWSWLRYQPESALSTWWRQRFAGAGMRGRKVGIVALARRLAIAFWQFLENGLLPEGATTKG

SEQ ID NO: 409594 - protein, 452 aa, unidentified
MALIVGIDLGRKSAHDVVILRRESAQQLGRPFRFCSTQTDIDHLFERIEAVRQEEESIAFVIDSPGKAWIPVTAALKNRGYPVYRPSSYRVRKMRQAGNRKNKSNRIDALALARCLLTYPQDTQQVFLPQKVQAQLDQLVRQRDRIVDSLRRRKQRIQDLCEAINPGLTPAAGGFLFTEAGRAFLRTYLDPRTVIRLGKKRLSIFLEKRYRLHLEEEILDGIFRACKDAVQLYKSIRQAGQMPFDEELLQADMQWEIDQLEREEQRLLHLENQIKTCNQKLDPQDAFLSLPGVQHILAGGIRACIGDIDRFSSLTKHRGFAGFYPSVRKTGDGESASMPISKMSCNRYKRYLYLAAENAYKWDVDCAAFYHKRREKGHTHTQAVCAVANGKLLPRIHQLLKKLRQAEVNGEHRPRYVFRDLEGNPISKAEAKAIIQAKWGQRKYGKKGLASS

SEQ ID NO: 409595 - protein, 308 aa, unidentified
MKIATVGLDIAKQVFQVHAADSEGRAVLRKRLRRDEVAEFFANLPPCLVGLEACCGSHYWVRVLRRAGHTVRLIAPQFVKPYVKSNKNDANDAEAICEAVSRPQMRFVPAKSVEQQDIQSLHRVRSRLVGSRTQLASQVRGLLAEYGIVVPQGIGQLRRGLPLILENAENELTDFSRRLFASLYEDLVQLDDKIETIDEQVKAIYSTSEPCQRVAAVEGIGPLLATALVAAVSDGKSFKNGRQFAAWLGLVPRQHSSGGKARLFGISKRAIRGPNLMRSATPDDRGYLVGRKASSVRVEVQSDYGLRR

SEQ ID NO: 409596 - protein, 282 aa, unidentified
MTIVMGLDQHRAQVTAEWLDTCTGELSRSRVAPADRAGVRRFLEGFRGQELEVALEATTGWRFMVEELCAVGAIVHLAEPAETAALRGNKKRAKNDRADARHHRELLMAGRLPESWIPPDHLLDLRARVRLRHALSEQRGEWQQRIQSVLYHHGCPPRGDLINTTGLAWLAGQALAAGAREQVTIALNVIDGLDAQLGPLDKSLRAYARRQPGCKALIAAYYGIGPLVAVTILAELGDCRRFSSSRLAVRYAGMETVASNCTSCSGDFGLRDVTGVRDPLAA

SEQ ID NO: 409597 - protein, 361 aa, unidentified
MPSMPSTTPPDSAEVVLGVDTHKDAHVAAVLTTLGVLLATSTFPTTAAGYRELLAWARGFGPLHRAGVECTGSYGAALTRYLRAEKITVIEVNRGDRSERRRRGKTDTLDAETAARAVLSGRATAIAKAGDGQVEMLRMFKLAKASAVKSRSQAINQLKAVLVRADPALRESMTGLSNPKLFRRCAELTVSAASDCATAAALTLRLLARRILTLTDEINELEDQITTAVQARAPRLLRRYGVGPDTAAALLLTAGDNPERLRSEGSFAALCGVSPIQASSGKTHRRRLNTGGDRQANSALYTITIACLRWDTRTQQYVHRRIAEGKTRREAIRCLKRYISRELYRDITATPDPSSRASSAA

SEQ ID NO: 409598 - protein, 426 aa, unidentified
MSEVEWVKPEPQYAAFIAIDWADKKHVWCLQGMGSEKRESGELEHTPEAVEAWVVQQCQRFGTGPIAVAVEQSRGALVFMLSKYEAMHLFPVPPTMAAKMREALYPSGVKDDPRDADLLLDVLLKHREKLRRLLPDTEATRRVQNLVEERRKLVDERTEQSNRLTSHLKIYFPQILNWFEHLDTELVCALLLRWPTLEELQRVPPAQLRTFLRKHHCRNQELNERRIQEIRQAIPAIRDRALIEAKSTVVKVTVRMMRSLLEGIAALDEKIEEAAAAHPDFFIFDSLPGAGAVMAPRLLAAFGSQRERYGSAGEVQTYSGIAPVIERSGKKKWVHFRRACPKFLRQSFHEWAGHSIAQSVWARSYYQQLRSRGKGHHAAVRALAFKWIRILFRCWKDRVAYDEVKYLVVLGRRGSPLAAVDVAISG

SEQ ID NO: 409599 - protein, 423 aa, unidentified
MMKLKYSICCGLDVHKNVIVATIVTTNKDGISEYLQKSFSTINSDIQRFHNWLIENNCYHVCMESTGKYWIPIFNYLENDIDVCLTHPKYVKAIKGKKTDKKDSKWIADLYKFDLVRCSFIPPKDFRQLRELSRYRFKLVCMKSSEKNRIQNCMTISNVGIASVLSDPFGKTATEIISYLLEHTADSMDEKAVRKLIKKGAKSKSDEIIEAIKGYNIETDQAKKLELARGHLEYLDNMITQTEVELYVRIKPYYEFVEFVSTMPGMTELSSTIVLAETGVDMDIFDDAKHLCSWCGLSPANNESAGKKKSVRIAKAGDYLKPMMVQCALAAIKSKKQPYFAIKYGRIKKRRGHKKAIIAIARMMMVCIYHMVSEKKPFTPTDYEELMDPQNHVESVVLNENNVFAYLESLGYDSSKLVKRNDN

SEQ ID NO: 409600 - protein, 343 aa, unidentified
MARFVGLDVSQKLTSICVVDDTGRRLWRGQCATDPEQIARVSSRHAGDDARIGIETGPMTPWLVHEFRARGLNVTCLDARRASAALKMQMNKTDQNDAEGLAQIMRTGWYRSVHVKSLDAHRARALLGARAQLVGMTTRLSNHIRGVLKTFGLLPGAMRGLPFDRRVEAMLTDRDDLASIVRPMLLAWRQLREQIAAFDKEVRALAKNDPTCRLLMSVPGIGVVSVLAYVSTVEDPKRFARSRSVGAHMGLTPRQYQSGEIDRSGRISRCGDTLARTLMYEAAVVILTRVKRASNLKDWAQAIAKRSGLGKARVALARKLSVILHSIWRSGEAFRWSEKPAVG

SEQ ID NO: 409601 - protein, 358 aa, unidentified
MDYYAGIDVSLELASVCIVDANGKIVKETKVESCPDALVAFFNDLRLPMAQIGLEAGPLSQWLHAGLTQAGFETVLLETRHVKAALSAMTVKTDRKDARGIAQLLRMGWFRPVHPKSVRSQEVRALLVARKLLQNKLKDLELSIRGILRGFGLKVGEVTRKKFESRIRQLVTGHAMLERIADAMLSARAGLLIQFNKLDKSVRQIARYDKVCLQLMTVPSVGPLTAITYKSAIDDPQRIKKSKSAGPLFGLTPRKYQSGETDVTGGITRVGDEMVRTALYEAANSLLSPKTRFSALKRWGLEVAQRRGLKRAKVAVARKLAVILHRMWVDGTPFRWSKADGAHTDPSRAKTSGSGSCR

SEQ ID NO: 409602 - protein, 368 aa, unidentified
MIVIGVDTHKRTHTFAWVDASTGTIGGERTIVATDAGALEALRFVQGLDGQRVWAIEDCRHVSGRLERSLIAFGERVIRIPPAMTAASRRVQRRPGKSDPIDATAVAVAALREGVERFPAAFLDEQAMEIRLLHDHRDQLIVERTRLVNRLRWHLLAVDPELEASLQPRAFEQARVRARVLRRLARHGDSARVRIARELLKRVSVLTRQAHDLEAELKLLTSMHSPQLLAESGCGPITAALLIGHTAGAERFPTDSSFARHAGAAPIPASSGNTTRHRLHRGGDRQLNRALHTIALSRARNDPQTRAYLARKAAEGKTRREALRCLKRHLARHFWKLLYTTESTPSPPATTSHPAFDVGAPALMICTR

SEQ ID NO: 409603 - protein, 351 aa, unidentified
MTMVGGFDVHRKQITFDYVDDDGLVRFGEIRPATRKTLRGWLSEHCPEGDAEFALEGCTGWRYVVDELAAAGVAAHLGDPAEIAVARGPKKRAKTDRADARLLRTLLLQGRFPESWIPPAHVLEVRVLGRLYCTLMDERRAWQQRIHAQLFHQGCPPIRALLTEAGREALARVELSAAGRQYVDSALRRIDELSAEIGPLRTQLVNFAKHQAGCRALQAHYGIGWLCAAIMWAEIGDARRFASSDQLVRFAGLDVTVYSSDRKCAPGHLSRQGSPELRWAAFEAAKCAARRGSPDYGYYHKLAAKHDGHNGKNPTLAVERKILRRCYHTLRELGDAALGLPDTQPHQEVAA

SEQ ID NO: 409604 - protein, 349 aa, unidentified
MILVGCDLHARDQQVAVLDTATGEIQEQRLTHDGSSVEQFYAGLPGPVTVGIESTGYALWFHALLHRLGHEVIVGDAAKIRAMVVRKTKTDRRDAAHLLDLLRHDRFPTVWLPDPVVRDQRTLLAHRMRLVRMRTMVKNGVHAIALNYRLALGPSLFTRAGVAQLQALSLPPHTSCRRSESLELLSWLETHIKGLDHQIEEAAHAHPEAQRLMTHPGVGPLSALATVLVLGSVTRFPTSKHVVSYVGLAPAIESSAGKHRLGRITKQGNALLRYVLGQAGQAAIKRDPDLKRLYYAVLHRRGRSRAKVAVARKLLVRLYVMLRDQIDYQTFLRRAPAATRRKELMSTTP

SEQ ID NO: 409605 - protein, 344 aa, unidentified
MGEVITIGLDIAKNVFQVHCVDSGGAVVIRKRVSRLKVLEFFAGLPSCLVGIESCTSAHHWGRELQSLGHTVKLLPPSYVKAYLKRSKNDANDAAAICEAVTRPSMRFVPLKTRDQQAALMLHRTRQLLVRQRTMLSNALRGHLAELGIVSGKGRNGTVELLGVIADAEDHRVPPAARAILEVLARQYRAIAVEIGLIDKSILAWHRTCEASRRLAEIPGIGPIVATALVAKVGDWQSFSSGRSLAAWIGLVPKQHTTGGKERLGHITKQGNRYLRWLLVVGAMAVIRYAKQHGAKNRPWLARLMQRRPAKVAAVALANKIARIAWAIMVRGERYREPKLLMAA

SEQ ID NO: 409606 - protein, 341 aa, unidentified
MDKELYFGVDVSKKTLDLAYYDGETIDWKNAHIKVSNDDAGFKKIGSWVAKVGKDFDTFLFCMEYTGLYNQNFRLWLESKEYIYGMVEPRKMHRFEPDLDDDQRSLDRIKTDELDAFRIAIYCEQNHKKILRNPSKLPSPVYFKLKRLLAERKQNTKQSTLYKQQLHDICAYDTDLSVERKKLLLKNMQENQKAIDKEIDSYIQEDASISKNYDLLTSIPGIGRIIALETIVLTENFTAISNPRKYACYIGIAPFKKESGTSVRKKTGVSKKGFSEAKADLSIAVLSAIRNNPSIRDYWIRKRKEKCGGIVLNAVKFKLVLRMFAVIKRGTPYVETDAYKN

SEQ ID NO: 409607 - protein, 371 aa, unidentified
MKEFSKYVGLDVHKATIAVSIAEACGGEVRYFGEIGNTPEAVTKLVRQLKKGEAVLSFCYEAGPCGYGLYRQLRQMGVDCLVVAPSLIPKKAGDRIKTDRRDSLSLARLHRASELTGVWVPDGAQEALRDLTRAREDMKHLQRQAKQRLLAFLLRHGKRYDGKSKWTQRHYRWLETVKFDQPVQQIVFQEYVDTVTVLSKRVEGFDGQIESAAMASVFWPIIEALMALRGVNLLTATTIMAEIGDLKRFASAPQLMAYLGVVPSEHSSGAKQTRGAITKTGNGHVRRVLVEAAWTYRHPARKTAVLQRRAERTPEAVQEIAWKGQKRLCARYRSLEGRGKLKVQVCTAIARELAGFIWAIGQAVPHATTSA

SEQ ID NO: 409608 - protein, 426 aa, unidentified
MLNSQINKIQAITSDTLIVGVDIAKNIQWAQFINFRGIEVSKHICFENNYSGFNSIMEKIEEIKSKNNFLSVIVGMEPTGHYWKTFATFLHNNGIKVVQVNPYHTKKAKELDDNSQTKSDKKDALVIAKLIKDGRYSAIYFPEGEYADLRNLSNTRLEVSRLLNICKNRIHACVDEYFPEFETVFKSFIKGKVALHILKRIPFPTDILELTLEDIISVIREAAKKSVGKKKAEELIRAAKVSIGVKVGLEGARIRLNNLLEEYELYHNQLEKIEKEMAQELEKTGYKDILTSIPGIGIISAASFIGEIGDPKRFSNPQQIIRLAGYNLVEDSSGKHKSKTMISKRGRKILRTILYKISLIVVSKNQEIKLLYKYLITRKENPLKKKQALIVISGKMVKIMYSLIKKEEVYDKEKVLGIYRKQQIVA

SEQ ID NO: 409609 - protein, 524 aa, unidentified
MASKKPRSKKSRSKAEFLQKPRGIVHPRVQAAGGPQFFGIVSIDCSKARSKWMLADFYGNVLVPPTEGAHNRVELELAVRQVREALAKSGLKDCLVAVERTGRYHHPIKNAFRAADFETRLVHPYATKQFRQPANPDDKTDDNDLAAIHLAAVNGFALLEAAPSEDWRELQLVIRQRRDLVRKCSSLCCQIREHLDAALPGYAACFDKLWDSNVAFRLVRRFESPQAFRQQGVAGLCKYLKDEKVRFQKRTVDVVHEWAQNAAAPDLAATRHRIIALALEDDRSRKNQDIRALERDIAHRLCKTPYVLLMSFPGINVISAGDFAGEMGPIENYANAKAITGRAGLFPSRYQSDRVDRANGPLVRRANRALRAVILGIADNLILCNAYFRNKAALWKMAGKDPGNSHTKVASSFCRIGFQMVAGRHVFHHPSIRERSYILDKLLAFHIEHQTPLEEALRDLYHAAEQIPKKDHADEAAKLDETFRATRKRGKTGPQPLSELIALVLIRLGVGRIESKPSGDKDPT

SEQ ID NO: 409610 - protein, 348 aa, unidentified
MKFYTKTHKHYCGIDLHARKMFLCILNASGDVLLHRNIATSPETFLKAVAPFRDDLVVGVECMFAWYWLADLCTKEGIKFVLGHALFMKAIHGGKAKNDKIDSQKIAILLRGGSFPVAYVYPPEMRATRDLLRRRNHLVHKKAELLAHIQNTAIQYNLPEIGVNLSCEGNRKEVDQHFPDPQVRKIVQVDLAMIDAYDDVLKVLEPDIEKTARRHDWHALMLLRSVHGIGQILGLVMLYEIHDIERFQTVQDFASYCRLVKCVHESAGKKKGTSGAKIGNAHLKWAFSEAAVLFVRHNPSAKKLMDDLIKLHGKGKALTILAHKLARAIYYMLKKKVPFSLEKFLATA

SEQ ID NO: 409611 - protein, 342 aa, unidentified
MTIVAGFDVHRRQITFDALDTDTGELTRGRIDATPGAVERWAARFEGRGVQVALEACTGWLFVSRALERAGAVPHLAEPVETSALRGRKRRAKTDREDARWLRTLLSEGRLPESWIPPEHVRQWRSRARLRKTLIDERTQWLQRVQATLFHHGIGGVPAELRSAAGHEFLEELELPADARERIAIALAMIDALDRQLAPLERELRALARRQRGCRALMAQFGMGELTALMTLTELGDVQRLSASRKAVRMAGIDIGVHRSDRRSRVGKLNRQGSPHLRWALYEAALAACRPTSPDHQDYLALKARGLSRTRASLTIARKLARRSFHILRELGPAALEPITTT

SEQ ID NO: 409612 - protein, 320 aa, unidentified
MRNAVGLDISKTTFDATAIIGGIEKSAKFDNDSKGFEQFKDWLDKMKCPDAHICMEATGNYYEGIADYIGSLYKVSVVNPLKISKYAESRFARTKTDKQDAKLIAEYCQTAKAQDLVIRKPIIDDGYKLKRLSALYAQLTADSTAQKNRLEAAKDTFVVKICQSNIRHLQKQIKAVKKELEKLTKQPALKAQTDRLATIPAIGRLTAVMLLNYLSGADFQTSNKFAAFAGLTPQIKDSGTSVRGKPSLTKYGNRRLRALLFMPAMVAYRIKAFPAFIARLEAKNKPKKVILAAIMRKLAVIAYHVHKKGENYDPTRYKVA

SEQ ID NO: 409613 - protein, 397 aa, unidentified
MKGFCISLDVSKGSSFYQGFKGLDEPITKPKKIEHNLEGFKELLNLKEKIKKQYNEDCVVIFESTGIYHKPLQTYLDEHDFKYTIISPLLSAKVRKSDIRGTKTDAKDCASIAKVFYLKELRIYTKIDEIYADLKEKSRYYDFLVDEMKRWKIEFRRLLDIIYPGFDRVYDDLYGDFIQTFLLEYSHPEMIRKRRLDTIAKFLEKHTCHKEAYCIRQAQIIKEYAENCASGCSSKSYLVNQFDTVIHNLNAQIKHLQIVLEEIIELAKTLPNYDSIASIPGIGENLAARILAEIGDISRFNNVSQLVAFSGVDPQIYQSGQVSGLHLRISKKGNKKLRCLLYLAVTCMIKTSRDTSIVDFYKKKKPDGLASKSALVASMNKLIRIIYSLCKNGCLFE

SEQ ID NO: 409614 - protein, 342 aa, unidentified
MKQYVALDCSLKQISVCVMTEQRRIVKEAVIAADAGSIAEFVWSQVPDPELIGLESGPSSAWLFHALRAEGLPVVVIDARHARAVLSLRINKTDRNDAVGLAELLVSGWYKPVTVKSLESHRVRTVLTNRALLVGIRQDLENQVRSVLKTFGFVLGKGRGSFADRVSEILAGKRLLLRLVRPLLKAWAAIREQLLSVDKEALAIAAQDDTCRRLMSVPGVGAITALAFKTTIDNPWRFSSSDKVGAYLGLTPRRYASGETDRAGRISKCGDGLVRTYLVEAAGVLLTRSKATSDLKDWGLRLAKRASAAKARVGVARKLSVILLRLWTDNSVFQPRVNVTAG

SEQ ID NO: 409615 - protein, 384 aa, unidentified
MRKDTLLFIGLDTHKESTEVAYVDDNRGSAVQHYGKIPTTKPALVKLARQFVSKYPGATLHFVYEAGPCGYWVYRLLTSLGHCCYVVAPSLIARKPGDRVKTDKRDAIMLAERLKQCDLTPIYVPEPEDEAVRDLSRSRETAMHDLNDARYQFKAFLLRNNIRYEGPANWSLKHLRWLTELVLPHPCQQIVLQEHLQIIMERQGRLDRLDNELIHQVKNWRYYPVVKAIQALRGVRLRVALGVIAELGDLTRFDHPRKLMAYLGLVPSEHSSGPHQRKGAITKCGNGRARRLLVEGAHSYRYTANVSTELQKRQEGLPKEIVDLAWKSQLRLCRRYARLMHRGKHRSIVVTAIAREMIAYIWAISRETVLSPVDPKQRLSRVPA

SEQ ID NO: 409616 - protein, 472 aa, unidentified
MKANHRRCCGIDVHKNSVTVCVLPPVGQPHLEVKRRKFRTFTRDLRQLRAWLKNCHVTDIAMEATGQYWRSLWNVLEGEFAQLILVNPQHIKGLNGYKTDPKDALWIAGLLEGGKLRNSWVPPRPIRELRDLTRERVNVLEDLNRAKNRIEQLCQTGNIKVSSVATDLFGVSGRRMLKAVVEGKRDAGWMADYARGTLRGKRKDLERALEGTFTDDQRWLLDKELRQVEWLEAQVVTLEQEIERRVAPFDEQIQRLVTIPGVERKTAWTIVAEIGVDMSVFPDARHLASWAGLCPGNRESAGKRMSGRTRKANRYVKRAMCQAAWAASHTKDTYLCAFYRRLSVRKGSPKAVMALAHHLITVVYQMLSRAEVYIELGGDYYDRRNKPKVVARLLHRLSRLGYYAQLSPIEPLPIPDEPPLPEAAEDGPAPPVIRKKRGRPCKCMARGIICKHMTSANLNSLIQQPSSPVRFS

SEQ ID NO: 409617 - protein, 294 aa, unidentified
MKYVGIDVHKKMCQVAVIDDEGELLDETRFMNTPEGIEEFAQRLSAYGDEVRAVVESTGNLWIQIHDRLEEHGFDVALSSPANSRLVSQSKVKTDRTDARALARLHRAGVLSTCFVPGEEDRSRRELLRHRLRLVKNRTAVRNRIHALLDKQGLRVPYKTKFSKKAVAWMQEQSLGFMDDAILHSDLALLETLDEQIGYVEKKLASLAVDDPRVRLLMTMTGVDYFAAMLVLAEIVTIDRFSSDKRFSSWMGLAPRVRQSGEKTWIGGVGGPRARAVRINGFSCHRAICIYLTT

SEQ ID NO: 409618 - protein, 365 aa, unidentified
MTSAKYIGLDVDQATIAAAVLDANGKLVMEAIVETRASSILDFIGGIRGELNITFEEGVCAEWLYGVLKSHAHKIVVCDPRKNALLKAGNKNDRIDARKLAELLRGGQLKQVYPGKRGVRTLNELAHSCLVLTQAVTRVMNRIKAVYRSVAIRCPGQRVYNQRCREQWLEQLAEPGLERRAERLYQQLDLLQPLRQQARRELIAESRKYAARQLLEQIPSIGPIRAALLIAIMQTPHRFRTKRLLWAYSGLGLEIRSSSDHDFKNGRLQRRPKQISIRGLNRNHNPELKNLFKSTVLSASLQPGPWQECYQRMLARGIKPAMARLTLARKIAAVVLVLWKRGESFDPEKLTMQAALRASALPCVS

SEQ ID NO: 409619 - protein, 404 aa, unidentified
MSTSISPDVPSAKVIVGVDTHKLVHVAVAINLLGARLATISVSADRAGYADLVAWARELGIVESFGIEGTGSYRAGLASFVRRHAIRVVEVNHCDRRKRRNNGKSDTIDAETAARSVLSGIAAAVPKTADGASEMVRQIKIARDTAVKARSAAIITLKTLIVNAPGELREALEPLTDRKLIDRCAALEPGVLVDPSESVKHALRALATRWKMLSTEISAHDEALDTITLATAPSLREAFGIGPDSAAEMMIVAGDNPQRVRSEAAFAKLCGACPIPASSGVTNRHRLFRGGHRQANAALYRIVIVRMRWHQPTIDYSRLSFQHELLTHRGVNAMAESVNGLYKTELIRRQGPWRHAEHVELATLTYVDWSRYAGDPCELRVDRSGWVTWPSRLVWSAPGTMAVA

SEQ ID NO: 409620 - protein, 494 aa, unidentified
MWGATTSSAGQNIEALRRPLHVLCAGWTCRNRRFPLVLIQEPDELGRKGGDTATKAPALVTSPDRAAHAPKERIYVGLDIGYREHVAAASPLSVFNVRRNPDGWKRVKPIHFASDAAGFGRFQRYLDRHSADPRDFLILLEPTGSYGLTVLLYLLGKGYRVLQVENRAVKDYREKIFGSETKTDDTDARLMARMGFLHELVGEEFSIQPVLLMNPDAAALRGMVHDLAKLQKEITRRRNQLQQMAALTFPELKTFFKGSTAAPAARALLEYFATPQELATASTEHVAEVLRSAHAYSHATRAAELQALARATAGVPTLTHHQWRQAWLIKQLSVVERARQELVDEVALATATHPYTRIIESLPVKSPIWTATLIGAIGDVSRFSNVNQFKAYLGWSPQLTRSGSSIDHSELAKTGVRPARNVLGQMTVIMLSSRIKATPFREVYHRLTGRGMRPASALGHVAGKTLSGAVRHAQKHDTVRPGSASKATGSGPFR

SEQ ID NO: 409621 - protein, 398 aa, unidentified
MDLPVYYELETNNGNRDYRIQIGGHYMNYNTVYVGMDVHKESFTLCSCKYEDEKASHYQRTPASYKNVLRYLAFLRTIYGEDTRFVCGYEAGCLGYSLYHQLENFNVECVILAPTTMLEQRSKRRIKTDKRDAEIIAKSLAQHNYSPVHIPTKMDNQTKEFIRMRDDHKAELKKIKQQILSFCLRQGYQYDGSGNWTEKHVKWLRSLKPVGLYKEILDEYLLTYTTLTDKLNRLDHRIEELASKEEYKESVSKLTCFLGIRTHTALSVIVEVGDFQRFASARKFAGYLGLVPGQHSSGDDRNGLGITKAGNTHVRRLLTESAQSYTRGKIGYKSRVLRLRQAGNSPQVINYADRANERLRRRYYKMVLKDGKKYNIAKTAVARELACFIWGMMTDNIY

SEQ ID NO: 409622 - protein, 331 aa, unidentified
MFPVGIDVSKNTLDLCMLYDGIKGRIKTRNIQNNRHSVENILRWLRLQHCGPEDVHVVMEATGVYHERLATELHDADFRVSLANPHRSREFARGMGIMTKTDKVDAYMLACYAFLKKPHRWEPPAPEIRYLGALLRRRDVLLGDALREENWLEKYLSTDTPADIISSCRRMAQLLREEVSNIERQIKAHIKACPALRRDYTLLTSIKSVGPQLGMHMLVVLRSHNFASAEQAAAFLGVVPIEKRSGTSVRSRPRMSKIGPPQLRAKLYMSALCGKIYNKRMRNIYDEMCLRGKPKMVAIGALMRKLVHWCYGVLKTGTVFNDESLKQVLST

SEQ ID NO: 409623 - protein, 432 aa, unidentified
MKELEKPIQAWIGVDWADQKHDVSLYEVSTGKTERYEIRHTPEAIQEWLGDLRRRYRDGYVAVALEQGRGALLNALMSCEFLVLYVINPKALSSYREAFYGSGAKSDPVDAELIRDMVRLNPTRFRPWRPDDVLTRSLRLLTEGRRNLVDQSTALTNQLTSLLKGYYPQALAWTGKLDTEWACDFLEQWPTLQTLQHSSRRQILGFYGRHPRPSIDLEQQLLDIQQAQALTQDAAVLEYSALMITALIPQLRALMVSIAEFDRKIAEVFRKHPDRLIFDSFPGAGPALAPRLTAAFGADRDRFSAATEIQQFSGIAPVTEKSGTKCWVHWRFACPKFIRQTFQEFAEHSRRWCSWAKAYYQLQIQRGKTHQGAVRALAYKWIRILFRCWKDRIPYRDEIYSKSLLHHQSPIARMIAPAVGQTEKRVRVAATS

SEQ ID NO: 409624 - protein, 355 aa, unidentified
MENVIRQCIGIDCGMKEHVASFSRMYADLRVEYVSMLTIPNGPGGFVKLSKWIRKLMDPSMPCQFVLEATGVYHETLACFLTEKGWPVSVVLPNRAKYFSKTLTVKTVNDKVSSQTLAAMGLEKKLDVWSPPDPIYNQLRQLTRERDQLKAESTQIKCQLHAEESGAWPNKSSIKRMNQRLSLIERQVEEVETSIREVVVESPEIDQAVRRMTSIVGVGMLTAVTVLAETNGFNLVRNKKQLVSYAGLDVVERTSGISVRGRSRISHRGNRYLRKCLYFPAMTAARHSNDHKALYNRLISKHGIAMKAAVAVQRKLLVMMYAIWKNGTIYDPNYESKKQQNELGQTRRPALTELA

SEQ ID NO: 409625 - protein, 343 aa, unidentified
MNEISMIGLDLAKNVFQVHGVDASGKVVLQRQLRRGAVETFFAKISPCVVGMEACGSAHHWARVIGLHGHDVKLMPPAYVKPYVKRNKNDGRDAEAICEAVSRPTMRFVAVKSVEQQAMLSVHTTRALLVKQRTMVANALRAQLSEFGIVAAQGHKGLHELMAKLQAPSEAIPEMMRRALLALVGQWQALDANERALEKQIVKAARCDREACRLMGAPSVGPIIASMVLAKVPDASVFRSSRDFAAWVGLTGRDHGTGGKHRPGRISKQGDRVLRTLLINGASAHLRQQKRRGVSDPWLRELLARRPYKVAMVAFAAKTARIIWAMLTKGEAYRDRASAPAAA

SEQ ID NO: 409626 - protein, 392 aa, unidentified
MARAARRQGGSQSRKGHAKGARSAQLEQLNLHAAGIDVGADAHWVAVPPDCDERPVQCFGAFTADLYALAAWLRQCQIETVVMESTGVYWIALFEVLEERGFDVKLVDAHQARQVPGRKTDVKDCQWLQELHTYGLLRGAFRPEDEVCVLRSYLRQRSMLVAMASRAVQHMQKALEQMNLKLTEVVSDITGKTGMTIIRAILAGERDPQLLATYRDKRCKHDQATIAKALTGHWRAEHLFALQQAVDQYDFLAQQLRACDGHIEGCLQAFVPDVEVEPPQPTPARTWRSSRSNPPSFDVPAYLEAMTGVDLTQIDGIDSLTALKVMSEIGLDMTRWPTSKHFASWLGLCPGNKVSGGKRYRIRSKPSANRAATALRLAAQGVANSHSALGAY

SEQ ID NO: 409627 - protein, 316 aa, unidentified
MAELTTQTNVGIDVSKDWLDIVVIPSGETWRTKNEEEAIRDLVKKLELLRPERIVLEATGGYEQLVAAQIYLAQLPLCRVNPRRVRYFARSLGQVAKTDKLDAKVLALFGERLKPALTHLSNENEQVLSAFIARREQLTAILVAERNRLGTAPKPLRLSLNEHITWLQNQLKQLECEIDLFVNNTPDFKEKDELMREVQGVGKKTAAKLIADVPELGYCDRKQIAALIGTAPFSRDSGNKSGQRSISGGRPDVRSVLYMATLTATRCNPVIREFYQRLLKAGKLKKVALVACMRKLLTILNAIIRDRSHWNPAFAA

SEQ ID NO: 409628 - protein, 356 aa, unidentified
MSRMAGKARIVIGGVDTHADTHEAAVLDEHGRLLAVEGFPTTPSGYQQLLNWMRGFGAVREVGVESSGAYGAALTRHLVAAGVKVVEVNRPHAHTRNRRGKNDAIDAEAAARKVLAGECTAVPKDTTGIVEAIRQLLLARASAVHARAAALHQLGELVVTSPADVRASLTAKTLAGKASQATRWRPDPARLADPAQAARIALRSIGRRIHALSDEIKLLDAQLSTLVTRAAPKTLALLGVGIVHTAQMLITAGQNIERLRSENAFAHMCGADPIEASSGKTERHRLNPGGDRDANRTLYLIAVVRLRYCDRTRAYAIRRAGDGKSKKEIIRCLKRYIAREIYYTLRADLKNLVSAT

SEQ ID NO: 409629 - protein, 350 aa, unidentified
MIIIGSDFHPEFQQIAFVDTDSGEFLEKRLDHREEAERFYRELAARGVAVRVGMEASGHARWFERLLGELQFELWIGDAAEIRTRRVRKQKTDRQDAQLILQLLVENRFPKIWVPSGENRDLRQLLWHRHRMVQARTRIMNQLQAVALNEGLRCKKRLWREHGRRQLEAFRLAPWASRRRRDLLELMDRLNPTIAELTQAIEQEAEKNPAAHYLMTHPGVGALTALAFVLIIGDSKRFHCGKQIASYLGLVPLEDSSGKRRRLGHITKQGSSILRFLLVEAAQVTVRSLPEWRSKYFHLTMRRGRKIAKVAMARKLAIGLYWMWRKGWSYEQVKKFGSHAGQPGYRHGVK

SEQ ID NO: 409630 - protein, 285 aa, unidentified
MKITTIGIDLAKEVFQIHGVNVHGKVLLRKQLRRSEMAKFFANLEPCLIGMEACGSSHHWARKLCEFGHSVKLMSPQFVKPYVKTNKHDMADAEAICEAVNRPNMRFVPIKNIEQQAILSVHRARQGFVKARTAQANQMRGLLSELGIVMPQGIRSISNRMPDILEDAENSLPGTMRWLLERLNNHLKELDRQVKELEFQIKLWHKENEASQRLKGTPGIGPITASAIVATVGNAAEFKNGRQLAAWLGLVPKQHSSGGKQTLLGISKRGDTYLRTLLIHGHSLC

SEQ ID NO: 409631 - protein, 367 aa, unidentified
MTFFIGVDLHKTQFTVHVRTEEKIESLDQIKQYPTTAAGYAEFLTRIETYKASGAAVKIGVESTGITRFFKNQVEKAGAEVTVINTLKFKVINESTKKTDKHDASTISEFLSKDMLPESYLCGKETENIRRLLKSRERLVRSVVGQKNEVHALLVSMGLPDELRCLQSKKGRRNVPDTLESHSDLVLEAQSVQLMFQIIDRMTESVRGIEKQLAELTKDDEMVNRLMTIRGCGKITAWTIRAYTEDISRFATAKKYAAFCGLVPWVQDSNETIHHGKITKRGPQELRTCFVQPVLGIRRCKDTSEWRMMQRYEYMKKNKGSGKSIVAAARKMAEIVWAMLSEKQDFNADKMKGIYKPMTLADEALLP

SEQ ID NO: 409632 - protein, 425 aa, unidentified
MNYKQNEKINQVKESTLVVGIDIGSTTQYARAFDWRGIELGKVFTFSNSREGFEAFKAWMQHLQDKYRKSDVIVGIEPTGHYWFDLGAYLEDEGILLVMVNPYAVKQTKELDDNSQSKNDRKDPKVIAKLVTEGRYSAPYTPDGVYADLRIMVANRKRLIREMTQIKNRFARWFAIYFPEYTDVFGDYEAQSSMLLLKKVCTPEAIVELGAEKINQIWRDAKLRAVGMKRATTLCETAKRSIGLKKGSSAARYEMKLLLEDYEYKKAQLDAVMEEIEKLCRKIPESEQMLAIKGIGVITVAGFLAEVGDVRRFESPRQIQKLAGLSLRENSSGKHKGQTTISKRGRSKLRAVLFNAAIPLIATNPEFKSLHEYYTTRANNPLKKKQSVIAISCKLIRVFYAILANGVTYDAQKMLSDIHRQPQAA

SEQ ID NO: 409633 - protein, 359 aa, unidentified
MDGSRSEPKMTAGLDLGDNYSYLCLIDTGSGEIMEEGRLRTTPEALRRRFASEQPMHIAIETGTHSPWVSRLLEECGHEVLVANSRKLRLIYANKRKTDEVDAENLARLARVDPKLLYPLKHRGEECQAHMAIIRSREALVGSRTQLVNHVRGAVKSFGARLPKCPARSFHKRAAEHIPEALRPALGPILEQIGSLTERIRRYDRKLETLCEEHYPETQLLRQVEGIGPLTALTFVLTLEDPYRFAKSRSVGAYLGLVPATDQSGERDPQKRISKEGDEMLRKLLVGSAHYILGPFGSDSDLRRHGEKIAARGGKNAKKRAAVAVARKLSVLLHRLWVTGELYDPLHDTHRRQEQKEAA

SEQ ID NO: 409634 - protein, 371 aa, unidentified
MSDGITHVGLDAHQETIVVAALLPGTQAPVEDRLANAPETVARWVRRLRSRSAGEVVCAYEAGPLGYGLMRQLEALGVSCVVVAPALIPIKPGDRIKTDRRDARKLAELLRAGLLTPVHAPTPEQEAVRDLCRAREAAKGDEKRVKHRLSKFMLRRGLRWTLGRKMWTRAHLEWLRGRRLEHAADQATLDDHLLALEQLTSRLEALDAKLAAWAGEVPWAEPVGWLRCFRGIDTLTALSVVTELHDWRRFDTPRALMAYLGLVPSEHSSGSKERRGAITRAGNGRLRRLLIEAAWHSRHRPAVGFRLRERRRGQPPSVIAIADRAQHRLHARYQRLQARGKPHNKVVTAVARELVGFLWAALDPRDRRTTA

SEQ ID NO: 409635 - protein, 340 aa, unidentified
MLYIGLDVHKEFCQACVIDESGRALSNERFSSTSEELDRFLDRFQDAKFVLESTGIWEFIYEGIEKRGFEAVLAHPLKVRAIAEARVKTDKVDAETLAQLLRADLIPRSWIPPKDIRDLRQLVRQRAYLVRDASRFKNRIHAEILRRGVRRPENLKTPFAQRSIRWMRSLGIPTVTSCLNCLENVQAQVEEINIQLLEEYNRRPDAQLISTVPGIGFYGALLILAEVDDVRRFHHPEKLCAYAGLVPTVRQSASSVKYGSISKDGSAYLRWILTESVHVHTRYDPESQLSRFHSRVAKRRGKRVATVATARKLLRIIYWMLVRHEPFHSHGFNPVKRVHC

SEQ ID NO: 409636 - protein, 375 aa, unidentified
MREKVRFLGLDVHAETIAVAIAEPEGEVRSLGTIPNREDSLRKMIKKLGPPDKLRVCYEAGPTGYVIYWQLAELGVKCEVIAPTLVPVKSGDRVKTDRRDAEKLARCYRAGDLTAVWVPDEGSEALRDLVRAREAAKQDQLRARHRLSKFLLRSGQRPPSGVRSWTRAYLIWVAQLRFTQMAQEATRLDYLHEVEHMRERVERLEQAITEAVKLASPALQQVINDLQALRGIADISAVTIAAELGQVSRFESARQLMGYCGAVPSESSSGKRTRRGSITKTGNAHLRRIVVEAAWSYHRPPGIWYGLRKRQESISEEAKEIAWKAQHRLHKRYLRLAAAGKDKRKITTAVARELLGFIWAIGTRAETVVRQRIAA

SEQ ID NO: 409637 - protein, 342 aa, unidentified
MRFIGADLHKKSITFCVVEVVQGKTIVVQRARILCQDTSRIEKFVARHAPCLLVVETTIGYEWFVQLCEPIAERVLLAHAGKLRVIAESTRKTDKVDAFVLAEFLAKDMIPEAWHPTARVRQHRALVRRRQKIQSRITSVKNTIRGILTRYNADRQDIFTRHGWEVAKEFDLLKEDRWVMDDLWDELLEHRARLDKVGKRLKTFATTAPALEAEARAVLDTMPGVGPVTLETVLAELGDWRRFDNADSVVAFAGLNPGVRSSDGKRYDMKLTKRGSPLLRWIMIQLAHRVKRTSARWQRMFEQLSRRTGKKKATCAVARRLLLVMYAMLRDGQAYRPPAVAD

SEQ ID NO: 409638 - protein, 339 aa, unidentified
MIFVGIDVAKDKHDCFILNSEGTVLADVFTIANNRIGFETLLSRIQSCSQGESKIKVGLEATGHYSYNLLGFLLDSGLATYVINPLHTNLYRKSLSLRRTKTDRIDARTIAMMLMSDVDLKSYSNTAYHNEELKSLTRYRFDKVKERAKLKSSVARLVNILFPELEKLVSSLHIAVVYALLSNYPGASYIANANTEELAETLCTASKGRYTKSKTAEIQVAAGVSIGSKMPAKSMELKHTIALIRELDKEISEVESAIDKITSQMDSPIFTIPGIGRHMGAMILAEVGDFSNFASADKLLAYAGLSPSTYQSGQLQNCYAHMEKRGSRYLRYALFNAAK

SEQ ID NO: 409639 - protein, 363 aa, unidentified
MEETKRRYVGIDLGKREYTMAVIGRNGKMRIHQGKTSDQGRQALYRLLEREDKVALEAGNLAFIIAREIQERAGCEVRVLNSAKLPFIWDAPTKTDKEDAMKLAHLVEERRDEKLPIVPLPSEKEIERRKTLSSYGREMKNRTRHINTLHAIFVHQGHTTIVRKNLATAENRQEAVQLLTGLEKEEAEWILKYLELHERRIKELKCKIQKEAKEDEDMKNLQTIPGVGPVVAYAFVAHVGDGSRFSTGAQVSNYIGFVPRLDYSGTIQREGHITKHGNGYLRGLLLQAAWSTVTCKMYSSLKDRYVCLTVYGGKGKKKTIVSIGRRLAELMYSVLRDKSSYESRAWTGKREYLAKLGEIKNSA

SEQ ID NO: 409640 - protein, 353 aa, unidentified
MTEYVGIDWAYRRAAWCAMSAGGVINAEGFTPADEDGLAKLVLRLGSEVKACLEMMSGAVWVRDRLRSAGWQVEVADARRVKGVAPLACKTDRVDARVLAELCRRDLVPALWIPSLEQRELRERLRRRMHLVRLRTSAMNRIFGLGTQWGLRLSAERLRRRGALELLAQRGVPAVWQRSIQEALAVIDLLEARIAPLEAELAPIARADRDVALLVTIPGVGEMLALTLAAEIADVSRFPSPGKLVGYAGMAPGVKQSGQSSRSGLPLSKAGSRTLRWAAVEAAQHAWRESNPWHQLYSDVAKRSGKNAAKSAVARKVLIASWHMLSRRQPFKPSRPRGGARTVPASSISVLAA

SEQ ID NO: 409641 - protein, 356 aa, unidentified
MEQINKLDFSGQSIYVGLDVHKKSFSVSIFSEQCEHKKFTQPPEADKLVHYLKRNFPGAAYQAVYEAGFSGFWLHDQLQDRGVNCIVAHPADVPTTDKERTHKRDKVDCRKLARHLRAGELKGIYVPTRLQLEDRSLVRTRESLVRKQTRCKNQIRAFLFFYGIYLDQEFVDSPWSQKFLRYLEGLSMMRPSGQAALQAHLEELKHLQHLILSVNRAIILLSREPGYRHWVQRLKTVSGISTLSAMILLTELCDLARFASLDRMASYAGLIPNVQASGETEHVGHLTYRRNAQLRHVLIEAAWTASRKDPVLLLAFNQYCRRMKKTRAIVKIARKLLNRIRFVLKNDQDYVPGVVQ

SEQ ID NO: 409642 - protein, 355 aa, unidentified
MNEITRVGVDLAKRVIQVCAVNAAGVRVVSRALPRDKFMLWCAQLPAGCLVAMEASSTAHHWARKLIALGLDARIIAAHLVVPYRLQGKSGKNDANDAAAICEAASRPQMRFVSIKSVEQQSMLCIHRLREGFKEQRVACINRIRGLLAEFGLVFPQKPEVLRQALPDAMEDASNELGGLARLALQQAFAQWRELDAHLHWCDERIAAHGKASAQVSQAKQLMGVGPVTASAVVATVGDFKQFKNAAQFGAWLGLTPRQNSSGGKNNLGGITKRGDMYLRTLLIQGAKSAVMTAHMRDDPISRWAHALRERSGWQKAVVALANKNARILWAVFVRGRAFDARHVSVNPAMVVAPT

SEQ ID NO: 409643 - protein, 415 aa, unidentified
MALKIVYKICCGINVHKTFVVACIASTNSKGVTTYESHRFSTYTKGLKDLLQWLLHRNCRDVCMESTGKYWIPVYNILENDCTIVLAHPKYVKAIRGKKTDKKDAKWIADLFKHDLVAGSFMPPADIRQLRDLMRYRFKLTCFKSSEKNRLQNCLTVSNIQLGNVVSDTFGKSAQAILDKLLENPADTSFDLEPLVYKSLKKKLPELRDAIDGFITPEQAGKLKVIKGHFEDLESRKAELEELILALAAPYQQELAILQTAPSISSIFTAIGIISEIGTNMEAFPSAKHLCSWAGLTPTNNESAGKKKSVRVSKAGCYIKPLLVQCANAVVTSKKHPEIRNRYLRLKKRRGHKKAIIAIARMLLTALYHMLKNGENYNAELYRKSDLPPADREITVEQAIIIARNQGYKIKPATA

SEQ ID NO: 409644 - protein, 368 aa, unidentified
MKTQTLQEPEPRTAWAGWDVAKETFQAALWIPGEDGRRRPGNLPAQSFPRTPQGAAEFLSWADEKIDVAWSGMETAGPGLRVVMEATGPYSEPLAVWLLVKRPTVSPAIISPDKTKSYAISLGLRNKTDKVDARCLAQYGAERGPAAYEPPTPERRKLRALSRNRIEVQTMRIMEDLILESVESTPLTEKLARKRIKLLREHEEMLESEMKQCVKESPDLAKDIKELDAIYGVGFLTAATVVAELGDLRRFEKARQLTSYVGLAPFRWESGKSVKGRTRMSKRGNSWVRRALYMSAMSATRGDNDLADCYKRMQAHGKKDMEALGVVMRKLLVLMRAVLISGEPFEAHHVKKSAKPVEKPADQEAKTA

SEQ ID NO: 409645 - protein, 541 aa, unidentified
MTPHKDYFLDPCPPVPSPTLPPSSVLSEALQVCNPHAAGIDIGEAEHWVAVPPGCDPQPVRRFGTFTVDLDALADWLIDCGVTTVAMESTGVYWIPLFELLEARGVQVLLIDPRQAKRAPGRPKTDRLDCKWLQRLHTYGLLAGAFRPEDQVCVLRSYLRHRQMLLTSAAHHIQHMHKALQQMNLKLTQVVSDLTGVTGMAIIKAIVAGERDPVTLATLRNPHCQHDEDDIAKALQGTWRAEHLFALRQAVELYEVYHQQMAQCDQQIKRHLETFADKSAGQPLPPKARRHKKTNEPRFDARTPLYRMAGVDLTTIEGIEENTALILLSEIGTDMHRWPSVKHFCSWLGLCPQHQISGGKVLSRRVRPGAHRVTVALRLAARSLHHSQSALGAFFRRMKARLGTPKAITATAHKLARLVYSLLQHGSAYVQQGLEAYEAQSRARKVTTMAKQAKALGYTLGPLAAQGYARCPGPLRSRPFSSSASHALRCHLSQGLTGRSVPSTPHDSQPHPSRGALQRRHPLPRASAPFLRPSAPSSRKA

SEQ ID NO: 409646 - protein, 350 aa, unidentified
MERVYHIGVDLHKRNSQVGVVNNNGEVVDMRKLVNDKNLLSDYFHLFPEGTPVVIEATTGWEWICDLLEEKGLEVKLANPYKVKLIAESTIKTDKVDAITLAQLERTNFLPLSYLAPKVVREYRELLRHRFVLVKIRSSLKNRIHSILTKRGIMVEKCTDLFGKKGREFLNSLELPPIYMEEIKTYLDIINKLDTYIKKKDEQIKKIVKEESAQAKLLTSIPGISYLSGLLLVAEIGDINRFISSKKLCSYAGLLPTISQSGEKVYHGHLKKDSNKYIRWVLIEAIEHVIKKDAVLKYKYEKICREKGINKARVAIAQKICISVYWMLKKNEPYKIRKWKKNVFRVSPIG

SEQ ID NO: 409647 - protein, 247 aa, unidentified
MAILSFCGIDVSKDRLDVVVLPEGRFCSVSNDAAGWAELVARLHPLAVSAIGLEPSGGYERGIIRALLAAGLSVRRINPNKLRQFARARGVLAKNDRLDARLIAEYVAIMPTRVVQRDDAVERLAEIVTMRRQLCDEHVAVENQAAHLEDAMLRRLSKRRLTRLEADIRLLDRRLAEMVATNAAFARLYDLLTSMPGVGAVLAFTLIALLPELGKMSRRQIAALVGLAPYDFDSGAWKAMAVGEKYA

SEQ ID NO: 409648 - protein, 346 aa, unidentified
MAHYAAFDVSDKETAIHGLDEHGKLVWKGKRPSEPEALAAALRQHAPELVRVGLETGRLTPWLFHALKGLGVPVVCLDARHARAATALQRNKTDARDAETLAQLVRTGWFREARVKSWAAHAVRHLVGARAQLVGMATDLSNQIRSLLRTFGLRVTGRAGGTFERKVREQITGSPEVAAVAEPLLAAWRAMRDQIAALDRKLIEAARSNATCRLLMTCPGVGVVVATSFAAAVAAPDHFRCSRAVGAYLGLTPRRHQSGESDHSAGVSKRGDKLLRSYLFEAAACLLIRVQRPSALKAWGVGLVQRLGFKRAAVAVARKLSVVLHAMWRENRPFQAWPTPAVAAAA

SEQ ID NO: 409649 - protein, 368 aa, unidentified
MAHCIIIGADVHVKSILVKAAADRDEPVQRSFRNTVSGRTALLGWLACWSERLGGARVLVVYETSSLGYVLYDEVMAAGFECMVVATSRLARSWRHRRNKTDERDAQLLLELGRSHVLAGNPLPAVWVPDPELRDHRELTRARTDLANKITRVKAQVKSLLHRYGLERPAGTGKGWTKGFAAWLDGLAEGPTLGWGARVALCTLLAQLGSLVKEAAYVDDHLVALSAHPRHAAAVEAMDAGYKGVGLKVALTVLTELGDLWRFPNRRSLASYAGLAPSSHESGEANDRKGHITHQGPSRLRRALCQAVQHWVRWDPEAKARYRRLVARGGRRAKKIAKVAMMRRLLIRLWHTARKAQAAARTAQDRCE

SEQ ID NO: 409650 - protein, 448 aa, unidentified
MRARKGPSDRKPKLPKHLQHINAHAAGIDVGCRSHFVAVPEGSCEQPVREFSSFTDDLHRMADWLLECGVSTVAMESTGIYWIPVFEILESRGLEVRLVNARHVKNVPGRKSDVLDCQWLQQLHSYGLLAGAFRPEEQVCALRAYVRQRMTLVRYASSHIQHMQKALLQMNLQLSNVVSDISGVTGMRIIRAIVGGEREPMALARLRDPRCRSSESTIARSLHGHFRAEHLFSLKQAVELYEFYQAQIAECDREILAQLAGFDAADAAGKGPPTSVEEALQRISGVDLTDIDGIDTTSALKIIAEVGTDMSRWRSAKHFASWLGLCPGTKISGGKRLSAKSKPVANRAAATLRMAAFTLLKSKSALGAYLRRQRARLGAPKAITATAHKMARLVYSMLKHGSAYVDVGQDHYEQRYRDRVVKNLKRKAQSFGYVLVKELETLPQPLVP

SEQ ID NO: 409651 - protein, 343 aa, unidentified
MTQYVGLDVADEDTSVCVVDQEGAVLVEAKVASEPAAIAAFIRARAPQAVKVGFETGPLAAWHWHELKQLGLPVVCLNARHAKAALACQINKTDRNDAFGLAQLVRMGWYREVQVKSYGGHYVRAALRVRALLVRSRCDFENQVRGLLKIFGLRLGKTGRKGFAKRMAELLEKQPELEALVAALLKVRETIVEQIATLDAGLQRIAKGSATIRRLMTVPGIGPITALAFASAIDNPFRFRKASSVGAYFGLTPRRYQSGEIDRPGRVSKAGDGMVRRCLFEAAVVLLTRVGGWSPLKAWAVRLSKRIGWRRAVVALARKLAVILHCIWVDGTEFWWSRGEARA

SEQ ID NO: 409652 - protein, 377 aa, unidentified
MHSENIAAYIGLDVHKETLAVAIAAPERLGEVRYYGTINNEAQAVRRLFQKLQGLYGNILSCYEAGPCGFGLYHQLTAMNIKCQVIAPSRIPKSPTDRIKNDHRDAISLARLLRAGELTPVWIPDLTHEAMRDLIRARAAAKRDSRVARQRILSMLLRTDKRYAGKHWTGKHRTRLANQSFSQPSQQIAFQHYCQSLEQIEERILQLDQEISRLLPEWSLCNLVCQLQALKGVGQLIAITLVAELGDFSRFSSPKQLMAFLGLVPGEYSSGNSIRPRGITKVGNSELRRLLYEAAWSYRTPAKVGAWLIYYRPDSVTQYSKDIAWKAQQRLCSRYRTLTAKGKKSQVAITAVARELTGFMWDIALAAQSSFSQQKQN

SEQ ID NO: 409653 - protein, 268 aa, unidentified
MTNIIYQFNIGVDVAKQKLDVSFSDQRVVSFENNLSGFKLLLKEIENKSQTRVVMEATGGYEKPLAHFLQDQGVAVSIVNAKRVRDYAKALGLLAKNDVIDAKVIRMFADAVNPKLLPAANDTQQALDTLVHRREQLVKQRAMEKQHLETVGNKDAVRSIKRTITFLDKELERIEKAIKALIKTDPTLTEKVDRLSAIKGIGDITALTLIADLPELGELTNKEISALVGVAPFCRDSGTQKGKRTTWGGRIQVRSILYMAALSAVQYK

SEQ ID NO: 409654 - protein, 358 aa, unidentified
MKESYFIGLDIAKNVFQVFTADSKGREISNKKLSRSAVTQYFAQLPESVVGIEACGTAHHWARTLTAFGHAVKLINPQRAKAFLGSRNKIDAADAKAICEALMHPGTTFIRAKSLEEQDIDHLLARRELLVQNRTQVINQIRAFLCERGIAIPQGRHNFMKNLPQIIAEKWGEFSGKFQAILTDNYSDYLDLDKKIAKLDKMIQVEATNTAPCKRLIQLSGIGPQTALALFAHVGNATHFKNGRQMSAYLGLTPREHSSGGKQRLLGISKRGNVRLRTLLLLGARAAILGIGRRRRGGDGQPVRLSYLDKWIMGMVERIGLFKAAVAFANKLCRIAWALLARGEEFNPMRLYRLEKVA

SEQ ID NO: 409655 - protein, 344 aa, unidentified
MDHFAGLDVSVKETSVCIVDDTGKIVREVKVVSEPEALLSVLSNPAYHFKRIGLEAGPLSQWLFSALAEAELPVVCVETRHMQAVLKAQINKTDRNDARGIAQMMRVGLYRPVHVKTLRSQKLRMLLTHRKLLQSKAIAIENDLRGTLRNFGLKVGIVGKVKFEARIKELVENLPDLAVLVEPLLIVRRVLREQIIILHRRLLAIVRDDEVCRRLMTTPGVGPVVALTYRATVDVPARFRKSKAVGAVFGLTCSKYQSGEIDRNGRISRCGDEMMRVMLYEAAQSMLHSKKWSWLKAWAMQIARRRGMKKAIVALARRLAVIMHRIWVDGTEFRWTREQAAAAA

SEQ ID NO: 409656 - protein, 315 aa, unidentified
MKVSLEKPVVTYVGIDVAKADLAVATTQLRAVFIRHPAGLDKLVTWLRERGAAVHVVLEASGGYEREVVAWLQAHDFPVSVVNAGWVRSFAHSQGRLAKTDRIDARVLVDFAAANAPRLTAPVSPEQQKLTDLVRARQQLVTVRTLLQNQLEHTREALARRSQEELVALTATRILRLEKAIAALIAETPELAAKVQKLTAVRGIGPTTAALLLAELPEIGSLSKAEAAALAGLAPRNRDSGTFRGQRHIAGGRPAVRTGLWMPTLVATQHNPILKAFYQRLRANGKPAKVALTATARKLLIHLNSLLKSPALPSC

SEQ ID NO: 409657 - protein, 362 aa, unidentified
MHDSITWVGMDVHAGNIAVAAIRGDSEKLLSRWETPNTRKGLERLSERLGELGEIRCVYEAGPCGYELRRFLEAKGIRCDVAAPSLIPRKPGDRVKTDKKDAEKLARLHRMRELSTVHVPTPAQEAVRDLVRAREDAKEDLMRRRHRLSKFLLRQGRRYEGNKWTQKHWSWIHSQTFADRNSETVLGEYLVAIEQELERIKRLEERIEEESKSPELASTVGRLKTLRGVGTITAMTVVSELIDINRFASPRRLMAFIGLVPRERSSGGKERRGSITKTGNAHLRRVLVESAWHYQRVPWIPAKSIQIRRQGQPPEVVETARRAERRLHKKYARMIGRGKPKGVAAVAVARELAGFIWALGRC

SEQ ID NO: 409658 - protein, 396 aa, unidentified
MGRLIVGVDVSKESFSVAGLDGRGARCFAQDCAMDSDGFSEFLKTMRVHQEDLTAIVVGMESTGCYHINLFSYLTSQGIHAVVINPLLISNFAKLSLRKTKTDKKDALTIAQFLLAHVDKISQMSVSQDMQDMRDLARERESLTHSMAATKSEIKRVLQTTFPELERHCNVFSGMMLDFLKVFPSARLIKLTKWGAVEKALEPHGRGNRISVFTPDDIIQLAKNSVGTVSPAKETILRGKISTLLHFETRRDELTDMLTDYCNSLMMDDLEIITSVDGISTGTGTTFLAEIGKIENYETHKHLIAYAGIDPSVYQSGKYEGKSRISKRGNRHLRRVLWLMTVSVILNNKNFRAYYQKKKESGLPYKKAVMATMHKLVRMPFAMLSNRQLYTESCMN

SEQ ID NO: 409659 - protein, 341 aa, unidentified
MEIVRIGLDLAKNVFEVHGVDAHDKAILRKTLRRDAVPQFFADLPPCIVGMEACSGSHYWAKVFVDLGHEVRLISPQFVTPYVKSNKNDRNDAEAICEAISRPSMRFVPPKSSEQLEIQAVHRIRQRLVSDRTRLVNQIRGLLAEHGMVVARDITRLRHALGRIADGTDVNLGGPIISELACDVHEELCELDQRIAAYNKRIRDLFRSNAMCQRIGKIEGIGPISATALVAAVGDRTCFKNGRQFAAWLGLVPKQRSSGGKTRLFGISKRGDRYLRTLMIHGARAVLAKAGGKTDARSLWIGRMRDRRHPNVVAVALANKNARIVWSILSGGKEYQPAVSI

SEQ ID NO: 409660 - protein, 343 aa, unidentified
MQAVTTIGLDIAKSVFQVHGVDAAGQVLIRRQLKRRVVLGFFQKLPVCLVGIEACASSHYWSRELQALGHSVRLMPPAYVKPYVKRQKNDMADAEAICEAVARANMRFVPTKTPEQQSCLMLHRTRHLFIRQQTAVINSIRAHLAEFGIVAPVGRKGVTELLHIVADPSDKRVPEVARACLAALGNQLLSIKEQIVEFDRMIMVWHRSNETSKRLHYIPGVGPMLATALVASVAHPRTFRSGRNFSAWIGLVPKQHSSGGKDRLGSISKQGDRYLRSLFVAGALAVIRYAKIHGTKHRPWLTALLARRPTKVAAIALANKLARMAWAMMAKGERYKEPVALVA

SEQ ID NO: 409661 - protein, 342 aa, unidentified
MQDTTISVDIAKSIFEVAVSDRPGHVREQHRLSRARFLRFFAERTPVRVLLEACGSAHHWARQLQALGHEVVLLPPHAVRPYVSRSKTDRSDARALLEAARNEDIHPVPVKSCSQQAITALHRLRSCWLSARTARINMVRGLLREFGVTIPVGARQVTPHLCRVLDQDDSPVPSALHEPLMSLATEIGELEKRISDTELQLRRLSDQIPVISLLKTIPGVGPLSATALVAFVGDVHRFPTARHFASYLGLTPREHSSGLRRRLGAISKRGDVYLRMLLIQGARAVLWASHRSSRKDRLRLWAQRVHASRGPNKAAVALANKLARLVWAVWRFGTPFQEVPAA

SEQ ID NO: 409662 - protein, 318 aa, unidentified
MNTKINQSINVGVDTGKTQLDIHIRPLDLFFSVENNDKGIKKALKTIKSHSPERIVIEATGRLEMPFVLACAEAQLPIVRANPVHIKRFAGAIGRRAKNDRLDAELIAHYGEAIKPALTVIKPKNIRLMSDLVIRRNQLLSMQTMEKNRIQILPASLHPTIKPMLTTIKNQITKLEEKLVKLIEDSPEYQAKNTILQSVPGIGNIAAASIISNVPELGYITNKQAASLIGVAPITRESGRYKGKRVIQGGRAQVRTVLYMAMMSAMQCNPVFKATYARLVAAGKPKKVAIIACVRKMVVTLNSMLRDGAMWDENTAKN

SEQ ID NO: 409663 - protein, 340 aa, unidentified
MNEITTIGLDLAKNVFQVHGIDEAGQVIVRKRLRRAQVLGFFAGLLRCVVGLEACATAHHWARELIALGHDVRLIPPSYVKAYVKRNKNDAADAEAICEAVRRPSMRFVPVKTADQQATLMLHRARELLVRQRTMLVNALRGHLAEFGVIAAKGLHNVEGLIAIVKQGEDGRVPDAALRVLTVIANQIVDVGKQIATLEAQILAWHRSHAVCRRLATIPGIGPMIATAIAATVADPSAFRNGREFAAWLGLVPRQSSTGGKARLGGISKQGDGYLRRLLINGAHTALYWSKAAKADPWIISLRARKHRLVATVALANKTARIAWAVMSKGETYRQKAMTA

SEQ ID NO: 409664 - protein, 340 aa, unidentified
MFTRKVTQRPARDNSAVEYDHYVALDWSLKTMAIAHLSRHARTPRVFERPAELKELKAYLGSLKGRVTLTFEESGFAHWLYLELLDEVDRIVICDPFQNKLLFHGPKTDKIDARKLCELLRAGLLTEVYHSTSALYELRLLVSAYDDVVRSGIRVLNQQAALTLGHRDKGKTAAFIGGILKENIDLYRRSKEEYERRFRDVARRNTLVRFQKGISGIGIIGAVKIVACVVDARRFPYAGKYFSYCGLIKHEKLSGGRSYGRRKPRYSRMLKSVYKTAALAAINGTNPIREYYDHLLAQGVAEHNARHAVARYIARISYGMLKSGTRYEPYRWRDAQHKSA

SEQ ID NO: 409665 - protein, 387 aa, unidentified
MIYYVGVDISKYKHDFCIISNTGEVIVENLSFENNKKGFQSLLELLKPYNKSDVRIAFEATGHYSKNLELFLIDQGYSFMKMNPFVIHQFLKARSLRRTKTDKADSLAIANYLMSVPYQPNSNLLYNIFTLKSLCRSREQLIKERSKYQVLLTNELDLTFPELKPFFGNNISATLLFILEKYTNTEHISLMRDYDSLKSISRGNFSYAKFAKLKELANNSVGHHDENTDLLISTYVSIIKTFNDKIDPIEKQISTIIKELNPRMLTIPGIGEISAATILAEYGDISNFSSPNKMLAFAGLEPSIIQSGTIENNGKMVKHGSGHLRYSIMNTAMIILRYSPTFYDYYLKKRSEGKCHRVALSHVCKKLLRVIYTLEKSNIDFNPSLLK

SEQ ID NO: 409666 - protein, 355 aa, unidentified
MKYMKCIEKFVENKVVFCGIDIHKDHWILCYYCDGEVVEKLRLVGSFKMLLSHTENFYYTARSVHFVYEAGFSGFYLYRQLNDAGYHCTVTPPHRVPIAHDKVKTDKRDAQKLVHYLANGLLKKVYVPPLSSEADRQLLRLRHSYQKKLTRVKNQIKSHLHLYGIPRPDGIATWTKKYLSWLEGLVFEESNLRYVLDQYLAEYRFHREQIAEITKRIRTLAKSESYQAHFTRLVACKGIGLITAMTFLLELHDISRFAAALQFCSYLGLTPSQYSSGQHVRLGHITREGNPHLRRALVESAWTVIRYDPFLAEKYARLRYKGTNGKKAIVAVARSLAVRLRRCLLDEQPYVIGVC

SEQ ID NO: 409667 - protein, 406 aa, unidentified
MQAIIERCCGLDVHQETVVACLLVGAPGTQPTKEVRTFRTVTRELVALRDWLAAAGVTHVGMESTGVYWRPVYAVLEGHFDQHIRNVPGRKTDVKDAEWIADLVRHGLIAKSFVPPRPLREMRELLRYRRKLTESQAAERNRLLKLLETANIKLASMMSDVFGVSGRAMLRALIEGRASVEAMADLARGQLRRKRSDLILALEGRMEEHHRFLLATQLRRLEAIEQDIAALDLRINERLEPYRMPHALLMQIPGVDWLVAAVLIAEIGVDMSVFVSVYHLSAWAGVCPGSHESAGRQKSGRARKGNVHLRTMLVGAAISAARTRGSYLKDKFHRLKARRGAMRAALAIAHKILVSAYHMLAKGLAYHDLGEAYLDQIGQTRTVANLKRRLERLGYRVTLEPKAKPA

SEQ ID NO: 409668 - protein, 391 aa, unidentified
MKKRYASVAYGGMDVHRKFSTVTLRDAAGVVVARERLNHEDRRKMREHLRCWPAGTPLVMEASFGWPWVSDEVEAAGHAPRLSNCYKLEQMRKARGQVKTNAKDADLLSLLPAEPTRWWEVWRAPPAVRDLREWMRHRADLVVLQTEVKNRVHALLARHGVFHPFSDLFGGQGRAFLHRLCQDGRYADGVLPPGTLEAIRSDARVLLALRAELATITWRLRGRLVWDPLVRRLKTIPGIGLILAHVLASEMGDIGRFRSHRHLASYACLAPRSDDTGEANPTQAPLGRHLGDRGNRMLKWAFIQAAHGAVRHGGRWRALYDRHTAGGTKDRGRGYIKVARQLTKVVFVVWSREVDYTETPPARPGSRLSRRRKDSRPGTGQPLVAMVQAKA

SEQ ID NO: 409669 - protein, 455 aa, unidentified
MPKSTTGDRPELKPVNFGAAAIDIGSKMHMAAVDPACTDTPVRTFSTFTQDLHELADWFTACGVTSVAMESTGVYWIPVYEILEQRGFEVILVNARYAKNVPGRKTDVSDAAWLRQLHSYGLLRGSFRPDAEIATLRAYLRQRERLVEYAAAHIQHMQKALMEMNLQLHHFVSDITGATGMRIIRAIVAGERNPEVLATYRDVRCHSSTETIRAALVGNDRHEHVFALSQSLELYDVYQAKMLDCDRKLEVLIGALNNKGERPVGKLPKPRVKTKQVNAPTFDVRTALYGVLGVDLTEIHGLGPSLALKLIGECGTDLRAWPSAKHFTSWLCLAPGNKISGGKVLSSRTRRSSSRAAALLRLAATTVGRSDTALGAFYRRLASRAGKSKAVTATARKIAVLFYNTLRHGMSYRDPGADQYEQQYRSRVLANLQRRAKSLGFVLQAIPRDADPAVS

SEQ ID NO: 409670 - protein, 349 aa, unidentified
MEHYIGIDVSKATLDLALINASGQLLAMVQTENSTKGLVRSWRRWSKEFDLVKDKCLICLEPTAHYSDQPLIALVELEIPTWLANASDMVRSLGMRRGKNDQLDAQRIADYARRFHDKARRFTRDHLRLRTLKKLLSRRRLLVDRRKAHQVLLKDYNPLMPAELRRTMDRLDKAMLRAYDKAIVEVEAMILVEIQRDPELQRQYELVLSVESVGPILAAHLLALTDGFARFGSARQLACHAGVAPYEFRSGSSIRGKTRVSSFAHRQLKTLLHMSAVSSISRSGELRAFYDRKVAEGKGAMSVLNAIRNKIIHRVYAVLARGTPYTKKTLANAIECGGAGCAASKGGWG

SEQ ID NO: 409671 - protein, 353 aa, unidentified
MNNPATESTIHTIGLDIAKNSFSLHGFDEVGNTVLAKDLRRGQVLSFFEKLKPCRVGLEACASAHHWARELIKLGHDVKLIPAQRVKAFLPRMKNDAQDAKAIARALRDAEMRFVGVKSVDQQASLMLFKARDLLIAQRTQVINALRGHFAEIGIVVSQGAHEVKLLVDLVLHDDETQKLPPVMRHALKALVATLANVEDEIKVLNVAIAQQHKASKPSQRLATVPGIGILTASLLVATVSEPEQFAGGREFAAWIGLVPRQHSTGGKASLGKISKMGNRDLRRLLVVGAHAVLYRIKSGKTQSPLADWARRLLAKKPFKLVAVALANKMARIAWAIMVKEDCYNPSHATATN

SEQ ID NO: 409672 - protein, 382 aa, unidentified
MSANGMARPCSRPASNRSWDGASRQGARHSQTLNAAIAVVGIDIGKNSFHIVGHDERGAIVLRQKWSRGQVEARFANMPPCLIGMEACVGAHHLSRKLRAQGHDARLMPAKYVRPYSKGQKNDFRDAEAIAEAVQRPTMKFVATKTADQLDLQALHRVRERLISQRTGIINQIRAFLLERGIAVRQGLRFLRAELPRILATPPDVLSPRIVRIVEDLAGDWRRLDERVERLSDEIEAIARLDAGCERLMSVPGIGPIISSAMVAAIGAGDVFTRGRDFAAWLGLVPKQISTGDRTILGKISRRGNRYLRVLFVQAAWVVLIKPKTWERHGLKPWIEAAKKRLHHNVLAIALANKLARIAWSVLARGRAFEARKMDQAANQSA

SEQ ID NO: 409673 - protein, 456 aa, unidentified
MGHARAKRVPAKVVEDEEYQLTHERSCGIDIAKDKGDVCVRLPPAREGGRRTSRTETVPATWRDITELGGRLLADGVAIVVMEATSDYWRCWYYLLEAMGLSVQLVNPSHARQLAGRPKTDRLDCQWLARLAEMGLLRPSFVPPPQVRALRDLTRTRLALARDRTREWQRLEKLLEGALIRLSSALAKMAGSESALKILHAITDGERDPGKLAALARGNVKGGRDGVRASLEGMMPGPHHIELIRIHLDLITALDRKVSAVDDLIAAHMGTLRDAWGITADGVPSADPGPGAAVLPAAQRLAEIPGVSLELAIGIIAEVGLDMTCFPTAAHLVSWAGLSPVARQSGQRAGNPKKGKGDAYLKGYCGQAALGASKTAGTYPGARYRRLARRIGPAKAQVAVARTILVIIWHLLADPAQRYRELGPDWHQRTTDRARRIRSHLDQLKALGYDLPPAAA

SEQ ID NO: 409674 - protein, 390 aa, unidentified
MIYVGIDVAKDKHDCCILGPDTEELFQVFTIRNNSDGYGELFHKIESVSKDKSQIKIGLEATGHYSYNILGSLLDHGYHTFVINPLHTNLYRKGQSLRKTKTDKVDARSIAEMLVTDNTLKPYTGTSYHSEELKSLTRYRFELVKERAKLKTSVSRLVNILFPELESLVPTLHMNSVYRLLQELPGAYFIASSNLTHLKALLADASKGRYGREKAIEIRETAKSSIGSLMPAKSMELRQTIHRIDTLTSDIKEVEQSIQKIMDECGSPITTIPGIKYRMGAMILAEIGDFTRVSKAEQFLSNAGLSPSTYQSGKLISSYARMEKRGSKYLRYALFNAAIYVSGWDERFRLYLSKKRAEGKHYYVAISHVIKKLVRTIFRMEITHTSYQPL

SEQ ID NO: 409675 - protein, 340 aa, unidentified
MFTNFVGIDVSKSKFDLALIKGHDKDHVIQGVFDNTQKGIKTMNKFLEKEHHVQLSETIFCMEFTGVYCRPLTIFFVEQDCHVWIEMPVNIIRSLGLQRGKNDRVDAHRIALYAYKNRDDIKLWKPQRDVILQLRDLLALRERLITSQKALTNPIEELLAMGAKSAAESVRKNCQKTLSAIENEIGQIEKNLDDIIKDDPQLKELFQLATSVPGVGKLTALFMICFTNEFSMYTNPKQLACYCGVAPFEHSSGSSVRGRTRVSHMANKVLKRMLHMGAMSVISRDPELRDYYQRKVAQGKNKMLVINAVRNKIIHRLCAVIKRGYGYQSEIIFKERLVLS

SEQ ID NO: 409676 - protein, 383 aa, unidentified
MRNIGIDLGKKPALCEVSAGEVVMRRTVSDLEAFVTVLGPGRGAPAKVAIEACREAWVVAARLKEWGHEVLLVDTTRAKQMGIGQHRRKNDRIDAETLARAVEKDQVPRAHLLSRPRQKLRLELGTRRALVEARANLVTTARGLARAEGWKLPSCEVEHFVENVERMQLPEEVRAGLDPLLQTLKAFEPRIAEIEDRLDKLCAPEPAHELLKTAPGTGPVVSAMFISVIDDPHRFDTAHQVEAYLGLVPSENTSGKRKLGSITKQGNSYTRALLIQAAWSILRMRSSDPLAMWGKQVRDRRGKRIAAVAVARRLAGVLWAMWCRGTVYEPGRLGVKTAAGLEQQAQSMLVRAAAFKRAAAKRFNKTRDEGGTNAIVSHVTQST

SEQ ID NO: 409677 - protein, 355 aa, unidentified
MNDAKYIGMDVHQATISVAVRDSRGNLVMEAILETKAETILQFIRGLHGSLSVTFEEGTWAAWLHDLLQPHVTRVLVCDPRKNALLKVGNKNDRIDARKLSELLYLNKLSSVYHGEPGIRTLKELARSYIAMTRDLTRVMSRLKAIYRSWAIPCAGQQVYAPRYRAEWLAKISEAGVRRRAELYYQQFDALAALRQQARRELLAEARKHPAMRLLRQIPSIGPIRAALLIALMQTPNRFRTKRQLWAYCGLALRTYTSGEYRFVGGQLKRSKKVLAVRGLNINHNHDLKNIFKGGATRAASTVGPFQDFYQACVARGVKPHLARLTLARKIAATTLLVWKKGVRFDAEHLKQQAA

SEQ ID NO: 409678 - protein, 374 aa, unidentified
MDDPSVAYVALDTSKLRNAVAIAEAGRDGEIRYLGEIDNAPAATAKLARRLAKKHATLTFAYEAGPTGYGLYRQIKNLGHDCIVVAPSLIPHKPGDRVKTNRRDALSLARQLRAGDLTAVWVPDPHHEAVRDLTRARGAAVRDQRAKRQQVSALLLRLGLHYPGKTTWGKAHMAWLAGQKLAHLEQRIALEEMLHAVRQAGDRIARLEQAIHAAVPDWSLAPSATALMALRGIEFIAATTLLAEIGDLTRFRTPRELMAWLGMVPSEHSTGERTRRGPITKSGNRRARSVLVECAWSYRHPPRVSRDKLARLEAAPPAVRDIAWKAQSRLTARYRALRRAGKLDVVAITAVARELAAFIWAVGVAVGSGRTPEV

SEQ ID NO: 409679 - protein, 373 aa, unidentified
MPKYSTAFGMDVHLRSTTVCALDADTGEAVTRRFPGNPWGEIAGWMDGFPGPSLAAYESGYLGFAPQRELAGLGVECVVAAVSKIPRSAADSASKNDRNDAARMAKAILAHDISPVWVPSPEVEGIRDLAGAYDGATARLATAKQRLLAFLARRGLVYGGTTPAGNPRKYWTYDFLRWLDKVRPEDDGGVRALAALRNEVEAAAEARADLLSEYRAAVDASPIAAEVAALQSIKGCAFALAAAFSAEVGDFTRFRSGRQVTAYFGLAPRQRSSGDSVRLGGISGAGNALVRKLAVEGSWCYAAARHQPKLMPRDTGVPLEIRMHGRKGSERLLRRREEMLARGMTAAKANAATAAELVRWLWALGMMCREGAE

SEQ ID NO: 409680 - protein, 423 aa, unidentified
MGRSIGLDVHRDFCEVAIADGGRARSAGRIAATLEQLELFAQSLVATDRVVLEATGNALAIARILGPQVAEVVLAHAKQVRAISHARVKTDKVDARVLADLLAADLIPAVWIGDERCRMLRRLVSRRRGLVKRRTQVKNEIAAALHRNLKGRNPASDPFGKKGREWIAAQQLPIDERLTVDGGLRQLDFLGAELAQIDAIIAQQALGDQDVRRLMTIPGIDVVCAATLVAVIGDIRRFPTSRHLVGYLGLHPTIRQSGNGPARHGRVSKEGSAAARHVLVESAWSAAKSPGPLRAFARRTAARRGRHVATVAVARKLAVLAWHLLTRGEDYAFARPSLVRRKLRRLELTAGAPRAKPGPKPDPIWNTTTDSAEKRLALQAEAAYRRLVADWQASGPKVGAGATPERASSRPLKGKAARQATSS

SEQ ID NO: 409681 - protein, 350 aa, unidentified
MSIVADHHGFVIGVDCHAKNHVYSIAAARGDILATRQFPATKAGMDRAISWAGKHTGGDMSALFAIEGTATYGANLSRHVVRAGYKRVEAPWTATSCKGKSDELDAGKIARATLACQIDQLRDPRADGIRGALAILLASRNQIQTAKTSAKNQLTALMRFHDLGIDVRKAVSMKQVKTIAIWQARDTGDIAVFYAMREAIDLAQSILQLEKKADSNRAEILALVRQCEAAPLLEEKGYGPISVAQIFVSFSHAGRIATEAKFAALAGVNPVPASSGNTVRHRLNRRGDRQLNRAFHTIALTRMRTDEETKAYVARRRLEGKTDREIRRCLKRYLARHAYRTLNHTPPTQP

SEQ ID NO: 409682 - protein, 400 aa, unidentified
MKIHKYIGLDVHKEKTTVAIAEGDRNGEVRHYGEVSSDLVTTERALRKIRGEDGVLHVAYEAGPSGFVLHRHLTRLGMECAVVAPSKIPQPKGVRQKTNRRDALQLARLHRAGELTAIHVPDAVDESVRELTRCRSEASRELKAAKQRLKSFLLRQGYHYQGKANWSEAHQRYLRELVLPLAALQSVLEECLLAMAQATERLTRLEELVAAQVPQWRMYPAVRALMCFRGFDLVAAATLVAEISEIHRFAHPGGLMAFLGLVPREKSTGDERRLGGITKAGNSQARWILIEAAQHAGKTPRVSAPLARRQEGQPELYRRIAWKAQVRLHKRHWHLTCRGVMAGKVKVALARELVGFVWDLLRQVPPPKATPAARPAVSTPVSRSATRRPKPAPATSVLVG

SEQ ID NO: 409683 - protein, 401 aa, unidentified
MKTVLSVDVAKNKSMIMLMNSDGEIFIDTKEINHNLEDFEKVKEEIKEINPQNLTVFMESTGTYHLPVERYFKENGFNTLVINSLTTKNNYDTIRKTKTDKKDCYRLAKLFFVNEVEYHELSKKDLYANLKAMTRQYFYLLQQNVSCKNRYKRLLNICFPELEKIFKSTRIYDDTALNFIKEFPHAEIVKEKRIDALYNNLYKTNGRNLNFYKRLSETIKIASANSYPGVDKEHKDVKNLSDMAKIVQNNNNVINELRDKMIETAKKSPYYEIINSFYGIGEILTAEILGELGDITRFDSPKQLIAFCGLDPTIKQSGKSINVKGAISKRGNKYARYILFNCSQMVVKLGASNYPEHPVYIYYQNKKAEGKHYYESLTACSTKILRMLYSMCKNNKQFLEN

SEQ ID NO: 409684 - protein, 445 aa, unidentified
MAPVTIERVTEKAPNLSRRSHQMKNSTARKLKQVPKGYLVMGIDPHKKRHAAVTMTQDFTTHSKFKFNNSKEGFEVALERIRAEMVRTGSKGVIFAIETGGHYWRNLAYFLDERGIPFRFINQFTLKRRREGKDLNRRKNDYRDSEVAAQLLCTGEFTDTKLQHGIYAELRAAHNAYRRLVKERTRITNLIKGLLDGIFPEFTQVFKDPCGLTALSVLSICSMPGIIAQMMGEEFVNVIRAKHQGHLMRKKLRALHYAAQVSIGIEAGAWSVSSEISFLVEKLRLIKRQVWSIDETLARLVDETEEGKYLLSIIGLNYTSVAGLLAELGSFRSYQSAKQLIKMAGSNPTESESGGKRSAHTPMSKKGRPVLRYCAWTAVIPMLRFNPDFRTWAKNLRERPVHANPLNGREVVGAALNRLLRLAFALVKNHTFYQVPRLEIAPVVV

SEQ ID NO: 409685 - protein, 409 aa, unidentified
MRAVGRAIGLDVHRDFCEVALVESGALRSAGRITTTPEQLELFAQSLAPTDRVALEVTGSAWEIARILGPHVARVVVVSPADTGIRQARAKTDRLDARTLARLLAAGELDAVWSPDECTRVLRRRLARREQLVRARSRSKNEIHAVLVRRLVGRPPVSDLFGVKGREWLRRLELPVEEAETIEACMRHVEFLDSEIAAVERQIARQALDSPQARRLMTVPGVNVICAASFLAAVGDIRRFPTSRKLVAYLGLDPRVYQSGSEPARGGRISKQGSPSARWALVEAAWSVIQQPGPLHAFYERIRARRGNKIAVVACARKLAALFWSLLTRGENYAHGQPSLTAKKLRLLEIRAGAPTRKGKPTGTWATRQQMRTAERELAQQAEASYKRTVSDWQAKAKKAGASVTPGRA

SEQ ID NO: 409686 - protein, 403 aa, unidentified
MEVFLGVDWAEHQHDLHLEDHEGRRLAARRIEDGLAGVQALHALVAEHAVPEEVIVGIETDHGLLATALLSAGYQVYAVNPMSVSRYRDRHHVSRAKSDKSDAKLLANMVRTDRHNHRLAVADSELLEAIKVLARGHQNLVWTRQRLTKLRSALRDYCPGALTAFEDLDHPDALAVLAVAPTPTQARALTLPQIKAALKRGGRRRYLDTRAADIQAALRLPQLTTAPLVEDAYSTTVAAQARLIGDLTAQIAAVEAKLTQRFSQHPDAELLLRLPGLGVVLAARVLAEFGDAPNRYADAKARRNYAGTAPITRASGTSEVVLARLIRNKRLFDACYQWAFCALSASPGARAYYDAHDPGPKTGKIARRKLANKLVGILHGSLTHEQPYDPDLAWAHWPIHDAA

SEQ ID NO: 409687 - protein, 475 aa, unidentified
MVKSNKRIARHIGGSKGNLLTENLKSTNLEKIMIVPLEIGKSYHKALIADYFGSLFKDPFEFHSSQEGITFLHNTISRVSREHHLETTFIGLEATGHYYQKPAACLYELGYKNLFVLNPLSTAQCRKAGLTWAKSDDIDLRAVGQALLSGYGTIYRPEKPLWENLRQICRYRRFQVRHQTALKNKTHVMLDHLLPGIAELKMFKNPYLFHLASLEFFTKYPCLDRIARLKPRYLVEFFRRRGRRLSPEDAHQIIRWTRQTFNQQSPANSTREEILKSLLLELKLLSENISRLEVKLLGYLVRLPAVLLLSINYIGPVRAGEFAGEITPFEQYPNSRALIKGAGLDATRFQTSTYEAPNHPISRKGSRNLRYISVDIGDALMRHNDYFAFFANQLMERGKSKDCACIAATTRFMRVAFWMIKDKKPFQSPKGEGVSKDPLAKIETFLTQHQASDLIEEYISSAKKYFHQPQPKEDH

SEQ ID NO: 409688 - protein, 357 aa, unidentified
MSKSTTDFSSVIRVGLDLAKHVFQVHAIDAAGAVVVAKAVRRGKLLEFFSALPRCVVAMEACSTAHHWGRALNALGFEVRLIPPAHVKPYVRRSKNDAADAAAICEAAGRPGQRFVGVRSIDNQAQLMRHRTREMLVGQRTQLFNALRGHLAEIGVIAPQGPQHAYTLKELLTDGADGNGEILVPDSVRAALAPLGLLIDELDARIAAIDKELKKQAKADATARRLMTIPGVGPIIASAVLASVQKIDAFGSAREFAAFLGLTPRQNSSGGKERLGHITKMGDRYLRKLLVSGACSVLFRRKGHNDALRHWADQLLTRKSGASKFKLVAEALANKLARVIFAVLTHGGKYEARAIAA

SEQ ID NO: 409689 - protein, 334 aa, unidentified
MRRQPKLIAGVDISKYTLDIALISDKNETASFKINNCAADLRNFVRGIKEQFKLRNADLAFCAENMGLYGIFLTDVLIKMHIQLFLESPLQIKRSLGLHRGKTDKADAIRIAEYARKNFTSLREWTPPRPCINKMQELLTIRKRLLKVKVILKGNSKIERHYLDSVSAENLAAHSFRSLDAVTKDISAIESQLTTIVQSDETLSHLYDLVTSVPGIGNVIGIHLLIYTNEFKDFANPKKFASFCGVAPFPWSSGISVLGKTKVSFYANKELKSLLHMAAMQNVKKTDSSLAKYYQRKVMEGKNKMSTLNALRNKLIHRIFSCVMNNRRYEERVS

SEQ ID NO: 409690 - protein, 342 aa, unidentified
MEITTIGLDLAKSIFQVHAVDASGTIVVRKALRRAQVLPFFAKLPRCLVGIEACGTSHHWARELTKLGHDVRLMPPAYVKPYVKRGKTDAVDAEAICEAVTRPTMRFVAVKSREQQAALALHRTRDLLVKQRTQLVNMIRGLLAEFGIEIVRGLGHAIELAARIAKGDAPEVPELAVRVITGLAGQIGDVQTRLAALEKELLAWHRSNELSQRLGTIPGVGVISATALAASVVDPGRFRSGRQFAASLGLTPLQNSSGGKERMGRISRMGDRYLRRLLVVGMTSLVRRARARPDSVDPRIATMLARKPARVVTVAAANRTARIAWAIMARGGTYRAPVGLAA

SEQ ID NO: 409691 - protein, 406 aa, unidentified
MLKINPLSTLYVGIDVSSKSNYVCALDFYKNKYINSSFANNQPGAEELALKILECLKEHPDITTIVAALESTSVYSIHIANYLSSCEELMRFKPYVFVLNPKCTANYKKSYIGLGKSDPIDAFVIADYARAGNIESEPWRGSQFLALKRLTRHRLHLVECMTREKTYLVSNLYLKFSELQMLEGDDQPFCDIYGATSSSVLMEYLSPEEILVSSEEDLIAFLAEKSRNRIKDISKTADLLKKAARDSYRLDKALYEPLNVSIASSFNCIETFKREIKVIDNAIEKEIKGLNPNAFIILQSIDGIGPVFAGGIIAEIGDITAFHSSDALAKYAGLTWKSNQSGDFDGEDTPMIKAGNRYLRYYLGEAANSMRKHNVEYGAYYRKKYNEVPKHQHKSCLLYTSDAADD

SEQ ID NO: 409692 - protein, 385 aa, unidentified
MLYIGIDIAKNKHDLACINENGEIMIANFKFANSYQGFVQLKLRLEQLSPLTQDIQIALESTGHYNYNIVTFLRELGYNVFTYNPLIIKEFAKSQSLRKTKTDRKDALLIARKLRFDVTPERYQTDSIVDELKELTRYQNRLIQSRSKCKNLYVRLLDIIFPELHAIVSNLHNQFIYELLTHYPSPQKIARARFSSLLKIKRLTADKAHQIQEEAKKTIGKDSPALVLELGQLIETIKHYDKQINQTQEEINRLMNDLNSPITSITGIGTRLGAIILAEIKNIHNFKNPNQLQAFAGLDPAIYQSGQMDNTGHMVKRGSSYLRYALIQAAKLISIYSPHFKAYLRLKISQGKHYNVAVTHVAKKLTRIIFHLLKTNQQFDETKLR

SEQ ID NO: 409693 - protein, 422 aa, unidentified
MPMKVVYQTCCGVDVHKSFLVATIIKTTSGVQPSYQKKRFSTFNNSILEFKKWLLDNSCRDICMESTGKYWIPVFNLLEDEINVTIANPKWVKAVKGNKDDTKDSKWIGDLFRLGLVPGSYIPCKEIRILREFTRYRYKLTSCRSSEKNRFQNALTACNVALDSVVSDIFGKSATSVIDYLLEQSDNSINHEEISSRLLRSLKKKSESVIESIEGYQMTDSQKYRMRLVHAHMDYITSTIADIDSMINSLVEPYNNAVKLLCTIPGVDCNSAVTIISEIGTDMTQFSNSKRLCCWAGLTPGNNESAGKKKSVRITRAGVYLKPALVQVAHAAVKSDKSPYYKAKYERIMKRRGKKRAIIAIARMILTAAYQMLSTGEMWNPIDLYKIDMPAPLKEKQKEKAIKQAKKLLIAEGIVTEEQLAS

SEQ ID NO: 409694 - protein, 344 aa, unidentified
MGEVSTIGLDIAKSVFQVHGVDVAGAVVIRKRVSRARMLEYFSDLPPCLVGIEACPSAHHWGRELQALGHTVRLIPPSYVKAYLKRSKNDANDAAAICEAVTRPSMRFVPIKTKEQQAALMLHRTRQLLVRQRTMLSNALRGHLAELGIVSAKGRNGTADLLNIIKDGSDSRVSSAVRGILDVLARQYGAIGAEIASVDKNIMALHRACEASRRLAEIPGVGPIGATALVAEIGDWKTFSSGRSLAAWIGLVPKQYSTGGKDRLGSITKQGNRYLRWLLVVGAMAVIRYARKHGTEKRPWLGQLMERRPMKVAAVALANKIARMAWAIMVRGERYKEPKLLLAA

SEQ ID NO: 409695 - protein, 340 aa, unidentified
MSLYGGIDLHANNSVIVFINEQDEVIYQKRLPNDLSTILEQLAPYHTEVKGLVVESTYNWYWLVDGLMEADYRVHLANPAAIQQYSGLKYTDDHSDARWLAHLLRLAVLPEGYIDPKAERAVRDLLRKRAHVVRQHTANVLSVQNIMARNTGARFSVKRIQELTKQELTTLLAEEPQVLAVTSSLVVLDCLRQQIKMLDKTVHKRLNHTPSYEQLLTVDGIGTILAQTIALETGTISRFPTVGNYASYCRGVDSKKISNGKRKGTGNVKNGNAYLAWASMEAAQFAMRFQPAAQRFYQRKLAQSRNNTVLARKAVAHKLARACYYIMRDLVPFEATKAFG

SEQ ID NO: 409696 - protein, 440 aa, unidentified
MTNDSTQINSSTVTPVTAPIVCWVGLDWADKKHCLVVRSAPGAEPRRHLIEHKPETLDAWFLQLRKEHPQGRIAVAIEQSRGPVLYALMKYDFLALYPVNPRALADYRRAFKMSGAKDDPLDADLLCELVCLHADRLRALAVEDVPTRQLRLLVEARRDFVNDRSGYSNRLGAVLKSYYPAALEVIGADLDSAMALEFLRRWPNLARLKAAKPTTLRAFFYAHNSRSEERIAQRLERVKQAVPLTEDPALVEPLQLQMERLVQQLRGLNQTVEQYDLRIKAVFGQHAEAWLFKELPGCGPVLAPRLAAAFGTLRANFQSASDLLCFSGVAPVKKESGNQKVVQFRYARPLFYHQSIVEFAKCSIAQCQWARLLYEHQLCKGKSRWAAIRTVAFKWVRILWRCWQDRKPYEESQYLRSLQRDGVQIYQSLYQSVAPAPPAL

SEQ ID NO: 409697 - protein, 242 aa, unidentified
MSGAVVGIDIAKRKFDVALFLKGKFKHKACMNNKQGFEDLSRWLKKQGVEHVRVCMEATGTYGDELATYLYDAGHLVSIVNPARIKGFAQSELLRTKNDKVDAGLIARFCVAMNPGTWTPPPPEIRRLQSLVRRADALIDMRTQEQNRLGTTHETVEPSIKEHIGYLDQEIEKLKRQIAEVIDHDPNLRGKRDLLDSIPGIGETTIAVILSALHVFEGVKCVQKTVAFIGLAPKETLSGSSI

SEQ ID NO: 409698 - protein, 333 aa, unidentified
MYYSGIDLHSDNCYITTLDDAGAVVKRQRVENDNERVLGYFNSLPGSHQAVVESTTGWYWLNDLLQDNGIELVLAHAKYLKAISYAKVKTDKVDSQTLAILLRQELIPRAHKISRDLCGLRDTMRIRLRLVQQRSACLLRLNSIQMKFNGSVPDPYRFQLAVLEHTKDTFTSQILALEKSLHPVLIPNDDIQRLLNIPGIGKLSAFIIYLEIDGIERFASDKHFVSYCRLVPAADNSNRSVHHRSSKDGNKYLKIAFSDAAVHAIQYYPEYKRFYQKLARRSNEATARTVVAKELAKIVYYILMNKSQYKGLKGQPIGRIKSLQWPRLASSFA

SEQ ID NO: 409699 - protein, 352 aa, unidentified
MTIIGVDFHPEFQQIASVDTDTGEFQEKRLSHREEAENFYRTLAGQKVRVGMEASGHARWFERLLSELQFELSIGDAAEIRTKRVRKQKTDRQDARLILQLLLEDRFPQIWVPSWENRDLRQLLWHRHRMVQARTRIMNQLQAVALNEGLRCKKRLWREHGRQQLESFRLAPWASRRRRDLLELLDRLNPTIAELTQAIEQEAEKCPPAQRLRSHPGVGALTALGFVLIIGEADRFHCGKQVASYLGLVPLEDSSGNRRRLGHITKQGSSILRFLLVEAAQVTVRSIPQWRSKYFHLAMRRGRKIAKVAMARKLAVGLYWMWRKGWNYEQLTKFGSHAGQPGNRHGVQSNTE

SEQ ID NO: 409700 - protein, 396 aa, unidentified
MIYVGIDVAKDKHDCFIINSEGEVLYDVFTIQNNITGFEDLLFKIKTAEPNPDKVKVGLEATGHYSCNIVGFLKNAGLDTIVINPLYTSLSRKSISLRKTKTDKVDARTIASMIMSDVSLKPYSDTLYHNEDLKSLTRYRFDKISQRAKLKQSISRLVNILFPELEKLVSTLHGKAVYALLTEFPSSRHIASANLKHLTHLLYTASKGRFKRASADQIRETARRSVGSYLPAKSLELKHTIKLIAELNDEISEIEAEIKKIMDVVDSPILSVPGIGMNIGAIIIAEIGDFSRFENPDKILAFAGCSPSTYQSGQIYSSHAKMEKRGSRYLRWALMNAAFYVCNWEPTFAAYLAKKRAEGKHYYVALSHAVKKLVRLLYHLETIGEKYQPQEMSSGA

SEQ ID NO: 409701 - protein, 402 aa, unidentified
MKAPKQYLRFCGIDMAKQKHVACIVDQNGQYLLRPKSIRNDADGYQQILNCLKQSGRTKSILTGMEATGHYWYSLHDFLTRQGYTVAVLNPIQTAQQAKQAIRKCKTDKYDAFHIANLLRTGQYKAAVIPGEFAMTCRQITRLRYRIVKQAAMIKQLVNSRLYPAWPEYEGLFSNKFGTTSMKLLQTASTPKELMELDPDDLSELIRKASRGRFGPAHTQKILHSAKNSVGMQRGHYGISTGIKFLLEQIVALEPVRKKMDAEIEKLAAKLPEYLFTLPGATELTIVSLYGEVDPIETFKRPSQLTAFAGLDPKVFQSGQYDAPRRHVSKRGSSYLRRTLWQMAYRAVCNEGDLRDFWRRKHRQNKHHLVAVTAAANKLCHIVWRIMTDRRDYIPKGYKHKS

SEQ ID NO: 409702 - protein, 357 aa, unidentified
MDKVLKQCLGIDVSKSRLSLSLGFLTDKLVKEFLIHPDVCNDSSGYKELLNWLKASVDTSTELLIVMEATGVYHQGIAHFLYDKGYSVCVMQSGRVKRYAQSLDQRSKTDALDCRMLSMLGLERELRLWSPPSAELQQLKMLSRERSSLLKDKTVETNRQSAIVSGVYKDKSASKRRKQRMKLLKDQIVSIEEEMRELISNNEFLKKKLVFLESIPGISFISAATVIGKTLGFESIGNAKQLTSYAGYDVVLRESGNFKGKTRISKKGNSHIRVALHMPSMTCVRCNPTLKQFYARLKPKKAKPLVALIAVQRKLLILMFTLWQNEEVYDADFEKKKQQKHKTLAAQDNKLINQYVS

SEQ ID NO: 409703 - protein, 406 aa, unidentified
MTAVMIGVDPHKGSHTAVVIGVAEQSLGKLRVDASAGQAGELMAWASEWPERTWAVEGAAGLGKLLAQQLVAAGERVLDVPPKLASRVRLLEAGDTNKNDPNDARSVAVAALRSRAVRQVAAEDHGAVLKIWARRHRDLARARNQVACRLHAVICDLIPGGVRKEISAGHAAKVLDKITPAGPVETARRDLAAQFLEDLRRLDSQLAETKKKLAAAVRASGTTVTEVFGVGPVNAGTIIGDAGDISRFPSRDHFAAYNGTAPVEVSSGNRKIYRLSLRGNRRMNHAIHMAAITQIRHAHSDGRAYYDRKIAAGKSHKDALRCLKRKISDAIYARLRADAAITSPPAGKGPGGQKGNDSDSSAAGSHPGRRLFGQATPGPATTLRPQARTPRQQPRTRRLKDLEKTR

SEQ ID NO: 409704 - protein, 343 aa, unidentified
MKITSVGIDLAKNVFQVHGVDEGGKSVLKKQLKRDQVASFFANLPPCLIGMEACGSAHHWARKLQSFGHTVKLMAPQFVKPYVKTNKNDVADAEAICEALSRPSMRFVPIKNAEQQAVLALHRARQGFVKARTAQANQIRGLLGEYGIVIAQGIGHIAKRLPEILEDGENDLPGSFRQLLDRLGDHLKELDRQVGELEAQIQLWHRAHEASTKLAQIPGIGPITASALVASIGDAKSFKNGRQLAAWLGLVPRQHSSGGKRVLLGISKRGDTYLRTLLIHGARAVIRVAERKAGYADGWLARLMGRRNKNVAAVALANKNARTVWALLAHGRDYQADYEPAAE

SEQ ID NO: 409705 - protein, 355 aa, unidentified
MREHSSKRTKKAAEAQWSVGLDLGDRNSHYAIVDRDGELIEEGECANTPAGLANAFAGMPAARIALETGSQSGWIVRELTKPGPEALVANARELRGIWGSVRKNDRRDAEKLARYARLDPALLHPTRVRGEQAQLELSELRVREALVRARTLLVTAARGLANTHGERLPKASTKSFAVRATGELTPTLVAILGPLFEQIAVLSEYITAADRSLAQATERDPAAARLMEVPGVGPLTALTFVHTIEDPSRFRHSRDVGAYLGLTPRQSQSGDRDPQLPISKAGDVRLRRLLVQCAHHILGPFGRDSALRRWAQELASRGGAAGRKRAVVALARKLAVVLHRLWVHEDHWRPFPAET

SEQ ID NO: 409706 - protein, 347 aa, unidentified
MNKNWFIGIDVSKKTLDASIFVAGEVINRFPHIQVRNEKQGFKELLRWAKEQGVNTKDALFGLEFTGYYSDALEQFLTGKKLYYAMLPTTVVKHYQRGTRDKNDKTDSAKIADYLFRFNGTECIKQRVLPSKAMQELKALKSERKFYVQQRVACENRQKVAKSKQEQKHLQKAIDLFNEQVELIEQQMAEVVTSDEEIYLTYTRLLTIPGIGPVNAINTIANTQNFTAFETARQYAKYVGVAPSEHSSGTSVRWRGRPSPHADLQAKADLSMAAMRAVEFDFEMSQCYERKLGNRKDDKDVQRKALNAIKFKLIRQMFSVAKQHKNFAVMQQRQTQAETHSTEERVN

SEQ ID NO: 409707 - protein, 354 aa, unidentified
MSGVITVGLDIAKHVFHAHGVDDQGRALFSKRISRGKLLDFFAAQPSCTVALEACGGAHHWARQLTQLGHEVRLIPPAYVKPFVKRQKNDAIDAEAICEAAQRPNMRFVAMKSEQQQAAGLVFRTRDLLVRQRTQLINAVRGHLTEYGWIAPKGPSHVAELAHLIEEKRMAGSLPEAARAMFRLMLDQLASLNGRIAVLDKEIARRAREDEVSRRLMTIPGIGPISATAIAALAPPVETFAKGRDFAAWLGLTPVQRSTGGKQKLGATSKMGERTLRRLLIIGSSAVVQQASKRGAAKGSWLEQMLARKPHVGDGCARQQDGADCLGASCKARGLPSSGRSQRMILADLRSSEM

SEQ ID NO: 409708 - protein, 355 aa, unidentified
MLTVGVDAHKRVNMAVAIDAAGREVARWRGPNSVEGWQQLAAWAAARDAEVRWGIEGAWDDGRGLAQRLVEAGATVYEVNARWTAAGRRRARTPGKSDGLDARAVALVVWREAGTLPPVAADDETGVLDLLVAERDGVVIETTRLRNQLHQLLLQLDPDYRMRIPSRTTQQGLRALVAYATGGARPLQAQRAAAVRRLALRLQLLVGQARELAAQIRALAATRYAPLATICGVDLLTAGALAGLLGQGRRFASDAQLAAYAGVAPLEASSAERVRHRLNRGGNRQRNALLYRIALTQARCSPAARAYLARRVSEGKTKRKALRARKRFIVRAVWRRWQDCLATPAALAALAALAA

SEQ ID NO: 409709 - protein, 535 aa, unidentified
MLQHKGDIAMATGVNSDKSRTSRRSRKIGTAVLGKPRGVVLDRVQAVGPERFGVVSIDCAKFRSKWMLADFYGNVLVGPTNVEHLRLSFDLMIQQLRRAVEKHSLKDLIVCVEMTGTYHRPIQRALRKAGFETRLVHPFATSHYRIAEHGDQKTDDHDLVAIFRAAINGFGLLEQPIPSLYRELQIFSRARRDLVRKRSKLQHQIRHHLEESLPGFAALYGTEMWDQIVPVPLLKLIGDQGGTVDVVLKLGEQGLVDELKKAGVRGFQRQSVSRVIAWAANTFESNEMAVAYARVWRDLLEDWSEKTTQIQALERDLVALLVQTPYVLLLSYPGINVVSASELAGEMGPIENYASANSITGRAGLFPSRYQSDTVDRYGKLSRFRNPRLRGVLTRMADSLVKCNAYWKLHCDALKAKNIDGRDIRCRVANRITRSIFQIVSGRRLFDHPSRLDRHYVMEKLLGYQREHGIRPSEIVRNLEAAAIQIPARYHQEQAKPLQQVCEKAKRSRLKEPKVIGELLVAVLAKLGVNELESD

SEQ ID NO: 409710 - protein, 315 aa, unidentified
MSKMVVIAGIDVSKDKLDIHVLPSNQTFVVNRDPRGLTDLARRLRKAGVEQVALEASGDYERIVLETLEADGFVVHLLNPARVRAFAEAIGILAKTDPIDARLIALYCQHFPDAGLTRRPEQARKLGEFLNMRDMLLKLAGEIRNSLEHVREPGLKALADTLSDDIAAKLEDVDDRIAKVIADDAASKRKACIIRSFTGAGPVLTSSLLARVPELGSVTRQAAARLCRAAPSDRQSGRSKRRSSIEGGRDRVRPVLHMAALAAMRSNSVIKAFAHKLSAAGKPRQLVIAACARKMVVILNAMLRDDTEWKYAKAA

SEQ ID NO: 409711 - protein, 339 aa, unidentified
MEQTIRTNVGLDISKDTYWATITVLSTSQGIKNLKSEEFKNSKAGFRMMERWVKEAAISTSALHFTMEATGVYHERIAHYLHDRQYPVHIVLPNRAKKFAESLDARSKTDKLDSKALGRFGAERNLTTWYPSNPIFKELKSLTRERATFIHHRTQLKNNLHALKHSHNPNKATLKRMESTVKEFDKNVKSIESEIIATIKGNDELRRKIAFMVSIPGVGVITAAVVAAETDGFSMIGNVRQLCSYAGLDIVIKESGKWKGKSKISKKGNSHIRAALYLPSLSTIRYSQQHKAFYERIVDGKKKPKIGITAVSRKLLVLMYTLWKNEEKYEDKHLLKEAA

SEQ ID NO: 409712 - protein, 445 aa, unidentified
MLRIVYKRVAGLDVHKKTVVATRMRVTEDDRIEWETKTFGTTTPDLLELLDWLYEWDVTHVAMESTGDYWKPVFNVLEDTFEIWLVNAQHVKHVSGRKTDVKDSEWLAELMLHGLLKPSFIPPKPQRALREMTRYRTTLLQERTRIVNRVQKLLEGANIKLASVAADIMGASGRAMLAEIATGQTDAELMADLARGRMRNKIPELEKALTGIVQEHHRFVLARQLDHIDYLDEKIEMISAEIGKQLESMSWPDEPSQPGVSESAEEGTGSADESELPLTWDAAVALLDTIPGIDRRIAEVILAEMGLDMSQFPTADHLVSWAGLAPGNHQSGGKRYSGRTTKGNKALSSIMVQAAWGASRSKDTFLKSRYHRLAARRGKKRAIVAVAHSMLVSVWHMLTYQQPYQELGSDYFDERKKESKVNYLVRRLEKLTGGAVSIELQPVAA

SEQ ID NO: 409713 - protein, 363 aa, unidentified
MHESTTVTVGLDVHARSIRLAAVRADELLEERTLPYDEQAVERLLRRWPAVRCCYEAGPTAFGLSRHLTEGGIDCAVVAPGLVPQRPGDRVKTDPRDARKLARLLAGGLLEPIHVPTPELEAVRDLVRAREDARLDRMRDRQRLSTFCLRHGRLLPTSAWTVIRRKWLGEQRFEHSAEQITFDTCLHAVDLVDARIGQLERAIRETAEQGPWSELVARLRCLRGIDTLTALALVAEIGDFGRFKCAEEFMAFVGLVPSEHSSGEQRRQGSITKVGNSHVRRLLVESAWHARRRPKVGYGLSRRHRGQDAAVIERAWRCQQRLDQRWQRMAGRGKPHQKIVVACARELAGFVWAIATEQPLRTT

SEQ ID NO: 409714 - protein, 341 aa, unidentified
MNQVSTVGLDLAKHIFQLHGADSAGAVVFRKKLRRGQLLAFLATLPPCTVAMEACGSAHSWGREIAKLGHTVRLIAPAYVKPFVKRQKNDAADAEAICEAAQRPTMRFVALKSANQQAAAVVFRTRDLLVRQRTQTINALRGHLTEFGVIAAKGPVHTSKLIAALEDPASDLPQVARAILAVLVEELRSLDERVAVLDREIALHAKESAVARRLMTIPGIGAVTAAALTALAPPAQTFRRGRDFAAWLGLTPVQRSSGGKERLGKTSKMGERSLRRLLIIGASAVARWAARKGVPAGSWLGRMLARKPAMLVRVALANKMARIVWALLARGGVYRAPVAAV

SEQ ID NO: 409715 - protein, 346 aa, unidentified
MKITTIGIDLAKAVFQIHGVGERGKVAVRKQLKRSEMSSYFANLEPCLIGMEACGSAHHWARKLQGFGHTVKLMSPQFVKPYVKTNKNDKADAEAICEAVSRPNMRFVSVKTVEQQAILSVHRARSGFVKARTAQANQIRGLLSEFGVVIPKGIHSIMKRIPEILEDGENGLPGTMRNLLQRLTENLKEMDRQVDELEKQIQLWHRENEASRRLAEIPGIGPITASAIAATVGNAREFKNGRQLAAWMGLVPRQNSSGGKQNLLGISKRGDTYLRTLLIHGARSVIQYAEKKADESSWLRKLMARRNKNVAAVALANKNARTIWALLAHDRVFRLDYTRADVAAVA

SEQ ID NO: 409716 - protein, 369 aa, unidentified
MNNYTTVVGLDVHKESIAAAVLPQGHNDVTEKVSIENHPKAIKKLVNRIMRQGPVEFVYEAGPCGYAVQRQITGLGQHCAVIAPGLTPVRPGDRVKTDKRDAVNLARFYRSGDLTEIRVPTSEEEAARDLPRAREDVLTDRLRARHRLSKFLLRQGRVHRERKFWGVAHRAWLRTQKFDFPSLQLTFEANLRAYDEAEARLETLDQQTYDLAQEPRYRTAVNCLRALKGIDTLGALILVVEAQDFRRFGTAGEFMSYTGLVGSERSSGEKVRRGSITKAGNAHIRRVLVEAAWSQRYPNIVGKELAERRKGCPKEVLQIAKKAQARLHRKFLRMIGKNKAHQVTVVAVARELAGFVWSIGQHVPVEATV

SEQ ID NO: 409717 - protein, 385 aa, unidentified
MRGTSFIPTDYDIFAGLDVDKRSLSVTFSNHQGFIRSLRMPHSVAHLVNYVRKHFAGQKLAFAYEAGPTGYGLYDGLVAHAYPCVIAAPSMIPKAPGQRVKTNRLDSRALAEYLRGGQLQSIHIPSPVYRELRHLTQLRDTFLRQVVAMKQRIKSLVLLEGIAFPPAPAGSQWSFRVRDTLRTLPCSNTVRFKLDQLLESLEFSERQVLKATKEIRRFCRTDPEVAQGITYLMTVSGIGWIVASQLLARIGDWRQLKTVRQLGGFLGLVPTETSTGERTDRGSITHTGDGRLRSKLIQAAWAAIRHDGELREFYRAVCRTHPRHLASRVAIVAVARKLSVRISAVLMQQRPYVVREKGPSTALTQEETVPQGTPRRQAEPGANNS

SEQ ID NO: 409718 - protein, 376 aa, unidentified
MEHNSEAFIGIDTSKLKNAIAIAESGRDGEVRYLGEIETTDAATRKLVKKLATKYRKVTFCYEAGPTGYGLYRLITSLGHECSVVAPSLVPKKPGDHVKTNRRDAVGLAKNLRAGELTAVWVPDTRHEAMRDLSRARETAVDDLKSKRQQISSLLLRLGLHYPGEKTWGKSHRNWLASLKLDQREQRIVLEELFGAERQAQERVDRLVSAIIDAVPEWSLAKIVTALMAVRGIDLVAAVTIMAELGDLSRFASPRELMAFLGLVPSESSTGDSVKRGGITKAGNRRARRILVESAWSYRYPPRISRDKLAKVAAAPEPVRAIAWKAQTRLSSRYRALIKRGKRPTIVATAIARELCGFIWAIHRAVTAPGGRQLVS

SEQ ID NO: 409719 - protein, 407 aa, unidentified
MDLLKTVFGIDVSSRKSNVCIMVNDQKVNDYAISNDMVGFNRLLGDLKQVTKPQIIFEATGVYSRRLQAFLDMHELRYVMMNPLEAKRKTKDDLHQNKTDKLDALYLAKLQSEHPQRLAYVQNKEYQELMANNRIYEQASHDLITNRNRLHKAIQLTFPEIEHLLVNPRGKNYWSIVLRFPHSDIVLETKEADIIDFLKGLTGIGKKRANDIAQSLIRLAKVACPAVKKNSAHIRGLKMAINNILSAEEECQTALQEMAKLAPKRDLEILTSIPGIGENTALRIISELGDIRRFNNPSQLNAFVGVDPQVYESGNLTAHLSISKRGTAIGRKVLYLAINQIQSAKKAGNPCHIADYYEKRKRSSETASHKKAAIASIHKLLRTIFALIKNDQLYSYDVAKHNQRLLS

SEQ ID NO: 409720 - protein, 358 aa, unidentified
MDGSKERPRTTAGVDLGDNYSYLCLIDQESGEIVEEDRLRTSPEAFRRRFASERPPMRIAIEAGTHSPWASRVLEECGHEVLVANARKLRLIYANKRKTDEIDAENLARLARLDPKLLYPLKHRGEESQAHMAIVRSREALVGCRTQLVNHVRGAVKSFGARLPKCPARSFHKNAAEHIPEALLPALGPILETIASLTERIRDYDRKLQTISKEHYPETELLRQVEGIGPLTALTFVLTLEDPNRFERSRSVGAYLGLVPATDQSGERDPQKYISKEGDEMLRKLLVGNAHYILGPFGSDSDLRRHGEKIAARGGKNSKKRAAVAVARKLAVLLHSLWVSGEIYEPLRSAHRSGGQAA

SEQ ID NO: 409721 - protein, 353 aa, unidentified
MEQFIGCDAHKRFSVFVAVNEKGQSGEALRVAHDRQLYRQFLARLPPHSSIAVEASGSYSWLIDEMERSGHRPKLCNPLEAKRRMGLTNKTDKLDARGLAILLRNGTLPEVWIPPSELRDQRELLRLRIFLVRLRTRVKNRIHGTLARYNVQVPGADLFGVTARLQLGARLPEVPEHSREAIEQELAMLDFLETQIESAERRLEAIMKVSVEADLLKTLPCVGKILSMVLMLEIGRVDRFPTAAHLASYAGLVPRVHSSGGHTRMGQVCGNVNRNLKWAFVEAGNLIVINQRRLAGSHVVRLYQRIKRAKNHQKAVVAVARHLAEAAWCVLTKQEVYREPHGPRQRALSSTHG

SEQ ID NO: 409722 - protein, 473 aa, unidentified
MIKSVGIDLGGIGEHRVRCLDENAQMCDGFGFDTTRVGLAKLEERIYKDGSNPVIVFEPTGLAWLLVAVYLKSRYPDSRLVRVQAQKVVALRKYLNRSSKSDKIDSLTLAKMPFIDPEKLEEIYLPPGKIYAIQRLARQRKRLESEIAGHKKRIGSIVDGHYPGIRSAFSDAWSAHARAFLRSRLNPLTVVRAGENALCRFLLRARKHGRIEASVESHGVYLVCRELAALYKASSSVETIDDDFFSALQEEISREMKLLEIKESESAVIAKRLEKLYLEIHPSDNLRTIPGVGDITAPVFLATIGDPARFRSQSAFANYCGIVPGANQSSDSEAKGLRMTKAGPPIMRWALFQAGGIGRAHDPQLACIYYREMVHNGKNHMQSMGAVMSHLSARVLAVLREDKPYQLRDKDGRAVSREEARRIILEKYQVPEEIRRERRKRKTPGSPSLHKKLREMLVPRVHEAAETPQPVVT

SEQ ID NO: 409723 - protein, 358 aa, unidentified
MQTSGKNIFEGQLTIGLDLGDRSSAYCVLNAAGEIVLEHKLATTPEAMKQVFGSLPRCRIAMETGTHSPWDSRLLMALGHEVIVGHAQKVRLITKSRKDDRLDARTLARLARIDPELLSPVKHRSAQAQLHLTEIRARAALVSTRTALVNAARGLVKSYGERLRKCHTQQVGREMTRELSMGLREALKPLLQEVESLNERIKEYDRRIEKMAKEMYPETALLKQVKGVGDLIATAYVLTIEDPHRFRKSRDAGCFLGLQPGRRNSGESEPQMRISKEGDEYLRTLLVQGAHYILGPFGEDSDLRRWGQKLSARGGKNAKKRAVVAVARKLAVLLHRLWVSGEVYEPLRNSQKPMSTAA

SEQ ID NO: 409724 - protein, 436 aa, unidentified
MKDLLEISCGLDVHKEKIVACILTGPLGKPTRSEIREFSTLIPDMIALRNWIVSKNCHHVAMESTGIYWMPIYEILEDAFYGDITLLVVNARHMKNVPGKKTDMRDSEWISTLLRAGLLNGSFIPEKRIREFRDLNRYRKSVIRDITSQKNRIEKFLQSSGFRLSSFISDIFGASGRNIILHLIEHGQIDKTALDSCLKTKTRNRIDEILMSVNGTLSEHQKAFLRILMTHYDSLKKHLAEIETSLEEDMAPFALQVEQLNSIYGISTTASCAIIAEIGIDMKPFKTAEHICSWAGLCPGNNESAGKRKSTSVTKGNPYIKSMLCEIAWVIAGKRNTYLSAWYWRIKQKKGAKKAIVALARKLLVIIYTMLKQGTLFDESCFETRRKHCEQKQLSRYIRELEKHGYHVVSENKVIRNGVELINFIMEKHLASFRCF

SEQ ID NO: 409725 - protein, 428 aa, unidentified
MKYTQNEKILQVTERTLVVGVDIAKERHVGRAFDFRGVELGKRIEFENRREGMEKFLDWAYKIMKANGKETVIVGIEPTGHYWLCFEQYLRERGIKVVLVNPFHVKRSKELDDNTQTKSDIKDPKTIAMLVKDGRYTEPNIPEGIYAEMRVAMNIYERLQKQMNVLKNQIINWLDIYFPEFLEVFSDWEGKTAIATLREMPLPCDVVEKEVEGIIEYWHDKVDVRAISLRRAMDLVETAKRSIGKKEGRKLARQEIKYLLEEYELLKKQIEEIEGEMAELLREVPNGEQLLEIKGVGVKTAVGFISEVGDIRKYEDARQIQKLAGLNIIENSSGKYKGQTCISKRGRGRLRSSLFKAMITIVAKNEEFKQLHRYYTTRQNNPLKKKQSLIALCCKLIRIFFAILKKGIRYDGNKMLSDIKREALAITA

SEQ ID NO: 409726 - protein, 453 aa, unidentified
MEKSSTDDQLMNLEVLHPNAAGIDIGNAAHYVAVPPDRDTEPVRRFACFTQDVRAIADWLKQCGIVTVAMQSTGVYWLPVYEVLVERGFEVFLVNARHTKNLPGRKSDVQECQWLMKLHTYGLLNNSFRPTEEICVLRTYWRQRDEHVKAASAVIQRMQKVLTEMNVQIANVISDISGVTGMAILDAILKGERDRYQLADLANPRIQASKEEIARSLEGNWRPELLFVLRQQRDLYHEYQKRIGECDEVIQLHLRTLEDKAQPENKPENPKRGKRAGGNAPRFDLRGELYRITGVDLTRIDGIHVMIAQTILSEVGLDMSRWPTEAHFASWLGLCPDNKITGGKIYHRGSRHVENRAATALRMAATSLWRSKSYLGAKFKRLRTKLGAPKAITAMAHHLARLVYRMLKYGQEYIDKGMEYYQQRYQNQQIKWLEKKAKDLGLTITLAPASVAR

SEQ ID NO: 409727 - protein, 486 aa, unidentified
MQCPSALRWDEAADANATARGTEGTEEPEGEAAVGCRGPRHYQGQARFTRRKRPLTEPAGPRPQAITQPPKEAAAQQPQACGLKKADLSLKDMASSTPTRSETQTRGASERSAMRSVALDVGVRQIALCEVKDGQVLERATVRSVSALEKYLGPNTPKAHVAIEACRDAWALHDRLQQWGHEVVMVDTTRVRQLGVGQHGRKTDRIDAQTLALALERGHIPKAHVRSPHRRQLRLHLSVRRALVETRAQYITTTRGLARARGEQLGSSSSQKFLQLLQQTPLEESTRGMVEPLGQVLEKLNEQIAQVEAKLLQLCEQEPAIDRLTTVPGISLITAAAFVSVIDDARRFRYAHQVESYLGLVPSENSSGGRRRVGSITKQGNSYLRALLVQASWRILRIDSEDPLAKWALHLASRRGKRVAVVALARRLAGLLWAMWRDQTVYEPGRVGMQSARGLERQAQSVELQAEAMARAARKVRHKYGPVPAE

SEQ ID NO: 409728 - protein, 339 aa, unidentified
MQNTKNNIYRHYIALDWSKQIVAMARMRDSSTRVEVQMFQPDPKVIKAQLKKYTGRKILTIEETTTSHWLYVELKDSVDKILICDPYRNSLLKDGPQTDKIDAKKLCILLRNGMLKEVYHTMDKDYEIRKLVSAYEDTIKGSVRLQNQRSAIFRSEGKNHKKEEIITTSPIKRFVTKKQIELLRKYREIIEEYEDQFKKIGNENKIIRYLDRISGIGLKIAVKIYAVVIEARRFENKYKYWAYSGLIKYYKESGGKTYRSKKVRYSKILKKCYKSAALAAISGRNDIREYYEYLINKGISYEAARNQIARYIAKVSYGVMKNRTEYRAYQWRENKSTLV

SEQ ID NO: 409729 - protein, 368 aa, unidentified
MKKRITFVGLDTHKNSIEVALADDGRNTEVRLYGSIGGDLASLDKMIRKLQATGTELRFVYEAGPCGYQIYRHLRAQGLQCDVVAPSMVPKRSGDRIKTDRRDACNLARLYRAGELTAIYVPQEDDEAMRDLVRGRQDAINAQRKVRQQLGGFLLRHGFRYPGKCAWTLAHRRWLAGVRMPHPAQQIMLQEYIHSVEECTQRVHRLTEQILQLMPDWRMRPLVGALQALRGVAPVVAATAVAEIGPMGRFERPRQLMAYLGLVPSESSSGGSVRRGAITKTGNGHARRALIEAAQAYSHPARISRVMRKRQEAVPEPIRQIAWKAQLRLCARFRKLTARGKSRNRVVTAIARELSGFMWAIAKQVPVP

SEQ ID NO: 409730 - protein, 333 aa, unidentified
MVDGTEGSHNKEGSTKMSKHSTICAGIDTGKRRLDVALDGSGEQLQVDNTPEGHAALSDWLRQHRTKRVGIEASGGYEWAVVAALRRQGFVVIVFQPAQVRAYATFHLQRAKNDKIDAALIAACTAATKKIHSPPDPRLAAFAEPLTMIEQITDDTTRLKNRCESCRDPRIRQLWKEEIARLKKLHRSELKTLVAAIRQHRDLAERLDLINSVDGIGLPTAVAILVRMPEIGRITREQAAALAGLAPYDQDSGDHVGVRHIAGGRERLRGALYAAALPAAFRWNPQLIALYRRLTAAGKLHKVALIACARKLLVFANTVVARGTPWVPQPAAV

SEQ ID NO: 409731 - protein, 387 aa, unidentified
MPQPNDLSRSLVPFRQDSTLVAVVEMSRSSWLVAGIVPGIGRHPLKKLDPSEEALLALLRQWRDEAAGAGCTIARLAVAFEAGRDGFWLARWLRTRGVEAHVIHPTSVAVSREHRRAKTDRLDTELLKRAFLGWLRGEPDHCGMAAIPTLEEEDAKRPSREREGLVGERTRIVNRLKGALARLGVRGFKPTLRAAPERLETLRTPEGMPLPPNTLAELRRDMARLRLVRNQIAEVEASRAERLQRPGGGGGDAMVRLLARVVGVGIETADMLVREVLSRDLRDRKALARYAGLTGSPDESGARRREKGLARVGNARVRRGMLQLAWRFLRFQADSQLACWYRARTADARGGTRKAMIVALARKLLIALWRLVTIGEAPEGVVLRPAP

SEQ ID NO: 409732 - protein, 400 aa, unidentified
MKGRVFMILVGIDIGKNSHYFCVINREDGEVLVDPTSFKNDQKGFGLFIQALQPFDKTSILIGIEDTGHYHFALLRYLLSKEFNVALINPVATDMTRKMQGGISKNDKLDTLTICDVLSSSNRKKSYRITKIDTFDYYEQRQLTRHHHNLKEELNVYTNRLQKCIDLVFPEFNSLFKSKYGTVYMKLLKTFGSADKIAHADIRSIRKCFEIQGRGKRISLTAEQLKAAAKESVGIASLADEIQIRHLIGQIELIHAQLDEIDKKIEEFSCMTNSPILSIPGISHFSGTSILVEIGDIGNYPKASKLTKFAGVAPYEHESSQYRAEHTAITKKGSKYLRKTLYQIIVPVIQHNEVFKRYYQLKRRQGKSHRCAQGHCVRKLLRVIYHLLTTNQQFDPALLR

SEQ ID NO: 409733 - protein, 367 aa, unidentified
MKKVSTRAAAQSRNISQQKLTIGLDLGDRNSWYCVVDEAGQIQREQRVHTSGRTLQEVFGAMPRRRIALEIGTHSPWISRLLREMGHEVIVANARKVRLIGESRKKDDRLDGQTLARLARIDPELLYPVKHRSAKAQADLTLIRARAGLVRARTGLVNTARGRAKSYGERLRSCNVRNLNPEEAESLSPELQAALEPLWNAMESLSERIVEYNERIENLAQQSYPQVALLKQIKGVGTLIALTFLLTLEDPHRFRKSRDVGCSLGLQPGRRNSGQSEPQLPISKEGDPYLRTLLVQGAQHILGPFGVDCDLRRWGMKLAERGGRNGKKRAIVATARKLAVLLHHLWVSGEVYAPLHNSSRTTVAAAA

SEQ ID NO: 409734 - protein, 410 aa, unidentified
MADEPRWYAGVDWASESHHVFLTDGAGRRIGEKVFRHGGEGLAEMAAWLMAASGASEASQIGIAIEVPHGPVVETLIERGFAVHAINPKQMDRFRDRFTLAGAKDDSRDAETMASGLRTDPRCFRRLAATDPAVIQLREWSRIAEDLGAERVRLTNRMREQLWRYFPAFLDLDADLGAEWLLDLWEATPTPAKARRIRETTVAKLLKRNRIRRLGAAQVLEALRQPPVTLAEGTVEAACAHIATLIPRIRLLNRQIAEAHGEIDRLTARLASPEETVPEQAELHDAAILASLPGVGRIVLATLLAEAWDALQRRDYAALRSLTGVAPVTKRSGKMRIVIRRLACHPRLANAVYHWARVAVQHDGTSRAKYTALRARGHSHGRALRSVADRLLAVACAMLKTRTTFNPTLA

SEQ ID NO: 409735 - protein, 397 aa, unidentified
MIAVGIDVSKSKSTVAILNGDGSIRAKPFDVHHVADELQALVDYIKRTSEPPTILMEPTSHYHYPLLKAFTEAELPVCLINPYQMKKYGDTELRKAKTDKRDSLRITQYALEKSYSLIPYTPQDQKYEDLRFLSRQYSQRISTLTVAKVQLLSLLDETMPGITTILPLKSRDPDNCVLLRFIKRFKSFDVIRKMGKTRFLDSYQVLVKKTKDRFAGSKGLAIYELVLNSVTTRGENPLSAMTQDQCVDLVSTSQKAADEINLQMRIIAETMPEYKVLRSMAGVGDRLGPIILGEIGDIRRFHSGKALNAYAGNDASPYQSGQFESRNRHISKRGNPALRKACFEVMQALKLTKPQDDPVYLFLLKKEQEGKPYNVAKMAAVNKFLRIYYARAMELYK

SEQ ID NO: 409736 - protein, 414 aa, unidentified
MELLHERCAALDIGKKELKACVRAPSPKGRRSRRQEIRTYATTTNSLLELRDWLIAEQVSLVVLEATGDYWRGAFYLLEDDLNVILVNAAHAKGLPGRKTDVCDAAWLCQMGECGLLRASFVPPEPIRQLRDLTRYRTTLTAERSREAQRLEKELEDAGIKLSSVATDILGVSGRAMLAALIAGEDDAVALAELAKGRMRPKIPQLVQALTGNFGAHHAFLCRLHLERIDQLSTTIEELSTRIEEQMRPFSHKLDQLQTIPGVARAVAEVIVAETGADMSRFPSPGHLASWAGVCPGHHESAGKRRSGKTRHGDRWLAGALGTAAMAAARTRDTTYLGARYRRLAPRLGKKKAIVAVEHSILTAAWHMLTDDVDYHDLGGDYFARLDPERAMRRIVRQANALGYTVRFDPIHAA

SEQ ID NO: 409737 - protein, 429 aa, unidentified
MTAFNTTVSTLLVAIDISKHRHEVLIGIPGKKRRRRMTITNTLEDFQRLATALASYELAVRIGFEATGNYHRTLAHHLGHVGFELKLVSSVGLARTREALHNSWDKNDPKDAQVILHMLEIGAVQFFHDPLVTGTADIQELSKTHEIVSRSKTELWHRILTHYLPLYFPEAERFHRSSRTDWFLAFLEKYPTPHMISTMSQEAFIADAWQVVGRKVSKERLLSDIYATAVGSVGLPVSPDSEAVRMFRLVLAEGRSLIRQRDEIEARAVELLSDLPDYQLLTTIPGIGPINAMTILAEAGDLRRFRHHRQFLKFCGMDLATVQSGMFRGQSKISKYGNARLRRTLWMAGQTAVLKRTNSFRDKFERYISKDRHNTHLRRKAYTAIAAKMARTVHAVVKHGEPYRPFFEGVSPGGRTSLCSSRGGRHLTS

SEQ ID NO: 409738 - protein, 353 aa, unidentified
MGSSPYVSVFAYPVYCLSPNGCGNLKSSHRKVGRKEEEVGKMTTFVGVDVSKATLDVCVLGIQDFQATNDEEGLAEIISALSGLKDVLVVMESTGGYEMALASALANARIPFAIVNPRQVRDFARALGQMAKTDRIDARILALFGERIKTSITELPSEKQQKLMGLVTRRRQLIEMRVSEQNRQALAPSNVKASLIRHITALNAMIGELDKEIGKLIRNSPMWKKREDIMDTVAGVGRVTIMTLVALLPELGSLNRKKIASLVGLAAFNKDSGQLLGKRCCWGGRAAVRSVLYMAALSATQHNPVFQEHYKQLVARGKLKKVALVACMRKLLTVLNAMVRDGSDWQEVLAAPH

SEQ ID NO: 409739 - protein, 381 aa, unidentified
MNQKQATAEKELTTKCPVLYVAFELGNSTWKMACSDGRKVRHVTVTARDLDQVERALLRAQNHFALAEGCSTVSCYEAGRDGFWLHRYLQGRGIDNVVVDSASLEVDRRLRRAKTDRIDAGKLLRMLIRYHGGEKQLWRVVRVPSREDEDARHLHRELESLKRERTRHRNRIHGILMQQGLCIPNPSKKRFLKDLEALRTWDGHQLPAGMKARLVRVYQQLRLVEDQISILATEKREQLKQVDNAKMRQVAQLLRLPGIGPVSSWAFVMEFFGWRRFRNRREVAALAGLTPTPYDSGRKLREQGISKAGNRRIRTLAIEIAWAWLRYQPRSKLSQWFSERFAGGGTRMRRIGIVAVARRLLIDLWRFLEYGVVPEGALLTT

SEQ ID NO: 409740 - protein, 342 aa, unidentified
MQITTIGIDLAKTVFQIHAVDSDGATVIRKRLRRAEVLSFLAGLEPCLIGMEACATSHYWARELTKFGHTVKLMPPAYVKPYVKRGKNDATDAEAICEAVTRPNMRFVPVKSADQQAVLMLHRTRALLIRQQTMLANAFRAHLAEFGIVVAQGIRHVRALIEKVFGEDTVDLPVLARIALRPLVAQLMELRLQIKTIEKELLAWHRTSQESRRLETIPGVGFITATAIAATVTDPSHFRSSREFSAWLGLTPRQKSSGGKDRLGRISKMGNRYLRSLIVVGATAMIRYAREKGPVSARWINALLEKKPARLVSVAVANKMARIAWALLVRKEDYRAPMSVAA

SEQ ID NO: 409741 - protein, 377 aa, unidentified
MNLKYSVGLDISSKKVNGCISVIDENQKVRSSIVFYNTINGFKELELWIKKWHVESQVPLVICMEATGIYHENCAHFLFEKTHKVSIVLPNKAKHYLISLGLKSKNDTIDAKGLSKMGAEQCLDTWQPLGKYFYELRQYTRQYQNLQEQKTVIKNQLHALELGMYINKPVIKQLEKVILLFDKQLKELDKMIKKHLDSDENVKQKAINICQIKGIASLSLATILAETNGFELFKNYKQLVSYAGFDVVERESGTSVGKTRISKKGNSHIRRALFMPAFTVVTYKQKPFVDLYNRTLEKHGIKMKSYVAVQKKLLTTIYHLWKKNEMYDPNYRINIQEQEQGLSSLLAFEKGVKNSPKQVEAIQGKHPANNHSMLPLC

SEQ ID NO: 409742 - protein, 361 aa, unidentified
MIVIGTDTHKASHTAAALDDGTGRVVAERTVSARRRSFEDLLLWGRGLEADRVWAIEDCRHVSGALERFLIARGERIVRVAPKLTAGARDSARERGKSDSIDAVSIARAAIREGIDKLPVAVLAGPELDIRLLVDHRERLVATRTRLINDLRWNLHDLWPELEIPPRGLIAVHWPQRVAGRLARAEQTTRVRIARDELRRIRELTKTIDELERELALLVAKVAPRLLAERGCGVLIAAKLVGEIAGVNRFATDAKLARIAGSAPIPASSGNANRHRLDRGGNRQINCALHRLAITKGLHDPDTAAYLARKQAEGKSRREALRCLKRYLARRVWQLLRDAQDPRQPAITIHCNTPYNNFSLT

SEQ ID NO: 409743 - protein, 342 aa, unidentified
MLETMIGVDLAKSVFQVHGASMTGVVKFRKRLTRSQFRRFLAAEPRSAFVMEACGSAHYWAREMVKTGHEVKLIAPQYVRPFVKRQKNDAADAEAIVVAAQRPEMTFVGTKDEDQQASAVLFRSRERLIQQRTVAVNALRSILYEFGHVVPSGIRNIRRIEEILAAENSDLPSLVRTECLDIIAQIREQTARIEAKTKTAKELASKDDVARRLQTIPGVGPLTALAVETFAPEMSTFKGGRNFAAWLGLVPRQFSSGGREKLGRISKAGQADIRRLLIVGAMSRLNWMGRKTVPEGSWLARMMAKKPRMLVAIALANKMARTVWAMLTKQEDYREPATGLAT

SEQ ID NO: 409744 - protein, 415 aa, unidentified
MRQTHVLVAVDVGMQRHRVAVGVPGQRLACEFDLDHTPEGFAAFFRRVEAYTHPGDLPVAVAMEGYNGYARPLDQQVLARGWRLFNVNNLKLARYKEIFPGPAKSDPIDTRKMLELFALREELPLAKDVLGEVGAVPEANAQLKRLTRRRRVLVNEKVRVINRMQSDLHAVCPGLAAITGAVDNLWFLRLLASRDDLTKLARLQTSTLFKIRGIGVKYAGLIRAWQARAQFAPEVVYVGPMIVADARRILELLTQIEALEATCAQMAAGSELAGRIDSIPGFGPIASAELAGEIGTLERFPSEASLALYVGMACLSQQSGQRSRGRAPRQVNRRAKAALMIAVARHVEQVPQSKAYYERKRTEGKQHNQALRALGRHLIRVLWAMVQHHRDYERRTPAQQPEEAHADAHKRSLAA

SEQ ID NO: 409745 - protein, 403 aa, unidentified
MHAVIGIDIDVSKATSQVAVAVDGKVVQNFKITHDVFGSNQLNSVIMQFNTFPDIVFEATGVYSRRLKTFLEAHNYPYTYLNPLTAKKQLDQLRPNKNDLNDAKHLAETQFILKRAKSYVQNPIYIELQDMSRFYQQLNHDIVSAKNRLHRLLQLTFPEIETLFSTTDSQQYWEIVSLIPHATMAKHSRQTLSDTIQSSVSRQIGVARLTRLVDKLVALGSLSAPAVAVASYNVTEVRYYAQRLIALSQSKANVLATMVDQTKDLPEYDIYQSIPGFSDKTVVSLIAELGDLHRFATSNKLNAFVGIDLRFNDSGDYKSSGFITKRGNTIARKVLFKAISNIASTATYGHQNHINDWYQKKKQSSMSKGTKKIAIGAMSRLLRTMHYRVLNNQLYDYDTASKR

SEQ ID NO: 409746 - protein, 457 aa, unidentified
MNRKTTKSKIDRTMPMVHPNAAAIDVGATMHMAAVSADRTPEPVRSFGTFTTDLHRLVNWLKECGVETVVMESTSVYWIPIFEILDARGFTVFLVNARDAKHVPGRKTDVSDAQWLQRLHSYGLLRASFRPKGQIAELRAYVRQRERLLEYAASHIQHMQKALTEMNLQLHHVVADITGATGLRIIRAILAGEHDPKELAHLRDYRCHASAETIEKALTGSYRAEHLFALEQALALFDAYHEKVSACDVRIEAVLKELSTGRGRGSGLLPSSRRRTDQTNAMAFDVRAALFALLGKDVTQINGLGPYLSLKLIAECGDDLSAWPSAKHFTSWLCLAPSNKISGGKVLSSRTRRSGSRASALLRLAAVTVGRTDTALGAFYRRLSARIGKAKAVTATARKIAVLFYNAVQHGMEYVDPGASVYETRYRARVVDNLHRRAKAFGFVLQPAEPKPSVAVS

SEQ ID NO: 409747 - protein, 337 aa, unidentified
MKFCGIDLHSNNSVVVITDETDHVLVSRRCPNDLARITALLEPHRADLAGVVVESTYNWYWLVDGLKACGFEVLLANTLAMKRYDGLKHSDDKDDAAFLSHLLRLGVLPTGYIHPPQERALRDLGRKRIQLVRNRTQHILAAENLLARQWGHRLSSNEIKKLSAPSIDRLGLPMDVALALNASVAIIQALQAQIDGLEERLLHEVKLRPEYCLLTTMPGVGEVLAAVIMLETGDITRFAEVGNFASYARCVSSARYSNGKKKGEGNVRNGNAYLVWAFIEAANHAKRFSDDAKRFFEKKRAKTSSTVATKALAHKLARATYHILQERQPFDSKRCFA

SEQ ID NO: 409748 - protein, 342 aa, unidentified
MRIIGCDLHAAQQTIAMWDRDTGERIERTLKHEGSVVRDFYASLAPPVVVGIEATGSMGWFRRLMEELGITCHVGHPAKICAIETRRQKHDRRDAALLLELLAEDRFPSIWMPSAELADVRALLLHRDQWVRMRTRVKNALQGLALAHGLRRRAGLWSRQGQATLAALPLAPHAADGRGHLQALHDHLTAHITELDQQIDVQAAARPQARRLMTHPGVGPVTALATEVFLGDPERFVDAKALASYVGMIPSEYSSGGRQRLGHLTKQGNPFLRFLWCEAAVHAIRRDAALGRFYRRKLQQKGLGKARVAVARKLGIRLWILLRDQIDYDEFCRRASSPATAR

SEQ ID NO: 409749 - protein, 339 aa, unidentified
MDKYAVSGIDVSAKELWVGLQREGGKNEPERKFANTPSGHQEVKRYLRRAAARVRVCLESTGLYGLDLGLCLQADSRLEVMVANPRAVKDFAKALLERSKSDPIDTWVLTEYAARMPFRRWQPPSPAALSLTALARRIHALTESATREKNRLHALSATDTSLRVLVTELKRSLQWIERSQARLTRAARKVIAAEPRLERRFRLLLSLPGVGESSALQLLGELALIPADAEVRQWVAYAGLDPCECSSGSSLRKRPRISKVGNRHLRRALYMPALTAAHHDPAFGSYYRHLQQRGKCKMVALVAVMRKLLHAAFGMFKHDALFDGTRVFGRPAAAIGAAA

SEQ ID NO: 409750 - protein, 348 aa, unidentified
MLIIGCDYHPGFQQIAFVDTETGEFGERRLTHREEAEEFYDTLKERSVRVGMEASGHARWFERLLNGLQFELWIGDAAEIRTKRVRKQKTDRQDAQLLLRLMVEDRFPRIWVADAANRDLRQLLWHRHRLVQMRTRIMNQLHVVALNEGVRRKKALWRPAGRNELESLNLAPWASRRRQDLLDLLDQLTPKIQESTRALEEEAEKRPVARRLMTHPGVGVLTALAFELVIGTPDRFHCGKQIASYVGLVPSEESSGDRRRLGHISKQGNSLLRFLLVEAAQVTVRSQVQWRSKFFHLAMRRGRKIAKVAMARKLAVHLYWMWRQGWDYGQFEKLGSHAGEPGNRHGVQ

SEQ ID NO: 409751 - protein, 342 aa, unidentified
MHSVTTIGLDIAKSVIQVHGIDAIGKVVIRRQLKRRYVLAFFQKLPPCLVGIEVCASSHHWSRELKALGHTVRLMPPAYVKPYVKRQKNDAAGAEAICEAVTRANMRFVATKTPEQQSCLMLHRTRHLLIRQQTAVINAIRAHLAEFGVVAPVGRRGVEELLDVVAASSDERVPEVARACVAALGAQLRVLRAQILEFDRQIMTWHRSNETSKRLDEIPGVGPALATALVASVADPKAFRSGRNFSAWIGLVPKQHSSGGKDRLGSISKQGDRYLRSLFTAGALAVIRYAKIHGTKRPWLTALLARRPTKVAAIALANKIARMAWAMMVKGERYKEPAALAA

SEQ ID NO: 409752 - protein, 368 aa, unidentified
MRDASTFVGLDVHKNTISVALLRPGQPVLEWSLANETAAVCRLIRRLEREAEGGLHCCYEAGPTGFVLQRQLTRAGIDCRVIAPSLIPVKPGARIKTDRRDARKLAELMRAGLLTEVMPPTEEEEAVRDLTRSRDDAQRDLTRARNRLSKFLLRRGCVYVVGRKPTWSAKYRAWLRALTFPRRADQIVFEDYLLAVEQVEGRLEGLNEEIESVAQEQPWRERVQALRCFHGIDTVTAVALVAEIHDPQRFPHPRQLMSYLGLVPREHTSGMRERRGGITGTGNRHVRRLLVEAAWHYRHKPVVGRDLRLRRRGQSPKAIALADRALRRLTLRQRRMLYQGKHPNLVNIAVARELTGFVWNVLHPATAN

SEQ ID NO: 409753 - protein, 361 aa, unidentified
MRIIGCDLHARQQAVAMLNTETGEVVNLTLMHEGDKLREFYSQLPRPVLVGIEATGSMHWFLNLMDELGIECRVGHPATIRAAAHRKQKNDRRDAELILQLVVENRFPAIWLPTKELLDLRALVLHRHQWVRMRTRIQNALQAIALANGLRRGPSLWSYDGQAKIALLPLLPHTAYRRSALQAMYKNMEAEIENLTQQVAEQAGRRSGAQRLMTHPGVGPVTALATDVFLGDPKRFADGKALASYVGLIPREYSSGERQRLGGVTKQGNPLLRFLWCEAGAHAVRRDPELKRFYRRKLVQKGLGKARVAVARKLGIRLWIMLRDEIDYQEFCRRGQKQHSGAACAGMPETAYGAKSHRAID

SEQ ID NO: 409754 - protein, 341 aa, unidentified
MKQYVGLDVSMEETKVCVLDGAGVVVFEGSVASRPAALAKLLNAKAPHAERIALETGSLSSWLWHELKAAGFPVVCLDARHAKAALSMRINKTDRNDARGLAELIRMGWYREAKVKSMESRQIRALLTARSKLVDLRRDLENQMRGLLKSLGLIIGKSGVRVLPNRIAALLRDAPHLRSLIDPLMTTHSTLAEQIATYDLQVRELAKTDQTIGRLMTVPGVGPVTALAFASTVDDPQRFARATDVGAYLGLTPRRYQSGELDRNGRISKRGDRLTRSYLFEAANVLISVVRRPSPLKSWATKLVKRIGRKKTTVAVARKLAVILHCIWTDGTEFDWGGVAA

SEQ ID NO: 409755 - protein, 426 aa, unidentified
MVALNSRREQLDEVLITFKEVTVTDPQIRVGIDVGCKAHRVGIAGSNGELLEEFDISHTATGFEDFFGRIEHHKQQLNLPVAVAMEGFNGYARPLDQLIQEHGYVLYNVNNLKLARFKEVFPGAAKTDPIDTRKILELFHLKDHLPTAKDALQEVVSAPVVNDKLKRLSRRRRQLVNEKVRVVNRLQSDLQAVCPELLGITNNVCNLWYLRFVTCRDELTQLSRLRRTTLLKISGVGQKYARIIQQWQKEAKFSCEVDYVGPMIISDARRLLELLEQIVALDKGMEGLADNSEMARRLASIPGFGKTCVAELAGEIGTTKRFTGEASLALYLGMSPLSKDSGQYHGSKCPRQVNRRAKAAMMTAVARHIDCVPESKVYYDKKRAEGKKHNQAVRALGRHLVRVIWSMLNNGRDYELRTPGGETNVT

SEQ ID NO: 409756 - protein, 335 aa, unidentified
MDNVTTVGIDLAKNVFSVHGVNGAGRPVLCRSVRRDQLHRLIAQLAPCLIGMEACSGAHDWARRFQAHGHTVRLMAPKFVAPYRKSGKNDGNDAEAICEAVARPSMRFVPIKSVEQQSVLCLHRVRQGFVEERTATINRIRGLLAEFGHVLPQSAAELRRQLPALLELLPLPVAHALRELHAHVGVLDQQVLSYEREIEQLARGDERNARVRQLNGIGPLSASAIVASVGDAHEFENGRQFAAWLGLVPRQYSTGGKTRLGHITRHGDAYLRTLLIMGARSVLQSAARRRDRVSRWALSVRQRRGYHRACVAIAAKNARIVWALLAGNQPLQLAE

SEQ ID NO: 409757 - protein, 421 aa, unidentified
MQVLCERCAAVDVGKDVIAVAVRLPGSGRDGRAAVRRVFKTFYGVLAEAARWLDSQGVTHVAMEAAGIYSMPVYHALIEHGHFGRVLVCNAAHVKNVPGRKTDLADAEWLAHLLECGLLAGSFIPPADIKAARGVIRYRVKVVQSRTAEVQRLGAVLQDAGIKIDSVASSIATKSGRAMIEALIDGERRPAVLADLARGKMRAKMPDLERALEGRFDDHHALMCRLHLDHIAHLEQMTATLDAQIETMMTPFRAARDLLATIPGIGPLTAAAVISETGTDVRKYWPGAAHLASRAGLCPGNHESAGKSRPGRPRHGNQHLQPLLAEAAWAAVRHDGYLRSLYHRHVMKWGGYRSTAAQNKAIIVVAHALLVIIWHILATGKPCHDLGAGYFTRRLDPERETRRLIARLQALGHTVTIQPAA

SEQ ID NO: 409758 - protein, 354 aa, unidentified
MATYYIGADLHCNNTELAIESRGKVVRRYSVPTTIRAIGEVLDSLSGKKHMVFEEGPMAGWLYRNLVHKVEQITVCDPRRNKLIASDGDKDDKIDAAKLAALLRGGYLRAVYHSLDEGRVAFKSWVGLYDGRVKDATRNINKVRACCRMCGIKVPRAALRDVGFRQKWLCTLKDKSVAEQLRILWIGYDATATQSRLAKKQVSRLAKQYKIIGYWSELPGVGLIRAATIFAYLDTPRRFRKKNSLWKYCGVGLQRQASGTDRQGRVRPARLKMAWAVNKRLKNAVMGAATSAIRCRDNVFRRDYERMIRDGMRASNARHAVARKMVTVMWGMWKHNCRFDERFLLKETCSLCNE

SEQ ID NO: 409759 - protein, 387 aa, unidentified
MPQLNDLSRSLVALDQDSTIIAVVELSQSSWLVAGVLPGIERQPRKKLEPSAERLLGLLHRWRDEAVRAGRNITRIALAFEAGRDGFWLARWLNARGVEAYVIHPSSVAVSREHRRAKTDRLDTELLKRAFLGWLRGERGHCSMARVPTIAEEDAKRPNRERECLVGERTRIVNRMKGTLARLGIRNFKPTLRKAADRLATLHTPEGMPLPPNVLAELRRAMARLGFVVSQIREIEQARQKRLEQQPETGPHAMVRQLSRVVGVGIETADMLVHEVLSRPMRDRKAVARYAGLTGSPDESGTKRREQGLARAGNARVRRGMIQLAWRFLRFQKDSALALWYRARTADSRVGTRKTMIVALARKLMIALWRFVTTGETLEGVVLRPAG

SEQ ID NO: 409760 - protein, 485 aa, unidentified
MALVLAVVLGLLILEVAMSQRKPHPTSPDPASLALLQTLHPHAAGIDVGAAELWVCVPPGAVAVPHPPAVLPAHVRRFGAFTADLHAIAAWLRQCGVTTVAMASTGVYWIPLYDFLESAGFEVLLVDPRQVQRAPNRPKTDVHDCQWIQRLHSLGLLSAAFRPEEKIRVWRSYQRHRTTLIEDASRHLQRIEKALEQMNVKLTAVVSDLTGLTGMSIVRAIVQGERDPKALAKLRDHRCKERAETIAQALRGTWQPEHLFALRQSLELYDYYHQQIRDCDRVIEAHLQGMALPEVPPLEPKKRVRRRKDNEATFDARQRLHHVAGVDLTAIEGIEESTALVVWSEIGTDMSRWPSEKHFGSWLGLAPNPRKSGGKVKSSATRPGVNRAAQALRLAAKNLQRSKSALGAFFRRIAARRGLAKAITATAYQLARIVSARLKHGTAYGAQGLAAYETAYRERVVRQVKRKAAELGLVVVERDAVGQPS

SEQ ID NO: 409761 - protein, 387 aa, unidentified
MIYVGIDIAKQKHFAAAMTADGEVLIPPFGFTNDAEGFKLLLSKIKSFKKENTLIGLESTAHYAENLICHLFELGYNISVINPIQTSTLRKTNIRKTKTDKVDCLLIIKSMIVNKPRIYSKTDIDSLRLKSLCRFREKIKKTKAKLKIQLVTYVDILFPELQYFFKSGIHTNTCYQLLKEHSSPDDIAALHLTYLANLLQKASHGRFGKEEAIALKGLAKSSVGTGNTAVSIQITQSIAQIELLEQQLADLDRAIESIMLEMDSVILTIPGIGFLNGAMILGEIGNISRFSNPSKLLAYAGLDPTVNQSGKFNAKSTKMSKRGSKLLRYALINAAWNVSLNNKTFNDYFNLKRSQGNNHYAALGHVAHKLVRIIFKMLKDNVAFNLD

SEQ ID NO: 409762 - protein, 401 aa, unidentified
MKYVLVLDVAKGKSMFMLSLDVGEVLLEPTEYVHNKDNLGLIDSNINKLNIKDNLTVVMEATSIYHKAPERFFKENNYHVIVFNPLIGKKITNTIRKTKTDKQDCIKLTNLFWKGSIPDRNYTEDEIYTKLNELSRQYYHLDEGLTRHKNRYKELLHLCFPEFELCFKDGKIYDLTALNFIKEFPHAYIIKEKRVDALAYNMANTNGRHINYYKRKANTIKEYAHNSYPGVNENSKNVDNLKQLANIIIDITEQKNDVKNQMIELAKQIKNYKSIVSVFGIGDLSASLIIAELKDITRFNNIKQINASCGLDPTIVQSGKSINYHGPISKRGNRYARRILFNCSRNIVTLSAKCDKENPIYVYYQKKKQEGKHYYACLTACSTKLIRIIYALCMNNSTSQN

SEQ ID NO: 409763 - protein, 326 aa, unidentified
MSKVIGIDISKQTFDVSFREENKLLHEVYANNLKGFKEFIESDYCKSDPIVVMEASGPYYVCFASYLYDHAIKVCVVNPLMVKRFGQMKFYRAKTDKKDASVIMEYGETVIKSLSLWKPETKGVQSLKQMRTTVELLHKQERQSKNQLSAFKSSGFLNHEVERGLKSIIRSLEKTISKIEDQMLVVCNSCYKESLELITSVPCVGEKTAMMLIAITDDFSKFEHYKQLIAYVGFAPRVYQSGTSVRGKGHICKMGKSQTRKLLYMCSWTAKRYNKTCREMYERLKAKGKPERVIKVAIANKLLKQVFAVATSKQKYIENYQPNICF

SEQ ID NO: 409764 - protein, 400 aa, unidentified
MLSIGIDVSKGKSTVCGMKPGGEIVYTPFEVQHTREGMSELVSLLRSSGEEVRAVLESTGSYHCPVVAALLENGIFVSVINSLRMKRFCSQSIRKVKTDRIDAMQIALYGLAYWQELQPTRLPEDTYRELQLLARQYYQMTSLLIKAKVDFNAICDQVLPGMQELMSDHAGRHKLSDFVLRYRHTTHILEMGETRFRKDYCKWAEKKGYRNCERMAALIFATAQNGIPVLPNAPSTQIVITEAIRVLHTVEASRDAILTQMQALAKTLPEYSLVREMPCIGDTLAPRLIAEIGDVRRFHSKRALTAYAGIDAPPYQSGKFCANNRHISKRGNRYLRKTGYEVMQSYVMHKPANDPIFTFIEKKRGEGKSGKLAMVAGLNKFLRIYYGKVTELYRSLPAIE

SEQ ID NO: 409765 - protein, 468 aa, unidentified
MAQKRSRRGRRRVGKPRRVKGRGGKIRLRTVNPKAAGVDVGAEEHWVAIPPELDETPVRKFGAYTVDLESLADWLKAKGIETIAMESTGVYWIPLYELLEARGFEVKLVDPRRVKNVPGRKTDVLDCQWIQKLHGFGLLNGAYRPPESICELRAYVRQRGMLVGAAGEQIQHMQKSLTQMNIKLQHVLRDVTGVTGLRILRALLSGERDARKLAGLRHERCQHSTGAIAKALQGNWREEHLFTLRQAVELYDIYQEKIAACEREIDRVLEKLGSQDEEQGGGVSGEKECARETQSETQAALQKMTGVDLTQVPGLDTLSAVGLVSEIGVDMRAWADERHFASWLGLCPGNKVSGGKRMSGRTRKCANRAAQILRLAARSLQKTRSALGAFYRRMRSRLGAPKAITATAHKLAHIVYGMLRESREYVEVGQDHYEREYKKRVLESVRRKAAKLGYNLVQIQEMIQPKTA

SEQ ID NO: 409766 - protein, 402 aa, unidentified
MGRTLPARMFKLAGVRNQIGEPATMPSESTVHIAIELSVSSWLVAARLPGAEKSRLHRIEGGDTAALLGLFAELRSRASAKLAGEADVVCCFEAGRDGFWLHRLLTAHGVAAYVLEPTSILVSRRARRAKTDRLDAEGMLRVLVAWLGGDRQVCSMVRVPTPDEEDAKRTHREREHLVQEKLRIENRIQALLFTQGIRARPSLRSWARDMAELRTGDGRALLPLLRTELNRLRRRLVLILELIRELEAERAEAMAAAVNDAMVRKITALQRIRGIGSNFAAVLVREVLYRSFANRRQLASYVGITPMPYQSGGMDRDRSISRAGNPRARTTLIQLAWLWLRYQPGSALATWFRERVGLLQGRTRRIAIVAMARRLLIALWRYVETGVLPEGVEIRAEAAPMA

SEQ ID NO: 409767 - protein, 470 aa, unidentified
MGHNRPPSRSESRKKFKRVSPSLLERIKPNAAGIDCGSEQHHVAVPSDRDPEPVRSFKTFTADLHRLADWLQACGIETVAMESTGVYWIPIYEILEERGLAVVLVNARHVKNVPGRKSDVLDCQWIQELHSVGLLSGSFRPAAEIAALRAYLRHREKLIQGATSHIQRMQKALVQMNIQLHNVISDITGVTGMRILRNIVAGVTDPGLLAAHRDHRCRASQEEIVASLTGNYRAEHLFALRQNLELYDTFQRQIQACDAEIERLLQTLAAKQDRANVTPPPPRTKKKPRDNEPRFDIRAPLYRLAGADLTQIDTIGPYTALQLVAEIGTDMTRWPTDKHFTSWLTLAPKNKISGARLISSTTQPSANRAAAILRMCAMVAGRTSTALGAYYRRIAYRIGKPKAITATARKIAILVYRLLRGDLDYRDPGADAYDIQHRAHTLRNLRKRARQLGFDLLNLETGELASGSVS

SEQ ID NO: 409768 - protein, 396 aa, unidentified
MLYLAIDQHRKQLTVNLRNEAGDVILKRQVSTEWKRVREFMEELRNQSVSEGGFVAILEVCGFNDWFLKLLAEYGCREIVLIQPEKKSKHKTDRRDANALGELLWTNRERLLAGKKVQNVRRIVPPSEQEAEDRQLTALRQRVARLRTRTINKVQHLLLKHNLQQECPTKGLKTKGARKWLTQLALGGLDRLELNHLLAQWELLDKQLDELEQTIGERMLKNPTAVIIATLPGVGAYGSLALASRIGSIERFPHARSLANYWGLTPGSNNSGDQQRRLGSITKEGSAIARFILAQIVVHVLRRDAKLKEWYRRIKKRRGSKIARVAVMRRLATIIWYMVKYQRPYRPGGTPAGDNGSECVAGVPDRNAFFEEIQGRSRKQKEKGCQGIETVAAARS

SEQ ID NO: 409769 - protein, 391 aa, unidentified
MPMYFVGIDISKYKHDCCIISAADQQIISKFTITNDKDGFEQLLTALNSLSNPEDIKIGFESTAHYALNLELFLENAHHSFMEVNPVLIKEYKKSTTLRRTKTDSVDCESIARWLITVEYKPHSKGFYHAYSLKSLTRLRDRLIRQRSFYLVKITNVLDHTFPEFKPFFNERLSKTALYLLENYGSAEKMARINSASYDKLRCISRGKFSIQQFLRLKELAANTVGVNNSIFDLELNTLLTLYKSLSDEINTLETEIIKLIEEVHPHYMSIPGIGPISAAVIYAEYGDISNFSNPGQMLAFAGIEPGINDSGTESHGGRMVKHGSSQLRYVLLNACLPLIRFDLTFATYYEKKRAEGKKHRVAITHVAKKLIRVIYALERQDVDFNAQKLR

SEQ ID NO: 409770 - protein, 358 aa, unidentified
MTSITPDSTPLTEVAGGVDTHQDTHTAAVIDGVGRVLGTEQFPATPAGYTALLAWMRAFGQLSRVGVEGTGAYGAGLTRLLQAEHINVIEIDRPDRKSRRFHGKSDPIDAIAAAKAALAGDRTGTPKRRDGRIEALRALRIARRSAIDQRADTQRRIKALIVTAPDALRQSLRGLSSTKLIATCAALTSDREAAADPTTATQLALRSLARRHQQLSAEIADLDELLDVLVMAINPRLIAAHGVGTEIAGQLLVTAGENHDRIGSEAAFAMLCGVAPIPASSGKTTRHRLNRGGDRQANAALYRVVLCRLRWDARTRAYMDRRTQDGLSKKEIIRCLKRYVARELYGLITTTNDQERSD

SEQ ID NO: 409771 - protein, 372 aa, unidentified
MKDDSAIFIGLDTSKLKISVAIADGSRNGEVRFFGDISSEPASVASMVNTLSKRGAKLHFCYEAGPTGYGLYRQIVELGHECVVVAPSLVPKRAGDRVKTNRRDALSLARLHRAGELTPIWVPDEGHEAIRDLVRAREAASEAQKQARQQLQSFLLRHGRVYDGKRPWTRAHKKWLTSQSFDHPAHHILLAEYCQAIEDAGVRLDRLTQLVEKTAASWSMAPVVAAYQAMRGVAFMAAVTFVAEIGDVRRFDNPRQLMAYLGLVPKESSTGDRVKRGGITKAGNTRARRVLVEGAWTYRFPARVSPTIQPRLEDLPRSVREIAWKGQVRLCARYRKLMAAGKPKVVTVTAIAREMAAFLWAIGQEVAPTAKA

SEQ ID NO: 409772 - protein, 338 aa, unidentified
MKQFVGIDLHKDVSQIAVLRESRTPSQLRLANDVVAVERVLKKLPKGSKIALEAMGSWWWMVELAQKTGHEVFLSHPKQTKAIASARLKSDKVDALMLAKLLKADLLPTVWIPPENQRHIRELLTHRARLVRQRTAVINELRAVYAKRNIDPQAKLGRVRPSVAGAEDLSGYGPRIVGEDVELLGFINRQIGGLDKELTKIALEDAQSKRLMTIPGVGPVSSVAVSCWIGEIARFSNAKKLASYFGLAPRVRQSAETERHGHITKEGNRMVRSLVIQAALVHTRRGKGPSRKHYLGVLRRRGKQIARVAVANKMLGAMFHMMKEQIDYHELLRRSGAQ

SEQ ID NO: 409773 - protein, 431 aa, unidentified
MEEVDEQELHVERVAALDLGKAALEACVRVPHESRPGRRLQEVRGYATTTTSLLALADWLRSWGVTRVVMESTSAYWKGVFYLLEAEGFDCWLVNAREVKNVPGRPKTDKADAVWLAKVAERAMCRPSLVQPRPIRQLRDLTRYRRSLIQDRTREMQRVEKLLEDAQIKLSSVASDLFGVSGRAMLEALIGGQRDPKVLAQLARRRLRVKIAALEEALRGFFTDHHAVILRMMLDNIDRLSEQIAALDATIEEAVAPFAAQVAQLDEVTGVGVTAAQELIAEVGVDMGRFPSAAHLVSWAKFCPQVHESAGRKKPKGRGKGNPWLAGTLGNIVATAARTDSFLGARYRRIAKRRGKQKAMVAVGNSVLVIVYHLLSDSEARFTDLGAEHYEARIDKQRRARNLAAQLQAVTGQRIVIRDGKAVIVEPTEAA

SEQ ID NO: 409774 - protein, 374 aa, unidentified
MLGSHMARSFIPRHHDIFIGLDVDKHSISLTCLDHEQMIKSLRMPYQAEGLLKYVGRQFPQKQVAFVYEAGPTGFGLHDDLTHAGYPCLVVSPSMVPQAAGNRIKTNRLDSQKLAESLRGGQLKSIHVPSEPYRQLRHLTQLRDTFVQQSRATQCRIKALLLLEGLAFPGTQWSQVTIAKLEVLACSEAVHFKLKLLIQTLRFAQMQIKDTTKEILRFCKQDPDIKACLEYLISIPGIGTATGTQLLARIGDWRNLRHVRQLASFLGLVASEHSTGETIRRGRITHAGDSRLRNKLIQAAWAAIRQDPELRAFYWRIHNRHASTQASYKAIVAVARKLTTRVYAVLTQQRVYVVRAQEEQTPPGQTRIPAEPAS

SEQ ID NO: 409775 - protein, 350 aa, unidentified
MDQVSTIGLDTAKRIFQVHGVDEAGAVVLRRQLRRSEVLKFFAKLPRCVVGIEACGAAHYWGREIAALGHEVRLMPPTRVKPYVKWGRKSDKVDAAACCEAVTRPSMRFVPLKTVEQRAALMMHRARQLLVEQRTRLGNAIRGHMSEIGIIAAKGGAGLGALVAFIGNPEDQHLPAVVRTILVPLVEQWRSAGAQIAELDRQILAWHRNNADSQRLETIPQYGPILSSAMAATIGDAARFDNGRACAAWIGLVPTQNSSGGRERSGGISKTGDRYLRQLLVIAATGMVRRARAHPEDHPWFAGLLERMPPKKAAVALANKLARIGWAVLRHQTPYRARRPTAVAPALEAA

SEQ ID NO: 409776 - protein, 421 aa, unidentified
MLTDSPDDGVIIERVAALDVGKAEVVCCVRVPGAQAGHRAQEVRTWATMTRALSAMTDWLHGLGVTRVVMEATSDYWKPPFYLLEAAGFETWLVNARDVKHLPGRPKTDKLDAVWLCKVAERQMLRPSFVPPEPVRRLRDLTRYRVDLVAERGREKNRVEKLLEDAGIKVSVVVSDIFGVSGRAMLAALVAGQRDPLVLAGMARSSMRRKIPELGQAFEGRFSEHHAFLLSRMLAHVDALDRDIAAVEDRIEELIVPFADAAARIDEIPGVGRTAARIIIAEIGTDMARFPSAAHLASWAKFSPGTRESAGRSLGTGSTGHGNVYLARALGEAAVGASKTDTFLGERYRRIARRRGKKRAVVAVGRSILVIIWHLLNDPEAHFSDLGPDFYDRHRNTQRAVRSHIRQLQALGYQVTVQPAA

SEQ ID NO: 409777 - protein, 348 aa, unidentified
MTYFVGLDVSLEETAICVVDDTGTIAREGKAATEPEAIAGWLKTIDVTFIRVGLEAGPLSPWLCAALQAAGLPAICIETRRMKGATAAMAVKTDRNDARAIAAAMCVGWFTAVHLKTIESQELRLLLTNRKTLLTGRVTLENEIRGTLKAFGLRVGKVAVAGFEARVIELTADQPRLQAMVRPMLAARTSMQKQYEELHVMVLNAVKSHPVCRRLLTVPGVGPVTALAFATAIDNPARFDHSRDVGAHLGLTPRKYASGEIDRNGAISKSGDRLAREALFLAAHTLLTRVTRWSALKACGMAVAKRRGLRRGTVAVARKLAVIMHRIWADGSEFRWSRNDTALTGATA

SEQ ID NO: 409778 - protein, 343 aa, unidentified
MQTTEAEKVYAGADLHGNNVFLSVCNVNGAEIFRRRVRADLEAVETTLEPFKTNLVALGVESTFNWYWFVDGLRAKGYEIRLGNPAKMQQYTGLKCTDDRSDARWLAEMIRLGIFPESYIYPEKTRCVRDALRRRQLFVRRRTQALLSFGSLLTRYGQDAPTARGMRDWDSERIKATELDPFVQLQLRTLHEEWCSSNRQAEEVELAVGKFVQPCASRRRIRQVPGIGDTLGMTILLEAGEFTRFKNASRYASYCRTVKSERTSNGKKKGENNTRNGNPYLAWAYIEAATFAPRFYPVIQSWYDRKKKQRSPIIARKALACKLSKATWHVMQEKDFDMKMMFG

SEQ ID NO: 409779 - protein, 376 aa, unidentified
MSTTLMQVCLMVVAIEIAAAKWVVVSTAGGKRRRVVLSQEDVQARFSALLVAIAEAKRRHGLSSDGRCVVGYEAGQEGFWLERALLAAGVEAVVIDPVSLQVDRRSKRAKTDRLDAEALAEGLLAWCEGRPRSLRTVRVPSQAQEDAREWQRERDRLMGARRGGLDRIVKKLRCHGLWSLPQGWRKALRDGELRGFSGAPLGSQLQSALVIELERLELVEGKLKAIEETVQSLDADSQERIARLCKLKGIGPVSARALALQLYWRDFENRRQVGSCTGLVGVPYASGNTHSDQGISKAGDPKLRALLVELAWLWLRNQPRSRLSQWFHTRTQGAGSRIRRLMIVAVARRLAVDLWRYLRHGVMPEGAQLKRGAVAA

SEQ ID NO: 409780 - protein, 427 aa, unidentified
MNPFPFGDFFMKNKTNKFVAFVGVDWADCKHDVSVLSETGGKPVHQVIAHTPEALSEWLTKLRQQYPEGQIAICLEQSKGALIFHLLGYDFLTIFPINPKSLARFREAFTPSGAKSDFNDADLCREFVSTHRDRLRPWKPDDEHTRTITFFAEGRRKAVDERTKLTSRLRSTLKKYFPQAVELLGDKLHSKMALDFIQRWPQLADLQKAKPDTVQKFYVAHNSRSSQLIEERLKLIRSAVPLTTDQAVIKSSLLTMKMLAGQIIQLNTSIDEYEQELKTLYDNHPDRDIFDSFPGSGGALGPRLLAAWGSDRDRHDSATSMQKFSGTAPVTKASGKSKIVMRRLACPTFLLQTFHEFANCSRRVSVWAQAYYEMLRDHGKSHHTAVRSLAFKWIRIMFRCWKDRTKYDEVKYLQALKRSNSPLREYL

SEQ ID NO: 409781 - protein, 309 aa, unidentified
MTATCHIGIDIAKDTLEIAGDSPAQIVNRPAALRAWLDKLKARRPGAHLICEATGRHHHALQTAAAEAGVPLTVVNPRQARDFARSLGRLAKTDRLDAETLRRLGQSLKPPATPVPEKALRSLQDLLMVRSALVDEQSGWKNRSALLGPEAARLCLRRLRSLEKEIARVETAIDTLLAQPQAGALGQKAQTLCLVCGIGIRTALVLIGWLSELGSCNRRQIAALAGLAPLNRDSGQYRGERHIAHGRAPVRKALYQAAVVAARFNEHLKPFYERLRAQGKPARVALIAVARKLLVFLNRILSQPATCPA

SEQ ID NO: 409782 - protein, 433 aa, unidentified
MGSRAKRRKSQKQQKTMNDSEQWQQHRAFGALDWASEKHSVIVVNQTGKVIEDFEIEHSALGWKKFREKLQPYGSIPFAIETSQGAAVEQLLEAGMIVYPLNPKSAQAYRERKAPSGVKDDRLDAWSFADALRVDGQGWKALKPEEPLIKELRLLCRDEISLIEQRSAFIQQLRHALAEYYPAALEAFKDWTSVSAWMFLERFPTPQALAQAGKRKWQNFLHSRRLWGSEEGPRRMEIFARATEFAGTPPTVKAKSLLALSLVEMLFAVEKQLGLYRRRIEELFASHPDHDLFGSLPGAGPKIAPRLLAEIGDDRERFGGDVQNLQCLGGTAPVTKRSGKYRHVHQRWACDKHLRHALHLFAEKSLPRCVWAERYYQHHRQKDRSHANALRRLGHRWLKIIHKMWLDRTPYDAELHHRNQLQHGSWIFQLKAL

SEQ ID NO: 409783 - protein, 335 aa, unidentified
MVKVKNFIGIDVSKKTFDAALIKNLNRQTIIHEQFENSRQGLKAFTNWLTAQGVSIDDSTVVCMEHTGIYNYSILEYLLETPVLVWLEMALQIKQSLGIQRGKSDKLDAIRIARYAYKEREDMKVWKPVNSIINSLKLLMAQRDRIVSSLTRLTVPVEELKSVGQLKEAQMLERLQKSAVRELQKTLKKIEQQIELKLKEDEGLYRLYQYADSVCGIGEVIATKLVIYTHGFTRLTDYKKMATYCGVAPFEHTSGTSVKKPSRTHHMANMDLKSTLSMGAKSAVNYDPEIKLYAQRKTAEGKSYAWIKTAVSNKLLKRVLSCVNNQRMYVKKQAA

SEQ ID NO: 409784 - protein, 355 aa, unidentified
MKGSRVSNLDQFFAASFGHRVWIGVDVHKRSYSVAVYRDDGVIASWKTAADNDALVRQLVVHGMEIKALVYESGPTGFGLARTCHNAGIPAIVAAPSRIIRPVLPTAKTDSLDCRKLAELAAKDMVRAIAVPSEAEEALRALERRRHQVADSLRKARQRIRGFLLFHGLQEPAGLDNWSNAAVAALVDMPMNPVLREVLDDYLEELQHLKGKITRLESSLAKHTAALHQRRLACLQSVPGVGRIVACSFLSELFRPERFQRGEEVAAYLGLAPFIKHSGEKTPAGRLRPTGHTRLRSLLVEAAWIWKGRDSGVQAFYARMLRNTGLAQKAITAVARKLAIILWRLACDVRAYRPA

SEQ ID NO: 409785 - protein, 401 aa, unidentified
MESPIVSIDVSNGNSHYMCFIKNNKRFGKVKKIDHDIEGFKRLLEDIQKLEAETNEKVCAVFEATGVYTKPLERFLSKNSIKTYIINPLESARKRKEEIHNKKTDKLDPISISKVYYDKEEMMELKKKDETYNWLRKKNRLYEDQLNHLRKYKVTFQNQLSICFPGYLDLFRDGYSDIPMTILKKYPHPDLLKNKKTETVARYLEKNTCHTHKVSLEYALKIIGFAKKTYPGCEKDDVEVEIFKILLDKVIETQRECEKTLNEMITVASTLEEYRYISSIDGIGPNLAARIIAEIGDIEEFKSREALVAYAGLDPHIYQSGDQDGKHLKISKKGNKYLRCLLFLAVGCSIRGAKDNPVNRFYQKKKQQSNPLNSKAAKTACTAKLLKIIYGICKNKTTYER

SEQ ID NO: 409786 - protein, 353 aa, unidentified
MMIVLGADMHKSSHTIAAIAAATGEVLDDKTAAVGARGFDQVVRWARRLGPDRVWALEDCRHVSGSFERFLIARGERVVRLPTRLMANSRRSSRERGKSDRIDAIAVARAALGEGVETLPTAELAGPELDIRLLVDHRERLVRARCALNNTLQWHLHDLWPELELPGSSLFYGKWSTRIARRLSRAEQTMRVRIARDELRRLRELTHAINALEAEIADLVAQVAPQLLDEPGFGPLTAAKLVGEIAGAARFASDAKLARAAGLAPIPVSSGRTDRHRLDRGGNRQINAAIHRVAVTRARCHPETIEFVARKKAEGKTHREAVRSLKRHLARRIWQLLRAPHPVPETTPIPSTS

SEQ ID NO: 409787 - protein, 346 aa, unidentified
MVYVGIDLHRKRSQVAVVDERGQQLLSRRLVNDPERFRELLGELAEDASFALEATYGWEWLAELLEDEGRELHLAHPLRTKAIASARVKTDAVDARTLAHLLRADLLPEAYIAPRELRDLRELLRQRFVLTQMRTALKNRVHALIARQGVQHGHAKLLGPGGRAFLAGLELRPEPRRRLDVLLRLISDFDREIDALALEIDQRARADARVAVLCQIRGIGRYLALLIIAEIGDIERFPSARHLCAWAGLTPTVRSSDAKARLGHISRLGSGALRWALVEAAQKNTQGDGPLAETFERIAERRGRQIAKVAVARKILTLCFYGLRDGEIRCLATSSGRASAVKVMAA

SEQ ID NO: 409788 - protein, 362 aa, unidentified
MSPHIIDVGTARVLDFKYTSGQHSANIIMEACAMQTILHNCCGMDIHKDTVVACILKTCETIGVINANENTVKELRVFKTFPDDLAQLRSWLEAENCCHVAMESTGVYWSPVYDALEDACNGNMQLIVTNARHMRNVPGKKTDIKDAEWIASLLRAGLLSGSFIPPLEVRELRQLTRYRKNVVQDINTQKNRIEKSLQQAGFKLSTFLSDVFGVSGRNLIRVLIKKGKLTPTDVEYATTRISPEKKAEIKLAINGKLTAHQRSFLKLQINHLDQQLAHLTTIEQSIAELSKPFEEEISRLDTIPGIAETSAVSIIAEIGTDMSKFPTAEHFCSWAGVTPGDNSSAGKKKVHELLLATPTSRA

SEQ ID NO: 409789 - protein, 349 aa, unidentified
MKIIGCDFHPSFQQIAICDLETGELQERKLSHGDGQAERFYRELGEPALIGIEASGNSQWFLDLVERLGHEIWVGDAAKIRASYVRKQKTDKRDAGHILKLLLEKRFPQLWRPSAAMRDQRQLLRHRDKLVEIRTKVKNSLQHLAMNRGMQKKSRLWTRQGMEQFQQLAMPGWAGRRREDLFELLKELNGQIEPLDQAVKQAAEQHPQAQLLMTQPGVGPVTALAFVLTIGDVARFAGSKQLTSYLGLVPSEHSSGNKRRLGAITKQGNCFLRKLLVEAAQTTVRKDEGFRKEYQHRCHHGPKAVAKVAAARKLAVRLYWMLRSNVGYPEIVHIESNPRVPLGESSPKH

SEQ ID NO: 409790 - protein, 387 aa, unidentified
MSTSMEHPASQCSLYVGLDVHKESVTIAVLPAAAAIPSRIDKVANDCKVLRRYFTRLAAAGEIRACYEASGAGYVLQRALTEWGYHCDVIAPSLIPQKPGHQRKHDRYDAKQLAHLYRSGELTPIRIPTEAEERVRDLVRCRATFQRELLRARHYILKFLTRRGLRYTAGKCHWTRAHHAWLEQLSRNSVLAAEDQAIFSEFLGLLRYAQQRRDALDDQIEHLALAPTLRESVAWLSCLRGINTPAAVTLATEVVDWRRFGKPTQLMAYVGLVPREDSSGTTERRGPITKAGNSHCRHVLVQAAWAYRHAPRVGAALARRQRGQPPLVVTHAWKAQHRLHKLYHRIAVRKGPQVAVVAVARELVGFLWAIMQECPLASELAQHGAAA

SEQ ID NO: 409791 - protein, 336 aa, unidentified
MLYVGLDVHKRFWVCCVLNGKGEEVGMKWLRPDSNLLVEWLKGFGERFSVCFEASTGYGYLYERLTVCASEVVVAHPGHLRLVFGSKRKNDRIDARKLARLLLLGAVPRVHVPRPPVRSFRAAVRARQRLVDECTRCKNAIRALLDANGIRAPKSLWSRAGRRWLAAVEFGDRLSAERRDLLVEALEQATARRKRLERILDRLTRHDRAVVLLRTIPGVGIRTAQAMVAYIDEAKRFPRNKFVGSYFGLVPREHTSGGRKRLGHITKNGPAVARRLLNQAAWQAIARSPEVRAFFERVCRDDPKRRKIAIVATMHYLVRVMHAMLRTGEPWRPLAR

SEQ ID NO: 409792 - protein, 462 aa, unidentified
MMNVQEQREMVEKANRILSEMKSFTWRDLETQGKFSKNDKLSFISDDMLIVGCDIGSETHYVRAIDTRGRELSRKALAFDNNAEGFQKAHDWAVQLAAASDKKQIVLGLEPTGHYWFCLAAWMVSNGISVVQVNPYAVKQTKELEDNSQQKDDRKDPKLIANLVKDGNYGMPYLPEKVYAELRRLSMFREQLTEDRNRSMNRLHREMKIYFPEYKDAFGKIDGAFCMAVLKEAPFPEDILKLGGEGIREIWHQAKLRGRGYSRAAEIVKYAETSIGLKDGTAAGREAVRWFAEKIMELDEELAEVENKLNEKCREIPHAENVLEIPGIGGKILSGILAEMGDISRFDDAKELQKLSGLGLVSCSSGKHKGETRISHRGRKRLRYWLFQAARSAVAHGEEYKWIHAHYTTRAGNALQKMQSLIVIACKLLRVIYTMLKTGKPYDPEKLLKDIRYPENVQTAAA

SEQ ID NO: 409793 - protein, 418 aa, unidentified
MAFKIFRKNCCGLDVHKTWIYACIGITDADSRTEYKQARFSSFSKGLQELSSWLAKYSCTEVCMESSGKYWIPVYNILEKTCWVTLAHPKYTKPQKGNKTDRKDAKWICDLFMCDMIKPSFIPPPDIRHLRDLLRFRMKLTYQITGMKNRALNCLTVSNLKLDDVFTDVFGKSSRSIIQQILDHPGETFDVTPYIHKNCKHPVEEIQAAIDGAICPEQSTKLKICLDFIDEQERHIAELDTEIFRLAEPYTSVLEFMRTVPGFSKEPLTAIRLLSEIGSDMSVFPTSKNLVSWAGCCPRNDSSAQKVKSTRISRAGSYLKPLLVQIANALLRSKEHPEFKERYRRIKACRGHKRAIIALCRMLLTAIWNVLSKCEPYSAKGYLADKLTEHSVVISRAEGLALLRQRGYIFKDEVADFT

SEQ ID NO: 409794 - protein, 403 aa, unidentified
MNNVVGIDVSKGKSMVSVLRPFGEVVAKPFSIGHTGSELKELADYLKSLDGETRVVMEHTGRYYEPVARFLHDEGVFVSAVNPKLIKDYGNNTLRKVKTDKADSRKIARYGLDNWAELRQHTPMDTIRMQLKTLNRQQSLYSKTKTMMKNNLIALLDQTYPGVNTLFDSPVREDGSQKWVDFATAFWHVDCVRSMSLTAFAERYRKWCKRHGYNFSQSKAVEVHAGAQDLIAMLPRDALTKTMVRQAIDALNAISASLERLKAEMQALAAQLPEYPVVMAMHGVGDSLGPQLMAELGDVTRFTHRNAITAFAGVDPGADQSGTHEAKSTRVSKSGPPELRRALFLVMDCLLKTMPQDDPVYRFMDKKRAEGKPYLVYMTAGANKFLRIYYGRVKEYLASLEGN

SEQ ID NO: 409795 - protein, 400 aa, unidentified
MRVVFGIDVSKVSSEVAILVNGEKVHNYTMANDAIGFSRLLGDLKTVHKPEIIFEATGVYSRRLQAFLEDNGYAYTRLNPLEAKKQLDSLRVRKTDQIDAEKLAQSQFVLNRKPTYVQEEVYQNLRDFSRFYQNLTEDIVRAKNRLHKVLQVTFPELETILSTPTGEQYWNLVIAFPCKDFVLELSKDELSKSIRLSTSKRISDKRVVYLAEKLAALANQSYCAVKKTSPIMEEVRYYAKELLRLSEQRQAVLDEMVELAQPLPEYDILLSIPGIAETTATSIIGELGDIRRFQSANQINAFIGIDLRHYESGNFIAKEHITKRGNPYARKILFKCIHNIASASHTNPCHIADFYEKRKRQSRTTSTKPHTIASIHRLIRTMYYLITHNKLYDYTSTQNR

SEQ ID NO: 409796 - protein, 351 aa, unidentified
MSQPVTTTIAVMGIDIGKNSFHVVGLDQRGAIVLRQRWSRSQVARRLANMPACLVGMEACVGAHHLSRKLKALGHDARLMPAKYVRPYSKGQKNDFRDAEAIAEAVQRPTMKFVATKTADQLDLQALHRVRERLVSQRTGIINQIRAFLLERGVAVRQGQRFLRIELPRLLTAPPDVLSPRMVRVIEDLAGDWRRLDERIEALSAEIEAIARRDAGCQRLMSVPGIGPIVSSAMVAAIGKGDGFGKGRDFAAWLGLVPKQISTGDRTILGKISKRGNRYLRVLFVQAAWVVLIKPKSWERHGLKRWLEAARKRLHRNVLAIALANKLARIAWSVLANHRNFETTRILVAAQ

SEQ ID NO: 409797 - protein, 343 aa, unidentified
MESVYYIGLDVHKKTIDYCIKTVDGQIVRQGTVGANRKALNQWLIELSTPWLGAMEATLFTGWIYDFLRPHAVELKVAHPEMLKAITAAKKKNDRADAEKLADLLRVNLLPECVMMSEELRELRRILRYRNMIVRTATRMKNKISGLLMEVGADYNKQRLHGKAYFDQLLERVEDVPDSVKDLLKLSRTNLELFTAVQKKLLKVLRNDSRIQQRVENLMSIAGVGEITGLTWVLEIGDPARFRSSRQAISYCGLCSAQQESAGKEQRGPISKKRNKHLQTMLIEAAKLAPLWNPLLASLHERELARGNRNRATLAVARKLVEYMLAVDRRGTPFVTETMEKAS

SEQ ID NO: 409798 - protein, 338 aa, unidentified
MLHVGLDLHKRFSTVTVMDDNGTVLEQAKLYHDDRARLTEFFRRLAGKAVVTVEATRNWYWLYELLEELGVTVKLANARKVRLIAEARLKSDKVDPKSLAQLERTGFLPEAYIPPREVRDNREYLRYRLTLVRLRTGLKNKVHALLDKLGISHQFADLFGPAGRRFLSQLELRPVYQQELTNYLALVDDLEQRIVAATKAIKQQLKPDPRAGLLMTIPGIGHLTAYLLLNEIGDIKRFATPGKLCAYGGLVPIVRQSADHRWQGHLTSDGNHYIRWALAESACKAPGKDYQFGTFYRRLAARRGTLKARMALARKLLVIIWHVLTNGEPYKVKEVPTI

SEQ ID NO: 409799 - protein, 341 aa, unidentified
MRAGDVDRLVSILETGRARAMRDASRALEIVLCYEVGYDGFWLARLLIARGIRVIVFDPASFLKPRRGRLAKTDRLDAEEMTRILRTWLSGDRAVATAVRIPTVEEEDAKRIERERKNLVEERTRIVGRIKGLLALHGIWLSSKRIGKGLLGRLDTMMTGDGRRLPPFLRRDIGRMIRHYEFICDQIAEVEADRKSALNDETSSFPQRDKVRRLTSLGAVGVTTATVLVAEVFHRSFETRRHLASFIGLAPSPYASGDVNRDRGINKAGTKLARQTLVELAWFWLRYQPNSKLARWWHERFGNMGMRGRKVGIVALARKLAIALWRFVEQGVVPEGATLKS

SEQ ID NO: 409800 - protein, 337 aa, unidentified
MSKVTTVGIDLAKSVFQFHGIDASGEVMLRRQVRRAQMPQMLAQLAPCVVVMEACGGAHYWARLSRELGHTVKLLAPRYVKAFVRGSKNDRNDARAICEAGCQPGMPTVAVKSETQQGCLALHRVRALAKKQRTMVANQVRGLLAEQGIVLAKRIGTIRRELPGVLPRLEPHLRRALELQWQQLQALDRQIAGLDQELKELASGSATCQRLMRERGVGPVIATAITAEVPEPRVFRNGRHFAAFLGLVPGQDSTGGRAKLLGVTKRGDAYLRTQLVHGARSALRRAAHHDDELSRWAQAVAQRRGFNRAVVALANKLARRLWAILRYGEAFRATAAA

SEQ ID NO: 409801 - protein, 402 aa, unidentified
MNAVGIDVSKSKSMVAIMRPFGEIVSTPFEIKHTASDIHSLVELINSVEGESRIVMEHTGRYYEVLAHQLSKANLFVSAINPKLIKDFDNDSLRKVKSDKADAVKIARYALDKWQNLKQYNVMDELRNQLKTMNRQFGFYMKHKTAMKNNLIGILDQTYPGVNTYFDSPARSDGSQKWVDFASTYWHVDCVRKMSLNAFIDHYQNWCKRKKYNFSQSKAEEIYGKAKELVPVLPKDAITKLIIKQAVDQLNSASTTVESLRTLMNETASKLPEYPVVMAMKGVGTSLGSQLMAEIGDVSRFTHKSAITAFAGVDPGVNESGTYEQKSVPTSKRGSADLRKTLFQVMDVLIKTHPQDDPVYQFLDKKRAQGKPYYVYMTAGANKFLRIYYGRVKEYLASLPES

SEQ ID NO: 409802 - protein, 345 aa, unidentified
MEPMHYIGLDVHKRKISYCVKDSGGKVYSEGSLTATRLDLDVWMKTLPQPWSAAMEATMFTGWIYDHLKPHAAALKVAHPLMLRAIAAAKKKNDRIDASKICDCLRCDFLPECYMAPTAIRERRRTLRYRNLLVRQMVQMKIKISSLLMEAGVSYNKQRLHKAGYFRELLVTNPDIHEGLKPLLQLCRETVVRLQKTESAMVRSLERDSLLMDRVERLMTIPAVGPITALTWTLEVGDVQRFSSIKKAISYCGLCGAEKSSGSTVQRTPLSKQRNKHLQTTLIEAAKMAPRNSPELAMLYDKEKQKGNANRATLAVARKLVAYLVAVDRRQKEFLTVERENRTAA

SEQ ID NO: 409803 - protein, 350 aa, unidentified
MLYTAIDYHKRYSVACTMDATGARVKEARIDDNEPAAFAAYFQSLPDQSQVVMEACWNWGWLYDELGEISGVETVVLAYPFKTRLIADAQIKTDRLDARALATLLRGNLVAKVHAPSPLTRARKHVIRQRMFLVQLRTMVRNRVHTVVARQRGIDRPVFSDQFGKKGLHWLRTVALPAPDDALLRQDLQALEQLGVLIKELEQRLLADNANDAAVHHLQSLPGVGPILAAVMAAEIDGINRFPRADKLCAYAGLAPTTYASGGHVHHGRMLPFANRWLKWAFIEAAWVAVGCSPYFGTLYRRHRARGKKANTAITIIARRMCRIAWQLLHEGRYFTPVPPKLTLSPVAPL

SEQ ID NO: 409804 - protein, 387 aa, unidentified
MPQPKDLSRSPIALNQDGTLIAVIEMSRSSWLVTGVIPGIDRHPLKKLEPDEEGLLHLLRRWQDEAARAGRTISRIAVAFEAGRDGFWLARWLRARGIEAYVIHPASIPVSREHRRAKTDRLDTELLKRAFLGWLRGEPNHCGMAAVPTLEQEDAKRPNREREVLVGERTRIVNRMKGTLARLGIRGFKPALPRAPERLETLRTPEGATLPPNTRAELQRDMARLRFVTDQIRELEAARAERLEHAPETGPNAMIRLLARVVGVGIETADMLVQEVLSRNLRDRRAVARYAGLTGAPDESGAKRREKGLAKAGNARVRRGMIQLAWRFLLFQKDSALSQWYRARTTDARGATRKTLIVALARKLLIALWRFGATGEVPQGVVLRPAA

SEQ ID NO: 409805 - protein, 337 aa, unidentified
MDTIGLDLHKRETQVCVLTEAGEIVERRIVTSRERFTAVLGGRAPARILVEASTESEWVAQHLELLGHEVIVADPTFAPMYATRRRGVKTDRRDARTLAEACRLGAYRAVHRASAAQRHVRAQLAVRDALIRTRTRYVSVVKALARRDGLRLPSGEPVHTEAKLAALPLSAALIAELAPLRVVLEPLNAEIAAADARLAAVAADDPLVARLQTAPSIGPVTAVAFIATLDDVTRFASAHHVEAYLGLTPREYSSGEHQHRGHISKTGNPRLRVLLVEAGWRLLRTNDAAAAPLRAWAERIAARRGRSIAAVALARRLAGILFAMWRDGVDYRVRAAA

SEQ ID NO: 409806 - protein, 342 aa, unidentified
MGQVSMIGIDLAKNSFQLHGMQADGSVAFRRKLSRTKLLEFVAGQPRCVVAMEACGGAHHWGREFGGLGHTVRLVPPVYVTPYVKRQKNDATDAEAICEAASRPTMTFVAVKTRDQQARMMLFRTRDLLVRQRTQTINALRGHLAEFGIVAPKGRVHVGRLAEALADPAAELPEAVRALGGLLLGQIADLDEKVAGLEKEVHAEAKQDEDAVRLMSVPGIGPVIALAIQAFAPPLEGFERGRDFSAWLGLVPRQHTTGGKPRLGRISKMGQRDLRRLLVVGAMSVIRNAVRSGRFHDPWLAGMLARKPRKLVAVALANRMARIAWALMTKQESYRAPAPAVA

SEQ ID NO: 409807 - protein, 412 aa, unidentified
MPSPLFVGIDVSSQDNVVCCLTLQEEKRPLCRFSVANNRPGILEFQDRIVSLVHKHGFDQVLFGLEHTGCYSTHVAMYLQHHLSFDCPETKVYVFNPSLIRDFKKSHYLDAPKNDRVDAWFIASKLRSGHLPHPFTLNEPLLALQRLTRARLHLVRELTRNSNILMTNLYLKFSDYTVGPFSNKLSATSLAVMEEFDSAEEIANISLDQLVEFLVERGKNRFDDPAQVAKALQKAARSSYRLPQSMADSVNLAMASLIRVIRTLQEQIKSLNKAIEDHLATIPQTLDTVPGIGPIFAAGILAEIGDINQFKNHRQLAKFAGLAWTEHQSGNFTAAQSRLILSGNRYLRYYLMEAANSVRVHDPVFARYYAQKLAEPKTFATKRALALTARKLVRLVDSLLRTNRIYKPEGGV

SEQ ID NO: 409808 - protein, 344 aa, unidentified
MEHYAGLDVSLEQTSVCIVDARGTIISEAKVASEPEALVGFLRGQGLDIGRVGLEAGPLSQWLHAGLVAAGFEAVLLETRHVKAALSAMTVKTDRRDARGIAQLLRLGWYRPVHAKSASAQEVRSLLTARKLIQGKLLDIESGIRGVLRGFGLKVGPISRGRFEARIRELVEGQAMLATVLDSMLAARAALQAEFARLHRTLLVLARADPVCRQLMSVPGVGAVVAITFKSGVDDPTRFRRSRDVGPHFGLTPMKYQSGEIDVTGSISKVGDRMVRTALYEAASVMLTRTVRMSPLKSWAMGVAKRRGGKKARVALARKLGVVLHRMWVDGTSFRWTSETAAIA

SEQ ID NO: 409809 - protein, 414 aa, unidentified
MAGSGLLKQSLPGSALVVAIDPGKVSHRVWFSTGDVGLVEEPRSVPSLRPGLDEVTATIRRLAGTQAPVVAIEATGALHGSWVRALEERFALSVRVFAPSETAAARAQLGSRRFKSDDRDCAALTYLARQGQGRPVVADPVEAVRGAVRYRRGLVAERKIAQQRLHDQLNVLCPGLSAPAGHARVLELEDSSGQAVLACAAAFAGRAPTVRSLQARAPGRLFDSNARYWVQRWKTCLPPPADAQVRAERLGRSLCRWQAIRADTAAVEVTIEALLAATAGQVLTTLPGVAVIRAASFAAFSLPVERFPTAEHLYSATGLAPARYQSATINRNGRISRTGLAEHRDALMGIAWGLSRYCDPFIDRDRELRARGMAPIQARVALARHACRLTYRMLKTQQPFDEQRYRQGRHPSER

SEQ ID NO: 409810 - protein, 405 aa, unidentified
MDIIIERGAGIDVHKESLVACIMGTGIKKEIRTFSAMTNDLLRLKMWLKERGVTHVAMESTGVYWKPIFNILEDAFEVILVNARHVRNVPGRKTDVKDSEWLCKLLRNGLVRGSFIPPKEIRELRDLTRYKRKLIQAIASEKQRIQKILEDANIKLSSVASNIFGASGTRIIEELMKGDLTAKEMAELSKGRLRKRKDDLTEALVGHMEEHHTFMITASLRHMKAIEEILSTLERKIAETIELHYKEEYELLQTIPPVKDSASIIIAEMGVNMDLFPTEMNLSSWSGMSPGNNESAGKKKPGTTTHGNKCLKSILTELAWVASRMKGTYLYSKYHSLVGRRGKKKTLVAVGHKILIMCYHILKYKVPYKELGENYLDTRKKDRIVKSHIKRLTSLGYVVTLSEAA

SEQ ID NO: 409811 - protein, 453 aa, unidentified
MARKAEKEKTKDGLKLKIVNPNAAGIDIAYGEMQVCVPEDRDGENNRCFGSFTCDYEEIASWLKACGITTVAMESTGSYWVGLFFFLEEKGFDVLLANAKDVKNVSGKKTDEADAEWIMLMHSYGLLKPSFHPDAAARSIRELARHRDNMLRSASKEVQHMQKSLVLMNIKVDTVISDILGKSGKAIIEAILNGNHDPKSLVQLVDPRCKASKETIEKSLEGTWDVVHLFELKQSYDLYKYIHTQIADCEAEMDRLLGEYTDGCGTDMQGYTATKKRVSKKNAISFDAEKHAFSMWGVNAMEIPGMGLGALAVLMGELGRGFTEKFTSAKSFCKWCNLVPNNKISGGKLLSSKVPKQKNRVGQMFRQCANSVKSVKTGLGIYFRRQKSKGGHLQAIVATANKIARIFYTMVVSKNHYDESKVGLDEKQLLERKIILAQKTLDRLNRKLSVTQG

SEQ ID NO: 409812 - protein, 345 aa, unidentified
MQPMYYIGLDGHKRKISYCVKDSGGKVYAEGSLPATRFDLDHWMKTLPQPWTAAMEATMFTGWIYDHLKPHAAALKVAHPLMLRAIVAAKKKNDRIDANKICDCLRCDFLPECYMASTAIRERRRTLRYRNLLVRQMVQMKNKTSMLLMEAGVSYNKQRLHKAGYFRELLATNPDIDEGLVPLLRLCRETVVRLQRTESALVRSLERDSLLMDRVERLMTIPAVGPITALTWALEVGDAQRFSSIKKAISYCGLCGAEKSSANTVQRTPLSKQRNKHLQTTLIEAAKMAPRNSPELAMLYDTEKQKGNANRATLAVARKLVAYLMAVDRRQRDFQVVETSSGIAA

SEQ ID NO: 409813 - protein, 367 aa, unidentified
MKKGSTVAAKTTKNFSQQQLTIGLDLGDRSSWYCVLDERGEIVLEQKLSTTPKAMKEVFGGMPRSRIALETGMHSPWVSRVLSELGQEVIVAHARNVRLIGESRKKDDRLDAQTLARLARIDPELLSPVQHRSAKAQADLTVIRARAGLVRARTALVNTARGLAKSYGERLRGCNVRNMNPEKAEGLSPELQKALEPLLAGIESVSEQIAEYNERIEQLAQQSYPQVALLKQIKGVGTLIALTFLLTLEDPHRFHKSRDVGCYLGLQPGRRNSGQSQPQLRISKEGDPYLRTLLVQGAQHILGPFGVDCDLRRWGLKLAERGGKSGKKRAIIAVARKLAVLLHHLWVSGEVYLPLHNSSRAALRAAA

SEQ ID NO: 409814 - protein, 339 aa, unidentified
MMYGAIDLHLRYSEIRVVEADGRLVRERRVATSRETLTAAFAGLGVLRVLLETGTESEWVAQTLEAAGHAVVVADPNYAPMYGEVRRRVKTDRRDVAALAEANRHGWYRATHRRSRAQRTLQQILRSRRQLVAMRTGSISVVRALLRQEGYRLPSGSAAQVPARLARVPLPDELAATLAPLRQVIDTVTRELAAIDTRVRTTAAADPVVTRLQTVPGVGPVVALTFRATLDEVTRFQAAGQVSAFLGLVPREDSSAERRHRGHITKAGSGELRSLLIQAAWACWKSRGSGTLRAWAERLAGRRGRRIAVVALARRLSRILYAVWRDGTTFDGARVAAGA

SEQ ID NO: 409815 - protein, 391 aa, unidentified
MIYIGIDVAKDKHDCFITNSDSEVLFKAFTIANNLDGFNDLYQKIESVMDDVTKVKVGLEATGHYSYNLLGYLIDKGLPTYVINPLHTNLYRKSLSLRQTKTDKVDARTIASMLMSDVNLKSYSDTFYHNEELKSLTRYRFDKVKERAKLKTSVSRLVCILFPELEKLVPTLHMASVYALLSEFPSAKHVATAHLTRLTNLLSESSKGRYGKDTAITFRDAARASIGSNMPAKSLELKHTIKLIQELDSEIDEIENEIKIIMDEINSPILSIPGINYRMGAMIIAEIGDFNRFDSPDKILAYAGFSPSTYQSGQLDGAYAHMEKRGSRYLRYALYNATKYVCHWDPTFAAYLAKKRAEGKHYNVAISHAVKKLVQVIYHLEKTKQQYIKVA

SEQ ID NO: 409816 - protein, 386 aa, unidentified
MPGNAFSPTEYDIFAGLDVDRKSLSVTFTSHQGFLRSLRMPYSVDHLVHYVRKHFADQRVAFAYEAGPTGYGVYDGLVAQAYPCLIAAPAMIPRAPGQRVKTNRLDSRALSENLRGGQLTSLHVPSPVYRELRHLTQLRDTVVSQVVATKQRIKSLLLFEGLPFPPAPAGRGQWSVRVKAQLRQLPCAPTVRFKLDQLLDTVAFAEQQVLQTTRAIRCFCQTEPELARCIQYLMTVSGIGWIVASQLLARIGDWRELKNIRQLGGFLGVVPAEHSTGEGAHRGAITRTGDARLRAKLIQAAWAAIRHDAELRHFFRAVCQRHPPDRGPRIAIVAVARKLTVRIAVVLMRQRPFVVRDQVPSAPVTQEETVPQGTTRRQAEPGAAAP

SEQ ID NO: 409817 - protein, 443 aa, unidentified
MSYRIAGIDVHKKMLAVVVSDVEVDDEYQFERRMFGSNPEQLRSLAAWLLEQEVEELVMESTAQYWKPVWEALERHWKPLRQKREGASRRSGTLHLAQAQSNRGRRGRKRDFPDAERLVKRLVARELTLSFVPDAEQRLWRTVTRRKYQLTRDRVRLQNQVESLLEEAHIKLSSLVSDLLGASARRMLKALAEGETNPAALAALADQKLRATPEQLCDALGACTDLKPVYRRLLKMALEQLQFLEQQIGQLDQELASLLHPHQDAVQRLAEVPGLGVDSAQQIIAEVGSTAATFPSEKQLSSWVGACPGDDESAGVNYSHRSPKGNRHMRRILNQSANAAVKAKGTRGDCPPTVSVNLVDPAPGSPLRRTRPSSHQTIEAKAHCENDPATPKPRLSDRTTESSTPEPRARAVIFDPVGLFHPLQHAGLSRRSPGSRQSGNRNC

SEQ ID NO: 409818 - protein, 344 aa, unidentified
MTLVGCDLHTRKQQVAALDTETGETQERQLLHEGTAVEEFYAALPRPVTVGIESTGYAIWFHALLHRLGHTVLVGDAAKIRAMVVRKTKTDQRDARHLLDLLRHDRFPIVWVPDPATRDLRALLTHRRRLVRIQTMLKNGLHAIALNQRLVRGAKLLRHAGVTQLQALPLPPYTAQRRDHSLELLETLHTKIQELDAAIATAASAHPDAPRLLTHPGVGPLTALTTVVVLGPVTRFADAKHVVSYVGLAPSLNASADKYRLGHITKQGSSLLRWVLGQAAPNAARIDADLKRTYCTLRHRRGHAKARVAVTRKLLVRLFIMLRDQIDYAEFRRRGRRPAPVAAG

SEQ ID NO: 409819 - protein, 349 aa, unidentified
MEHYAGIDVSLELSSVCVVDAKGKIVKEAKVASDPEALVLFFTGLGFIVERIGIEAGPLSQWLHAGLAKTGFETVLLETRHVKAALSAMTVKTDRKDARGIAQLIRMGWFRPVHCKSTGSQEVRALLVARKLLLGKLLDVEFSIRGILRGFGLKMGVVTRNGFDARVRELCAGQAMLEQIARSMLAARCALQTEYTKLHKAMLSIVRGDAICRRLMTTPGVGPVVAITFKTAVDDPTRIAKSKAVGALFGLTPKKYQSGETDVTGGITRVGDESVRAALYEAANVLLSRVTRFSALKRWGMDVAKRRGMKRAKVALARKLGVILHRMWIDGTSFRWTKVAGGDEQLARA

SEQ ID NO: 409820 - protein, 394 aa, unidentified
MRFVGIDVGAERHVVAGVDEAEAVVIPPTGFTEDAAGYHQLRTLLGPATDTLVALEATGHYWKNVFAVLVSAGFAVALLNPLRTRRFAEEDLQRTKTDTIDALGIARFAGQKRPAATPLPDPATEELRELLRYRDRLSQDFGDRERQLHRLLDLGFPEFPRHVHDVGSELATAILRDYPTAAAFQGVAVRRLAGLRYDGRHKVGTDLATTLLTAAAGSVGQHHGAAYRVQVRDACADLDVLRGRLRTLDRDIERLLEDHEVGTLLTTIEGIGPQTAARLVATFGDFSGVRSAAALASYVGVIPGLRQSGKRTSVRASLTPIGAARLRAKLYMPVLSAVRHNPWLRAYYVRLIGRGKLPKVAIIAAMRKLLHAVYSVATHRRPFTPHVVTQEARA

SEQ ID NO: 409821 - protein, 341 aa, unidentified
MGIVGALDLHRSQITYHWQDLATGEVHRGRIVPGAREPLRAWLAGFHGADAHFALEATTGWRFVVQELERARCTPHLGDPAEISTRRGPKRRAKTDRADCEHMTALLLEGRLPECWIPPPDILEARTLSRLRKVLVDERRQWMQRIHAQLYHQDAPAAKSIATAAGRARIIDTELSSAGRRVLAVGLAALEHIEAEVSTLDRDLAIFARRHPGCRALRTLYGIGPITSVAILTELGDCRRFSSSDHAVRYAGLDVTVYESNDRRAPGHLSRQGPAVLRWALYEAAQCAARPASPDHAYFAALAGRLGHNRACLCMARKLCRRAHHLLRELGEDVFLTARAA

SEQ ID NO: 409822 - protein, 421 aa, unidentified
MRGLRAKRVRTVKEGTLIATVDIGVANNTGFCTTLDGRSTKSFRFDNTKEGFEKFWWMTIASKNRFGCDELLVGYESTGPYAEPLVHYLAKKQVKIVQVNPMHTKKMKEVNDNSPLKTDDKDPRVIADIIRLGRALTIVVPEGDAASLRRLNNARERHVGEQTALLNQLQQLVFLIFPEFKTVLKNMKSKTAQYILKRYTTAERIGPLSKEVLGEEMRKQSMGKFGIKEAESLIGLARETVGIKEGNTGIFMDIRHILMQLEAEGRFISEIEAQMRATLERIPYSVRLLSIKGLGIVSVAGLIGEVGDFSKFSTQSEIMKLAGLDLYEISSGRRKGQRRISKRGRSLLRKILFYAAIQMIRKNGIMYEYYARLTGRGMERMRALIAVSRKLLRIIHAIVRDNRDYVGQYQTPERRVIKMAA

SEQ ID NO: 409823 - protein, 428 aa, unidentified
METPTSSSQIVAWVGLDWADQRHEVRLQAVGSEKIESCTVEQKPEALHAWVAELQARFPQGRIALALEQSRGAVIYALMNYAFLWLYPVPPKGLARYRQAFFTSGAKSDVSDADLLLEMVRSHRDRLRAWQPDDALTRQLRLLVEHRRETVADRTRLTNRLGALLKTYFPQALEWAGELRSLAACEFLSTWPSLEAWRAAGRSTQRKFYRRHRRLPAAELEALLDAIAQAQPLTRDRALVEASVLMTQTLVEQLRTVLAALARLDQTLEKLFDQHPDQQLFRRLPGAGDALAPRLAAGFGTDRQRYLKAEDIQQFSGIAPVTEASGKQRWVHWRRACPKFLRQTFHEFADASRKKSLWARAYYEQQRQQGASHHGAVRALAYKWIRILYRCWQSHTPYDESVYLAALRRRHSALWLAAGSLSTQEAQA

SEQ ID NO: 409824 - protein, 432 aa, unidentified
MERIREKTAGIDIGARKVFVSIEAQEVRCFFTFTEDFEKLRDYLVENSIETVAMEATGVYWSILYDMLEEAGMDVWLVDGAQTKQVPGRKTDVKDCQWIQQLHSYGLLNRCFVAESDVKELRIYQRLREDQIRSASMHINHMQKALTEMNIRLTEVLDQIHGVSGLAIIEAILKGERDKEKLLRLCHSKIIKNKKDEVLKALNGRYTKAGLFALQQAFDSYCFYQHQIEQCDKMLEDVLKRMSKGKPNQTISSHRKPIRHNKPDIDNLGTEMMKIFDGKDATTLSGITDYTWMQLLSETGTDLSRWPSEKHFTSWLGLAPGQHTSGKMKKNKRKSGRPKAGQIFRQIAQSLLTSKRIALGAFGRRLGSRKGSPVAIKAIARKLAVLYWRIMVKGMEFVEKGIHDYEERLLAQKQRSLNRLAKELKIQVVYNV

SEQ ID NO: 409825 - protein, 327 aa, unidentified
MTQKMDVVGIDVSKATLDAYALTSQQARQFANDPAGHQGLVAWLQELGVGVAVFEASGGYERAAAQSLRRAGLVAHVVDPKRVRYYAQAAGQLAKTDRIDARMIAAFGAAFLLGKPSGVAGGDDPARQDLAELVGTRQVLVDHRTSLQQQADAVTSAIAKKLLLATLKQLDRQIETSDRQIAAAIARHEPFAALARRLDTVPGLGPVSIAALIAWLPELGQLDRRQLAALVGVAPFADDSGKRTGQRHIQGGRMKLRNILYMATVGAATRHNPVLQARYRRLLENGKKPKVALIACLRTLLTILNAMVAHQQDWNPTKLPATEPVAA

SEQ ID NO: 409826 - protein, 343 aa, unidentified
MGQYIGLDVSLKDTAISIREDGKRIWRGKCPSDPGIIAQAVRKHSDDPLSVVFETGPLATWFFHALTGEGLRAICIEARHAQKILGETLNKTDANDAEGLAKLAETGFYKAVRVKSFEAMLIRSLVAARTQLLAITTQLTNQIRGLMKTFGLVVPKSKGRVFIEKVNDLLDGHVELKGIIYPLLEAWQAVRERASTLSRQLLLAARQCQSTRLLMTIPGVGAITAVSYVAAIEDPKNFPKSRSVGAWLGLTTRRYQSGEMDFNGHISRRGDQRLRGLLYEAATSLLTRTRAETVSDLKTWGLQLRERLGFKRAAVAVARKLAVIMHSMLKTGQTFTPTREELA

SEQ ID NO: 409827 - protein, 388 aa, unidentified
MIYVGIDIAKLNHFAAVISSDGEILIEPFKFTNDYDGFYLLLSKLAPLDQNSIIIGLESTAHYGDNLVRFLISKDFKVCVLNPIQTSSMRKNNVRKTKTDKVDTFVIAKTLMMQDSLRFMTIDDLDYIELKELGRFRQKLVKQRTRLKIQLTSYVDQVFPELQYFFKSGLHQNSVYALLKEAPTPTAIASMHMTHLAHLLEVASHGHFGKEKARQLRVLAQKSVGVNDSSLSIQINHTIEQIELLDSQLFHTELEMANLVTCLHSVIMTIPGIGFINGGMILGEIGDIHHFSEPKKLLAFAGLDPSVHQSGNFQAQRTRMSKRGSRVLRYALINAAHNVVKNNATFKAYYDAKRAEGRTHYNALGHCAGKLVRVIWKMLTDEVEFNLE

SEQ ID NO: 409828 - protein, 351 aa, unidentified
MSQKTNAVVVRTIGIDTGKNTFHLIGLDQQGAIVLREKLARGRIGRRLANASPCLIGIEAGMATHYVARELLALGHDVRQIPPAYAKPFRQGHKNDFRDAYAIAEAVLRPSTRCVPVKTDDQLDLQALHRVRSRLVGQRTAVINQIRSFHLERGIAIRQGPRFLRQRLPEILAKRIDVLSPRMIAIIEDLSGDWRRLDERVERVTEEIEQLAQGSESCRQLMTVPGIGPLIASAMVAAIANGAAFAKGRDFAAWLGLVPKQMSTGDRTILGHISKRGNRYLRTLFIQGARVILLRPANWARHSFGLWLTAAAKRLHHNVLATALANKLARIAWTVLAQRRNYDARVIPQAA

SEQ ID NO: 409829 - protein, 342 aa, unidentified
MERTQGVRSFVGIDAHSKQCSIKAISAQGEPLLELSVSTHPERLRSALRGLSEPVWVMLESSFLAGYVKENLESEVARVIVCETRENRWIAKSEDKSDPKDAERLARLLRMGEFKEVYVPKGLCRDRREVLRMYQKAQGDVARTKNRIKAKYREHGIFAQGGSVYSPTHRERWLVKLERPNIRLLLESLYSKLANEELFRDRVLEQLVELMSATREYQMLKTIPGVGKILAGVMAAVIGDFGRFSKKRQLWSYAGLGLRSPWSSDPSRARVQGSSGGNRSLKYAALSAANGALRGDNRFSRHYQKMVAEGVDPAMAKRTVARQILATALAMIKSGQVYREAK

SEQ ID NO: 409830 - protein, 346 aa, unidentified
MALFVGLDVSLRTISICIIEAKGKVVWEGKVLCEGPALVAALAPYRKKIKRVGIEAGPLSEWLFGILTECHFKAVCIEARHAHRFLSSRPNKTDRNDARGIAEMMRLGHFKAVHVKSRASQLLRTLLAARKTFVDHMLEIEQAIRGFLKVYGLKLGQVHRYNFSAKVKTLVADTPELSVAIAPLLEARDMMRKKKKEIDRELEKRARQDAVCQRLMTVPGVGPIISLAYKATIDDPARFRSSRAVPAHLGLTPRVYQSGEMDRSGHISKCGDSLLRHCLYEAANAHLRVTRKWSALRAWGVKLAQRVGSKKACVAVARKLAIIMHRMWRDGIDFQFGTAPQRPAKA

SEQ ID NO: 409831 - protein, 352 aa, unidentified
MSGTAAQNAIAVVGVDIGKNSFHVVGLDDRGAIVLRQKWSRSQVEARFANMPPCLIGMEACVGAHHLSRKLKAFGHDARLMPAKYVRPYSKGQKNDFRDAEAIAEAVQRPTMKFVTTKTADQLDLQALHRVRERLVSQRTGIINQIRAFLLERGIAVRQGQRFLRTELPRILATPPDVLSPRMAHAIEGLAGDWRWLDQRIEELSNEIEELARRDPACVRLMSVPGIGPIISSAMVAAIGTGDGFSKGRDFAAWLGLVPKQISTGDRTILGSISKRGNRYLRVLFVQAAWVTLVKVSPNKWQGHGLKPWIEAAKKRLHHNVLAIALANKLARIAWSVLARGRGFEANKLQAA

SEQ ID NO: 409832 - protein, 404 aa, unidentified
MPPGPGHGQVLGVSCSASYGDVQMVQWVSRRTEATCPPARSTRGRKTAQHLVPCETVSKHGSPAPSRSEARTVARARIGARIQELESLLGEGITMGTIGIDVSKDHLDWADGPEASVSHCANDGRGIAQLVRRVRRLDPERIVIESTGGYERPLLHALADAGLPVVLVNPWRVRRFGEALGILAKTDPIDARLLSRYGAVAAPPVTPVRRGIHRALADLVARRRQLIAMMAAEKNRLSIAPKALRREIAGLITILQQRIDQLDRRVDAALAQDPERGQVGKLLQTAPAVGPAVARTLLVDLPELGTLSRRQISSLVGIAPFARDSGKHRGQRRIRGGRASVRTALYLAAVTGARFNPVLRALYQRLRNHGKPAKVAFVALARKLLTILNGMVRDGTAWREADAT

SEQ ID NO: 409833 - protein, 324 aa, unidentified
MTAATFVGIDVSKAYLDLAARPVGLAERLPNDEAGIGQIVARLRPLGPTLVVLEATGGLEVPLAAALAAAGLAVAVVNPRQVRDFARAVGQLAKSDALDAQLLARFAEVVRPEPRPLPDADAPILSAVLARRQQVIAMLVAEQQRLPTTPAALRPRVEAHLAWLRQERDELDRELRRQIRASPAWREDDDLLQSVPGIGPVLATTLSAELPELGRLNRKQIAALVGVAPLNCESGILRGRRIIWGGRARVRAALWMGTLVAVQRNPAIRAFYQRLVAAGRPKKVALTAAMHKLLLVLNALLRQRTPWQDSIQPACPLDSRDHCF

SEQ ID NO: 409834 - protein, 357 aa, unidentified
MNEGSWVGLDVHARSVVAGVVDAGTGEVRTLRVAPGYEGTVAWLKSLPAPVRVAYEAGPTGYGLARACAEVGIACTVAAPSRIRRASAERVKTDRRDAERLARLLRLGELVAVRVPERHEEAARDLVRAREDARGDLMRARHRLSKLLLRHGLVFEATAWTQAHDAWLRRQRFTSGPLALVFDEYYGQVLQAKTRRDSLDKAIAELAAEPPYAEIVDRLVCLRGVSTLTAFALTVELGDWKRFRPQSLGPFLGLTPSEDSSGERRRQGAITKTGNTHARRLLVEAAWHQRRPPRMSVTLERRRSGKPAAVRAQADRSARRLHARWHALEARGKRRSVVAVAVARELAGHCWALATME

SEQ ID NO: 409835 - protein, 361 aa, unidentified
MSDSMALVGLDVHQAQSVAAVLDPVSGELRVERLRGEPDDVVPVFLEGLGRPVRAVYEAGPTGFALAREAGARGLDLRVIAPGSIPRASGDRVKTDRRDAKRLVRLFAAGELSFSFVPSIEEERFRDLVRCIDDARKDLMRSRHRLSKFLLRRGLRFPGRAWAQPHQRWLGKLHFEDALSRAVFLDYCCAIDALVHRRRELIAVLENAVPGSAHAESVARLRCFRGINTLTAAGLCAEVGNFERFAKPGLLSGFLGIVPSEYTSSEKRVQGQITKAGPTHARRLLVEAAHHYRRRPRVSGELAARQAGQDPRVVQVAWRAQKRLHSRWAHLAGERGKPTGTVAVACARELAAFCWEAATLN

SEQ ID NO: 409836 - protein, 352 aa, unidentified
MIIGCDFHPSFQQIAYVEQETGEYEDRRLSHRGEAEAFYRSLAGRSVRIGVEATGNDRWFHKLMSELGHELLVGDASAIHASAPREQRTDKRDARHILRLLMENRFPAIWQPSAGNEEQRQLLLHRCRLVRMRTRIKNQLDSIAKSEGLTGSRVWKAKRRQQIEALPLTGWYAERRKDLLALLDEMDKLIEPLDKAVQAAAEQNAEAQLLMTHPGVGPVVSLAYVLVLGDWRRFPRGKQVGSYLGLIPSEASSGKHQQRMGHITKQGNTLLRWLLVEAATKAQSKDPSWHRQYVRLSMNKHHGVAKVAIAHKLAVRLYWMLRSGQNYTKIVERGSHAGQSELAGGCGLRPIN

SEQ ID NO: 409837 - protein, 418 aa, unidentified
MKPDLFARLSRRYLALDIHKHYSIVAGVNFEGEVILEPVRVEHADLPGWLEKHIQATDYIVIESTTNAWYVYDLLEPLAEKVLVANPIKVKQIAQARVKTDIRDTLILARMLAANMIPSIWVPPTAVRNLRYLLSQRRRLTGMHTQVVNRMHSVAHRHHLSHPKGKRFNEQNTGWQQDDELSDEEKFQLELDMGTEKHLAEQTGKITQKLAKMSHEKPWAESMMYLMQLPGFGIVTGMTILAAIGDISRFEDFKKLSSYSGLTPGVEQSGVKNRGKKITKEGRKDLRWALVEVAQRAVKSDPHWGRRFQDLCRRMHRNQAIVVIAHRLLELVWFVLTRKQPYRHFSHERIAYKYLTWSWQLSEADRNGLTRQQFARYYLMRLGIGHDLEKITLNPQHPRRLASEAELLALRPELIQTE

SEQ ID NO: 409838 - protein, 365 aa, unidentified
MLSTPHPSSQHQVRDGQEVIVGVDTHKDFHVAAVISALGVLLASKTFPTTRAGYQALVKWACEFGVVRQAGVECTGSYGAALARHLAAADIEVFEVNQPDKATRRRRGKNDTIDAESAARSVLNGQASALAKGGQGPVEMLRMFKLAKTSALKSRTQAINQLKALLVSADPALRDELRDLSTTKLVQRCINWAPTTPCDTTTATRFTLRLLARRIDRLSQEIADLNAQTAAVLASHNPAMLDSYGVGPDTAATLLIAAGDNPERLRSEPSFAALCGVSPVEASSGRTQRHRLNRGGDRQANSALRSIVLVRLRWDQRTRDYIDRRVSEGKTKREAVRCLKRYIARELYRVITTPGPQAAPEDQAA

SEQ ID NO: 409839 - protein, 360 aa, unidentified
MQYYVGLDVSVKETSVCIIDKAGKVIREVKVATKPVAILAVLTEEALAIERIGLEAGPLSQWLYSALAEAGLPVICVETRHMKAALSAQINKSDRNDARGIAQMMRVGLYRPVHVKTLASQKRRMLLTSRQLLQAKALDIENDLRGTLRNFGLKVGMVGAVKFEARIRELVADDPDLAAIVEPLLIARRVLREQLGVLHRQLLEIVRHDEVCRRLMTTPGVGPVVALTFRATVDVPSRFTSSKAVGAAFGLTPRRQQSGEIDRMGGISKCGDAMMREMLFEAALVLMTHSRKWSWLKAWGMKVARHRGMKRAIVAVARRLAVIMHRMWVDGSEFRWTRQEHRMWVDGSEFRWTRQEAAAA

SEQ ID NO: 409840 - protein, 420 aa, unidentified
MNKTRHRKLERVKGNVLIVGVDVARSAHVAALRLPLGEVTKILSFTNDLSGFQRLAQEVQQHCEKYNLRGAILGIEPTGHYWEALAYWWEDHYGTVVLVNPMHTKRAKELEDNSPLKSDPKDARVVADLVAQGKYLECHLPRGVFAELRNLVSQRDRCQNQRTQVINQLHQSVDRIFPELTNEFSSIRVKSYRHLLANYPEPEHLATVPVGELTVLLRKWSRGYLGEQKAERLIALAGRSVGVKEAASTIGAEVKRLTGQLNLIEIERSNLESQIEHCLERTPGAALLLTVPGFGLITVAGILANTGDLAEYEHPEEVLKLAGLNLFEISSGKHRGKLRISKRGRAPLRKILYMAALRAARRGSPFRQYYDRLMDRGVDSTASLVALMRKLLRVGWSLVRNSQVFDRQRLTQTQTHKQAA

SEQ ID NO: 409841 - protein, 378 aa, unidentified
MHSMTQDRPLIVGGVDSHADAHHVAALDQRGGLLGTASFPTTTPGYAQALDWLSGFGEIDAIAVESTGSYAAALVRYLREHDVRVVEVNQPHAHTRRRVGKSDPIDAEMAARLFQAGKAKAIPKQTNGIVEAIRLLRVARNSAVKSRTAALVQVRDLIITAPQELRDQLSHRKTLRGKATVCARFRPSLSELRSPSQAAKFALRSLAQRIESLDREITALDRELEQLVATAAPRTIQLLGISTGHASQLLVTAGQNIDRLHGESSFAMLCGASPIPASSGKTTRHRLNYGGDRQANRALHLIAVCRLRYCERTRAYAKRRTAEGKTQREIMRCLKRYIAREVYNILRTDLADTPHPRPAIATTIMCGTPGFGVTRKPT

SEQ ID NO: 409842 - protein, 389 aa, unidentified
MYYIGIDIAKFKHAVFIQDDNGEIINKGEYFENTIDGFQKLLTILNNLEPTKQKKIGLEATGHYHMNLIAFLQNHDYDVCELNPYFVNKYRNSITLRKNKNDFIDAEIISSYLIKNEVKSYPQKFYHIYSLKSLCRKREELIKNRSKSLIALTNSLDIIFPEFKPFFKNKFTGTALYILKNYETPNRIARMNIDSYNKLKRELRRTISYSEFVKLKELANNTIGFHDSIQISILKTNLESYFYLDKQVSEIEELITNEIQILKPKMLGIKWFSVFYIATIYSEYSGFDGFDSASKCLAFAGLEGGRYQSGQVDYNLSMVKHGSGHLRNALIYGSFNLLGRYPILYEYYHKKRNEGKSHYVALSHVAKKLLRVIFYLEKNNIAFDPNLLK

SEQ ID NO: 409843 - protein, 411 aa, unidentified
MIKENYIYVGIDLHKETHTAVMIDCYNQKLGEITFPNRPAAFPKLVTKVKKCNTDGKEVVYGLENAYGYGRALAVWLIDKGYLVKDVNTAISHRQAKHRGAMYRKSDSDDAKAIALATLNMLDKLPDACPNDAYWSLGQLVHRRDNIMKQRTRLVNQLHEQLCIAYPSYKQFFNDISRPTALYFWEHYPSRKYLKGKSVEDLRAELVPVSHNKCSTKTCEKILDAVASDKVKNNAYQDARDMVTLSIVSDLQHYDSQLAEVDKMLEQMYKMLGCTLTTIPGVNVITAVKILAEIGDIKRFGNANKLAQFAGIAPLHLSSSGKGKDVATKQGNRRLQATIYFLAIQMVQVSSKGTPRNSVVRAYYEKRKAEGKTSQQALICISRRLISVIYGMLKNGTEYRMPVVENAGEKL

SEQ ID NO: 409844 - protein, 355 aa, unidentified
MNQEKYIGMDVHQATISVAVMDAGGKLIMECLLETKAATIVEFLRGLHGTLSLTFEEGTSAAWLHDLLKPHVSRLVVCDPRKNALLKDGNKSDRIDARKLAELLRGNQLHAVYHGEHGVRTLKELGRSYLTITQDVTRVMNRVKAVYHSWAIPCAGTTVYAPRHRAEWLAKIAEPGVRARAERLYQQLDLLQPVRMEARRELLAESHKHAAVKLLRQIPSIGPIRSALLVALLQTPHRFRTKRQLWAYSGFAVETHDSGEYRSVRGKLQRNRERMTVRGLNDNHNRDLKNLFKSAAISASTRPGPLRDFYVARVEKGMRPTMARLTLARKIAAISLTIWKKGVEFDAQQLQRQAA

SEQ ID NO: 409845 - protein, 362 aa, unidentified
MESDSAVDNLFFENKRLFIGVDVHKAKWVVTIRTYDLELKTFSMKPNAEELEKFLTSNYPGGDYRIVYECCFSGFWIYDYFYEKGYNITVTPTNRIYKDGSYIKTDKIDSRKLAFQHSRELLRKVVVPERTVREYKYIFRIYDKQKMRKGQILRQIKAILEQKNHPLKWERWNKGLVEKLKELKFEGKLFDLKFLNLLKEYDYVVSQIKDSEEIIGRMKEDELIGPRIARIEKINGIGIISAARLSVYLFDRKDRFESSEKLNHYLGLTPSEQSSGEKVKRGRSGMYGNKQLRSIVIQLAWMTVRKDGALLDKFETIYKRSGSKQKAIVAVARKLMTKIFAITDKEEDYKVNKFGCKKSKAD

SEQ ID NO: 409846 - protein, 380 aa, unidentified
MTTATYNVHDTTTERVLFVAFELSEKTWKLGFTTGHGQKPRERSIAACNQARLLQEGAQAKKRFGLPDTAPVVSCYEAGREGFWLHRFLQAHGITNYIVDSSSIEVNRRRRRAKSDGLDVRKLVSMLIRYAHGERAVWRVVHVPSVAAEDQRHLHRDLETLKQERASTTSRIKGLLSSQGVRLTSLSKLPEQLEALRLWDGSPLPSGLCRRVLRVYAHHQFLSQQIAELEAERRALLQTSQEAALEKVRQLMHLRGIGINGAWLLVMEFFGWRAFKNRREVGGLAGVTPTPYHSGESAQEQGITKSGNRHVGWMTMELAWSWVRYQPESALSCWFRQRFGGGGKRLRRIGIVAVARKLLIALWRFLETGVLPEGAVLKEA

SEQ ID NO: 409847 - protein, 439 aa, unidentified
MSTRECFGFSHPASIACLTEEEFTLQVLYPRCCGLDVHKKSITGCCLWFDAEGQRQQEIRKFGTHTTELRRLAVWLRQHEVKHVVMEATGSYWRPIWNVLEGEGFEQTLANPQHMKAVPGRKTDPHDAHWIADLFQHGLIAASFVPNQQMRHLRDLTRMRTKVTEDRARVINRIEAVLEDANIKLSSVVTDIMGASAQAMVKGLLRGERDTAQLAELAQGRMRAKRPQLQTALEGNLQPHHVFVLQRLLMQSRFLQQQREAIERQIKRRLDPEMRQAIAFWDSIPGVDEDIATILVAEMGIRSDQFADGAHVASWTAICPGNHESAGKRKSGKMREGNRWLRGALTQAAWAATHTKGSYLSALYRRIAARRGSKRAIVAVAHAILISAYYMWKKKQAYHELGDNFLDTLKPEKTADRLLKRLAKLGYAVTVTGFPSPAA

SEQ ID NO: 409848 - protein, 327 aa, unidentified
MVARRRSASTDLSAVAGPLCIGVDVSKDWLDIADTAGRAVRIANTVAAITEALAGPWSQGCRAMVCEATGGYERPLRLVAAQLGLPLRRVHPNRARAFAQAAARLAKTDAIDARMLARFAAFIADEPARPSPAPQTQTLAALVSRLDQLSDLRQSESCRAHQAHEASVKASIGAVIEVLDSQIDAIQHAIDALIASDPILTEKASLLRSCKGVGPKNAQMILARLPEIGALDRRKIAALVGVAPITCKSGSSINRASIAGGRKPLRDTLFMAALCASSHNPTFIAFRDRLKANGKPHKLIIVAVIRKLIVTLNAMIKAKTPFKPALT

SEQ ID NO: 409849 - protein, 402 aa, unidentified
MNAVGIDVSKGKSMVAIMRPFGEIVSTPFEIKHTASDIHSLVELINSVEGESRIVMEHTGRYYEVLAHQLSEANLFVSAINPKLIKDFDNDSLRKVKSDKADAVKIARYALDKWQNLKQYNVMDELRNQLKTMNRQFGFYIKHKTAMKNNLIGILDQTYPGVNTYFDSPARSDGSQKWVDFASTYWHVDCVRKMSLNAFIDHYQNWCKRKKYNFSQSKAEEIYGKAKELVPVLPKDAITKLIIKQAVDQLNSVSTTVESLRTLMNETASKLPEYPVVMAMKGVGTSLGPQLMAEIGDVSRFTHKSAITAFAGVDPGVNESGSYEQKSVPTSKRGSSNLRKTLFQVMDALIKTHPQDDPVYQFIDKKRAQGKPYYVYMTAGANKFLRIYYGRVKEYLSSLPES

SEQ ID NO: 409850 - protein, 447 aa, unidentified
MKKVFIGIDVGKFKNSISIIDTEGNPIIKKGLSIENDYYGFARLEEQIDLIINNYGFTYDDCIAGVESTGHYWFNLRDYLKDIGIETVMIKTDSVKHRRALEEGQKGKNDTLDARVIASCLRNGNYVYIRDNERELRALQKLTRMRNDISDELVALKNKIHRCIDICNPVFFKIFENLNSKTGVALIKLYPSPEDIINVDLDNIKKELGEIVDKPNMRMVSLYKEECEIWSRLIKEPSYAEKVEMIAYIDKFLLQNESKEHLDKQIKEIAKNIIPLYSEFEQIKGIPLIQLISVLSEMGDIRNFKNTRAILAFLGLSLKGNASGKYIGERRINKAGSRIVRKHLFNIMDTLIKHNEYFRIAYCYYKSYNHKNPTKKRSMQIAVMCKFVRVMYGMLKHNTNFDYKEMLKGYYFGDCNMKVFKEEFEGEKRTKKIENYKLAYSIFTNYS

SEQ ID NO: 409851 - protein, 330 aa, unidentified
MTNACTYPSEGHATWFVGVDVAKDEFVWAVHGSSQTTSCPNDSAGAQALFSALAEHNIGLVVLEATGGHERALAGFLLERGVAVAVVNPRAAREFARSMGHLAKTDQIDACALAHYAQTLAAKADQAGIRFAPPPPHIEALQALVTRRAQLLNMRTAEKNRLAGAVRVLRSSIEDVIRTLDRQIKRLDKEIDDHLDSHFSQQRKRLESIKGIGVTTCATMLAFMPELGHVSAARVAKLAGVAPLNQDSGKMRGRRQIWGGRSLVRCTLHMAMLSAVRYNPVLQAFYQRLVAAGKPKKVALVACAHKLLRILNAMERSGQHWNEAMHTNSA

SEQ ID NO: 409852 - protein, 360 aa, unidentified
MTGTMTFAGLDVHARSTHAAAIDVLTGELRRARFGAGSEEVVAWLRELPQPVYACYEAGPTGFGLYRAAVEAGLRIDVIAPSKTPRAPGDRIKSDRKDAELLARLLLAGQLKAVAVPSRELESVRHLCRAREQVRGDLMRCRHRVSKLLLLHGRVYPETNTWTVRHRQWLARQQFDEPAAELAYLDTLAAVDGLVARKKALDEHLSRLALDGEWAPTVARLRCFRGIDTLTAFALALEIGNFDRFQRPAQLASWLGLVPGLDQSGESRRQGAITKTGSGLARRLLVESAWHYLRQPRIGATVANRQQGQPAHVLQIAWRAQHRLYRLHSRLRAHGKPGNLAVVAVARELACFLWAAATAD

SEQ ID NO: 409853 - protein, 371 aa, unidentified
MKKFSKYVGLDVHMETIAVSVAEANGGEVRYFGEIANTPEAIEKLVKQLRKGGAELSFCYEAGPCGYGIHRQLSDLGWDCQVVAPSLIPKKAGDRVKTDRRDSLMLARLHRAGELTAVWVPDGAQEALRDLTRAREDMKHLQRQAKQRLLAFLLRHGRRFGGKANWTQAHYRWLELVKFNHPVQQIVFQEYIDTVKAMTKRVEALDKQIESASKESVFWPVIEGLMALRGISVLTATTIVAEIGDLRRFASAPQLMAYLGVVPSEHSSGATKSRGGITKTGNGHVRRVLVEAAWTYRHPARKTAILQRRAERTSEVVQEIAWKGQKRMCSRYRLLEARGKLKVQVCTAIARELAGFIWAIGQAIPQPATKL

SEQ ID NO: 409854 - protein, 349 aa, unidentified
MELDTIGIDLAKTVFHLVGLSRAGEVVVRKRFSRPQLLRFTGNLRVRLIGMEACGGSHFLGRRLREQGHEVRLIPAQYVKPYVKTNKNDYIDAEAIAEAVGRPTMRFVPIKSDEQLDMQSLHRVRDRWVGRRTSVINQIRGLLLERGITFSRGRRHAEASLPGILEDADNRLSGLLRMLLAQLQGELRQLQSQIDEADALIAKAAREHEPCQRLMAIPGIGPLTATAVVASIGSGAEFRKGRSFAAWLGLVPKQHSTGGKQNLLSISKRGNSYLRRLLVHGARAVLQCRDKQSPGLNLWLGQLASRAHTNIVAIALANKMARVAWAVLAKSEAYRPPLLASPVEAPACN

SEQ ID NO: 409855 - protein, 459 aa, unidentified
MGMTFGIDLACRAAHVASLAGPDGALVWRGRSFFTRPADLEKLWRDVDCVPAELTVVMEPTRNAWIPVAAWFRRRGAKVVLVPTTQSADLRAYYSKHTKNDRLDSAILARLPLLHPEGLREHVGDGPADPLRRVVKQRSSIAKRRSAIFHRLDAQLELLGPAWYDALGTDYGKATLQFLAHYADPATVIRLGQARLARFLQRYSHGHWREGKAAELIAAAKESLQLWDTDGMDFAELAADIAVEAEQAMMLTAQLADLDERIANLYAEADPAGIIRSAPGVGPVIAGIIAGRLGDPHRFTSLAAVRSYSGLVPKVNQSGKAEHVGGLTKAGDPLLREAMWMAAEQARKLDPQLAAKYKRLMDSERHHGTAVCHIATTLLTRIATSWRNNEPYQIRDLDGTPLTQDQGKRIVQEQYQVKKNPKKQYKRATNHKAGREPQESPSAPTSRPVTTKPTSPRAA

SEQ ID NO: 409856 - protein, 344 aa, unidentified
MKKMVGIDLHGNNAMLGLMDETGRRLLHKRVPNEMPRVLEVLEPHREEIDTVAVESTFNWYWLVDGLQEANYNVVLANPAKIDQYDGLKHLDDKSEAYFLAELLRLGILPTGHIYNKETRPVRDMLRRRMGLVRQRTALMLSFKGLYTRNTGQTLGLGRLKTMELTETRKMFNHPADQLISREQLAMIKQLDQSIGRVEKAVLKVARFLPNFPRLQTIPGIGKILALTITLETGEVGRFASPGNYASYCRCVQSRRTSNEKNKGRNNGKCGNKYLAWAFVEAANFAYRYNTECRKFIDRKSAKTNGILARKALACKLSKAGWHIMTDNSNFDIDRVFPGMKKKE

SEQ ID NO: 409857 - protein, 387 aa, unidentified
MPQPNDLSKSLAALDQDSTLIAVIEISQSTWLVGGVVPGINRQPLKKLAADETALLQLLYRWRDEATKAGRTINRIAVAYEAGRDGFWLARWLRRRGIEAHVIHPTSVAVSREHRRAKTDRLDTELLKRVFFGWLRGEPRHCSMAMIPTLEEEDAKRPNRERENLVGERTRIVNRMKSTLARLGIRGFKPHLRKAPDRLDGLRLAEGAPLPPNTLAELRRDMARLRFVMDQIREIEAARLVRLEQHPEERHHAMILLLARIIGVGVETADMLVHEILSRNLRDRKAVARYGGLTGSPDESGAKRREKGLARAGNARVRRGMIQLAWRFLMFQKDSALAEWYRRQTADGRGTTRKTMIVALARKLLVALWRLVTTGEVPEGVVLRRAA

SEQ ID NO: 409858 - protein, 421 aa, unidentified
MQVIYERCAAVDVGKDVIAIAVRKPGDGPDGRVTVKRTFKTFYGVLREAARWLMSEGVTHVAMEATGIYSMPVYHALLEHGDFEKVLVCNAGHVKNVPGRKTDMADAEWLAQLLECGLLAGSFIPPADIKAARDVIRYRAKIAQQRVSEISRLGNVLQDAGIKLDSVAWSISAKSGRLMIEALIDGERRGAVLAGLAIGRMRSKIADLSMALEGRFGDHHAMLCRLHLDHLDHLDGMLAQLDTQIQAMMQPFHAARDLLITIPGIGPLSAAAIISEIGTEVAGYFPDAAHLASWAGLCPGNHESAGKHRHGRRRPGNKHPQPVLVECAWAAVRHEGYLKSLYHRHVMKWGGYRSSIAKNKAIIVVAHAILVITWHVLATGKPYDELGADYFARRLDPERETRRLVARLEALGHAVTLEKAA

SEQ ID NO: 409859 - protein, 331 aa, unidentified
MGTKEIVGIDVSKATVDVCIHGSQLLERFDNDSEALAGMLHWAFVENALPLGDTLFVLEHTGLYSQTLVGMLEERGVPYCMVPGLEVKRSLGMVRGKDDRVDARRMALYGHRLRDELEPDQACGPRIEGLKAMASLRKRMVRQRAGHKASLGEQRRVLDAEGYQAVLDAQVRMVESLSKEIAELEAEMARLIREDRKLKRAYELILSVKGVGTVTAIAMMVATYDFTKFKTWRKFASYCGIAPFPHRSGTSIRGRTKVSHLANKEIKSLLNMCALSAIQWDPETRSYYQRRTQQGRNEMSTLNIIRNKLVARIFAAVNRGTPYVDVLKYAS

SEQ ID NO: 409860 - protein, 406 aa, unidentified
MDLVYSHVCGLDVHKKNVVACIITPEGKEISTFSTMTDDLIALKEFIKAKGCSVVAMESTGSYWKPIYNLLELESIKILLVNAKHIKNVPGRKTDVKDAEWIASLLQHGLLQGSFVPDREQRELRELVRYRKSLIEEKSRELNRIQKVLEGANIKLSSVVSDINGASSRSILEAIINGEENPETLAELSQGKLKNKMDELKRALKGLINHHQRMLLEIQLRHIDYLDEEIAKLDEEIKNRMLPFEKDLALLDTIPGVGRRTAEQIIAEIGTNMEQFPSAAHLCSWAGLCPGHNESAGKQKSARTRKGNQKLRSSLIEAARAASRAKDTYLSSQYHRIAARRGANRAAVAVAHSILIIVYHILKQKQPYIELGPTYYEEKKRNMIIRQSLKKLESLGLKVTVESAVS

SEQ ID NO: 409861 - protein, 356 aa, unidentified
MTTAQKSNCMYIGIDVHKDTHTAVGMSPYGEKMFEITVGNYKNDFENLTAKVEEMKGTLSPFFGLEDVRGYGERLSEYLYQKYPVYHVPSILVDRQRQNATHPEKSDSLDASGVAKVMMNSIDSLLAYTISEDSKKAKQLKEISIDREDLVLERTRLKNQVHTLLYRIYNTEYEKMHKDTFSIKALKHFRNAKPKRDPYLLKTMKRKVRRLLDIHVEVSDLEKDMAELLRDNYTIQTASGCGVVLASAIIGEIGDIGRFTSPGALAKYAGCAPRERSSGKKTRHVKSRSGNRRLNCAFHRMALSQISRMGNDRARAYFKRKISEGKSKSQALVCLRRVMVNLVWMMMKHRTMYRNA

SEQ ID NO: 409862 - protein, 354 aa, unidentified
MLAELVDHVVGIDPDRDWITAAVIDAHTTGVVATERFGADSAGYDEAISWAEALTVEGERAWAIEGTASYGRGFTAALARVGEWVIEFDRPRGKASKDGAKSDELDAVRAARETLGRNRLHEPRAHDGHREALRVHTVTRAGVVRARTAASNELKALVLTAPDDLRQELRHLTTRALVKRCAAFRDTPQRLVAQRCARNTMRSIARRIICFNDEIDVHDTAMKQLIDEAAPQLVAEPGIGHVTAAMFYIAWSHPGRCRNEAAFARLAGVAPLPTTSGQRQDRHRLNRSGDRKLNNALYVVALARSRNHQATRDYHDRRRSEGKSEREIRRCVKRYIARRVWRLLEHPPGPEIAA

SEQ ID NO: 409863 - protein, 491 aa, unidentified
MKMLYSRCAGLDVHKKSVSACIRISKGKETSQETRTFGTFTADLEALRDWLLKHKVSHVAMESTGVFWIPVWNVLEQCEANFVLTLINPQHVHALPGRKTDRKDGERIAELMQYGLLKGSFIPPPAIRELRDLSRRRTHLQGERNRVINRIRRLLETANIKLGSVVSDITGKTARLILGEICRGNCTPEALAKLAQASLKNKRTELIGSLKGFYSEHFRWLLTEAMQDLTYLDRKLEPLDQQLAKRLLPYGDLIHRLCTIPGVDFTTAAVIIAEVGLDMSRFPDAAHLVSWAGLCPGNNESAGKRFSGRMRKGNRYLRRVLTQSAWSITHKKECFLTSLFWRVAARGGRTKAAMAVAHRVLAIAWHIIKNEGEVYRELGSSHQDTLRPQRSARRLVRRLEQLGFEVNLKAKTDEPAPARESVTLPTSTVNHRNRRSQSSTPASSTSPQKPDTVAADPSVCRRCARWGIACIHLRNAHRRSPAVTSSVESAT

SEQ ID NO: 409864 - protein, 343 aa, unidentified
MLTNNVIAIDLAKNVLQACHISVHGELLSNRPLSRQKMKEFLVKTKPSIVAMEGCCGCHYWGQLAEKFGHEVRIINPKKVKGYLEGHKTDYNDALAIANAAIQIGIKYSSPKSLEQQSMHSLESSRRFLSRTVVSLGQHIRGTILGYGIANPRGEKGLKASVQTVLDGETPIPANVVSVLSMMWEQYKQLKAKLIAFEKEKNALTRQVEPCQRLMEIEGVGETTAAMLYTTLGDGKQFKNGRQASAFVGLTPKQHSSGGKVFMIGIDKCGGVKELRSLLYLGAMSYVGRLPDIPRTQKDAWLIKIIERIGFKKACIALANKVVRTAWAMLRYETEYKPVLLTA

SEQ ID NO: 409865 - protein, 400 aa, unidentified
MLSIGIDVSKGKSTVCGMKPGGEIVYTPFEVQHTREGMSELVSLLRGSGEEVRAVLESTGSYHCPVVAALLENGIFVSVVNSLRMKRFCSQSIRKVKTDRIDAMQIALYGLAYWQELQPARLPEDTYRELQLLARQYYQMTSMLIKAKVDFNAICDQVLPGMQELMNDHAGRHKLSDFVLRYHHTTHILEMGETRFRKDYCKWAEKKGYRNCERMAALIFATAQNGIPVLPNAPSTQIVITEAIRVLHTVEASRDAILTQMQALAKTLPEYSLVREMPCIGDTLAPRLIAEIGDVRRFHSKRALIAYAGIDAPPYQSGKFCANNRHISKRGNRYLRKTGYEVMQSYVMHKPANDPIFTFIEKKRSEGKCGKLAMVAGLNKFLRVYYGKVTELYRSLPAIE

SEQ ID NO: 409866 - protein, 405 aa, unidentified
MKVVYSRCCGLDVHKDSVTVCLVTESGSEVRTFRTVTRDLLALSDWLCANKCQAVAMESTGVYWRPVHNVLEGTGMELLVVNAKHFKAVKGRKTDVKDAEWLADLLRHGLLQGSFVPDREQRELRDVVRYRRRLIQDRSREANRVMKVLEGANIKLKSVISDVLGVAGRAMLELLASGETDPAKIAGAARTSLRATTEELEIALEGLMSEDQRLMLLTQLQHLDFLSERIEALSARIEERMRPFEDQIRRLDTIPGVGRRVAEEVVAEVGVDMGRFPSAAHLCSWAKVCPGLNESAGKRGPATTGYGNRYVSSALAEAAWAASRTKNTYLASQFWRIAGRRGKKRAVVAVSNSTLRIIYYILRDGTEYQDLGADYFDQRAFHYVTRSAVKRLERLGWEVYLAKAA

SEQ ID NO: 409867 - protein, 335 aa, unidentified
MSTVYIGVDVAKDTIDVAYWNGTEAKSIGTYANNEAGFTEVVPPLTKLAGPQQICLVMEATGSYHLSLSTFAIQQGWDVALPNPKRVKDWAKGMGYRAKQDKIDGRKLAHYGAVCQPPVQPPLPPELEQLDNLLKRQQDLEHLLRQERNRLHALEVRPTVDPQVLASVERSIAFLSQELALLNQAIDDFFDSHPEHKQALKQLRLLPGVGPKNSPHLFLLLARWDNLTAGQGSAKQLTAFVGLDPQPFASGTSVFKHPSISKMGDSHLRSLLYMGALGGVRGHNPLRNFYQALVKRGKAKKLALVASARKILVWAWTCFSRNVAFDPRKIDPNFV

SEQ ID NO: 409868 - protein, 330 aa, unidentified
MGTASTAVVGIDVSKATLDCCLLTPDGKARDHTVPNTPAGFAALLAWAGRHAGGADARFGMEATGGYEDALATYLHAAGRTVSVVNPTRIKYAGVMRGRRNKTDKADARLIAAYTRDQAPPAWSPPAPEVRELQALVRRRDDLRQLAAHEKARLDAPLLTPAARRSVARVVKLLSREADAMQAAAAALIAATPALAADRDLLVTIAGVGPQTASTVLAELPAVDRVPSAQAAAAYAGLSPREFRSGSSVRGRTRLSKSGNARLRKALYLPTLTAVRFNPVLKAFFDRLVAAGKPKMQAVGACMRKLVMICYGVLKNRQPFDPAWASQIAT

SEQ ID NO: 409869 - protein, 354 aa, unidentified
MPAVVSGFTLGLDLGDRTHHVCVLDAAGQIVRESSLPNTRPALAQLLAEFPRATVAVEAGTHSPWISRYLTDLGATVLVANPRKLHAISRNERKCDRRDAQMLARLARVDAALLHPIQHGSAQAQHALLGLKLRDALVRNRVSLINAIRFTLKSLGHAVRNPSSESFHKAVLADLPADCRPVVQPLLTVLANVTEQIKAMERDLVQRSKKDYPLTQRLQQIAGVGPLTALCFVLKIGDPERFSRGRDVGAYLGLCPRRDQSGGTDKQLRISKCGDGLMRRLLVSAAHYVLGPFGPACALREHGQRLSGTGSAREKKRAVVAVARKLAVLLLSLWKHGTDYEPRVTTSALVLTPA

SEQ ID NO: 409870 - protein, 422 aa, unidentified
MNKHRYQAKELQRVDWAQLSERIAGQRLVFSVDVAKEDFYGAFMVSALKTLVTIKWQHPGETPALGDFLSALPASRIEVALEPSGTYGDSLRGVLRGLGCEIYLVSPKRVHDAAEVYDGVPSLHDAKAAYLIGRLHLEGASKPWREACEHRREQRALIAELDLYQGEHRRNLNRLEALLSRHWPELDRVAELNSAGVLHLIANYGTAQAVSDERRQAETFLHHVRRGVANPTLVTAILDSAATTLGLPCTAGERHLLQVLAEELLRTRKALHAVERRIAERVNQDSRLQLLGESFGKTTALVLETTLGSPLDYPDPRAYIKAMGLNLKERSSGQHKGRLKITKRGPARARHYLFLSAMRFVRKDPVIRAWYLKKVERDGRLPRYNALVAVMRKLGLAIWHVARGHPFDSRKLFDLKALGLAV

SEQ ID NO: 409871 - protein, 359 aa, unidentified
MDESMFIGLDVHARSVTAGVLDATTGEVRCGPAPARTAELVGWLRAQGGALSVAYEAGPTGFGLARACEAARIPCLVAAPSRIPRAPGDRVKTDRRDALRLAKLLRLGELVAVRVPSPAQEAARDLVRAREDARGDLMRARHRVSKLLLRHDLLWEGSTWTAAHERWLCAQRFEERGLQIAYEEAVAAMQAVRARREALDAAIAVEAASQPWEAIVGRLCCLRGVSVLTAFGLAAEIGDWRRFDGRSIGAYLGLVPSESSSGQHRSQGAITKTGNGHARRLLVEAAWHQRRAAAQPSRELVRRRAGQPALVRARAEAAGRRLQRRWAAFDVRGKRSTVAAVAVARELAGWCWSLAVMDS

SEQ ID NO: 409872 - protein, 340 aa, unidentified
MTIVTLGLDLGKNWVHMVGLDGAGRIVLRRRVRRDRLLAQTGNMAACLIGMEACCGSHHLARALAAQRHTARLMPPHYVKPFVKSNKNDYRDAEASAEAVQRPTMRFVARKTEAQLDLQTIHRVRHRLVGRRTALINQLRAILLERGITVPQRRRVLATRLPAILADEPSGLSPRIRHLIEDMWVEWRELDVRIEAFDAELVATARQDDACCRLCAIPGIGALNATALVAAVGNGSVFDKGRDMAAWLGLVPREHSTGGKQRLLGISKRGNKYLRTLLIHGARAALPHLAARGDALGSWLRRLLGRVHRNVAVVALANKLARIAWAVLSGTRRYEAPTGA

SEQ ID NO: 409873 - protein, 334 aa, unidentified
MNYIAIDAHSSTCTMCVLDNKGCEKDSSQIETNGRLIKNYLRSFTGKKIVTFEESEISSWLFDIIRPEAEEVLVCNPVANKDYTKKKTDKLDARKLARFLRGGFLTPVYHDGSKREKFKILISGYMALVEDAVRMKNRYKSIFRRSGKKQTGKKLYNDESLIEDIADPGHKFVGSNIYKLLREMETMRGSYVKEIKEQSKEFEEVDYIKSIPGIGDIQTAKIVAYVIDPKRFANKHKYYSYCGLVRHKRTSDGVSYGSSKIWGNSILKCVYKMAAQSAVNSNNAFKQYFDHLTKNGYNDKNAYNDISRKIAAISLAVWKNKKYFNEEEILKLIR

SEQ ID NO: 409874 - protein, 343 aa, unidentified
MKVSRIGVDLAKNVFQLHGVDRHDRVVFKRRLKRDQWLRVLLDNTEADCVIGMEACAGAHHWARELQSRGYRVRLIPPQFVTPYVKSNKNDANDAEAICEAMSRPNMRFVAVKRVEQQDIQATHRIRAELMTQRTAKANQIRGLVTEYGLVAPQHLSSLRSAIPCWLEDAENGLTIRFRALLHDLWQDLLGLDDRVARLDAEIEVIAKTDPLAQRLQQLRGVGPLIATALVASVGNGQQFGKGRQMAAALGLTPKQHSSGNRERLGGISKRGDVYLRSILIHGARSVVSHAKHKEDRLSRWVTQLAERRHPNVAAVALANKTVRMAWAMMRNESDYDPEFVVV

SEQ ID NO: 409875 - protein, 403 aa, unidentified
MNNVAGIDVSKGKSMVSVLRPFGEVVAKPFSVGHTGSELKELADYLKSLDGETRVVMEHTGRYYEPVARFLHEEGVFVSAVNPKLIKDYGNNTLRKVKTDKADSRKIARYGIDNWAELRQHTPMDTIRMQLKTLNRQQSLYTKTKTMMKNNLIALLDQTYPGVNALFDSPVREDGSQKWVDFATTFWHVDCVRNMSLTAFAERYRKWCKRHGYNFSQSKAVEVHAGAQDLIAMLPKDALTKTMVRQAIDALNAVSASLERLKAEMQALAAQLPEYTVVMAMHGVGDSLGPQLMAELGDVTRFTHRNAITAFAGVDPGADQSGTHEAKSTRVSKSGPPELRRALFLVMDCLLKTQPQDDPVYRFMDKKRAEGKPYLVYMTAGANKFLRIYYGRVKEYLASLEGN

SEQ ID NO: 409876 - protein, 389 aa, unidentified
MDYRKPTAPTAERDVATLYVALELSLKTWLVALRSSASEKVSLKPLSAGDQAALFALIDRMQAELYAAGYREVRVVSCYEAGRDGFWLHRRLLEHGVESLVVDASSVAVPQRARRRKTDRLDVYGLLRELMALTRGESDCRVVRVPTPADEDARRLGRERQQLVSERVSHVNRIKGWLATEGIVDYQPLRRDRRARLAELRTALNQPLPTQMAEAISRALERLELLLVQLKAIETKRDAIVANPPPDDQNAAKIRRLAELKSLANESATRLTREIYYRSFAKQRQLGAFVGLDGSPWRSGRMDREQGISKAGNRRVRALCIEIALGWLRHQPDSALSQWFRARVGAATGAFKRKMIVALARKLVIALWRYLETGQVPTGAVRKPEAARA

SEQ ID NO: 409877 - protein, 398 aa, unidentified
MARVWAGVDAGKTHHHCVVIDADGGKLLSRRVANDEPELLGLIGDVTALGEVTWAIDLPDGGAALLIGLLLGAGQELLYIPGRAVNRAAGSYRGEGKTDARDAAIIADQARMRRDLQPLRPGDELTAELKLLTARRADLVADRTRAISRLRELLTSIFPALERALDLTAAGPLVLLTGFQTPAAIRQAGPEALESWLRGRKARNAGKLAAAAAAAAARQHAVLPAEKLTAQLTAALAGEVIALNEQVRELDKLIEDKFHQHELAPVIESMPGIGVLLGAEFLAATGGDMSFFGTPDRLAGFAGLAPAPRDSGRIRGNLQRPRRYHRGLNRVFYYSAMISIATCEESRRFYDRKRAEGKKHTQAVLALARRRVNVLWALIRDKRTYQAATPRHAPVKAA

SEQ ID NO: 409878 - protein, 354 aa, unidentified
MACHGPQRRGRPPVDEYGGRQYVGVDLHRRRSVIVRMTPEGERLGPPVRIDNDPFVLAAQVASWGESPEVVLEATYGWYWAADVLAEAGAVVHLAHPLGVKGFAYRRVKNDERDAADLADLLRMGRLPEAWIAPPAVRGLREAIRHRCKLVAIRSGLKAQVHSVLAKQGVRVPVSDLFGVGGQQLLDRLRLDAAYAARVGSLRRLIDTFTFEIDVLAARTAADLRGHEGWQAIQTIPGVGPVLAAVFVAEIGDVHRFRRPEQLCSWAGMTPRHRESDTKVHRGRITKQGNHLLRWAAVEAVQRLRGGPLGSARARIAERRGTNIAKVAAARKLLTLVYYGLRDGHIRCLQPHPA

SEQ ID NO: 409879 - protein, 442 aa, unidentified
MPLLHPEAAGIDVGHREHWCAVPADRCAQPVRAFGTFTQDLEEMARWFKECGIKTVAMESTGVYWIPAFQILERHGLEVCLVHARHVKNVSGRKTDIQDCQWLQRLHSFGLLNASFRPPDHICVLRSYLRYRDDLVGLRSMQSQHMQKALQQMNVQLHQVLSDVTGLSGTRIIEAILQGERDPVKLAGLVDKRVRASQATLQKALQGDYRPEHLFMLQTAFELYQIYDQKIHLCDQQALAQMAQLPTQESQPLPERKACRKPIHDMVAGTDLRAELHRWAGVDLTAIEGFGVLTAQVILREIGPDVSRWPSEKHFTSWLGLCPDHRISGGQVLSRHTRRVVNKVSNALRQAAVTLQKSQTALGAFYRRMRGKLGAAAGVTATAHKLARLVYRLLKHGELYVQQGLEDYERKYRERVLRHLKKTAASMGLEVVEKQPLASGVS

SEQ ID NO: 409880 - protein, 405 aa, unidentified
MEILVDRACGMDVHKATVVACIMGTGIKKEIRTFTTMTNDLLRLKAWLTDNRITHVAMESTGVYWKPVFNILEESFEVILANARHVKNVPGRKTDAEDSAWLCKLLRSGLIRGSFIPPKEVRELRDLTRYKRKLIQAIVSEKQRVEKILEDANIKLSSIASDTFGASGKRIIEELMKGELKPEAMAELTKGRLRSRKAEMKEALVGNMEDHHRFMIQAHLTHIAMMEELLATVEKKIQETIERHFKKDYELLKTIPPVKDSASVIIAEIGVNMDPFPTEMHLSSWSGMSPGNNESAGKKKPGVTTHGNKHLKTILTEFGWIASKMKGTYLWSKYHSLVGRRGKKKALVAVGHKILVMCYHILKHKVPYKELGPRYLDERRKDRIARSYIKRLSSLGYAVTVKEAA

SEQ ID NO: 409881 - protein, 369 aa, unidentified
MEKRIKYIGLDVHKNSISIAIADQGQDQEVRFYGTIPNRLDIFDKFIRKLVSEGSELRFVYEAGPCGYQLYRHLTKKGFECMVTAPSQIPKKSGRRIKNDRRDAIDLARLYRAGELTAVYVPHVEDEAMRDLTRAREDAKFATRKAKQQLGGFLLRNGHIFTGKSNWSKAHFNWIADIKLAHPCQQITLQEYVDAVQTGCERVDRITEQIQKLTKTWRLAPVVKALQAMRGVSTIVATTTVAELGDLGRFDHPQQLMAYLGLVPSEHSSGEKVKRGAITKTGNGHVRRVLVEAAQAYRLPARVSRVLLKRHDGLSPQIREIAWKAQLRLCQRYRRLIGRGKPANVVITSIARELIAFMWAIAKQVAPVV

SEQ ID NO: 409882 - protein, 325 aa, unidentified
MDILGIDISKDMFDAALLVGGRVRQATFPNTEAGFEQLLAWLAKHRPDPAVPLHACMEATGNWGLDLADFLYGSGIRVSVVNPARIKAYGESELARNKTDRLDAALIARFCRAHTPPAWSPPSAHLRELRELVRRCGALKAARVQELNRQKSGFASPAVARSIAAHLKWLDEQIEAVAEEVRQLIKADPALSKNLALLRGITGLGEISATVLLAELPNIAEFTPKALAAFVGLSPQEHSSGTSVRRPGRMSRIGTERLRSTLYMCALSAKRTNKALASFVQRMTAAGKPPKVILVAVARKLLVYAHAVIRTQKPFTSSPDAHSPA

SEQ ID NO: 409883 - protein, 330 aa, unidentified
MLMIGVDVASDTLAVGEARGGKTKPFPNDNPGVAELCAWLESREPQGQVQVILEPTSTYHHLVIQSLSRLGISYTCVNPSRTKAFAHALGQRAKTDAVDAQMLALYGESQQPDPSPSPDEAQQGLKALRRHKESLEREAEATQNRLEAARRSPWTPRAVLESLERKLRWCQEEVERVTKELREVVIQDERWSHGMDLLTSIPAISEKTAVVLLSELPPVERCATGKQWVAFCGVNPEPHDSGNTTWSRLSKKGAARIRVRLYMPAVNALRWNPPIRALGERLKAKGKGGKLRVMASMNKLLRQAFAVLSTGQSFDPSLVRVPALDNQDSI

SEQ ID NO: 409884 - protein, 344 aa, unidentified
MEKHNVVAVDIAKAVFQIAVSEEPGRVARERRLSRGEFLIFFAQTPRSTVVMEACGSAHHWGRELQRLGHDVVLLPPHQVRPYVTRNKTDRADAKGILEAYRNADIRPVPVRSLPQQVLGSVHRFRSGWIAARTAQVNTLRGLLRELGLVIPEGIEKVIPQVRCFVADADSGIPDSLRSTISAACDEVESLTERIREAERDIEALGEQTPVVARLRSIPGIGLMTGTALVAFVTDIQRFPSGRHFASYLGLTPREYSTGLRKRLGRISKRGDSYLRMLLIHGARSVLCHAKKATHHDRLRTWALALQKRTRHNKAAVALANKLARIAWAVWKHGKEFESMPHAA

SEQ ID NO: 409885 - protein, 357 aa, unidentified
MSKRRAPVEDHSSSEASVFCGIDVSAATLSVAVQAAPEWGLDQRPFANSPAGHKQLLAWLRKRKGLIRVTLEATGVYGIDVALALDETEGFAVEVLNPKKASDFARSLGRSKTDRTDAVALAEYSRRMKFVAWKRPCREQLELRALGRHISTLTEEHARLSNRLHAAQASRTAPRCVREDLKRTMAGIQRRLVRLRREARVRIEKQAGMRRKWLRLLAVPGVGEISAVQILAELAGLNEDMTVRQWVAHSGLDPAHETSGTSVRKPSRISRQGNRYLRRALFMPALTAARFDPYLKAFYGQLLARNKTKLQALTAVARKILHAIYGIFKTDTPYDGAKLFPALAASLVPQPQTIPTY

SEQ ID NO: 409886 - protein, 428 aa, unidentified
MNEDELSRLKEFRQLKKQIQGSERHLIVGIDVAKDRHHAFVGTATGRTLVKKLIFANTSVGFAELLARVEAVRAQSGLSEVVFGLEPTSNYHKPLGRYLISKGCHVVMVGGKAVKNNRELLDERWDKHDTKDAANIADLVSRGKCFYYDMPSREIEELRDLHSLRARLKKEEHSLSLRIRNNLLAKHFPELDAFYSACERETLAIVRWCLNPQKIAVMPFEEFFKRVAPNARGIAQKLRLQKIHRLAHESIGCPVGSAVQFQARLLAEKIKEVRGQISDVDHLIAQASAPFPSYEYLLSIPGFGPYVASKVLATIADPRRFDSAKQIIRTSGYDLCADRSGKRSDQAVPVISKKGNSQLRYALYQAAMIASSRHRFFMAYFARMLQGREREQGIRTKMRVKLAAKMLVIAWTLMKKGEPFNPEHLSVQ

SEQ ID NO: 409887 - protein, 348 aa, unidentified
MKATTIGFDLAKNEFQVHGVDAAGKPVVRKQLRRAQVLPFFARLSPCTIGIEACGSAHHWARKLTELGHTAKLMAPQFVKPYVKANKTDAADAEAICEAVARPNMRFVPVKSVEQQAILAVHRVRSGLVAERTAQLNRLRALLAEFGLIAPRGRRALMERLPVFLADETLPGVARTLFERQSARIRQLETDISAEEAVILDWHRNNELSKRLDAVAGVGPITATALVASFGEGREFDNGRQMAACLGLVPRQHSSGGKTRLLGISKRGDTYLRMLLIHGARAVIRTLERRAKGAGNPTDRWLAKLLARRNPNVAAVALANKTVRVIWALLAHDRTYDRNWVSQRVKTA

SEQ ID NO: 409888 - protein, 345 aa, unidentified
MGKIITIGLDIAKNVFQVHGVDAAGAVVVRQKLQRSALLAFFERMEPSLVGIEACATAHHWARSIMAFGHTVKLMPPAYVKPYVKRQKNDTADAEAICEAVTRPTMRFVPVKGEEQQSVLVLHRTRDLLIRQRTMLINALRAHLAEFGIITRQGRLGVATLVTLIEKGEAELIPTMAREALLAVINQMRDTHKRIGSIERKIQIWHRSNEQSRRLETIPGIGPITASAIAATITDASLFRSGRELAAWIGLVPRQSSSGGKERLGHITKKGDSYIRRLLVVGAHAVLKVARHKEIPTTQWAAALLARKPYKLAAVACANKMARIVWALLTKSETYRAQPVCLTTA

SEQ ID NO: 409889 - protein, 361 aa, unidentified
MKKPMHPLIAEVPRSVTKVGMTIGIDLGDVWSHYCTLNEDGEVVDRGRFRTTPSGVEKWFTDVPRARVAMETGTHSIWVSEQLREMGHEVIVANVRELRAISHSNRKSDTVDAEKIARYARVDPEILRPVSHRTVAQQEALTLIRARNLIVRLRTAAVNSVRGLAKPCGYRLPASSTLCFAKRCMAVLPPGLARALGPVLEQIAAMTVKIQQYDRTIKQLTETEYPETQALLQVYGVGQLTALTYVLTLGGKERFKRSRDVGCYLGLRPRRSQSGDRDPQLGITKAGNIYLRSLLVECANHVLGPHGRDSTLRQWGLHLASRGGKQSRNRAIVAVARKLAVLLHRIWVTQEPYIPFYAVAA

SEQ ID NO: 409890 - protein, 342 aa, unidentified
MYYMGIDLHKKYFVSTIMNKEGKVLKRSRVSTDRESIKHYFGLLKNIRPVKAVIEATFNWVYFYDEISPFVDEAILAHPLKTRAIAEARIKTDSIDSNTLAHLLRSDLIPKAYTPGFETRDLRNLLRFRIALVKVRTSLKNRVHAVLDRNYIEDPIFKGLSDKFGKKGMKIMRALKLKGNDTSILNGYLDLIEEITKKINDLEKRIKSFVKEDKITLLLKTIPGIGDIIAFLMRYEIDDIERFSSAKKLYSYAGIVPSTYSSGGKTYHGRITKQGNKWLRWALAEASHKAIVKSPSLRRYYNKIKYKKGSNTATIALSRKLLEIVYKVWKEQRPYYEKEICF

SEQ ID NO: 409891 - protein, 391 aa, unidentified
MIYVGIDVAKDKHDCFITNSYGEVLFKSFTIPNNRDGFETLFQKVQSVSDDLTKVKVGLEATGHYSYNLLGYLIDKGLPTYVINPLHTNLYRKSLSLRQTKTDKADARTIASMLMSDMNLKSYSNTSYHNEELKSLTRYRFDKVQERAKLKTSISRLVCILFPELEKLVPTLHMASVYALLSEFPSAHAIASVHLTRLTNLLSESSHGRYGKDTAVIFREAARNSIGSDMPAKSLELKHTIKLIQELTSEIDEIEAEIKSIMDEINSPILTIPGISYNMGAMIIAEIGDFSRFDSADKILAYAGMSPSTYQSGQLDNCYSHMEKRGSRYLRYALYNATKYVCHWDESFGTYLAKKRAEGKHYNVAISHAAKKLVRTIYAMEKSKQSYNLVA

SEQ ID NO: 409892 - protein, 359 aa, unidentified
MSRGSLGVLTSTTKEAPVSTDYDGRQYVGIDLHRRRSVIVRMTPEGQQLGWSRIDNDPVALGLELAKAGPDPEVVLEATYGWYWAVDALQATGARVHLAHPLGVKGFAYRRVKNDVRDAADLCDLLRMGRLPEAYIASRGERELRELVRHRGKLVALRTGLKAQVHRVLAKQGLLPPCSDLFGVAGMAWLRAAPLDLVYRQRVVSLLELINAYDAEVEMFRTMIAHRFRGHRGYRVIQQISGIGPTFAAIFIAEIGDITRFGRPQKLTCWAGLTPRHRESDTTVRRGPITKQGSTLVRWAAIEACQRTRPGTKLATDRARIIAARGRNIGVVAAARKLLTYVYYGLRDGEIRALAKGAA

SEQ ID NO: 409893 - protein, 333 aa, unidentified
MNQKYFIGIDLSKEKIDCAIILQDYSVFLEQVVKNQDAKIKSFIQAFIRKAKCNLSDVFICAENTGIYGQPLKRVCVDLGVDLWIETPTKIKRATLDIRGKSDRMDAQRIADYALRYYDRRVLYTESSADIEELAAIAKARETILAQKVGIENQLSEAKSHDPRLYKKLQSLYRAALRTFDRELQKMEKQLTVVLKKNKEMNKNAELLMSIPGVGKQVAVQFIIHTNNFKNFDNAKHLASYSGVVPFLNESGKLIKRPRVSKMANLKIKTMLHMAALSAVRTKSELKEYYIRKVSQGKNKMSVINAIRNKLVHRIWAVIERQTPYEWEVKNNF

SEQ ID NO: 409894 - protein, 341 aa, unidentified
MNKTSIIGIDLAKSVFQAHGMTSSGKQTFARQLKRAEVAKFISKQPKCIIGIEACSGSHYWAKLFKQYGHDVKIIPPSYVKAYVRVNKNDKRDAAAIAEAASREQAPVVAVKTTEQLDLQALHRVREDSVNNRTRTGNRIRGLLAEQGIVVKRGHAATRYEVALILEDASNGLSCSLREIIADLREEWLRCDDRVDYYTSRIEKIARSDARCKRLMTIPGVGPVISTLLVAYAGNGQSYRGSRDLAASLGLVPAQHSSGGKDVLLGISKRGNRQLRKQLVHGARAAYRSLEKCPESSRLGLWAQSLRASGKHVNKIVVAIANKLARIAWSCLVNERDYKAL

SEQ ID NO: 409895 - protein, 358 aa, unidentified
MQAKGTTIDFNGQNVYAGIDIHLKSWKVTIMLGDREHKTFSQDPNAETLWNYLRKNFPGAVYHSAYEAGFCGFSAHRDLVGFGILNLVVNPADIPTTDKEKRQKEDKRDSRKIAKSLKNGELVGIYIPGKGMEELRGLVRYRKTLVKEISRHKCRIKSFIYFNGIKIPLEQDGISKHWSGRFTHWLREVKLSTAHGKMVLDDTLDTAELLRKKLLKVNRHLRQDVGNGEYSEKLRLLQSIPGIGLISAITLLTEMEDILRLRNLDQLCSFVGLVPSTNSSGEKENVGRITRRNNRFLQSIIVEAAWMASRKDPSLLYSYGLLCKRMEPTEAIIRIAKKLLNRIRYVMKNETEYVHSVI

SEQ ID NO: 409896 - protein, 464 aa, unidentified
MARRKRRGKRSGKGNRSAQPQEVHANAAGLDVGATMVYAAVRAERAEQPIQSFPTFTCDLHALADWLSACQVDTVAMESTGVYWIPVYQILEARGFEVVLVNARHVRSVPGRKSDVEDCEWLRCLHSVGFLRGSFRPPDEVCAVRSLLRHRDSLVKTASRSVLHMQKAFDQMNIHLHHAISDLTGLSGLAITDAILDGERDPARLAELAHPRIKASRATLIKALEGDWRSEHLFTLRHARRTYAYYQQLLSECDQEIEAHIRAFEQTQEPPAATATDQQPPQSPETRPEPPAATGQPRTMEAHLTRLFSTDLTLIPGIGSATALVLFSELGSDLKRFPTASQFASWLNLCPQNKITGGRVISSKTGPGVNRAAQALRIATQTLYRSQSALGDYFRRERARFGTPQAITDTAHKMARIIYHLVTRHVLYDDNLLAEQQRQDRKRHVRRLRNQARALGFQLVPEAA

SEQ ID NO: 409897 - protein, 407 aa, unidentified
MRCVEAGLVNDGYGVYLGLDVGKGDHHAVGLAPGGKRLHDAALPNTEARLRQLFDKLARHGRVLVVVDQPASIGALPIAVARARGHQVAYLPGLAMRRIADLHPGTAKTDARDAYVIADAARTLPHTLRRVDVGDEALAELEVLVGFDDDLAGEATRISNRIRGLLTQIHPALERVLGPKVQHKAVLELLSRCGGPAGLRRAGRRKLLSIAGPHAPRLADRLVEQVMSALDEQTVTVPGTQAAETILPRLADSLRDVLRQRDQVAGEVEGMLDAHPLAPVLTSMPGIGVRTAARILLEVGDGTAFATPGHLAAYAGLAPVTRRSGSSIRGEHPPRGGNKQLKRAFFLAAFAALADPVSRAYYDRKRAEGKRHNAALICLARRRCDVLFAMLRDKIPYQPRPSTPVPA

SEQ ID NO: 409898 - protein, 369 aa, unidentified
MEDNITVFVGLDVHKDSVAVAVAHAGRGNPRFVGPCGADPAQGHKALSHLGTPDETLIAYESGPTGFALARALSAHGWRCQVVAVSKIPRRAGERIKTDRRDAIALASYLRSGELTPVVIPDATDEAIRDLSRAREDAVRARLKARQQLKAMLLRHGKRFPGKTSWGTTHERYLARIGWEHPAQGIAYAEYRNAVAEAHARVERLTAALREQVEQWRFGPVVRALMCFKGIDFVAAAVLLAELGDLQRFDHPRQLMAYLGLVPSEYSSGPSRSQGGITKTGNTHARRILVESAWCYRFSARMSRPVAERNLDQPQAVRDIAWRAQLRLCSRYRRLCGRGMHSNKICVAVARELTGFLWEAARAVAPLVR

SEQ ID NO: 409899 - protein, 350 aa, unidentified
MLIIGCDYHPGFQQIAFVDTETGELGERRLAHREEAEQFYGELRERSLRVRVGMEASGHARWFERWLLALQFELWIGDAAEIRTKRVRKQKTDRQDAQLLLRLMIEDRFPRIWVADAENRDLRQLLWHRHRLVQMRTRVMNQLHVVALNEGLRRKKALWRPTGRAELESLALAPWASRRRRDLLDLLDQLTPKIQELTRALEGEVEKRPVARQLMTHPGVGPLTALAFELVIGTPERFHCGKQIASYVGLVPSEESSGDRRRLGHISKQGNSLLRYLLVEAAQVTVRSQPQWRSKFFHLGMRRGRKIAKVAMARKLAVHLYWMWRQGWDYSQFEKLGSHAGAPGNPHGGE

SEQ ID NO: 409900 - protein, 456 aa, unidentified
MSNSTGIRRQPKSKLTVVNPRAAGIDIGSRFHVVAIPCELEDQPTRQFGTFTGDLLELATWLKGHGITTVAMESTGVYWIPAFEILVKSGIAVDLVNARHVKSVPGRKSDINDAQWLQQLHSYGLLRGSILPEGSLAHLRSYVRTRENLARGRARYLQLIQKSLMQMNLQLHHVVTDVMGETGRRIITSILAGERDPLVLAEHRDARCKQTQQTIAKALEGNYEDDHLFELENAFSLYNYYSERISRCEDKINELLQALVESTSQENKHFLGDKKLSSAKLDGRNRVRSLNFNPRPLCAALCGRDMMQLPGMGHGTLLTVISECGTDMRRWPTAKHFTSWLGLAPRNKVSGGRLLSSGTAVGANPARTAFWMAAQVLARTQTSLGGFQRRLAARIGRPKAIIATARKLAELYYRALRDGISLVDPGLSHYEAEQRQIQINAIKRRAQRFGLTLTPA

SEQ ID NO: 409901 - protein, 405 aa, unidentified
MNAVGIDVSKGKSMVAIMRPFGEVVAMPYEVAHDSGELLGLAASLKKLKGETKVVMECTGSYYQPIAYALNEAGLFVSTVHAKLIHDYGNNSIRKVKTDKADAVKIANYGLSNWMELPKFVPEEDIRIMLKTFSRQYSKYLDIKTMLKNNLIALTDRTFPGVNELFTSLPRKSDGHEKWIDFYLKFWHCECVSGLTPKAFASRYKKWCVREGYRFSQEKADDIYTSACGHCSVMPMNDASKLLVTQAIGQITAISENISAIAREMKQLAESLPEYPAVSQMFGVGDILGPQLIAEVGDVFRHRNKGSLVAFAGLDAPPFQSGKFESHDRSISKKGSPHLRKTLFQIAKVYLQKSPVDEPVYQFIDRKRTEGKHYYSYMTAASAKFLRIYYAKVKEFLLALDQGLA

SEQ ID NO: 409902 - protein, 326 aa, unidentified
MATIGIDVSKKKLDLCWLRDAQAGKVKTRVFPNAHDHYPALLAWLLKQTNEEAGDLQVYLEATGIYHEPLAYWLHQSGVTVYVLNPARVSYYARSLGDQGKSDKKDSKRIVHFAQANPELTPWQPEPEEVRTLKQLAKRLETVQKDIQREQNRLEKAQFNRDTQAEHSITHVLALLRREAKRLIKEVDDHIDRHDGLKRDRRLLESIPGIGEVLSVHLLVTLRSRRFKSGRQVAAFMGLVPVEWTSGSSVRHAPRLSKNGDPALRQKLYMGAVVAMRHNPSIRRQYQRLCAAGKRKMSALGAAMRKLVHIAYGVLAHQKEYEPQPT

SEQ ID NO: 409903 - protein, 397 aa, unidentified
MIAIGIDVSKSKSTIAILNGDGTIRVKPFDVHHVADELQALVDYIKRISEPPTILMEPTSHYHYPLLKAFQEADLPVCLINPYQMKKYGDTELRKAKTDKRDSLRIAQYALEKSYSLVPYTPADQKYDDLRFLSRQYGQRISTLTVAKVQLLSLLDETMPGITTILPFKSRDPDNCVLLRFIKRFKSFDVIRKMGKTRFLDSYQVLVKKTNDRFAGAKGLAIYELAFNSITTRGENPLSAMTQDQCVDLVSTSQKAADEINLQMRIIAETIPEYKVLRSMAGVGDRLGPIILGEIGDIRRFHSGKALNAYAGNDAPPYQSGQFESRNRHISKRGNPALRKACFEVMQALKLTKPQDDPVYLFMLKKEQEGKPYNVAKMAAVNKFLRIYYARAMELYK

SEQ ID NO: 409904 - protein, 320 aa, unidentified
MSQNTTAIMNQNITSVYAGLDIAKASLQLHLQNRSYDLSNTSSGHAHLIKRLAAIPGAHVICEATGGYERAVVAALQAANLPVSIINPARVRHVARASGELAKTDPIDASMLTAFGFAFAPVPTPPRTAAEIKMAALVTRRAQLLELRVAETQRADTCAEPSLSKLFRSWLPQIEKQITKVEALIEELLAEQTTLAHHVERLDEITGVGRITAVTVLANMPELGQLNRRQAAALAGLSPYNRDSGQWAGKRCITGGRNEVRRALYMAALSASRRNHHLKPFYDRLIAAGKPAKVALTAVMRKLIILMNHLLKNPSFSLAH

SEQ ID NO: 409905 - protein, 363 aa, unidentified
MSNEILCDGFIPRQYDIFVGLDVDKTSISVTFTNHQETIRSMRIPYSSDHLIHYVHRHFPGQKVAFAYEAGPTGYGLHDQLTAEGYPCLVVAASMIPTAPGQRVKTNRLDSQKISECLRGGQLKSIHVPSSSYRQLRHLTQLRDTFVRQATANKCRIKALLLLEGLPFPEAPVGSQWSKRVIAELKQLDCSGAVRFKLDRLLLSLEFSQKQAVETTREIRRFCRQDPEIHPCMEYLISIPGIGGIVASHLLARIGDWRQIRNVRQLSAFLGLVPTEHSTGEVVQRGAITRSGDGRLRNKLIQSAWSAIRQDPELTEFYRRVGQKHPRDRAAKKAIVAVARKLTTRIYAVLHEQRPYVMRPKSH

SEQ ID NO: 409906 - protein, 482 aa, unidentified
MKKRNIYQNQSQELLHLFEGAGSSEKVMCVPMDYAKKDHLVMFCNGHGDILRKPFSVKNSPEGLEYLVDQVTRSCRRRGIKKQHVFFGGEDANSFAENFVSTLRFKGWLIAGVNARDAKKQRTNLQASTDRIDLMGIATMLLNCRANCCPAQSGIYRNLRTLVRHRRKLVVMLTEVKNRVHGIVDRLFPGFLNEKNSGIVPFTQSSLYLMENRFSPKQVRRRKREKLIEILKRFGTSKAEYTADKLQQYAAQVLHTPVEYVDTLQLSLAQHVKHIRCLQEGVAQLEKEMAVNLAQTQGAFLTSVRGIGIVLAAGVTAEIGDPNEQKPLNNLVSYSGIIPRVKQTGGPDGKTYTYSVAKRCNRILKDYVVKSALHLGLYGPEDLMIDYKRRDASGQHADFGIGRRYLRMAMSLMRTSQIYIPPRLRKTDSTLEERAGYYLMSWPYLREKWKKYGALEAAFAKDQPLGLWRRIVQEVYDIKLKL

SEQ ID NO: 409907 - protein, 349 aa, unidentified
MKILAIDLGKYKSVACNYVTATGTARFATVVTHTNELDRLLSQESPDLVVIETCSIAGWVHDLCCQRGVVCQVANPNGEAWKWKNVKRKTDRDDALKLAQLAALEQLPTVHVPAPETRQRRALLKYRQSLITRRVAIQNHLRAIAQRQGILLDRGSRAWTKAGFEVIQQLAKPLEQCSADELWRGEAALELQALEAVTKLLREVERKLEVFAASNESVKLLRSIPGVGRCTAEVVVAYLDNPQRFENGRQVSAYAGLVPKQFQSGETDRRGRISRRGPSLLRKVLVEAGWILLRYNPWAQRLMLRLSRGQKTRRKQAIVALARKLLVRCWAMLRDSTEWHEPPPATATA

SEQ ID NO: 409908 - protein, 376 aa, unidentified
MTTLEREYSTNSALYLALDLSEAKWKLGFTNGLGSKAWIRTIDAGEVLLLEREIQRAKERFGLAAGSRVLSCYEAGRDGFWLHRCLVASGIENVVVDAASIEINRRAKRTKTDRLDAGKLVRMLVRYASGERKVWSVVHVPSLEAEDQRQIHREIATLKVDHTRHINRIHGLLAGQGIRMPIQADFLAHLDELRLWDGAPLPAGLRGRLEQEYACLQFVDEQIAAQEAQRRELLRTSTERYVEQVRQLMRLKGIGEQSAWRYVTEFFAWRAFRNRREVGALAGLAPTPYRSGDEQHELGISKAGNRLVRTMAIEIAWIWLQFQPESELSQWYWRRFGAGSKRIRKMGIVALARKLLIALWRYLEQGQLPAGAQLKP

SEQ ID NO: 409909 - protein, 417 aa, unidentified
MKNHQRKLYVGIDVHSREHKAAVLPIALLEQPGTAWRKVKPLGIKNNIADFERLDTTIRSHISSAEEVAIAVDHTGGHYSEPIVYFLQTKGYTVYHLEVKAIKAARERFLDEESKSDVIDSTSAAYMLYLRDAHGISFRISAMIPELSSKAAALNSLVLQRWQFNKLATQATNRLHQFLLAVFPEGEARYFNQLLKVTPYYPTPKDILDSNRLEGIEKLSQKHKENMLELAANSIGIPGDIYHWLIKDLSIQRLESLAKRDALTSMLRTQVTAHPYGDILLSFPYLGAIAAATIIGIIKNIERWPDNKKFKKALGVYSSLTQSGGSSGRTKRGREGSRHGRRVLFQVCFGCIRTSVQDNDFKDYYLRQVARGKPRMKALVSTMGKLAEIIYHCLKAGEPYQYQGKYKSHIPFYDKKP

SEQ ID NO: 409910 - protein, 348 aa, unidentified
MLIIGCDYHPGFQQIAFVDTETGECGERRLTHPEEAEQFYNALKGRSVRVGMEASGHSRWFERLLRDLQFELWIGDAAEIRTKRVRKQKTDRQDAQLLLRLMMEDRFPRIWVPDAANRDLRQLLWHRHRLVQMRTRGMNQLHVVALNEGLRRKKALWRPAGRNQLESLKLAPWASRRRQDLLDLLDQLTPKIQDLTRELEEEVEKRPVARRLATHPGVGPLTALAYELVIGRPERFHCGKQIASYVGLVPTEESSGDRRRLGHISKQGNALLRFLLVEAAQVTVRSLPEWRGKFFHLALRRGRKIAKVAMARKLAVHLYWMWRQGLDYGQFEKLGSHAGEPGNRHGEQ

SEQ ID NO: 409911 - protein, 316 aa, unidentified
MDKSDVFVGIDVSKANLDVGIIPESKQLSVANNKSGIDNLVSHLRKAKPALIVMEATGGLEVKVAGALAASCLPVVVVNPRQVRDFAKATGKLAKTDSLDAFVLAKFAKVIRPEVRVLPDDASKKLKSLIARRRQIVEMITAETNRLSSAPYHIQGEIKDHINWLKERLNSLDKDLDKTIKQSPIWQEKADLLKSTPGIGQVVSFTLLADLPELGTLNRKQIAALAGVAPFCCDSGAFRGKRMVWGGRANVRSALYMSALVATRHNPVIKEFYERLIKAGKAPKVALVACMRKLLTILNTMVKHKTPWQIKDISYV

SEQ ID NO: 409912 - protein, 342 aa, unidentified
MQITTIGLDIAKNVFQVHGIDATEKVVVRKQLRRGQVMKFFAALPPCLVGMEACATAHYWARELTKLGHEVRLMPAKDVKAYVKRNKNDAADAEAICEAVRRPTMRFVRAKSAEQQGRLMQHRTRDLLLRQQTQVINALRAHLAELGIVAAQGREGLKQLLAIIADQADARLPLDARACLIVLAAQLQALHTLIKSIEKRLLVQERANEASKRLESIPGIGIIGASAIAATVTDPKAFQSGRDFAAWIGLVPRQDSTGGKQKLGPISKQGDRYLRRILVVGAHAVLRWAKQNPGKYPWLTQLLARRPFKVVAIALANKMARVAWALLASGAKYRAPRLAAAT

SEQ ID NO: 409913 - protein, 423 aa, unidentified
MKRTYKVCCGVDVHKTFLVATIISSSFVLPQYQQKRFSTFYSGLLSFKQWLLANDCKDVCMESTGKYWVPVWNVLEDSIHVVIANPKWVSAVKGNKDDKKDSKWIGDLFRMGLVPGSYIPPKDIRILREFTRYRSKLVSMRSSEKNRFQNAFTVCNLTLDAVVSDMFGKSSTDILNYLLDTDTVESDHCVSLLRGSLKKKASDVVEAVNGFNMTAEQKERVRIVQGHFADIDKRISQIDQIIAKLTAEYEGTISLLCTIPGIDRRLAITIISEIGTDMTEFGSSKRLCRWAGLTPGNNESAGKKKSVRISRAGVYLKPALVEAAHAAVKATQKCPYFRIKYERIMKRRGKKRAIIAIARMMLTAIYAMVSTGETFNPCDLQKFDMPEELKKKQIISDAKDAVKLLVSLGLVTEGSISLEALVG

SEQ ID NO: 409914 - protein, 359 aa, unidentified
MIVIGIDPHMKTHTAVALDAATGRSVAELTVTCDDRGHDGLLAWARSLSDDRYFAIEDCRHVSGRLERHLLPRGERVVRVPPKMMAGVRHSARSYGKSDPIDAACVARAALREPGLPEACLAGPEQDVRLLVDHRDDLVYERKRIQKRLRWHCHDLEIGLVLPPRVLDRYVWLDRLGSVLGALPESTRRRIALDLLRRCRELTKDVRALERELRGGMRELSPDLLAIPGCSALCAAHLVGQTAGASRFSGEAAFAMHVGVAPLPVSSGQSNRHRLNRCGNRRLNSTIHMIAVTQARMHPPAMAYMERKQAGGMSYREALRCLKRQLARVVFKTMLRTERATVGKVLRADLSADFVAIAV

SEQ ID NO: 409915 - protein, 343 aa, unidentified
MQAITTIGLDIAKSVFQVHGVDAQGAVVIRRQLKRRYVLSFFQKLPPCLVGIEACATSHYWSRELQALGHRVRLMPPAYVKPYVKRQKNDAADAEAICEAVGRPNMRFVETKTPEQQGCLTLHRTRHLFIRQQTAVINAIRAHLAEFGIVAPVGRRGVDQLLAVVADASDKRLPEVARVCVAALGTQLQMLKAQILEFDRMIRAWHRSSETSKRLDAIPGVGPALATALVASVADPRAFRSGRDFAAWIGLVPKQNSSGGKERLGHISKRGDRYLRGLLTAGALAVIRYAKIHGTRHRPWLTALLARRPSKVAAIALANKIARMAWAMMARGERYREPVALAA

SEQ ID NO: 409916 - protein, 347 aa, unidentified
MEYFAGLDVSLETVNVCIVNAAGDILLEKKIAAEPAAIVNLLKSFGSPFKRIGLEAGPTSSWLYGELRAAGYGAICLECRHVKAGLSAMRNKTDRNDARGIAQLVRLGWFRQVHVKSEEAQRTRMLLVNRQQLLTKALDIENSVRGSLKVFGLRVGVVARRGFEARALELVADDPILLAITKPMLRVRQVLLEEFERLDRLCQQLARRDPVCRRLMTVPGVGVVVALTYRTGVDAPERFSRSRDVGAHFGLTPKRYSSGQTDYDGRISRCGDEMVRTALYQAANVLLHHGRWSSLRSWAMRIAKRGSVKGAKVALARRLAVVMHRMWTDGTDFRWSDTRRMTVSTAA

SEQ ID NO: 409917 - protein, 323 aa, unidentified
MQGKVSFQEDAMPVVYAGVDVSKEWLDIHLHPLGESRRFCNDKTGIRQLKRLLARHRPKSIVMEATGKFHRPAHRSLWLDGFAVAVVDPLRARMFARACGYLAKTDRLDARFLALLAESLRPPADTPPSPHIEALQELVNARSAAKCDITALQNRSKTATTALLRGELNRLLRRLEQHVERLDKEIERCVGEDPQLCRKAEILTSIPGIGRVTALALMAGMDELGSCSGKQAAMLAGLAPIANDSGARTGRRSIRAGRPAPRRALYMAALSARRYNPALARFADTLKAAGKPAKVILVAIMRKLLVLANCLLAHDRIWTPNPP

SEQ ID NO: 409918 - protein, 375 aa, unidentified
MKEKVRFLGLDVHAETIAVAIAEADGEVRSLGTIANRAESIRKLVKKLGPAEHLNACYEAGPTGYVLYWQLAELGVACEVIAPTLAPMKAGDRVKTDRRDAERLARSYRSGDLTAVWVPDEGSESLRDLVRAREAAKQDQLRARHRLGKFLLRTGRRPAVGMKAWTSPYMAWVRQVQFTQMAREATMLDYLHEVDHMGERVKRLEQAITEAVKLATPAVQEVVKGLQALRGIAEISAVTIIAELGSITRFDTPRQLMGYSGAVPSEDSSGKRTRRGSITKTGNAHLRRIVVEAAWSYRYRPAIGPRLRKRQEGVSEPIKEVAWNAQVRLTKRYARLAAAGKDQRKIITAVGRELLGFIWAIGVKAETAVTQQMAA

SEQ ID NO: 409919 - protein, 400 aa, unidentified
MDYNQPCIAIDVSKGNSHVCGFVRSTQPYGKILRVSHDSQGFESLKLLSQNLNEVTNQTPIFIFETTGIYHRAMKRYFDMNQLPYKEVSPLLAAKHRKNSAIRSGKTDARDTHALSKLFYDTDIKLNQSGDEVYHELKQLHRYYLSLTSLLVKCKVHFNEKLDVIFPNFRKEIAVDVYKRYYLELLKQYPHPEVLSSKRVDAIENVLIRYGARTSTARRKAERIKTYAKNCWSGSDVDSVDTFILVSYIEQIQEYQSQREHIIERMIQSGKQLHLYGQLQTIPGIASKTAICLIAELGDLSMFVNSKQIIAYAGLDPVVYQSGQNSGKGLSISKKGNKHLRTLCFTTVQRSVGSRFEHPIKSFYQKKRQNTSNYSAIIASCDKMLRIIFSMNQTGEIYKI

SEQ ID NO: 409920 - protein, 357 aa, unidentified
MSSVAELYRFVVGVDTHATVHRYAVVEAATGRVIEEAGFATSRAGLARAVAWIERRAGGPGMVLISAEGSGSYGSRLAKLLGEVGYRVVDAPSPKRDRGRDKNDAIDAIIAARSVLSWPVERLADVRGGPAQECVKVLLAARERMTGESTRAINALTALLRDVELGIDARRALTLAQIRVVSQWLIRSERPVAAIARAEAVRLATRILELRGQLKDNHEQLRQIVAEHVPVLLSMTGIGPVNAAVVLSVWSHSGRIRNEAALARLGGAAPIEVSSGNRAEHRLSRGGDRQLNRALHSIANTRMRQDHQTKLYVARRTQQGLSKRRIRRCLKRYIARQIYRGLATASCPVPTVMVSLD

SEQ ID NO: 409921 - protein, 350 aa, unidentified
MVIIGVDCHTRVHVAAAIDGQGQVGARFTASAKAEELAALTTWACQQGADLVAVEGARGFGLAVTRCLIAAGLEVVDVPTRMTADGRRQGRHRGKDDESDAVVIARVALREHDLPRLRLARLDADIKLLVDARNQLVAEGTRVRNRLHALLLTLSPGYREQTGALSSKRALIVARRLALRARVTDPVRGRLAVAAVRRLFVIGAEAAEFEREKQAVGARHPKQLLAICGVSTLVAGKLLGETHDITRFPTAASFASYAGAAPVPASSGVTRRYRLNRGGNRQLNRALCTIAMVQARWHPDAVAYLKRKRAEGKRPAEARRCLMRHLANAVHRAMLLDADAVRASSTMHAA

SEQ ID NO: 409922 - protein, 357 aa, unidentified
MSTKKMMNYIVKGKEIFIGLEDSKRTWKINVRCEGMEIHYTTMEARYSILHEYLRNKFPECKIAIIYEAGFKGFGLYEKLVMDGYDCVVTPPNKVTQEKHSRVKTDKIDARRLAIVLEKGDYKSCSVPDQERREDRQLNRSLMQIQFDIIRVKNQIRKFFDFHGYAEDFSAGAWNEKQYSEARIKQLPETLRIALDVYFENLDKLKELRKYLHKKVMLLAKKARYQETAKIIKSVSGIGMLTAIRLVLEWGEDIAARFKGGKSLACFSGLTQSEYSTGESTRKGRITGQGRGYIRGWLIQCAWICIKKDPVMLLAFNRISRNTGSKKKAIVAIARKLVVRIWTCVHKKEEYCVGLVE

SEQ ID NO: 409923 - protein, 318 aa, unidentified
MDATAQPLDAWAGIDVSKDRLDVHIHPAGELFSVSRDVAGLDVLIGRLKPLALKAIAVEATGGFEAIVVAGLAAEGLPVIVVNPAQVRSFATALGKRAKTDPIDAAVIARFVEAVRPQIRPLPSRETQALADLMARRRQIVQMIAAERQRALRTADDRLQKSIARLLKALERELKSLDGDIDTSVRGSPVWREKEDLLVSVPGVGKIIARTLLAEMPELGRLDRRQISALAGLAPYTRQSGKWRGKSFIGGGRSSCRAVLFVGALVATKHNSDLKAFHQRLIDAGKPKIVATVAVARKLLTILNAILRDKSKWSPKTT

SEQ ID NO: 409924 - protein, 364 aa, unidentified
MKTNSKTATMSEKNKAETATGAEVIYIGIDAHLEKYVIVRQLDGLSPQPAQTFRKETTLCNWVAKQQKQARRVVCCYEAGPLGFTLHRTLLAMGVTCHVVAPKRWAENEDRVKTDKRDARILCQRLESYERGNHTVLNIVRVPSKEEEYCRALGRQREALKKEVMRNAQRGRGQALLQGVRLKGKWWATKRWDQLKEQSEELFNLLSPLRKIILVIEEECLAMTKRLEEDSVAQKDRPKGLGALTWRMIKGEVCDFTRFNNRREVASYTGLCPSESSSGSRRRQGFVTKHGNRLLRHYLVEAVWRLIKWQPDWYAWKKWKEEFARASGGKRKQIVVALARTLAIDMWRLYTGQTTLENLGMTPA

SEQ ID NO: 409925 - protein, 338 aa, unidentified
MYYTGIDLHKFTSYLTTVDSSGAIVKQENLKNIAHNFVQYFSAIPGEHLTTVESTMTWYWLNDLLTSINIPLVLAHAKYVKAIAYAKVKTDKVDSHTLAQLLRMDYIPVAHKISNENRTLRDALRARLKIVQRHTSVTNSMHLLLAKYNYNSPTQLTGIHEFQYEQLSEVEELLNEQMLDLEKQLYPFLIPNDDIQRLLWIPGIGKMNAFTILLEVDDINRFRDVKNFFSYCRLVPSARNSGGKAKQRSSKDGNKYLKVAFSDAAIHAVQYYSIIRKYHNSLLRKKNKNIAKTIIAKEIAEIVYHVLKNKSNFNNKFRGQQLEHKKSLQWPRVVNPYA

SEQ ID NO: 409926 - protein, 416 aa, unidentified
MTDDARWFVGIDWASETHQVCLVDAGGKIVGERGFPHGGAGLAEMCIWLLVTTRAEPTVIAVAIEVPHGPIVETLLERGFLVYAINPKQLDRFRDRFTVAGAKDDRRDAHVLGDSLRTDRHCFRHLAAEDAVTVELREWSRMAEDLQQERNRLANRVREQLWRYYPQALKISDDLGADWFLELWAAVPTPAKAARVHESSIDRVLKTHRIRRIAAAEAAQVLRQQPLTVAGGTVEAASAHIRAVAARLKLVNRQIKEAHRRLDALCGKLAAGEEKTASGQAPEQRDVTILRSLPGVGRIVLTTLLAEAAEPVRRRDYHALRTLSGVAPVTKRSGKRCIVLMRQACHMRLRGAVYHWARVAIQHDPLSRCRYAELRKRGHSHGRALRSVADRLLAVACAMLDQQTMFDPGRANKQAA

SEQ ID NO: 409927 - protein, 325 aa, unidentified
METKKLCCGIDVSHTKLDVCYQNNLGELFHLQVGNNNAGYKTIIEHTGTHYHFVMEATGVYYIRLAFYLHRFGCELSVVNAMCIKRYIQMHLERNKTDKKDARWICRYAIEQRPAYWQMPDSAYFESKQLYNSIREYTEQIKRFNNQLHSLRLLPVPSKDTIKSLEKIIGCMEKEIKLLEQKLQLLLQQWQPEQLKNVSSIKGIGKRAAAMLIVFTQGFKHTQNHRQLISFAGLAPTQYSSGTSIQGKPRIYKRGGKNLRDVLYMCSMNAMKTNNACKALYERLRANGKTGKQALVAVMNKLLKQVFAVVKHNSLYQPNYCSAKP

SEQ ID NO: 409928 - protein, 417 aa, unidentified
MNQDVYAAYIGIDWADRKHDIHLYDCTTGEAEESVISSQPDAIAAWVEGLRKRYGNALLAVCLEQKRGPLVYALCQYENLVLYPINPRTVSNYRKAFQPSRAKSDPIDARILVELLRKHGDKLPAWQPESAQMRALRQWVETRRMLVGEKVRLTNRLTSALKNYYPQVLDWFEDKDTQVFCEFLERYPTLKAAQAATAEELTQFFQQHRVVRRSAITRRIEQIATSGIPLTEDPGIVEPMQWLVQTLIGQLKPLLVRLIELTLKIDQCFTSFADAAWFAALPGAGEHLAPRLLAAFGEDRTRFDNAQQMMCYFGIAPVKESSGKKNWVHWRWSCPIFLRQTFVEWANQSRHHCAWAQAYYQMQRSKGKSHPAAMRSLAFKWIRILFRCWQNREAYDEAKYLESLKRKGSPIAKRLAL

SEQ ID NO: 409929 - protein, 387 aa, unidentified
MQKPHDNSKASPAAFMQDNTLIAVIELSLSNWLVAGLIPGVSREPLKKLEPNPEDLLKLLHGWRDEAIKAGRPITRIAVAYETGRDSFWLARWLRERGIDAHVIHATSVAVSREHRRAKTDRLDTAMLKRGFLGWLRGERGHCTVAIVPTMEEEDAKRPHREREGLVHEQTRVVNRMKSALIQFGVRNFNPKLRKARVKLETVRTPEGKSLPPNTIAALRRDMERLKIIKEQIKAIEQARLQQFEQKPEALANRMVYLLVRIYGLGWETADLLVHELLSRTIRDRKAVARYAGLTGSPDESGSKRREKGLSRSGNARVRKIMIQLAWRMVKFQPDSALVQWFKQRTENAKGSRKPMIVALARKLIIALWRYANDGVIPEGFRLHSAA

SEQ ID NO: 409930 - protein, 364 aa, unidentified
MVYVGVDLHRKSSYVAVLADDGELLASRWIASQPDEFLRVFGELEAEPTGVAFEATYGWGWFADLLSDVGIPAHMAHPLATKAISSARVKNDRVDAKTLAHLLRTNLLPEAWAAPPEVRDARKLARTRVSLARISSRLKCQTHALLADQAIAPPVTDLFGLAGRAFLQEVRLRPVPQARLQANLRLIDLLAPELAQADRELRELFRADPRIPRLTPIPGIGFTTAALIVAEVWDVSRFPSPQHLCSWAGLTPTERSSADHTRRGHISKQGSRWLRWAMVESASRPYLKDPTLRRFRDGIARRRGAKIAKVALARRLLTLCYYALRDEDGCRAFPVPPTRTNRPNRGRARSPQVMASSGTAAPSD

SEQ ID NO: 409931 - protein, 316 aa, unidentified
MAQLRFVGIDVSKDTLDVFLRPSGEHQVFANDDQGCAKLARFLHVRKRRPELVVLEPTSRYHLLAAKALEAKGIPVAVVNPRQVHDFGKATGELARTDKISAAVLAQYAEVLRPEPRPLPDDDAQAYRDLLARRRQVVASLTAEKNRLRVAGAAASYVQASIDGLVAQRKALDAEIAERTRACPVRKEADRILQSAKGVGPVVARTLLGDLPQLGRLDRSRIAALVGVAPFNCESGTLRGTRHIYGGRAHVRAALYMATVVAVRHNPVIKAFYDRLIAKNKPYKVAITAAMRKLLVILNAMVRDGCPWHATGTQPA

SEQ ID NO: 409932 - protein, 347 aa, unidentified
MRFYTNPHPFYCGIDLHARSMYVCLMSHDGEILLHRNMKAAPEPFLKAIAPYRDGLVVAVECIFTWYWLADLCAEEGIAFVLGHALSMKAIHGGKAKNDTIDSQKIAALLRGGMLPQAYVYPAEMRATRDLLRRRTHLMRKRAELLAHVQNTNSQYNLPEIGKKIAYKANRSGVAERFDDAAVQKNVEVDLALITYYDDLLTDLALSIVNTAQQHDAPTFYRLRSIPGVGKILALVMLYEIHDIRRFPRVQDFVSYCRLVKCARESAGKRYGSSGTKIGNAHLKWAFSEAAVLFLRNNPPGQKYLARLENKHGKGKALTILAHKLARAVYYMLKRDTVFDMDKFLHG

SEQ ID NO: 409933 - protein, 345 aa, unidentified
MEPMYYIGLDVHKQKISYCVKDSGGKIYAEGWIPATRHDLDCWMKNLSQPWSAAMEATMFSGWIYDHLKPHAAVLKVAHPLMLRAIAAAKKKNDRVDANKICDCLRCDFLPESYMAPTAIRERRRTLRYRSLLVRQMVQMKNKIGMLLMEAGVSYNKQKLHKAGYFRELLASNPDINESLRSLLRQCREMVVRLGKMEAALTYSLQQDGLLMERVERLMSIPAVGPITALTWALEIGEVQRFSSIKKAISYCGLCGDQRSSADHTQRMPLSKQRNKHLQTTLIEAAKMAPRYSPTLALLYDKERQKGNANRATLAVARKLVAYLVAVDRGQTHFLVLDRHTCAAA

SEQ ID NO: 409934 - protein, 348 aa, unidentified
MRFYTKSHKHFCGIDLHTKMMYVCILDADANIIIHKNIPTNGKTFIALIEPYKDDIVVGVECMFSWYWLADLCAREKIEFILGHALYMRCIHGGKAKNDKVDSEKIARIMRGGDFPLAYAYPAELRPVRDLMRRRSHLVRIKSEIQSHIAITNYQYNLEPFEKNIVHKGNRQGIADHFRDASVRLNVETDIAVMDALHDQIKHLENYIIKHAKHYDGRMLYRLKTVPGIGDVLALTIMYEVLSVERFPTVQRFCSYSRLVKCANESAGKKMGTSGSKIGNAHLKWAFSEAAVLFIRGNEQAQKYVAKLTKKFGKGKALSILAHKLGRAIYFMMKRNDVFDMKYFFRTN

SEQ ID NO: 409935 - protein, 424 aa, unidentified
MVVLEEDPQSEEIIARVAALDVGKAELVCCVRVPHETKPGRRLQEVQSYSTMTGSLLEMSDHLRCLGVRRVVMEATSDYWKPVYYLLEAQGLDPWLVNAKDVKHLPGRPKTDKLDAVWLCKIAERGMICPSFVPPPEIRRLRDVSRYRIDLVGVRTAEKQRVEKLLEDAQIKLSVVASDIFGVSGREMMAALTGGQTNPKALAQLARGRMRAKLDALEEAFTGHFTDHHAMLLTKMLARIDALDADIAELDAAIEEMIAPFAAAVARLDDIPGVGTTAARVILAEVGLDMSRFPTPAHLASWARFAPGVKESAGKRKGKGTTGHGNRYLARALGEAAVAAGKTDTFLGERYRRLARRRGKKRAIVAVGRSILVIVWHLLSDPQVRFVDLGSDFYDNRTSPERKKRNHICQLEALGYKVTLEPAA

SEQ ID NO: 409936 - protein, 362 aa, unidentified
MVKAMAFVGLDVHARQTHAAVLDPAAGELAVSRLRMAPLEVVSFLQTLGPGVRAVYEAGPTGFGLARAAREQGIDVRVAAPGSIPRGSGDRIKTDRRDAVRLVRLLAAGELSFAFVPSVADECFRDLVRSIEDARADLMRARHRLSKFLLRRGERYPGPGRAWTRRHTIWLGSHRFEDACSQATFADYLAAVELLTGRRGGLIDALEQAIPSCTHATTVARLRCFRGIDTLSAAGLSAEVGDFSRFAAPKLLSGFLGVVPSERTSDLKRRQGSITKAGPGHARRLLVEAAHHYRYQPRIGEALARRQQSQDARVIEIAWRAQRRLHQRWQHLYRERRKPAGVVAIACARELAAFLWEAATLE

SEQ ID NO: 409937 - protein, 394 aa, unidentified
MIYVGIDVASTKHDIVISNESGEVFKKAFSIKNDLEGYKKLLSEISYAKEFFNDLNVRIGLESTGHYSRNILHFLILARFEVMFINPLLTNMDRKAASVRKTKTDSIDAKAICMFLIRNQNDFKPYTLSSYHIDELKTLVKLRKSLKTQINKEMNLLHAYVIQAFPEYYKIFKKISSKASMEVLSRYASLSEFKRVRLKTLKELIRKSSQGHHGIREAQMIKELTASSIGIDSSALSFSIKQTIERILVIKDQVSGIEHEIIHHVDESKTKLLSVPGVGYTTGAIILAEIGDIHRFKTDDQLLAYAGLDPSVYQSGNFEGNYKISKRGSSILRWAIYQAAQAAVKFDSVFKAYYLKKKSEGKRHRVIIGHVTKKLLRVIRSIMKNNITYSINTH

SEQ ID NO: 409938 - protein, 368 aa, unidentified
MKQSSILYVGLDVHKDSIDIAVAEPGRDGEVRHIGTIGGDLVALDRALRKLVSGGRQLHIVYEAGPCGFVIYRHLVGKGFTVAVIAPSSIPRKPGDRIKTDRRDALMLARLARNGDLTPIRVPDAGDEAVRDVIRAREDAVREQRNARHRLKALLLRNGMPYAGKTAWTAAHRRWLATVKLPQPAQQIVFQEYLHAVTDANLRIGRLEQTMQEVLADWPLRPVVEALQALRGIQSLAAMTIVAEIQDFQRFPHPRNLMAYLGLIPGEHSSGPHRRQGSITKAGNGPARRILVEVAWLYRYPARVTPIIARRQSALPKVITDLAWKAQVRLCARYKRLAARKLPHNKVVIAIARELTGFVWAIARAVPQ

SEQ ID NO: 409939 - protein, 370 aa, unidentified
MSVRRILAKTINTDLEYEAIGIDLAKNCVSVALLTTDGEVVCIDRLDYSELEKSAQALSSTTFAMEPCTEMNYLVQKLEAWGHRCLVIGGKNVQNYVENHYSGQKTDLNDAQALAFLAQDTQLRTIKAKDVEQQKYASLTTLREQYIKQYRQTIVSLKGICQAWGLNISKGISGKARLKDLIENHAAFPEELKESLVDMVTHAQTAQKALNKITKTLEELAKNDKVCQLIQTIPGLGTICSCRLRATIGDIKRFKNPKDFPAYYGLVPRSIATGHNEKKGKITHRGDRTMRSLMVQAAGSLVNMATKGKLKSKQLTKWILKKQKEKMPWGKLVCAVAAKLLRIVRAILISSKPYNPKIAGVSKCSLPKGS

SEQ ID NO: 409940 - protein, 351 aa, unidentified
MLIIGLDYHPSFQQIAFVNTETGECGERRLEHGDQEAERFYRKLKEGGVSVRVGMEATGHARWFERLMAELGFELWIGDPAQIKAKRVRKQKTDRQDAQLILTLLMENRFPKVWVPSVENRDLRQLLWHRHRLVQMRTRVMNQLQAVAMNEGLRRKKGLWSKSGRAQLESFLLAPWATRRRRDLLELLDQLTRNITELSTAIEQEGKKRPEVVRLMTHPGVGPLTGLAFVLIIGPPERFRCGKQIGSYLGLIPCEDSSAGKQRLGHISKQGNSLLRFLLVEAAQIAVRDDPNWRRKYVHLAMRRERRIAKVAMARKLAICLYWMLRKEWNYQQLLKFGSHAGQLETGHGVE

SEQ ID NO: 409941 - protein, 359 aa, unidentified
MREQRNKISFRGQKIYVGIDVHLKSWSVTVLSETSVLKKFSQHPSPEALYGFLTRSYPGAEYHSVYEAGFCGFWIHERLTALGIDNIVVNPADVPTKSSEKLRKTDTVDSGKLARSLRANELKGIYTPDSVSLEMRSLIRLKNSITKDTTRQKNRLKSQLRYLGIEIPQEFLTPFSNWSKRFFAWLKEIETLTPSGRQALDIHIRHLEELRRQKLEMTRALRTLAKTDRFREPLRLIMSVPGFGQATGMAFLSEICNITRFRNAEQLAAYIGMIPMCHSSGEKDGTGDITIRKHAVMRCNLIEAAWVAVRQDPAMNLFYTEQCKRMPKSKAIVKVARKLVNRLFFVLKHQTEYVNSIVS

SEQ ID NO: 409942 - protein, 343 aa, unidentified
MQVSTIGVDLAKNVFQVHGVDSAGKVVITRQLRRKQVIDFFSKIPACLVGMEACGTAHHWAREVSKLGHIVRLMPPSYVKGYVKRSKNDAADAAAICEAVTRPSMRFVPIKSADQQALLMLHRTRDLLIRQRTQLINALRSHLAEFGLVAATGREGLAQLAAIITDESNREALPSAMKQALQAIVDQLAALELQIGTLDRAIHAHHRANDMSCRLETVPGIGVIGATAIASTVTDLDDFKSGRDFAAWIGLVPRQHSTGGKERLGGISKQGDRYLRRLLVIGATAVVRQARLHPQKHPWIMRLLAKKPAKLVAVAVANKMARIAWAIMAKGGCYRAPELAAAA

SEQ ID NO: 409943 - protein, 422 aa, unidentified
MNAKSNVSKPKLFIGIDWADQEHVLHLISSHSNKQSTEKLQQEPEAIAKWVKQLRQRFPGHRLMVILEVSRGALFAALADYDDLELYPVNPKQLSRYRDSHYPSGGKNDVVDAKLLANFLKERHEGWRQWLPDDLCTRQMSHYSEIRRKLVDDRKSLVLKLQSTLKVYFPQALTLFKTEMQDDQNLDLLKRWPSLQSLKRVKPQTLRRFLKEHRVKNEEQQTEFIESVRSAAPLTKDQAIVKANALYVQSLVQQLRDLNHSIEQFDEQLKDLVKVHPDAEIFKSLPGAGEALVPRLIAAMGSQRDRYESANDIQCRVGIAPITIQSGKSLQVRKRIACPKFLRQTFHEFADHARKWSPWAKAFYQMKRSQGMKHHAAVRALAYKWMRIIFRLWKTKTIYNENHYIQRLKATGSPIVNFLEKS

SEQ ID NO: 409944 - protein, 472 aa, unidentified
MYKEERIRHGRYCQLRREIRGSGEYLIVGIDIAKDKHHAFFGTARGKVLLKRLVFHNNKEGIAKLLSQVEALKVRHNLSEVVFGVEPTGNYHKALGDYLVKNGHLVVLVSGAAARKNREIMDGRWDKNDTKDAANIADLISQGRCLFYEYPPQRIRDLRDFLSLRRRFKKEEHRLRLRIRNNIVTKHFPEFDRFFSENDSESLSIVKWCLDPQDIHAMDFDKFFLMVTSKRRSLAQERRLRAIHWTANDSIGCPMGTAGGFESGILVDQVKNVRAVIKDIESNMEKICREFPEYEYLLSIPGFGPYISSVVLASIGNPWRFQNASQVIRLAGYDLSANRSGKSSAKAVPEISKKGNADLRYALYQAALIGSTRNRDVMEYFTRKLKGRSREKGIGMKMRVKLSVKLLVIAWTLMKKREPFNPEYLKDPCLEKQGGVSHLLKAKTAEATVRSRASASSSRRDRRPLTANLSGG

SEQ ID NO: 409945 - protein, 370 aa, unidentified
MEQYTEAFVGIDTAKNKHALAIADPGRDGEIRYLGEIDSAPAAVQRMIRKLAGRYEKLYFCYEAGPTGYGLYRQVRALGHDCIVVAPSLVPKRPGERVKTNRRDAVTLARLLRAGDLTPVWVPDAVHEAVRDLVRARTAASEDLRRKRQQLLSFLLRHGRIYSGRKHWTKMHLHWLAQQKFDHPAQQIVFQDAVDAIEDAATRLRRLDQQVAEIVPSWSMAPVVEAYQAMRGVSFGVAATFVAEIGDLRRFDNPRQLMAFLGLVPSERSTGERVRRAGLTLAGNKRARRVLIEGAWSYRYPARVSQTLQTRLEGLPKTVRAIAWKAQIRLCARYRRLTAAGKKRPLVIAAIAREMAAFLWAIAQHVAPAA

SEQ ID NO: 409946 - protein, 346 aa, unidentified
MQPVIGCDAHKHFSVFVSVDRHGKASRPVRVDHDRELYCSYLRSLPAGSEIALEATGHWYWIVDAMEQAGHHPHPANPFEAKRRMAKSNKTDALDAKGLAILLRCGTLPESWIPPGELRDQRELLRTRMALRDLRTSLKHRIHAGIDRYGLQADAISDLFGTKGRAYLANILKALPTETAHMIAVQLHSIDQLEEKIDAIERRIAEQLKTSPEMRLLRTVPGLGPILAPLVWLEIGKVERFPRAEHLASYAGLVPRIIASGGHIRHGATCRNVNHYLKWAFVEAANCAIRIKAHRQNHIGMLYQRLYPNKGHGRAVVAVARHLAEASYWVLRKKQTYRAPQPRIAG

SEQ ID NO: 409947 - protein, 387 aa, unidentified
MYFVGIDISKFKHDCAIIDELGDVITSSWSFNNDCEGFSLFRDLLNALDGEKKIGFESTGHYGHNLKLFLESNNFSFMEFNPLLIARFVRGKSLRKTKSDTLDAQSIAQYLMTVEYKPYPPSFYHMDQLKSLTRFRDSLVRQHSRQLVELTNILDKVFPEFKPFFDGKFSVTALYILSHYQSPEKIANMNAKSYEALRKKSRGKFSMVKFAQLKALAKNTVGRSDDFLLKQMEITIDIENQLDAKIDEIETQIAECIRGLNPPVLTIPGIGELTAAVILSEYGDISRFEGPAQMLSFAGLEPGYYQSGQAEYGGHMVKHGSSHLRYALMNACLPLITYEPVFAEYYAKKRAEGKPHRVALTHVAKKLLRVIYTLQTKNIPYDPALIH

SEQ ID NO: 409948 - protein, 342 aa, unidentified
MQIAVLGIDLGKNSCSVVGLDAGGRVVLRRRLQREGVVKLAAGLPGCVMAMEACCGAHHLGRRLRDQGHQVRLMSPEYVRAYVKAQKNDDRDAEAIAEAATRPTMRFVELKSETQLDMQSLHRARDRLVGERTALINQLRAFLLERGIVVPQGRRKLESHLETLLAGKETLLSPRTRLLIEDQRAEWRELDRRIDAFDEEFAREARADEAARLLLTIPGIGPLNATALVAAIGRADTFGRGRDLAAWLGLVPRQMTTGGKPKLLGISKRGNGYLRKMLIHGARAALPTLCRSETPLGGWLRGLAARAHVNTVVVALAAKLARTICAVLRTGQQFVMRAATVA

SEQ ID NO: 409949 - protein, 420 aa, unidentified
MSFKIFRFNCCGLDVHKTWIYACIGITDSNGRTDYKQARFSSFSKGLKELCDWLAKYNCSEVCMESTGKYWIPVFNVLEKANNSVILAHPKYTKPQKGNKTDRKDAKWICDLFMCEMIKPSFIPPADIRHLRDLVRYRFKLTCMITGEKNRAQNCLTVSNLKLDDVFSDVFGKSSRSITEYMLAHPGEIFDVAPFVDSRCKTPMEEIQAAVDGAISPEQAIKLRQCLNHIDELEKHLEEIEREILRLSDKYQAALDLIRTVPGFDKNPMTAIQILSEIGGDMSVFPSAKHLVSWAGCCPRNDQSNKRIKSTRISRAGNYIKPILVQVANGLLRSKKHPEITGRYKRIKSHRSHKKAIIAICRMLLTAIWHILSDLKPYTAEGFLESRPVNKAKVLTTSQALNLLKQRGYTIKDDIVPAMN

SEQ ID NO: 409950 - protein, 345 aa, unidentified
MEITTVGLDIAKRVFQLHGVDAAGKAVLRRKLQRSEVLAFFKALPPCLVGIEACGTAHYWAREIRELGHEVRLMPPSYVAPYVKRGKTDAADAAAICEAVTRPTMRFVPIKTAEQQAVLMLHRARDLLVRQRTMLVNALRGHMAELGVIAPQGIARVADLLAVLLGEDTTNVPALAREALRGLVAELEALDRRVKEIEVAIVTWHKDNEASRRLATIPGVGPITASAIVATITDPFQFHSARHLAAWIGLVPRQHSSGGKQRQAGISKQGDRYLRRLLVLGATAVIRHSRSKSTAEAGWLKSLLERRPTRLVSVAQANKTARIVWALLVHGEAYRRPAAVPGGAA

SEQ ID NO: 409951 - protein, 360 aa, unidentified
MENIQSVNSFVGVDIGKKGMEIVRISNHGPHRRLRTKTTQEGEKALFEWLRPTDTVILEAGSQSFRIAKRIRNHGIEAIVLNPGDVRTIYASLRKTDKEDALKLARLAQRNPREELPEVTVPDDEEEDARRLTTEQAHWSKQKTINKNRLHSLFTQAGLTDITKKDISTQKNRERVIPLLPERYQREALRLQQALESIDNFLETVDDEIRERLQDNIEYTKIAMSMPGIGPVTAHAFIAYLGDCRRFSRGKQVSYYAGLVPRVDQSGETERYGSIIKRGCTPIRRVIIQCAWAMMKAEHGGPLKEFYERLNLRIGSKKAIVATARKMVETFYSMITSGELYWGVPEDIIHKKMKTYGLIA

SEQ ID NO: 409952 - protein, 386 aa, unidentified
MHDGTNLPVPERTGIPGDCATLFVSLELSRSTWVATSLAPGSKKMSKHTLVGDDGRKLLDLLARLKTRAEQRIAAPVKVVAIHEVGLDGFWIHRLLEANGVESHVVDPASIAVPRRHRRAKTDAIDGETLLRTLMAWQRGEPRVCAMTVPPSPSEEDCRRVSRERATLLRERIQHTNRIRGLLFGQGITNYNPLHKNRRECLEELRTGDGRSLPTHVKAEILREIDRLELVLRQIGEVEAERDEILRPAEASSPAALLMRLKGIGAEFATVLYFEGLFRHFENRRQLAAYAGLAPSPWKSGSIDHEQGISKAGNPRLRTTMVELAWMWVRYQPDSALSGWFRQRVGSERGRTRRISIVALARKLLIALWRYVTHGEIPAGAVMKPV

SEQ ID NO: 409953 - protein, 369 aa, unidentified
MNATTAPAKDATVVGVDLAKSVFQLAVANGSWKVVESHRLTRTQFERWFGNRRVALVVMEACGSAHHWARWLNALGVPVKLLPAAYIRAYVKRNKTDAADACALLEAARCADITPVRIKSIEQQALQGLHRTRSLWQSTRTSRINALRGFCREFGMVIAQGSRLGVEQISRALADPHSAVPALIRRTMQLVVEEIRLLETRISQLERELTLLARQSAACTTLLSIPGVGLLTATAMVAATSGKVQHFRDARHFASWFGLTPKEYSSGSSRHLGRISKRGDRYLRMLLTHGARSVLRAASVAAKTGRTLDGLRRWALAVQGRSNHNKATCALANKLARICYATLRDAQPYGQPAPRLNKKIGRTAFALAT

SEQ ID NO: 409954 - protein, 312 aa, unidentified
MVCAGIDTGKRKLDAALKGGAERLQVNNAADGHAALARWLRRRRVKRVGIEASGGYEQDVVAELRRKGFVVVVFQPVQVRAYAMFHLQRAKNDKIDAALIAMCTADAKKIHAPPDPRLAPFAQDLTMLDQITDDIAGLKNRRESCRDRRIRQLWKEQIAQRKKLLKTELNRLVAGIRQYPDLAERLDLINSVDGIGLPTAVAILVRMPEIGRITREQAAALAGLAPYDDDSSDYVGVRHIAGGRERLRGALYCAALPASFRWNRQLIDLYRRLIAAGKGHKRALVACARKLLIFANTVVARGTPWVSRASPA

SEQ ID NO: 409955 - protein, 350 aa, unidentified
MSSKLNTAIAVAGIDIGKNSFHVIGLDKRGAIVLRQKWSRGQVEARLANTPPCLIGMEACVGAHHLSRKLQALGHDARLMPAKYVRPYSKGQKNDFRDAEAIAEAVQRPTMRFVATKTSDQLDLQALHRVRERLVGQRTGIINQIRAFLLERGVAVRQGLRFLRIELPGILAKRTDVLSPRMLHLIERLADDWHRLDERIEVLSSEIGALACGDPACDRLMTVPGIGPIISSATVAAIGNGAAFSKGRDFGAWLGLVPKQISTGDRTILGKISRRGNRYLRSLFVQAAWVVLVRVGPKHWDRYGLKSWIEAAKKRLHHNVLAIALIAWAVLNKERKFECIRTNEMSPRAA

SEQ ID NO: 409956 - protein, 317 aa, unidentified
MEQCDVSTKIAGIDVGKYWLDAAIDGQSTPLRVVNDAAGIKTLSSWLKSHGVGRVGMEASGPYDRRVRADLQAVGLEVVLHQPMEVKLFGRIRRQRAKNDRLDARLIAAATAGIERQPLKHDPRLAELAERLTVYEHVADTIAGLKSLLESVGLEDLHRAVTGQIEQLAAFKSQLAEAAMATIKAQPDLRHRLGLLMSLPGFGPIVATSILVRMPELGDMQHGQPACLIGVAPHDRDSGTHAGTRFIAGGRSRPRRMLYIAALAAKRCDPDLKAFAQRLEANGKPKKLILVALMRKLIEAANIVLKRNAPWVIKQPN

SEQ ID NO: 409957 - protein, 350 aa, unidentified
MKIIGCDFHTRYQQIAMLDEATGELIERRLEHQNGEADAFYRSLAGPVRVGIEATGPIQWFQRLLAELGHQLWIGDSAQIRASAVRQQKTDQRDAALILDLLLTNRFPRIWVASPAQADLRQLLWHRHKLVRMRTMVGNQLHALALGQGLCRKAKLFTRKGRAELRDLSLGPWASRRRRELLMLLDQLDPSIQELDRAVMEQARRRQEAVRLMTHPGIGPVNALAFLLTLGPVTRFGCSKQIVSYLGLNPRERSSGGKQRLGAISKQGNSMVRWLLIEAAQHASRFDPALRHNYQRLKFRRGSAMAKVAIARKLAVRMYWMLRTGADYAQLVRMQGSPRGTLVSTASPIC

SEQ ID NO: 409958 - protein, 344 aa, unidentified
MNRTTIAVDVAKTVFEVAVSEHPGQVRERHRLSRAGFRQFLAERPPATVIMEACSSAHHWARQAQSRGHEVVLVPPHAARPYVLRNKTDRTDAKGLLEAFRNDDLRPVPVKSETQQALAALHRLRSAWVAARTARLNTLRGILREFGVLIPTGAHHVGPHVRALLEDVDAGVPGLLRVALGEALREIGELEERIRAIERQLATAAEPALVVSQLRTIPGIGVLTATALVAAVGDVQRFPSARHFASYLGLTPREHSSGQRRHLGAISKQGDTYLRMLFIHGARSVLHHAKSKTAPTTDRLRTWALQVERLRGHNKAAVALANKLARIAWAVWRNGNDFAAVPAV

SEQ ID NO: 409959 - protein, 326 aa, unidentified
MLFVGLDLHKKYSEFAVMDVGGNLLRQGRLENTIEKMKEFSESVPERSSMVIESSSTWYWAHRLLSERHNVTLSNPMKNKAIASAKVKTDKIDSITLASLLRGGWAAECYVPSKETMEFRELVRFRANLVRQRTGMKNRIHAYLLMNNISIAAGPFTKGFVDEVRKLNDVRVQSYLRLIDGLNREILEASRSIKEKAGSDADANLLMTIPGISYFSALLIISEIGEIERFEDSSSLVGYSGLAPSTHSSGGKTYHGPIMKTGSRYLRWIMGQCTRVHMRTEPDGTVATFYARIKRKKGDQKAIVAASAKLLRIVFWVLKEKRAYHS

SEQ ID NO: 409960 - protein, 400 aa, unidentified
MSVIIGMDPHRRSATIEVIDQGGRVLQVGRFDTDQAGYAAMLAAGRGHGVIGERVWAVEGCNGIGRHIAHRLVHDGERVLDVPTKLSAQVRVFATGNARKTDPVDAHSVALAALYAPAEPGLRPVVVEDDLVVMGMMVDRRDELGRTRTQTVNRLHRLLLELIPGGAKTFLSAPQARALVAKVKPRDLVGKTRRRLVVELIGELEVIDRKIKTAEKELTALVTERGSTLLELTGIGPTGAARLLADVGDIHRFRDKDRFASWNGTAPLDASSGAQQRHRLSRAGNRRINRTLHIMAVVQLRNPTPGREFYDARKAGGTPSLMAMRSLKRRLSNVVYTRMVADQTRREYTLRTGQVTGPGGHRGNDSDSSVTGSQPHTGSSDKPLPGPVTPERRTPVLAMS

SEQ ID NO: 409961 - protein, 355 aa, unidentified
MPRKTDSAVAHTIGIDTGKNTLHMIGLDEKGAIVLREKVSRIRIAARFVNVPPCLIGIEAGMASHHIARELTALGHEVKQVPPAYSKPFRQGHKNDFRDAHAVAEAVERPSTPCVPIKTDGQLDLQALHRVRSRLVGNRTAVINQIRGFLLEHGIPVRQGHRFLRQQLPQILATRADVISPRMIRIIGDLIEDWRYLDERIETVTDEIEALARADEGCQQLITVPGVGPIISSAMVAAIGNGAAFCKGRDFAAWLGLVPKQMSTGDRTILGRITKRGNRYLRMLFIQGARAVLLHPTSWARHSFGPWLTTAARRMHRNVLTVALANKLARIAWTVLAQGRRYEARVEPRIEPAAA

SEQ ID NO: 409962 - protein, 337 aa, unidentified
MAVAGIDSHKDTLAVAVVDDQGRELDRTEIENSSRGHLTLIGWLGRHELTRVGIEGAGSNGRVAALRLQDAGYEVVEVPPQLTAQARRRQRTQAKSDPIDALLICRIALRELELPQIRPSGDIEDLRVLVHHRRELQSERTRAASRLHSDLEQLHPGYQTRIGRLTAERNLDRARRLLSGDDRVRADVARERVRRLRQLNRQIARITEEIGALSATFGSGLTTITGIAELSAAELLAEIGDIGRYRTKAQFAMANGTAPLTASSGRIDRHRLNRGGNRQLNRIIHFVALTQISRSPEGRAYYERKRTQGRTTKEAIRCLKRRISDRIFVTLRASMLT

SEQ ID NO: 409963 - protein, 385 aa, unidentified
MAKPDDLSKPAVALDYDSTLVCVIEMSGTSWLVAATVPGVDRRPLQKLPINPARLLEQVERWRKEAARAGRTITRTVVAYESGRDGFWLARLLQGHEIEVYVIHASSVAVSREQRRAKTDRLDTEMLMRALLGWLRGEPEHCRMVAVPTVAQEDARRPGRERDGLVAERTRVTNTIKAELALRGIQGFKPGLKKATEHLEALRTVEGEPLPPNTLAKLRRLLERRRLIGEQIAAIEKDTAQAVERDPTGPNALILLLAQIKGIGLETAQMLVYEVLSRNLRDRRAVARYAGLTGTPDESGSKRRDKGISKAGNPRVRCGMIQLAWRFLMFQPDAALARWYKERTAGARGGVRKTLIVALARKLLIGLWSYAAGGVLPEGIVLKAA

SEQ ID NO: 409964 - protein, 310 aa, unidentified
MANQYVGIDVAKATLDVALGSDGELVQVENSEAGIARLLEQLGEVAPTLVVLEATGGYESVVAGAIVGRGIPVAVVNPRQVRDFAKATGVLAKTDRIDARVLARFAEAVRPEPRPLPTAEAKELEEYLSRRRQLVDMLTMEKNRQSIAATERMKKSLKKHIDWLEEALRRANDDIDKAIRNSPAWREQEDLLRSMPGIGPVSARTMLAELPELGQLNRKKIAALVGVAPLNRDSGTLHGSRTCWGGRASVRQVLYMAALSAVRCNPVIRRTYAALRARGKKHKVALVACMRKLLTILTAMVRDQRRWSPS

SEQ ID NO: 409965 - protein, 342 aa, unidentified
MDHFAGLDVSVKETSVCIVDETGKIVREVKVASEPEALLSVLKNPAYRFKRIGLEAGPLSQWLFSALAEAELPVVCVETRHMQAVLKAQINKTERNDARGIAQMMRVGLYRPVHVKTLRSQKLRMLLTHRKLLQSKAIAIENDLRGTLRNFGLKVGMVGTAKFEARIKELIENLPDLAVLIEPLLVVRQALREQFVILHRRLLALVRDDEVCRRLMTTPGVGPVVALTYRATVDVPARFRKSKAVGAVFGLTCSKYQSGEIDRSGRISRCGDEMMRVMLYEAAQSMLRSKKWSWLKAWAMQIARRRGMKKAIVALARRLAVILHRIWVDGTKFRWTRETAVA

SEQ ID NO: 409966 - protein, 416 aa, unidentified
MNAVGIDVSSRKSTVAVLRPLGEVVCLPFDVTHDIAGLASLVEKLKALDGETRVVMEHTGRYYEAVEKALHEAGLFVCAVNPLLIKEYGANSLRRVKTDKADAVKIARYALDNWADLRDFTPMDAIRYDLKTLNRQFQLASKQRTASANNLIALLEQSFPGIRKCFDSPVRSDGTQKWVDFAHSFWHVDCVRKQPFAAFCERYRKWCKRHAYLFKLSNAEEVYALAKRAVVLTPKSKVVKVLVQEAANQLISISRSVEVYRAEMDRLAAMLPEYPVVMAMYGVGKSYGPQLMAEIGDVRRFERKQALVAFAGIDPMPNQSGDKNVRSNKSSKRGSPYLRKTLFNVIRTYLQCAPQDEPVFQFLNRKRAEGKPFYVYMLAAANKFLRRYYAKLRDFFASLDTLQPVAPIPTILKATL

SEQ ID NO: 409967 - protein, 370 aa, unidentified
MPKSTPLFVGLDVHKDTISVAHATGDAAAPPHYVGQIGTRQCGLDKLVRRPQSLSSQLVFAYEAGPCGYVLHRYLTGKGLDCRVVAPSLIPKKPGDRVKNDRRDALELARLLRSGDLTRVYVPSVEDEAVRDVCRARDATRLTLKSAKLRLKSFLLRLGFNYVGRADWNDAHRRYLAKVVCPTPAQQIVFQESLRAVDEQVERLARLERELLDLAPTWRLFAVVEALQALRGVQRLVAITVVAELGDLTRFDNPRQLAAFVGLTPSEHSSGDKRRQGGIPKTGNGRARRVLIEGAWAYRYPAKISAHIRKRIDKLPKFAQDIGWKAQVRLCKRYRRLIARGKHANVVTTAIARELLAFMWAIAKEVKITA

SEQ ID NO: 409968 - protein, 410 aa, unidentified
MVERFVGIDVALREHRIAVLDRDGEAVGPSFTIAASKDGVATLLRTLDARGATAAQTLIGLEASGHLWENLEAALIGAGYRVLVLNPLQTRRYRDVVRRKAKTDDIDAHVIAGLLRSGAAQASYVPDEPIQSLRELARLRARLMADRQDYLRQLVAQLDVVLPEHRTVLGDLLTARARGILAQFPTAPHLANANPRAIRRAAEEAGARGFSLDDATGVRDSARRSLYSGKAAAARAHVVRTLVSQLERLTSAIDEVDRAATALLPPSAPGTGPSDAELLQTIPGIGPQTAATLLGELGALTRFTDARALVAYVGFYPVINESGDRAAPPRLSPVGSRIARHSLYLAAVNAVRRSGEWRTIYLRKKAQGKTAKQALVVVAVKLLHALYAMLKHRQPYNPSRLLVAPATIGS

SEQ ID NO: 409969 - protein, 351 aa, unidentified
MKTQTKTASKLWIGIDFHKKTWRVHFRSDTFSGNPFSMEPDPDALHKKVETEFSGYEVEIVYECGCFGYWAHRKFVSYNWISIVVNPCDIPRISKQKFTKTDSIDARNLSKLLKAGLLRSVTVPDVEREQLRSLFRRRVHTVMYTRSIKVRLKAHLLYYGIKIPAEMDNAAWSKNFREWVREIEWKYETGKQMMLSNIKQVEYLHYETNEISNQLRKYCREKHKKVYNLLRSIPGVGPLTAICFISEVGDISRFKNFKQLACLVGMMPTTYQSSETNRTQGLTPRALRIMRSYLVEASWQAVRIDPILREYYKKHTGKKPNDIIVKVARKLLSRMYGVLRTETEYQIGLVK

SEQ ID NO: 409970 - protein, 327 aa, unidentified
MEDSMYYTGIDAHKRTCFLVTRDSKGKIVKQANLCSSETAIRDYFTDLSGSHRAVVESTSSWYWIGDVLREQGIELTLAHSKYVKAITYAKVKTDKVDAATLSQLLRSDLVPEAHQISCELRGVRDMLRTRLRLVQRRTSAMNSTHRVLEKFNCRSPLELDLFYREQVRCHHEQIVLLEEQIKRLQKRILGELKPRQEIQWLMSLPGIGRINASTIYLEVDGIERFDTPDRFCSYSRLVPGSHNSAAKQRHKRSKDGNRYLKLAFSHAAVRAIQHYPQIKAWAWRIERRKNRPIARALVAKQIAIMSYYVLKRREPFNGYFKGVELK

SEQ ID NO: 409971 - protein, 349 aa, unidentified
MIWIGVDAHKRVHQAVAIAEVGIQGERTISNTPAEWAALLEWARQWPERIWAVEGAWYLGRGLAQYLAEQGERVHEVSGRLTAARRGRAVRRGKSDRLDAHAVAQLLREEAERLPRVLALDDETAQVQLWSRTQAELTKDMTRLVNRLHDLLLLCDPQYARGLPDLTTTAAIGALLGYHAPGEGGLARERERIVRGTAAQLGLLHDQDRELRSKLERASTARFSPLRQIEGIGPIIACAIVAELGRPRPHFAEEQLAALAAVAPLEASSAGAVRHRLNRGGNRRLNMLFHVISLTQGRIYPPARSYLERRRTEGLTAREARRALKRHLVRRVFRAWLSSFDQHIEAVAA

SEQ ID NO: 409972 - protein, 347 aa, unidentified
MRFYTGRHRYYCGIDLHARTMYLCILDHESGEKLLHRNLRCDPDLFLQAVEPYRDDLVVATECIFCWYWLADLCAREGIDFVLGHALYMKAIHGGKAKNDRVDSHKIAVLLRAGALPKAYVYPPGMRATRDLLRRRLFFVRNRGELFAHVRTTHHQYNLPTPSGQLLYQCNRAKVPDAFLDPIVRTSVEADLALAGHYDGIIRSLERTILRTAKVEDPETLDRLQTIPGVGPILALTLLYELHDIARFKRVQRFLSYARLVKSQKSSAGKVLGTSGAKIGNAHLKWAFSEAAVFFLRKNPRGQKHIDRLRSKHGKGKALSILAARLGRASYYMLRRSTDFDMDRFMN

SEQ ID NO: 409973 - protein, 418 aa, unidentified
MNATEWNQQPYFAALDWARAHHDVVVMDRLGQVKEMIRFGHTVEGWRKFQELARRYPALPVAVETSQGTVVDQLFAAQVRVYPVNPKAAERYRERQAPSGVKDDQRDAWSLADALRLDGHTWRALSPQDPIVAELQLLCRDEIALIEQRTAFVNQLQQALHEYYPAALQAFANWTCPAAWELVLSFPTPAALEQAGRRRWEKFLHTHRLWRKDTAEERMAIFARATALSGTAPTVAAKSLLAVSLVRLLRTLEAQLDSYRERITAVFARHPDHDLFGSLPGIGPKLAPRLLAEIGDDRSRFVDAEGLQCVAGTAPVTFQSGKLRFQKVRYACNDTLRATVHLWVEHSRDDCAWAKAYYQRHREKGQSHACALRCLGQRWLKILWKMWQTRTPYDEARHTRNQTEHGSWILKLNPAPAS

SEQ ID NO: 409974 - protein, 404 aa, unidentified
MVTSMPTEAFLGVDWGGSEHQLCAVDDTGEVLIRRRVGHTADGLAVLDDTLAELSVLRVRVAIERGEGLLVEHLQAAGITVYCVSPKLSSRARERYRLADTKSDAFDAFVLADTLRQQHDQWRPLAARSEQTALVASLSRDRERITLMQRAVESRLRATLEAYHPAPLHLFSSLDRDIALAFIRDYPNPVAASRMTVDRMARFCRRHHYSGRVDPAVLLARMQPHLLAGSPGTTAGKQIMALHLVDQLEMLNQQERDFNVHLAAAVAAHPDGALFTSFPGIASVIAGVMIGELGDDRARFPAPGALLAESGLAPVTRASGRTRQVRFRYAANKHLRHAIDWWMTVAAREDPWSKQVYDQARAAGHSRYRAYRGLGARWTRILWRAWTDHQPFDPDRGHHTPAGN

SEQ ID NO: 409975 - protein, 405 aa, unidentified
MPYILALDVSMGHSYSVLYKDDTCLFEDEIEHTQRGFHALLEEIQHLPERPLIVFEATGIYSRPVEKFFQDHHFSYCLLNPLEAKKQMEESTLRSWKTDKSDAHRLAQTHLRNQRQPKEVQSNFYLEMRDLARFYQEIEKKITRLRMDLHNCLQLTFPELEQFFSNRLTPYALTLIRLFPHPDFVLASTRTKIKNKLINETRKKISANRAEQKADQIIHYAQCAYPAVEKDSIHCQKTIYYAELLQDLLEQKEALATQMIKKAEGSPCFLLYQTFPGIGALTAALLLGELGDITRFETHKQLNAFVGIDIRRYHSGKYTGQDRINKRGNPKARKIIFFTIRNMIRQQRAAPNHIVDYYYKLKKQPIPKKDKVATVACMNKLLKCMHAMVRAHTEYDYAYAVSVDH

SEQ ID NO: 409976 - protein, 404 aa, unidentified
MEHVIIGVDPHKLSATIEVVDHHERRLGSGRFTTDQAGYTAMRTYAKSWPERVWAVEGANGAGRPLAQRLLEAGEHVVDVPAKLAARVRLFDTGHNRKTDALDAHSIAIVAVRTAGLRVLKVDGQLEALRMLSDRREALSRRRVQTVNRLHALLGELLPGRAKKDITPLQAKALLASVRPRDIAGKTRRRIAAEELAELVAVDAKITKATAELKAIVLARGSHLMNIHGVGPVVAARTLADVGDVARFADRNRFACWTGTAPLDASSGEQNRHRLSRAGNRRMNHMIHIAAVTQLRLNTDGRAYYRRKRAEGKKPLEALRCLKRRISDTLYRQLIADDQRAAGGQEAGAGPGGHCGASQESSAAGSHPLTGTSDQPLPGPATPTLQPAPTTRKTHRGGTLVATG

SEQ ID NO: 409977 - protein, 378 aa, unidentified
MSDVISIAPADVRLWVSLDVHKFSIVAATLPPAGGTPEVCRIETTEKAIRRFIDRLGGPEGLAVCYEAGPGGFALWRLLTRLGVSCDVVAPSLVPVRAGDRVKTDRRDAKKLVSLHRGGLLRFVHPPTEELEGLRDLLRCRDDIRCARTAARHRVLKALLRHGRIFRGGKTAWTKLHRAWLARQRLDDPLAQRALEQLLIHLDGIERQLDALDAELGQIASSERWAGQVATLTRFRGISTLTALGLIAEIGDFARFGHPRELASWLGITPSEYSSGDQQHRGHITKAGNHHARRLLVEAAWHYRHPPRRPTSGPDPDERAWQAQVRLHHRYRHLTEHGKRTTVTNIAIARELVGFLWAAMTDQPLRDTHDPHHKKVAA

SEQ ID NO: 409978 - protein, 398 aa, unidentified
MITTDIDIFLGVDVGKTDHWACAVTKDGTKVWNKTLPNDEAKLTKVYQELSAKGTVLVVVDQPATIGALAVAVAQHLGITVAYLPGLSMRRIADMYPGTAKNDEKDAFIIADAARTMPHTLRSIQVSDEDEATLGMLTGFDLDLARQITQTSNRIRGLFTQIHPPLERVLGPWLEHDAVLEVLAAWPTPAALRHAGQARIDAKLKKYGARRHTAWASTVIDTLDEQSVIVVGTDAAGLVIPHLARQMISLHAQRADVAAHLETMVEAHPLYPVLTSMPGVAVRAAAIIIAEISGKTFTSAAALSSYAGLAPTTRQSGTSIKSERVSHSGNKRLKRALFLSAFASIRFDPASREYYDRKRAQGKRHNQALIALAHRRLTVLFAMIRDGSLYDVPELKIA

SEQ ID NO: 409979 - protein, 455 aa, unidentified
MSKSNRTDTPLRAARAQISNPEITVHAMYRSAIGIDVHLNLLVCCHQKQVAGHREQSESRDFNTDRASIDAFAAWCRECNPDIILMESTGSLWQSPYEALERAGFTSEQLALINARDAKAAAGRKTDRKDASRLASLARTGNFKKSFVPEKAFRLQRVISRDLQKNRNDISRTSNRFGKSLNLTGCRPTTVFSDIRGGKAASLILMAKLRDDPHLFDVIKQNSRRLRASPEQIMQALNFEIEPMMKEQILALRKKIDQLEEYDRSTFERLRQLQAPYEKDIQLLITITGIQERSARMIYAELCPDLKEHFPTSEQFASWLGICPGDNTSAGKQKSGKCPKGNKHLRRTLIEAARGLAVGGTAALKEKFQVLKMRRGYRRAMVAFAHLLARIIYSVLTHQKGFEPYLSTAFRDALIERAKNGVKQLLKLKGTKYVIADGLVVETKTGAILGAVVSS

SEQ ID NO: 409980 - protein, 350 aa, unidentified
MWIIGCDFHPSGQQVYTVNEQTGEIVERWLSHGGEEVDEFYRSVPAGSEVGVEASGNMLWFERKLARYGLKLRLGDAAKIRAKDTRKQKHDRRDAEHIYTLMRKQDFPDLQWVPTLQERDLRQLLLHRHKLVRMRAQVKNQLQHIALNQGQQKKWQLWTAKGQELLKKLELEPWTERRRNDLLQLLESLNGYCEGLDAAVEQEAQQRAAARLLMTHPGIGPVISLAAVLTLGEVKQRFENSRKLVSYLGLNPSEDSSGERRRLGSISKQGSSFMRMLLIQGAQTAVRGDAELARQYRRLAMKKNKGIAKVMVARKLAVRVFWMLKTNTGYPELVRMRGSSSHPVVEGPTA

SEQ ID NO: 409981 - protein, 322 aa, unidentified
MTKHTTICAGIDTGKRKLDVAIEGRRELLQVDNTAEGHKVLLAWLRQRRVKRVGIEASGGYEQPVVAELRRKRFVVVVFQPAQVRAYAKFHLQRAKNDKIDAALIAACTAAVRKIHAAPDPRLLPFAEQLTMIDQINEDIARLKNRIESCRNARIKKLWQEDIARLEMRQKAELKALVASIRKRPDLAKRLELINSVDGIGLPTAVAILVRLPEIGRITREQAVALAGLAPYDDDSGEQVGVRHIEGGRKRLRRALYTASLAASFRWNRQLIQLYQRLTAAGKEHKRALVACARKMLIFANTVVARGTPWCDEPPVGSLSVS

SEQ ID NO: 409982 - protein, 463 aa, unidentified
MPKSRKTRKKVTPKVDWTSGLETLHHHAAGIDVGSAQHYVAVPVGRDPQPVQTFGSFTADLHRLAQWLQACRIETVVMQATGVYWVALYEVLDGYGFQVQVVNARYTKTLPGRKSDVQECQWLQKLHSFGLLNNSFRPPEEIRVLRCYLRQRENLVQQAGICIQQMQKVLTEMNLQLANVISDLSGATGMSILQAILEGERDPYKLARLAAPGIRASRKELAQSLEGHWREELLFVLRQTHDLYLTFLQNIRQCDGCIEAHLQTMEAKVDEVARPLPAARPKNRLPKRKHIPQFDLRAELYRVAGADLTQIDGINVQTAQVVISEVGVDMTRWPNEHHFSSWLGLAPNNEITGGKVIRRRTKKVLNRAARALRLAAQSLHHSRTALGAQYRRLRGKLGAPKAITAMAHHLARLLYRMLRFGTEYHDKGMEHYERRYRETQIKWLQNKAATLNMQLTPVQAVAY

SEQ ID NO: 409983 - protein, 359 aa, unidentified
MKIVGCDFHPSWQQVAIFDLETGELTERKLLHVDGEAERFYRELEAPALVGIEACGNSQWFIELVESLGHVVWIGDAARIRASYVRRQKTDRRDAGHILKLLMENRFPRLWTPSAEQRDLRQLLIHRHKLVEIRTRVKNGLQHLALNRGLQKKSRLWSVRGRAELEKLPLEGWTARRREDLLQLLGELNRHLEELDEAVKRAAQDHPQARLLMTQPGVGPITSLAFVLTIGDVRRFRHSKQVSSYLGLIPREHSSGGKQRLGAISKQGNSFMRSTLVESAQRVTHLDPGFAKEYRARCHHKPKGVAKVAAARKLAVRLYWMLRQNAGYPEIAHIESSPRVPLIGASQIETLNGRSRIQQ

SEQ ID NO: 409984 - protein, 340 aa, unidentified
MVHVGVDLDKRSSQIAVLTEEGEIAQQRLPNDPGRLEKFFAELPPHTPVAIEASGTWWWLVDLLEHLGHDPILSHPKQTKAIAAARLKNDRVDAERLALLLRGDLLPTVWIPPAALREARELVRHRVQLVWLRGIVRNRLHAMLARRNLQPVSTKSWLTQRGQRELQRLPLADTPNRIREDCGALLPLLDAQIRRLDGELGARWGGDPRVQRLTTIPGIGPFIAIVLVLELGDIARFPSAKQVASYVGLTPRIRASAGRIRAGHISKEGNRLLRWVLVLAATQAVRRPGPLRTWFHAVKKRRGKKVARVALARRLAEIVFHVWKQECDYFTVVRHGVVRG

SEQ ID NO: 409985 - protein, 404 aa, unidentified
MKGPIVSIDVSKGKSDYQAFKDLNVKYTGSRSIKHTKEGFDEIVNLVREMEKKLETEVCVVYEATGVYHRVLKKVLEDNNIKQFIINPLLSAKTRKNDSLRSPKTDKLDPKSIAKTYYSHSLHNSHKPETIYHELRELSRYYEDILVHIRKDKVAFRAQLDIVFPGYDTLYDDLYGPVALAVIEKYPHPEMLQKKKINTVSKVIQNKTCHRQAVSDTMADKAIEYSKTIYSGCDKDDIEVLILQRFIKKLNEDMAEAERTIGEMIKLAQELPDFNIIKSIPGIGDNLAARIIAELGDMTRFKKKNELVAFAGLDPRISESGQNDGDHMHITKKGNKRLRCLLYLAVTCSIRLKRDDNSIKDFYIKKKQQSNPMCSKAAKTACASKLVRIIYSMCKTGELYQYNK

SEQ ID NO: 409986 - protein, 373 aa, unidentified
MSNSITHVAMDTHKKQHRVAMVYPNDEVIVEFSVKNTPSEIRKMVRKIKRNAPGEVKFCYEAGVCGFTLQRRIEALGCKCSVIAPSLTPRKPGERRKTDRRDAKKLLGLFMSDMLTEVYPPDEQQEAARELTRCREAAQENLKRIRHQLQKMLVRHGYVFLDGQHWTQKHLRWLGAVKFDQPLLQEVFDSYFTEMRHCLQRVQTLDRELEKLAQSEDYREVVGILRCFYGIETLTAMSIIAEVFDFGRFASARAFMSYLGLTPSESSSGEKEHKGPITKTGNKRARRLLTEVAWHHRHAYGVSTALRKRRDGQPQWAIDIADRAGLRLRRRYSRLVHRGKLPCKAVTAVARELAGFIWSALVEYEARRKRKVA

SEQ ID NO: 409987 - protein, 422 aa, unidentified
MIVSSKLKGASAMETVVERPAALDVHKEQVTACVRSPGGDGQREQHVAEFKTTVQGLLALRDWLKAHGATKVAMEASGVYWKPPWAILEDEFECVLVNARHVKQVPGRKTDVSDAAWLCQLLEAGLLSASFVPPKPIRTLRNLTRYRKAQIGERQREANRLHKILEDTGIKLDCVASDILGASGRAMLDALVAGTTDPAVLADLAKGKLRQKLPALREALEGRFDAEHGIVVGAILAHIDFLDEQISLLSDAIEEQIRPFAAAVELLCTIPGVQRRTAEVIVAEIGTDMTVFPTAGHLASWAGLCPGNDESAGKRRSGRTRKGSRWLGIALTEAAQANTRSRDTYLSAQYRRLKPRRGHRKAIGAVRHSIIVASWHMLTTGEVYHDAGGDYFTRLDPDKQTRRLVAQLERLGHTVTLQEAAA

SEQ ID NO: 409988 - protein, 343 aa, unidentified
MGEVSTIGLDIAKSVFQVHGVDGAGAVMMRKRVGRAKVLEFFGGLSPCLVGIEACPSAHYWSRELQALGHTVKLMPPSYVKAYLKRNKNDANDAAAIYEAVTRPSMRFVPTKTPEQQTGLMLHRSRQLLVRQRTMLSNAIRGHMAELGIISAKGRNGAAELLRIIGNVADDRIPPVARFCLDLLARQYLTLIAEVSSIDKRIHAWHRSCEASRRLEKIPGIGPIVATALVAEIGDWRAFHSGRSLAAWIGLVPKQYSTGGKERLGSITKQGNRYLRWLLVAGAMAVIRYARRHGTKRPWLTRIMDRRPAKVAAVALANKIARMAWAIMVHGERYREPKLLLAA

SEQ ID NO: 409989 - protein, 425 aa, unidentified
MVDDVSLAALIGIDWADQHHDVSLQEVGTATVERSRLSHTPEALVEWLGQLRRRFDGRAVGVAVETSRGPLIHALLEHEFVVLYPVNPRSLKRFREAFTPSGAKDDVPDADLLRELLVKHRDRLRPWKPDTPETRALQRLVGSRRKTVDLQTKLTQQLRAALKEYFPQALAWAGGELASVLACDFLLKWPTLQALQRARPKTVRTFYYAHSCRRGDLIEQRIQEIQDAMPLTQDAAILETSVLLVRTLARQLKALAPSVKRFDQEIERRFQEHEDAELFRALPGSGAALAPRLLVAFGSDRNRFPRATDVQQLSGIAPVTEHSGQRCHVRWRWAAPTFLRQTFHEFAHHSVRWSRWAQAYYDIQRERGKGHQAAVRALAFKWIRIIWRCWQDRTPYDEERYIRALTRRGSPVASRIAATAPAQAA

SEQ ID NO: 409990 - protein, 379 aa, unidentified
MERIIYIGMDVHSTSYSLCALEPIFGQENKFFFETKVAAEPSNIIKYLDDIESCFANDECTFVTGYEAGCLGFSLYNYLKGRGIDCKILAPTKMSEEKGGKKVKTDKRDARAIAQNLAYGTYSAVFVPTEEDLAVRDYIRMRNDHKAAVKRIKQQINALCMRHGYIYQRTKWTAEHLKYIQGMTLSPLYREILQEYLATMEQLNNKIKAFDARIEELSKTKRYKDNVGKLACFTGITRSRALAIIAEIGDFRRFLKPLNFAAYVGLVPGEKSSGKKQKRIAITKAGNSHIRKELIEAAQSICRGLPGYKSRALLARQQGNDTTVINYADKASARLRRRYYKLERSGKKRNVAVTAVARELSCFICGMMNGLTEVQIKKA

SEQ ID NO: 409991 - protein, 348 aa, unidentified
MNEVSIVGVDLAKQVFQVHGAAADGRVLFRKKLSRPQFAKFMAALPRCVVAMEACGTAHYWGRELAGHGHDVRLIPPVYVKPFVKRQKNDAADAEAVAEAALRPTMRSVAVKTAGQQARAMLFRTRDLLVGQRTQLINALRGHLAEHGIVLARGIGNIDRLATRLEEEGLPDLVRDLGRLYLHRIAGLSDEIDKLDGRIAAAAKESDVARRLQTMPGIGPVCAMAIATFAPDMREFRRARDFSAWLGLVPRQHSSGGKQKLGRTSKMGQRDIRRLLIVGAMSVVHWRGRDGGRPGSWLSRMLARKPRMLVAIALANKMARMVWAMLSRNEDYRGPVGDVRRTTTSMGK

SEQ ID NO: 409992 - protein, 349 aa, unidentified
MQHYAGIDVSLELLSVCIVDAKGKIVKEAKVGSDPDTLVAFLRGLDLAIDRIGLEAGPLSQWLHAGLTSAGFEAVLLETRHVKAALSAMTVKTDRKDARGIAQLIRMGWFRAVHCKSAGSQEVRALLVARKLLLSKLLDVEFSIRGILRGFGLKMGMVTRKRFEARVRELYADHAMLEQICSAMLTARSALQTEYAKLHKALLVIVRKDEVCRRLMTTPGVGPLVAITFKTGVDDPSRIHKSKAVGALFGLTPKKYQSGETDVTGGITRAGDEMVRTALYEAASVLLSRVTRFSALKRWGMDVAKRRGTKRAKVALARKIGVILHRMWVDMTSFRWTKGAPTTMRLARV

SEQ ID NO: 409993 - protein, 411 aa, unidentified
MEPLYRCIAGIDVHKKMLAVVVRTPQGEYVQRKFGTTKSEIGHLAAWLQDHQVSEVVMESTAQYWRPVWYGLEGHFKLHLTHPLKTRAPRGRKSDFRDARRLADRWHSGDLEESFIPGAEQRSWRWLTRSRVHLKRMLGVIRNQVEGLLEQGGIKLSAVASDIFGVSGWAILERIAAGESDVDQLVKEARGTLNRKKSKLREALQGKLDPLYRLLLQQHLAQAQLICQQVEELNQALAEALKEHVAVLCRLTKVPGINLYAAQELVAEIGPGAVAFPSAEQFASWVGVCPGSKETAGVNYSHRSAKGNRYLRRLLCQNAWGAIHTKNTFFAGLFARLKPKVKGKGAAWAVAHRIAKLVWLILHEGVEYVEKGTAPLNPRTLVRKFRRLVREFGQQGIDVKSLLEQELAATV

SEQ ID NO: 409994 - protein, 402 aa, unidentified
MIFINCLGIDIGKSESVVAHYKDEVLVKEMVIQNNQNGYRYLKNYIKHLDSLFILFESTGIYSRGMKRFCEIHKIDYLEMNPLEAKFKTSSLRSWKTDKSDAHKLALLAFRMKDSKVQRQSEEIYFELRERARFHLEMEINQNRLKVELVETLHQTFPGLEKLFTNRYSKIALNIAQAFPHPDFVSTLTHDELVEKVLHSTDKGLSVNKAHKYVQKLIEIQINSFPNVDKSSFLLQKVQYLCDKLLIGIEEMKEFDQEMIDLAKNTTEFENIISIPGIGELTAALLIGELGNIREFKTNKQLNAFVGIDIKRYQSGTSKSRDTINKRGNKKARRLLYLIIMNIIRGRNHYQSHIVDYYYKLREQPHGKTHKTAVIASINRLLKTIHYLIVNNKLYDYQKAPH

SEQ ID NO: 409995 - protein, 400 aa, unidentified
MRVVFGIDVSKASSEVAILVNGEKVHNYTMSNDAIGFSRLLGDLKTVHKPEIIFEATGVYSRRLQSFLDEHGYAYTRLNPLEAKKQLDSLRVRKTDQIDAEKLAQSQCVLNRKPTYVQEEVYQNLRDLSRFYQNLTEDIVRAKNRLHRVLQVTFPELENILSTPTGEQYWNLVIAFPCKDFVLDLSKDELSESIRQSTSKRISDKRVAYLAEKLIALANQSYCAVKKTSPILEEVHYYAKELLRLSEQRQAVLDEMVELAQPLPEYDILLSIPGIAETTATSIIGELGDIRRFQSANQINAFIGIDLRHYESGNFLAKEHITKRGNPYARKILFKCIHNIASASHTNPCHIADFYEKRKRQSQTTSTKPHTIASLHRLIRTMYYLIMHNKLYDYASTQNR

SEQ ID NO: 409996 - protein, 355 aa, unidentified
MSQEKYIGMDVHQATISVAVMDASGKLIMECLLETKAATMVEFIQGLHGTLSLTFEEGTSAAWLHDLLKPHVSRLVVCDPRKAALLKDGNKSDRIDARKLAEMLRTNQLKPVYHGEHGIRTLKELGRSYLTITKDVTRSMNRIKALYRSWAVPCGGTSVYAPRHRAEWLAKIVEPGVRIRAERLYQQLDGLQPVRLQARRELLRESHQHAAVQLLRQIPSIGPIRSALLVALLQTPHRFRSKRQLWAYSGFAVETHDSGEYRSVRGKLQRNRERITVRGLNDNHNKDLKNLFKSAAISASTRPGPLQDFYVALVAKGIRPTMARLTLARKIAAISLTMWKKGVSFDPKQLHRQAA

SEQ ID NO: 409997 - protein, 450 aa, unidentified
MATRNRSFSRQALELTHPNAAGIDIGSASHFVAVPPDRDDEPVREFASFTTDLHRLADWLRDCGVDTVAMESTGVYWIPLFELLDARGFTVLLVNARHVKNVSGRKSDVLDCQWLQQLMSYGLLRGAFRPDDQVCVLRALARQRATLLKTQARSVQHMQKALVQMNIQLANVIADVAGASGQAILRAIVAGERNPYVLASLKNCRVRATEEEIARSLQGTWRAEHLFALRQALDAFDFCGKQLAQCDEEIEAQLQRLHITAVEPDKGKKRSKARNAPKFDLRTRLFQMCGVDLTRIDGIDVTTALVVVSEIGTDMSRFPTDKHFASWLGLCPGTKITGGKVMSSKTKRCANRAAQALRLAAAALRTSQSALGAYFRRLCARMDKPKAVTAAAHKLARLIYSMLTKGEEYTDQGQAYYEERYRQRVLHNLNRRAQQLGMALVPTAPAVQTA

SEQ ID NO: 409998 - protein, 327 aa, unidentified
MEEGRLRTTPEAFERRFASEQPMRIAIEGGTHSPWVSRLLKECGHEVLVANARKLRLIYANKQKTDEIDAENLARLARLDPKLLYPLQHRGENAQAHMALIRSRQALVSCRTQLVNHVRGAVKSFGARLPKCPARSFHKRAAEHIPEALLPALEPVLEQIGSLTERIRDYERQLKTISEEHYPHETDLLRQVEGVGTLTALSFVLTLEDPHRFEKSRSVGAYLGLVPATNRSGDRDPQKHISKEGDEMLRKLLVGSAHYILGPFGGDSDLRRHGQKIASRGGKNSKKRAVVAVARKLGVLLHSLWMSGEVYEPLRNAHRSGGRQEAA

SEQ ID NO: 409999 - protein, 404 aa, unidentified
MRLFVAIDVSSEKLDVCFLDSHDTVLKEICLSNDVNGANAIKEDVLHFHQLYNYEKIVIGMESTSVYSFHPSMFLTEDKDLRALDVEVVVQNPKAIHRYKKLFEEDKTDKIDAFRIADFLRIGRYNKFLIKEEKYVALQRLTRSRYQLVHQQTECKQHFLENLYYKCNTLSKELNTSVFGATMMEILSDSLSLDEIAEMDLEALATLLQKKGKGRFSDPEDLAKTIKKAIRDSYRLGKVVQDSVDVVLATYARLIQTLKKQIKEIEKSITALFEAIPEARYLTSVPGIGVVYAAGIIAEVGQIERFENEAQLAKYTGLYWEKSQSGNFESERTPMTRTGNQYLRYYMVEAANSVQLREATYRAYYLKKYDEVPKYKHKRALVLTARKLVRLVDVLLRNHQLYMP

SEQ ID NO: 410000 - protein, 352 aa, unidentified
MDATTVAVDLAKDIFEVACANRAGRVIERRRLTRRQFERFVDSLEAGTDVIMEACGTAHYWGRRCQAHDLRVRLLPPQYVRPYVRRNKTDRADADALLEANRCGDLHAVPVKTLEQQTLQVLHRVRTQWQAARTARINTMRGILREHGLPIGVGARTALTRIPALLEDADAPLPDLVRHTVWLMLEEVRAIGVRLATIDQQLGLVARTHPIARRLQQIPGVGVLTSTALVGTVSHIHAFRRGRHFASWLGLTPRESSTGSRRYLGRISKRGDVYLRCLLTHGARAVLLTAQRTARTAPQGLTRLQQWAVTVAARCGHNKAAIAVANKLARIIWAVWHRDVDFQSPRYDPLAA

SEQ ID NO: 410001 - protein, 400 aa, unidentified
MLSIGIDVSKGKSTVCGMKPGGEIVYTPFEVQHTREGMSELVSLLRSSGEEVRVVLESTGSYHCPVVATLLENGIFVSVVNSLRMKRFCSQSIRKVKTDRIDAMQIALYGLAYWQELQPARLPEDTYRELQLLARQYYQMTSLLIKAKVDFNAICDQVLPGMQELMNDHAGRHKLSDFVLRYHHATHILEMGETRFQKDYCKWAEKKGYRNCERMAVLIFATAQNGIPVLPNAPSTQIVITEAIRVLHTVEASRDAILTQMQALAKTLPEYSLVREMPCIGDTLAPRLIAENGDVRRFHSKRALIAYAGIDAPPYQSGKFCANNRHISKRGNRYLRKTGYEVMQSYVMHKPTNDPIFTFIEKKRGEGKSGKLAMVAGLNKFLRVYYGKVTELYRSLPTIE

SEQ ID NO: 410002 - protein, 403 aa, unidentified
MQDILTCVMGLDVHRDIIVACLVRGAVDAEPEAETRPFSTLIPEMQKLRDWVIEAECRNIAMESTGIYWQPIYEMLESCFDGEISILVVNARHMKNVPGRKTDMKDAQWIATLLRAGLLKGSFIPDKTFRELRHLTRYRKSVVHDITAQKNRIDKFLQSSGFRFTAFLSDTFGASGRNIIRHLIEHGSIDREALDKCLKTKTRNRIDEILVALNGSLSVHQRRFLNMVFLHLEDLEAHKHTIEDEITEEVLKHTDALNLLCSIPGIDVTAAAAIVAEIGTDMSAFLDSQHICSWAGLSPGNNESAGKRKSVHINKGNPYLKSMLCETAWIMASHRKLYLSGWYWKVKQRKGAKRATIALARKVLSIIYTMLKTGTPYSEECFEQRRQRCERKRANRMVNDTNS

SEQ ID NO: 410003 - protein, 395 aa, unidentified
MKTDDRVAKVGLDGHRTFSTATARDAEGMVVWRKRLEHADRRPLREELRTWPKGTPVVLEGTFGWGWMSDELSAAGLEPHLASSKKVAAWRDARGLAKSNRTDADLLSELWNQQPRWWEVWLAPPEVRSQREWLRYRMTLVRLQTGLKNRIHAVLHRHGIVHGESDLFGASGRRFLNLLIAPNDATLPESARAMLKGYLQLLDQLRRQIANVTREIRGQITRTPAGERLRTMPGIDYILGYTILAEVGRIERFRSAKDLAAYSLLAPRAYDSGDDDGEAPKGRHVGHAGRRTLKWAWIEAAHGAVRKGGRFREIFDRRTNGGKRDRNRGYIAVGHELCRIAYILWTKEVDYTETPPPRPGRGKRQGGLRRSAKGIPGRSRPGTGQPEDPMVAVLT

SEQ ID NO: 410004 - protein, 489 aa, unidentified
MKSQAAKKGPKDKQESKKTSGKSTPGKWEEMNRKQRREIMRQMQSEDLNLEVVHPHAAGIDIGNASHYVAVPPSRDPQPVRCFGCTTAELKTMAEWLKQCGIRTVAMQSTGVYWIAVYEILEEAGLEVYLVNARETKNLPGRKTDVQESQWLMKLHTYGLLRNSFRPSQDIRTLRTYWRQRQDLVRSTGRHIQRMQKALTQMNIQLANVISDISGVTGQAILKAILDGQRDPRELAAYRDCRVEASEEEIAQALEGNWQEDQLFVLRQEQAGYEFCQKQITECDQQLAQYLARLEDRTQGATLPEETRKGRRKKKKGNPQFNLREELFRMTGVDLTQIDGIDVMTAMTVVSEVGWDMSKWKTENHFVSWLKLCPDNKISGGKVMGKGRMPTNNRATTVLRMAATTLRESDSYLGAQFRRFRTRLGPPVATKAMAAKLARLVYRMLRYGMKYVDQGAELYETQHRKQQVIHLKRKAAQLGLQIIEVAAAA

SEQ ID NO: 410005 - protein, 458 aa, unidentified
MTRHARPPHRTGPLSVIHPHAAGIDVGATEHWAAVPGGDPAPVRRFGACTADLEQLADWLAGCQVTTVVLESTGVFWIPLFEPLEARGFEVLLVDPRQVHHTAGRPKSDVYDCQWLQRLHTYGLLAGAFRPDEPVCVLRSYLRQRAMLVTYAAQHIQHMQKALTQMNVKLQHVVSDITGVTGLAIIRALVAGQRDPTELAKLRDDRCGHSAADIARALYGTWRAEHLFALKQALELYDFYHRQMATCDRQIEQQLQQFADKSGGQPLPPKARRRRRGGNRPGFDPRGALYRMAGVDLTVIEGIEESTALVVLSEIGTDMSRWPSAKHFGSWLGLCPNHRISGGKVLSRRTKPCANRAAAALRLAAQALHRSQSALGAFLRRLKARVGAPKAITATAHKLARLVYSLLKHGTAYVTQGMKEYERRYRERVVRSLSRRAKELGYALVELPAPAAAQPLPT

SEQ ID NO: 410006 - protein, 333 aa, unidentified
MLDNDGAIVAEGKLKTTQAAIDQQFASLAPARVALEAGTHSGWISRLIESYGHEVIVANPREVRKIYQNDRKNDRSDAQILARLARFDPQLLEPICHRTATMQADLATVRARETLVTARTKCINAMRGLVKSMGGRLPKCSTESFCERVSADVPAELEDALRPLLTAIQTLNEQICCCDKQIEALATEIYPQTALPRQVSGVGALTALAFILTIADGARFAKSRDIGPYLGLVPRQDDSGDHSSQLRITKAGDPYLRRLLVGSAQYIVGPFGPDCDLRRHGERLMQRGGKNAKKRAIVAVARKLAVLLHRLWMTGEVYQPLRNSNRQASMKAA

SEQ ID NO: 410007 - protein, 425 aa, unidentified
MNSNTNQKINQVSEKTLVIGIDIAKRTHYACAVDERGRVLQKSFSFSQTREGFDTFYERIMALRATHEKSDVLVGFEPTGHYWMNLAAYLCAHGIPFIMVNPHHVNRSKELDDNLQTKNDQKDALVIARLMRDGRFSYPRILEGVEAELRNGATLHAKIQEDVNALQNRIIRWLDRFFPEFTQVFKNFGKMAYAALEKTPLPMDIQGKTPEELLFLYRQVDGMKSPQLPKAKQLVEVAQSSIGLTEGLVMARIEIATLLSQYQLMQAQLDELTAQLIELAKQMTDYAYLASVPGIGDVTIVELLSEVGSLTQYEHPRQLIKLAGLTLRENSSGQHKGQKRISKRGRRRLRALLFRVMMPLIRHNEAFKKLHEYYTTRTVNPLRKKQSMVVLCGKLLKILHALCKKKVQFDEQQMMKDLYCLQEAA

SEQ ID NO: 410008 - protein, 355 aa, unidentified
MRKDITKREEITIGMDLGDKANRICLIDADGNEQEKLEISNTARAIDGYFGRYSGVLVALEAGTHSPWISRKLEKMGHRVLVGNPRRLRAIWSSPNKSDMRDAEMLARIARFDPKLMCPIHHRSEQAHSDLEFVKSRDILVRVRSKLVNHVRGAVKATGVRIPKCSLECFHKRAPENIPQILKTAMEPLIETIEKLTGRIKEYDKKIAKLSKESCPETARLLQIKGVGPVTALAFVLTREEPGRFQKSRSVGAYLGLSPRRDQSGETDKQLRITKADNTYLRQLLVNCVHYIMGPFGRECDLREYGMRIASRGGKNAKRRAVVAVARKLTVLLHHLWVSDEEIPLHKEAIKKLAA

SEQ ID NO: 410009 - protein, 347 aa, unidentified
MDHVGLDLGKRESQIAILAEDGELINMRIRTERRRLVEMFGRRPKARILMEASTESEWVARCLEDLGHEVIVADPNYAPMYAQRTRRVKTDRRDAHALAHACRAGTYRPAHRTSTERRELRARLAVREAVVRTRAAWITRIQSLVRREGCRFRTGAPETFLTRVEELALPPALMTVIAPLVELLGPINKQIAVLDEELERIVAADEVARHLTTVPGVGPVTATAYVATVDDVRRFRGAHQVEAYLGLVPSEWSSSEVQRRGHITKAGNSRMRWLLVQAAWCILRRRKRPQTAALRDWAERIAGRRGRSIAVVALARRLAGILFAIWRDGTVYDATKVRGPLPARRAA

SEQ ID NO: 410010 - protein, 430 aa, unidentified
MKSNTQNKKIKEVTENTLVVGIDVGSEFHYARAFDWRGIEFSKKPFRFSNTEMGFAEFEAWILHIQTEHDKDKVIPGMEPTGHYWFNLGKFLQDNGMRPVLVNPHHVKKSKELDDNNPTKNDRKDPKVIAGLIKDGRYSYPYLPNGVYADLRTASNLRFQLQSELTRIQNRISRWFSIYFPEYKDVYGKPDAKSGMMILKAAPLPEDIVTLGVEGVNRIWREAKLKAVGLKRAKTLVSAAEHSIGSREGSTIARLEIRMLLEDYESRAARLQEIMTLIEELVKQIPMAEKLMEIKGVGMKTVSGFLAEVGDISRFDNPKQLQKLAGLAIKENSSGKHKGETTITKRGRKRLRYLLFESAMSLVSKNEEFAQLHRYYTTRPVNPLKKMQSLMAIACKLIRIFYVILTKEVEYDPQKMISDIRRPEIYLQAA

SEQ ID NO: 410011 - protein, 356 aa, unidentified
MAENSTTIGMDLGDKRSFLYVVDNATGDEVEQAQIPTTIKSVGRWFASRQPATVVIEIGTDSGWVSRLIAQYGHEVLVADARQVRQLAKGNDKDDRLDAEFLARLGRVDRKLLKPIKLRTEETQIVLGFIRSRDNLVQARTQLINHVRGMVKTVGVRLPKCSSESFHKLADQIPEKLQQVLNPTVVSIETLNQQVRAYDRIIEHKAKDDYPETKVLQQITGVGPITALAYVLTIEKPGRFSKSRKVGSYLGLTRPKHQSGNDDPELKISKRGDILLRRLLVNCAHYILGPHGPDSDLRRWGFAHGAGGGKSAKKRAVVAVARKLAVLLHRLWTTGEVYEPLYNAKRLQQHDVPKAA

SEQ ID NO: 410012 - protein, 348 aa, unidentified
MMLIGCDFHPSWQQVCWVDTETGETAEQKVVHAPGEAAKFYRRFAAPARIGLEATGNCQWFVEMVAALGHEVWIGDAAKIRASDVRQQKHDRRDAALLLRLLRENRFPRIWTPSSAEKDLRQLLIHRHKLVRLRAQTKNGLQHLAMNQGLQKKRRLWSKAGQEALRELALQPWASRRREDLFSVLAMLDKQIESLDLAVKQAAEENENAKLLMTQPGVGPVTSMAFVLTMGDVSRFPRGKQVASYLGLIPREYSSGGQQRLGSISKQGNGFMRMLLVEAAQVVVRCDPQMRREYLHRCHDKPKGVAKVAAARKLAIRLYWMLRTQQPYPEIVHVESSSRVPLVIRHGG

SEQ ID NO: 410013 - protein, 343 aa, unidentified
MNNVSTLSIDLAKNVFQLLSFDKQGNKCFSRRLDRAKLLQTLTQLPACNVVMGSCSTSHYWGRYCLQAGHQVQLIPAQHVTPFVRGNKNDKNDCMAIYEASLRPNIRFVPVKTEHQQAILALHRYRERLIHNRTACINQTCGLLLEFGIVIKKSLKSFRATIADLLNRNLHGALNLLLRDVYEEMQKLDVNIKNVEAQFKQFNEQSQAAQIIQSIPGIGIINASALSATIDKGQVFSNKKELAVWLGITPRQYASGETNKMGGITKRGDRYLRKQLIHGARTVVNHAHKKQDDLNKWINALVERRGKNKAVVATAHRLARLMWILLQRNEPYKAQYTQSEAQS

SEQ ID NO: 410014 - protein, 340 aa, unidentified
MNNILKQIFGIDVSMDTFVVRFGTTDTNQDQQISKSLSFKNTTLGFKKFIQWAKKHIISNDIPLFFVMEATGVYYENLAHFLYSNNYNVSVVLPGKIRNYAKSLQTKSKTDPIDAANITSFGLERKLNLWKPANSIIKPVKELCREYHSTKIIITEIKNQLHAKNHSYKPEKQTILRKKQLIRLLEKQTKEIENQIKAVIKQDKELSEKIDRAVKIKGLGFISVVTTVAETNGFELVNNQKQLASYAGLDVVYNDSGIKKGKTSISKKGNKFLRKAVFMPALSASKHNQKMKELYIRLVSKGKNKKLALIAVARKLLLLIYTIWKNNTDYIPDYQPCLGK

SEQ ID NO: 410015 - protein, 347 aa, unidentified
MEVTTVGIDLAKNVFRLHGCDARGRAVLRKQLGRRQLLAFVARLPRCVVAMEACASAHYWAREIEKLGHRVRLINPRFVRPYVKANKNDASDAEAICEAAGRPTMRFVAVKTAAQQDVQAVHRVRQQLVKNHTALMNQVRALLAEQGIVIPQGSAHVHRSLPRILADDDNRLSGMMRELLNEIGERLRYIEERLRQYELRIRRLFREDERCRRLAEVEGVGPVTATALVAAVGNAAEFKSGRELAAYLGLVPRHRASGGRTTMLGISKRGDRYLRMLLVHGARAALRVNQHQHTTRSAWIERLKSRRGSNIAAVALAHKNARVLWALLRTGECYRPTPFPARVPHVG

SEQ ID NO: 410016 - protein, 352 aa, unidentified
MMIIGCDFHPRFQQISFLLEENGECGQRRLMHTAEAVEYYRSLRGTRVRIGIEATGSYGWFRRLLSELGHELLVGDATQIRASNPRKQKTDKRDAEHILGLLVADRFPAIWQPPAENEQLRQLLLHRSRLVRLRTRVTNQLDGMAKNEGLLIPGGWSGKRRKAIEALPLPGWYSERRKDLLGLLDRLEERIAPLNKAVSQAAANNAEACLLMTHPGVGPVVSLAYVLTIGNWQRFPRGKQVGSYLGLIPAEESSGDKRRLGHISKQGNTLLRWLLVEAASTAQRYDASWHRQYVRLSMNKHHGVAKVAIAHKLAVRLYWMLRSGEDYQHVRERGSQARQSECPVGRSRRPIE

SEQ ID NO: 410017 - protein, 334 aa, unidentified
MQNVTLIGIDLGKHSFHVHCQDRQGNALLRKKFSRTQLINFLGSCKAATVVMESCGGAHFMARRIADLGHEAKLISPQFVRPFVKSNKNDFVDAEAICEAASRPSMRFVPPRTEDQQAMAALHRVRDSLIRQRVKTTNQMHAFLLEFGVSLPRGIAVIRRLAAVLEENDFPPYLARVLSRLHSHYVYLSGEIEEVDKELKTHLAEDETAQRLLTIPGVGPVTASLLAMRLGDGKNYASSRDFAASTGLVPRQYSTGGKTTLMGISKRGDKNLRQLLVQCARVFMQRLEHNPGRLAEWVNRQLARHHSNVVACALANKLARIAWAVTAHQTVFIK

SEQ ID NO: 410018 - protein, 386 aa, unidentified
MRIALGLDLADEKCAAYAVPVGKAKKAQREFLDGFNKDFRRVPTTKEDLQRMVDVLKDESDGIHVLIENSTITHKVYWLLVGMGCEVLVAQSADLLRITESVTKNDDNDAMELAAYMRRRLNGEDEFRTVVMTPPEIMAKKMFIRAIYVDKTYLSECKKRLRFRLKVMGADLRREYKDISCERSLTQLRETGDPYLCYEVAVIRATKSRIQDGERYISTLFKDDPYFDLLMTIPGFGLEISAYISTIIIDIDRFDDKKQLEAYSGLVPRQRSSADSDPNCRTTHHGDEWAREFLGYAVKAHVMWAKDSVVTIMYNRLRARGMPYKKVITACSRKMVDVVWSVLKNGRSFTSDQNVLRQARGAAAEIERMDSELSEQELDAKYAEAA

SEQ ID NO: 410019 - protein, 405 aa, unidentified
MNAVGIDVSKGKSTVTIRQPGDVVVLAPRDYRHTQSSINDLITTIKCLEGETKVCMEHTGRYYEPMASWLSAAGIFVSAVNPWLIKDFGNESIRTPKTDKADAKKIARFALDRWAKLPQYSRMDELRNQLKTMNRQFGFYMDQKTAMKNNLIALLDQTFPGANCFFDSPARSDGSQKWVDFVYTYWHVDCVRSKSLEAFTEHYKNWCKRKGYNFSAAKAEEVYLAAADLIAVFPKDDYTKLLIRQAVAMLNIASETVETLRIKMDQTASQLPEYPVVMEMDGVGATLGPQLIAEIGDVTRFKHRGALTAFAGVDPRANESGDYKRVSNPTSKKGSPHLRKTLFQIMDGLIQRSPADNPVYAFMDKKRAQGKPYYVYMTAGANKFLRIYYGKVNAYLSPTEGAEDS

SEQ ID NO: 410020 - protein, 312 aa, unidentified
MSSWVGIDVSKNTLAVWVRPSGVNFIVCNSSEGHQALLLNLADIQVERVLLEATGGYERAVMGCLVQAGYPVVRINPRRARAFAQAMGKLVKTDPVDACVLAHLAQVIEPSACQTVSLARDELQELVRRREQVVKLRDDERRRLTLARSGVVQESLQTNICQLNEQIARLNSAIEAAAQRTDNQLVKQLGAIAGIGPVTVASLLAYLPELGQLSRRQIAALAGLAPYNNDSGQHSGKRCIKGGRASIRRVLYMATWSVIRCHSSFGARYASLRARGKCAKVALVALVACMRVLLIRLNAMVRDHSSWRAEAV

SEQ ID NO: 410021 - protein, 318 aa, unidentified
MNIIGLDISKDTIDATLHKTNGSIHYIKFKNNDDGLKQFRLWIKGNRIRKVYIGMEATGIYYEKAADMLSSYYTVYVINPLKIKDYGKIRFNRTKTDKADSNLIADYIKRHQDTLIPYQIPKNKALQKLINLKNQLQQHQKQIKNRLHSTEEDFIRNIHQDLIDTIQDKMEQVKIAISEQIKKQTDNNHYRNLQTIPSIGKDTASVLYAQLTEKHFKTANQFVSYAGLSPAIIQSGTSVRGRGRLSRYGNRRLKSTLYMPALCAYRFNAFPKLINNLKKAGKPKMVIIVAIMRKLAKLAYYIVKTGQPYDAERHRLNQ

SEQ ID NO: 410022 - protein, 339 aa, unidentified
MREVSTIGVDLAKKVFLVHGVDAAGETVVRRVLRRARVLAYFAQLPPCLIGMEACATAYYWARELGKLGHRVKLIPPAYAKAYLRRNKNDAADAAAICEAVSRPSMRFVEIKSEAQQAAAGIHKVRDMLMKQRTMLINALRGLMAEFGIVVGAGTRHVGELTAILADPEEQRIPALLKDGLRRMAEMLRALERQLEGIDKQIVDWGRGNAACRHLITAPGYGPILSSAMAAIVVNPAAFRSGRDFSASLGLVPRQDGTGGKVKLGPISKRGNGYLRRLLVNGAMSVLNSKRAKQDPWLVKLLANKERKVAAVALANKMARIGWALMTRQEDFWATPAAA

SEQ ID NO: 410023 - protein, 331 aa, unidentified
MYFSQFIGVDISKDTLDAAVYPAKDKKMDFLHFDNTQKGLTVMMSWLKRRGIKATDMVICAEHTGVYTNPLIEFADKKGLALSLNSPLDIKHSMGIARGKNDAVDAGRIAEYAHSHKDKLRLYEKPSDNIRKLQYLLTERRQYMRQRTALINLDCAMGKYGTSETRSRSESAKHHCEKLVKKVEDQMLSIIHSDPDIQRNYDLVISVKGVGLINAINTIVFTNNFKSFETPRRYACYIGVAPFDHTSGISVKGRTQVSKICRTQQKAELSMAARSAIVNDPGLKKYYLRKMKEKGGGKDAHGVVLNAVKFKIILRMFAVVRSGEPYKVLNY

SEQ ID NO: 410024 - protein, 445 aa, unidentified
MQHVGIDLGAKYSHTVILSEMGQEQLRTRVKTAELPAWLKRLEPARVVMEACTQSPAVARAAMECGHETRVVPGNLVRALGVGARGIKTDYRDAEVLAKASVRNADLPSVHLRTETSVTRRELLACRTNLIESRKAVVVSIKSWLRGRLIHLPGRFSAKSFAKTVRQLAGLHPGGLPRATELMLETFEFLTQRIEALNEELKKIADSDPVCKNLQTIPGVGPQVSLAFTALIDDPSRFSSADELGSYMALVPGEATTGDKRRRTSTIKAGPKRVKALLVQAAWSMWRSRPNDPVVAWARAIAERRSKRIAIVALARKIATIMWSMWRRGTPYRPSMAARTGLPPNLWTPRLSGLGGLLLFEVSLLVLRRSGVADGRVPSLPVVEHLDPLRNGSLRRRSRQEDDVVDEFCLERREEALGDRVVPAVRSTAHAARDGSAFECRTVVT

SEQ ID NO: 410025 - protein, 437 aa, unidentified
MKKHLPVLDEKAAFVDVGSEHMHVSVGGDEPMVFGTVTTQLHALRDWLLAQGVRSVAMEATGVYWLPLYGVLEGAGLDVRMVSGRQTRNAPGRKTDMQDAQWGSTLHMHGLLRAGFVPPADIRRLQDYLRLRADHVNQAASCVQLMQKALERMNIKLHDTISSLAGASGMAMVRAIIAGQRDPAALLALCDIQIRRAKAEPIKEALRGTWTDEHIFALDQAVQSWDHYQRLIADCDRRIESVLPPHDPTQPALPRSVKRGGANAPEIAKLREILVQMCDGRDLTQLPAHTPYGVLQIIGETGTDLSKWATEKHFTAWAGLAPGSKDSGKRKGSVKRRRNRTGRLFCMMAAALVRSKNIALGAFYRRMASRRGGLLANKALARKLAAWFWRVMVKGDDYVEKGIADYEEQVRKGKERALRRLAKELGQQLVPASQPVA

SEQ ID NO: 410026 - protein, 437 aa, unidentified
MRRKKNKANKSVNLQILPVVNPNAAGIDVGAKEHLVAVPCDRDPKPVRTFQAFTPDLHELAAWLKRCGIQTVALESTGIYWISLYEVLEQYGFEIRVVNARHVKHVPGRTKTDVLDCQWIQKLHSFGLLNGSFRPDQQIRKLRTYMRLRDNLGVASTQAVHHMQKALFEMNVQLSNVISDIVGETGLHIIEAIIAGERDPKQLAALCSTRIKASRETVAKSLHGSWDEALLFALKAALETFGFSQTKIQECDCCIQQHLAQFESRAEQINSPQDLKTQLHRVCGVDLTKIPGIKEQSAQIIISEVGLDMTQWKTEKQFCSFLGLCPDNSISGGKVLHRATRKVYNRAADTLRLCAQSLTHSKSALGAKYRRLKARLGAPKAIVAMAHHLARLVYRMLRYGQNYVEQGIHQYELKFQLQRIKWLKKEAKSLNLQLVPA

SEQ ID NO: 410027 - protein, 362 aa, unidentified
MRIAPQSHNSDVHDLDVILGVDTHKDIHVAVVLTALGGVLAGREFPTTRSGYHAMLVWARSFGSLQRAGVEGTGSYGAALTRLLRADGVEVIEVNRPDRSTRRRRGKSDAVDAEAAARAVLAGDATATPKSADGSVEIMRILKIAKDSAVKARVQAINQLKAILVNADPALREDLAPLSTRRLVARCADLNTDTHDDVVAATRHVLRQLARRIQYLATEIHDLEKRITHAIRATAPQLLEISGIGPDTAAALLIAAGDNPERLATEASFAALCGVSPVEASSGKTKRRRLNRGGNRQANAALYRMVITRLRWDEATKDYSRRRSADGLSKREIIRCLKRYLARTIYRVITSASTRSPMLAVT

SEQ ID NO: 410028 - protein, 410 aa, unidentified
MSQITPPSRFVGLDVHKHYLIAAAVDANQNVVLHPRRVQLAHLDHWMRKALTSQDAVVLEMTTNAFQLHDDLAPHVHSVTLVHPPYVKLITQAQVMTDQMAALTLARLHAAGLLPPVWVPPADVRDLRALIAQRAKTVRLSTQAKNRLHAVLHRHHLPPAAGDLFAPERREWWLALPVSAMERVRVQNDLDTLAFAQAQIAALEETLTALAAQDERVLLLIQLPGISIVTALTLLAAIGDIARFPTPAKLVGYAGLGARVHDSGLTHRSGRITKAGRRDIRAVMVEAAHTAANIHPHWQAELARLEPRLGRNKAIVAIARKLLVAVWHVLTEGCADRFAEPEIVARKLLQHAYRLGAENRPDGQSTAEYVREQLDRLGLGEDLTAIQWGKRTISLPPAAPMPTRMSASGD

SEQ ID NO: 410029 - protein, 361 aa, unidentified
MTPQGKQLDFTGQVVNVGIDVGKRRWDVRLVISDTMGPRFSQGPDPETLVRYLHGRYPGARYACVYEAGYCGFWIHERLRALGIECIVVNPADVPGSDKERVHKNNTVDASKLARELGKESLHGIYVPPRWALEDRTLVRMRSSFVRKQTRCKNQIKALLAFYGFHVPAEEQERYWSRGYIRWIESLLMQEPTGQQALQALLAELTFLRSQILDLTRKIRQLSRQERYARNVHLVCRIPGISLITTMVLLTELVDIARFPRPDQLISFVGLIPGEHSTGDEQHNTGMTYRRDAYLRYIMIEAAWTAIRSDPALMLAFTELSKRMKKTEAIVRIARKLVNRVRFVLKSGELYVEGVMAGRAT

SEQ ID NO: 410030 - protein, 315 aa, unidentified
MQRVCVGIDVSKQSLDLAADSADAVRTFANDAQGHAAIVEHLKELGDIQRVVLEATGGYERNLVAALLAVELPVVVVNPRQVRDFAKATGRLAKTDRIDARVLACFARAINPPQRSLPDENTRVLQEKLARRGQLVQMLNAENNRLKQAHSHEVRVSIQQVITLFQKQIDEIDKDLDRLIRESPAWCEKENLLKGVPGVGDQTARQLILNVPELGQCSRQEIAALVGVAPFNRDSGIMRGRRVIQGGRAHVRATLYMATLVATRYNPVLRRHYQKLLAAGKQKKVALIACCRKLLTILNAMIREGKPWKHQTQAA

SEQ ID NO: 410031 - protein, 458 aa, unidentified
MRIIGIDLGVTAKHRAIIADERGRFVSRVIKFETRLPELERLTRLAREGVDPATPLVVVMEATNIAWYPVAAYFHRLGATVYVVNPRMSADLARFYHRHARSDQLAAKVLARMPVVNPDRLQPWTPASADHLALQRGCKELDRLVEQSAAIKNRLQSTDVLAWPGLTPRVLGDPLSPAARWFREHCYAPQRVVELGVSGLQQAWRAARTYTGDETWIEPLVQLAQELLHLYGAEGRYLDYQALSDEVRREQHRLAEVEAEERLVRLEVTRPRYRQLHPSRNLETLQGVGQDGAAVFVGFTADPGRFQENRSYRGWSGMVPCSAQSGQAESKNLHISQAGPDLVKKFAYIDADTARRYDPQLAAIYYDQMVNKGKHHSQAVCACATHLMDRILVILKEDRPYELRDVDGTAVTPEQARAIIAERYTVPESVRRHNNKYARKERAQRRAEQSDNKRSRPK

SEQ ID NO: 410032 - protein, 421 aa, unidentified
MQEEASEFAAFIGVDWADRKHDVCLQVAGAETFELSIIEHRPTIIDAWARALRERFGGRPIAVCLELSQGPIVSALLEHDFFVIFPVNPSTLAKYRRAFTPSRAKDDPTDAAIALELLRRHPEKLARLRRESPNMRALRRLVEARRDLVQDRVRLTNRLTYTLKAYFPQVLDWFRDKETDVFVSFVERWPSLLDAQRARRETLVDFFNAHSVRRAAVIDRRIHAIKTEKPLTSDAAVIEPGLLVVAALLPQLRALNTGISSLDDEIAARCAELPDFRLFDDLPGAGPVFASRLLAAFGEQRDRFADAGAFQRYVGIAPVTERSGNKSWVHWRWSCPTFLRQTFVEWVASSIPHSFWARAFYESHKAKGASHNATVRALAFKWIRILFRCWQDRTPYDESRYLSALQKRQSPLLKFAALAPS

SEQ ID NO: 410033 - protein, 388 aa, unidentified
MQTVADRPEAPNAIRNDLGAIFISLELSRSTWLITSLSPGGGEKMSKHSVPAGDIYALLARFLEFKQKAFARTGKSFPIIVIQEAGLDGFWIHRVLQNEGIESHVVDPASIATSRRRRRAKTDRIDGEALLRTLLAYKRGEPRVCAMVKAPTPEEEDRRRLCRERKILIAERVKHVNRIKGLLFCQGVSGYKPLRRDRRQRLDELRTGDGGLLPKHLKAQIGRELARLEQLLDQIKAVEAERDALLAAQRVTARAPPAMLLNIKGIGPEFAAVLWSEGLFRHFDNRRQVASYAGLAPTPWQSGSVDREQGVSKAGNPRLRTTLIQLAWLWLRNQPQSALALWFKDRVSRNGGRLKKTTIVALARKLLVALWKYVTAGVVIEGAIVKSA

SEQ ID NO: 410034 - protein, 469 aa, unidentified
MDLLKLPIYTFYCEFLDMEERFMKKVFIGIDVGKFKNSISIIDSEGNPIIKKGISIENDYYGFAKLEEKIDLIMNNYGFTYEDCIAGVESTGHYWFNLRDYLKDIGIETVMIKTDSVKHRRALEEGQKGKNDTLDARVIASCLRNGNYVYIRDNERELRALQKLTRMRNDISDEVVALKNKIHRCIDICNPVFLKIFENLNSKTGVALIKLYPSPQDIINVELDNIKKELGEIVDKPNMRMVSLYKEECEIWSGLIKEPSYAEKVEMIAYIDKFLLQNESKEHLDKQIKEIAKNIIPLYSEFEEIKGIPLIQLISVLSEIGDIRNFKNTRSILAFLGLSLKGNASGKYIGERKINKAGSRIVRKHLFNIMDTLVKHNEYFRIAYCYYKSYNHKNPTKKRSMQIAVMCKFVRVMYGMLKYNTPFDYKEMLKGYYFGDCNIKVFKEEFEGEKRSKKIENYKLAYSIFINYS

SEQ ID NO: 410035 - protein, 344 aa, unidentified
MKITTIGIDLAKNVFQVHGVDERGKAVLKKQLKRDQMAAFFAKLPACLIGMEACGSSHHWARKLQEFGHTVRLMAPQFIKPYVKTNKNDVADAEAICEAVARPNMRFVPVKSVEQQAVLSLHRVRQSFVKARTAQANQIRSLLGEFGLVMPKGITNVRKRVPEVLENATDKLPAAFAHLVERLLAHLKELDRQVGQLEAQIKAWHRSSELSQKLEKIPGIGPLGASALVASIADARSFDNGRQVSAWIGLVPRQHSSGGKPTLLGISKRGDVYLRTLLIHGARSAIVAAQRSAAVNPWLAGLLRRRNPNIAAVALANKNARTVWALLAHDREFRPDYVPTLAAL

SEQ ID NO: 410036 - protein, 311 aa, unidentified
MNTTLCGIDISKDWLDAHIEPMGAANRFANDAAGIADLAAWCQNHDVELVIMEASGGYERLAFLLLWEMGQPCGMATARSVRYFAEAMGFLEKTDRIDAAVIARYGAVKRLKPTPPPSAAQQRLKALVARLSQVGGDLTIQKQRKSTADAETIASLDEVIALLARQSRRLEGEIATLIHDDPLWACLDRAFRSLKGVASRTVARLMAQLPEIGILSNKAIAKLAGLAPIANDSGKRSGRRPVRGGRAGPRGVLFLVASIVAKYDPHLAAFKQRLQTAGKEKMVIRIALARKLLVILNAKARDARNEFANAT

SEQ ID NO: 410037 - protein, 457 aa, unidentified
MNNKIGQKKNQVVNNNPIVAVLSQEEISRRIAEIQDSLKASTWKELETKGKFTKDEKLTFINDDMLIVGCDVGSEKHYVRAIDLRGRELSRNPFSFRNDSDGFQSVKTWALKLAARHHKKQIVLGLEPTGHYWFCLAAWMVSNGISVVQVNPYAVKQTKELEDNSQNKNDRKDPKLIANLVKDGNYGMPYLPEDVYAELRRLSRFKDQLSEDRIRVINRLHREMAIYFPEYKDAFGKIESAFALEVLKEAPFPEDILATGADGLRDIWRRAGLKGRGYGRAGKIVSLASGSVGLAHGTQGGREAARWFAMELGRLNREMADIEEMLHSRCRDIPSVGDISRFDDAKEIQKMSGLSLVSSSSGKHKGDTKISRRGRKRLRYWLFQAARSSIAYADEFKALHIYYTTRKENPLKKMQSLIVIACKLLRIIYMLLRTGRSYDPSRMLSDIHRPAEKTSAA

SEQ ID NO: 410038 - protein, 362 aa, unidentified
MNYVGVDIHKKYSVLCAVDERGRKLREARVEGNAPFGFAQFFSGLGGPSKAVVEACWNWGLIHDELEELEGIEEVVLAHPYKTRLIADAQIKTDRLDAYALSTLLRGNLVARAHVPRCETRMRKNLLRQRLYWARLRTMLRNRIHALLDRQRGLELPQCSDIFGVRGLSFLRRLELPETDAVLLREQLALHDLIAQQMKAQEKRIGLEFGSEAMHRQLLSVPGIGPTLAAVIACEVDSIERFSSAEKLCAYAGVVPTTHSSGGKTRHGQLLPFCNKWLRWALIEASWVAIGCSPYFGALYKQHRARGKKANSAVLIVARRMCRIIWQLLHEKRDFEKRPLRPNFNFPGCSVVRLTAATAARP

SEQ ID NO: 410039 - protein, 332 aa, unidentified
MSVYVGIDVHRKRSQVAVINEVGEVLANRNVTNGVRPILSVIGGLPAGTPAAYEAAFGWGWLLELLEGYGFEPHMVHPLQCKAIASARLKNDKVDAATLAQLLRADLLPEAWIAPPEVRQLRAVLRHRAQLVRLRTLLRNRVHAVLADHGHGRPAGCWSGPGRTWLASLELPAVSREVIDDDLALIDALQLPIDRLDLEVRQRAKADPRVKVLTRLPGVGQFTALVLLAEIGDITRFASARKLASWAGLTPTVRGSDRTVHHGHISKQGPAWVRWVTCEAAQTARRHPDFAPGYQALSRRRGRKIATTAVARKLLTRACHLLTDAASGGAPS

SEQ ID NO: 410040 - protein, 356 aa, unidentified
MTSKSKYIGMDVHKESISMAVRNAAGKIVMESVIETKANMIVEFIDGLQGEVHVTFEEGTWSAWLYDLLKPRVTKVVVCDPRRNALLQEGNQNDRVDARKLAELLQNNQLRRVYHGDHGLRALKELVRSYLTITKDLSRVMTRVKAIYRSWAIPCSGKQVYASRHRAEWLGKICEPGVRRRAELYYQQLDALRLLRQEVRKDLLAESKEHKIWKRLREIPSLGPIRAAVLLGILQTAHRFRTKRQLWTYSGLGIEVHSSADHHVVKGQLERKKKHIEIRGLNKNYNHDLKNLFKSAAVVASSKPGPFEEFYAALISKGMRPEIARLTLARKIATIVLIVWKRGVCFDANHLKPQKA

SEQ ID NO: 410041 - protein, 362 aa, unidentified
MSNSTTWVGMDVHKENIVTVSISGDSGTVMTRWETPNTTKGKERLAGRIARLGKARCVYEAGPCGYDLRRFLDGKGIPCDVIAPSLIPTRPGDRIKTDRRDAEKLARMHCMGELTAICVPTPAQEALRDLVRAREDANEDLVRCRHRLQKFLLRQGRRFEGKSWTREHWRWVRALTFDDANAGTVLAEYVLAVDQQLERVARLDARIEEEAQNPGIAPAVARWKTLRGVRTLTAMTIHSELIDLSRFASPRDLMSFIGLVPSEYSSGGKQRRGSLTRAGNAHLRRVLVEAAWHYRHPPHRTGETIRKRREGQPPDVIETARKAEVRLCRNFTRLVMRGKRTTVAAMAVARELAGFVWAIGRI

SEQ ID NO: 410042 - protein, 362 aa, unidentified
MRIIGCDLHARQQTLAMLDTATGEVVNQTLAHEGERVREFYSKLPGPVRVGIEATGSMKWFLLLMEELGIDCQVGHPATIRAAEPRRQKHDRRDAELLLKLLVENRFPSIWQPSKELLDLRALLLHRHQWVRLRTRIQNALQAIALANGLRRGSSLWSESGQAAIASLPLATHTAQRRSELQSMYARFEAEIEQLNERVLERAGERPTAGLLMTHPGVGPITALATDVFLGDPKRFRDGKALASYIGIIPRENSSGGRQRLGGLTKQGNPLLRFLWCEAAAHAVRRDPELRQFYRRKLVQKGLGKARVAAARKLGIRLWIMLRDQIDYQEFCRRGQMQQKSGEACAGMPGPRYGANRHRPID

SEQ ID NO: 410043 - protein, 323 aa, unidentified
MYYLGVDVAKAKLDCMLLDGASGKRKSKVVPNSSAGFMQLLEWLDKQGAPNPHVIMEPTGVYHEPAALALTDAGLTLSLVNPAQLRQFAQGLGVKTKTDKADSTVLARFGQTQQSEPWQPPSRSARTLKALLARRDTVADDLQRERNRQEAADFAQTPNEVKASIMQTIAFLEAELKRFEKMINDHIDSDPDLRNKKELLETIPGVGERVSTNMTALFAGRTFERAEQVAAYLGLVPVQWESGSSVHGRPRMSKAGPAHLRKLLYMPAVKARQCNPHIKALGERLLAKGKSKMAVIGACMRKLAHLCFGVLHTGRPYEPTFAM

SEQ ID NO: 410044 - protein, 458 aa, unidentified
MKKKSKRTRGLEEARPFDGLSKVNQNAAGVDIGATEIVACVSGGEEVQLVKAFGNYTVDLQSIAKWLHEHKIKTVAMESTGVYWIPLFEELERQGFECLLISSRSLRKVAGQKTDVEDAQWIQTLHSYGLLKGSFRPQGDLVALRTLLRHRSQLVEHRSPHIQHMQKALLQMNIQLSQAVTDVTGMTGQKIIRAIVAGIRDPEQLATLRDPGCKHSAEEIEKALTGTWRAEHLYILKQSLELYDFYTEKVEACDKEISRRYGMTRPDWASRELPAIPDKKRNSHSKNAPKEAKEIREHLYRINGVDLSLVDGMGVSLAQTVTMEVGSNVGEKFPTEKHFCAWLGLAPKHDITGGKVLSNRTLKTKNRAGQAFRLAANSVKKADCPFGMMYRRLRSRLGPAQATVATAHAIARVVYKMLKYQVEYDPLSVNEYQKQYEEQQVKYMRKRAAKFGYQLVPA

SEQ ID NO: 410045 - protein, 452 aa, unidentified
MSMKRKKRVQDLPVLHPDGAGIDIGASEVFVAVPADRDPEPVRSFTTFTRDLNAAADWLQKCGIRSVAMESTSVYWIPLHQILEARGFEVYLVNAQHVKNVPGRKTDVSDCQWIQYLHSVGLLRASFRPPASICAIRSLWRHRGSLIQMAAEHVMHIQKALDQMNLQVHRVLSDITGLSGVRILEAILAGERDSAKLASLCHSRVRSSRDIVAKSLEGDYRPEHVFALRQSLAGYRYYQGLIAEVDQEIQRNLAELKSAANADSKPPKRTQKKSHQRQHYDPTSFDLSAELYRIFGVDLTDVPGISAVTAHTILCEIGPDVSRFRNASAFASWLGLCPEQQISGGRVLYTKSRRVRNRAALALRVGANSLHHAKNYLGEFFRQIARKLGKPQAITATAHKLSRIVFHLLNTKEPYDETVFKQSDEETLKRAEVRLRRYAAQLGFQVVPDMNG

SEQ ID NO: 410046 - protein, 337 aa, unidentified
MKLYCGIDLHSNNHYVSIIDQDNNRLKEKRLSNDLSKTLTLLEPYKDDLQGIAIESTFNWYWLVDGLMEADYSVSLVNTTAVKQYEGLKHTDDQYDAYWLAHLMRLGILPTGYIYPKEQRSLRDLMRKRMQLVQCRTAHVISAQAQYWRSTGFRLRSQDIKKCPDNLLSAISDQNLFLSIQSNLNVIALLNSQIETIEESILLQCKNITEYKQLQTVFGIGKILALTITLETGDISRFHKVGDYASYCRCVDSKKTSNGKKKGSGNKKCGNKYLAWAFMEAANYALRFYEPARKFYQRKSSKRNMIVARKALAHKLARASYYVMRDHVPFKPEKLFI

SEQ ID NO: 410047 - protein, 342 aa, unidentified
MVMIGIDPHKGSHTAVALDDQELELASLRVRAGRRQRQQLLEWATPFDVRVWAIESANGLGYLLAQQLLAAGERVLDVPATLASRVRVLSSGRSNKNDPNDARSVAVAALRSPAMTEVRCEDHVTVLRLLAKRHIDLGRWRNKVCCRLHAHVAELVAGGISTEIVVAQASELLAGLHPRGVAAVERHRQALELVEDLTRIDDQLRASRRRVTGAVAASGTTLTELFGVGPINAAILIGYTGDPRRFATQHHYAAYNGTAPIEIASAGRTIHRLSRRGNRQLNHAIHMAAVTQIRHTHSPGRAYFDRKVEEKKTPKVALRCLKRRISDSVYRRLVADARRARR

SEQ ID NO: 410048 - protein, 366 aa, unidentified
MSVVSSIDHRVVIAIDPHKASWTAAAVSESLQPLATLRVPVSREGYRSLRRFARTWHASMWAIEGASGMGAPLTARLADDGVDVVNVPAKLAARVRLLSTGHGRKNDDADALSVGIAALSATHLTTVTIDDAATALRAIVEHREDLVKTRTQTLNRLHVLLTRLSPGGASGTLTADRAATLLRAIRPRDPATKALRGLAADMVSELRHLDRRITKSANDITSAVTTSRTGLTELHGIGTVSAAKILSRVGDIHRFRSAAAFATYTGTAPIEVSSGDTIRHRLSRAGDRQLNSCLHVMALTQIRNHPQAQAYYQRKRSEGKSRREAMRCLKRRLSDVVYRQLIQDADRQEADPGGHSGAALSSRAAG

SEQ ID NO: 410049 - protein, 340 aa, unidentified
MKMYAGLDVGGKQTAICAMDEVGKIIWRGMADTYPDVIAARLKGFQEKLVKVGIESGPFTPHLHRSLVGLGFPMVCRDARRAADAIKSRRIKSDRADAWALAEMLRIGWFTAVHVKSAESHKIKTLLGARDQLVRVKRSLGNQVRGLLRPFGVRLPSRAGMKKFAEAAHQAVQADKLLRASISALLEALASIDAQIAKLDDELKALARRSEVAWRLMSAPSIGPITALAFIAAIEDPHRFRRTRDIGAYLGLTEKRYQSADTDVGLGISKQGDAMARHYLYEAANVLLTSVKKGSALRSWGLKLLKNIGPKRARVAVARKLAVLLGRMWKDGTHFEAMAA

SEQ ID NO: 410050 - protein, 370 aa, unidentified
MSVRRILAKTIDTDLEYEAIGIDLAKNCVSAALLTTDGEVVCIDRLDYSELEKSAQALSPTTFAMEPCTEMNYLVQKLEAWGHRCLVIGGKNVQNYVENHYSGQKTDLNDAQALAFLAQDKQLRTIKAKDMEQQKYASLTTLREQYIKQYRQTIVSLKGICQAWGLNISKGISGKAQLKDLIENHAAFPEELRESLVDMVTHAQTTQKVLNKITKTLEVLAKNDKLCQLIQTIPGLGPICSCRLRATIGDIKRFKNPKDFPAYYGLVPRSIATGHNEKKGKITHRGDRTMRSLMVQGAGCVIRLATCGKLKSKQLTKWILKKQKEKMPWGKLVCAVAAKLLRIVRAILISSKPYNPKIAGVAKCSLSKGS

SEQ ID NO: 410051 - protein, 450 aa, unidentified
MSKLKPKSQSLPVINPNAAGIDIGGRFHVVAVPPDRSDKSVQTFKAFTGDIHNMARWLTKCRITTVVMESTGVYWVPVHEILEEHGFEVVLSNARDTRAVPGRKTDVGDAQWIQRLHACGLLKASFRPDATIAELRTYMRVRERMLDYAAAHIQHMQKALTFMNVQLHIVVSDITGVTGMKIVRAIVAGEHDPAILAKFRDPRCKADEQTICAALKGNYQPEHLFALRQAIILYDVYQRQVNECDVQIEAVLDRLCINSSEPDEPIPKPKHRAKQANAMTFDVREKLYRLIGADLTQIHGIGPFLALRLISECGTDMNKWPTEKHFTSWLTLCPGSKISGGKVMSSHSRKSNNRVVAHLRLATTTVGRSDTALGAFYRRLSSRIGKAKAVTATARKIAILFYNAMKYGTKYKDPGAEYYEERYKERVLKNLKRQAERMGMTLQAKEECVS

SEQ ID NO: 410052 - protein, 377 aa, unidentified
MNTKLYLGLDVHKNSIVVATALADGSDPQSYGKWCGSNLSAERGLLKIRQKYQVEKSEISIVYEAGPTGFVLARRLQQLGYHCIIVGPSEVPSKAGDKVKTDKRDARKLARLHRAGELTAIHIPESKDEAVRDLCRARTDASQALARAKQQLGMFMLRSGYRYDGKTNWTQAHLNYLRRSRMPHPAQQLVLEEYILEVDALTQRVARIEEHMREFLPSWEREPYVRALMSFRGFQEVAAMTVISELGDLSRFKHPRQLMGYLGMVPEESSSGQKRRQGGITKTGNGHARWMLIECASHYSHHPRVSPQLSARQAGQSREVLGIAWKAQNRLNSRFRRLAARGLHRNKTVVAIARELCGFLWELHHRVSKEISGRSAA

SEQ ID NO: 410053 - protein, 360 aa, unidentified
MKRQRTSIGLDVHARSIVACGLDADTGEVFQRRLCPDHREVLEWIRGLPGPVAVTYEAGPTGFGLARALIGAGIDCRVAAPSKLQRPAGDRVKTDARDAAHLARLVHLGQIVEVTIPSVTQEAARDLVRTREDCRGDLMTTRHRISKLLLRQGVVYYGGQAWTGKHELWLRGQHFDDPALTLTYESTLDAMVTCVHRRDRLDDAIAAMAADSAFTPVVNRLCCLRGVSTLTAFGLAVEIGDWGRLTGRTIGAYLGLVPTESSSGASRSQGGLTKTGNGHARRLLIEAAWHHRPGYRPSRDLRRRWEAAPAAARERGHTANHRLHTRWAGFDARKKRPVVANAAIARELAGWCWSLATMTD

SEQ ID NO: 410054 - protein, 424 aa, unidentified
MKSTQNEKIMQIKDETLVVGIDIGKETHYARAFDARGIEQAKLLRFSNDAHGYNSLETWMQEIMQQKGKTEAIVGFEPTGHYWFTLGDHLKGKGHKLAIVNPFHVKCTKELDDNSPTKNDRKDPKTIAMLVKDGRYREVYTPEDLYQELREAVSEHERLQDQLNAINNQVIRWLDIRFPEFSKVFKSWHGMAALLLLKHYPTPAKVIEAGIEGIMGIWRQTLKKPSRKRAEAIIRAGKESIGRTAGSVAAEASIHNLLVQYEMLMKQLQEQELLMQELLLQIPNAGKLMEIKGIGLLTAAVIVSEIGDVHRFQDPRQILKMAGLNLRENSSGKHKGRTTISKRGRRRLREGLFNAMIPMLANNEEFRQIHHRNLTRENNPLNKMQSIIALCGKLVRVIYAILKKGVEYNADKLVKDMNLSMKAA

SEQ ID NO: 410055 - protein, 451 aa, unidentified
MDRPQEIEVAEEHEIVERVAAIDVAKASGMVCTRVPHASIPGKRVTKVWEVSSTTKAIGELADHLVKEGVERVVLESTSDYWRGFFYVLEGAGLCVWLVNAKQVRNVPGRPKTDKLDSIWLAKLAERSMLSPSFVPEEQMRHVRDLARARFDLVADRSRVKQRVEKVLEDALVKISSILTDLHGVSGRAMLEALIAGERDPMVLAELAKGRARARLPLLAEACDGRFTSHHARLCRMLLDQADELSAHIETVTGLLDAAISTLEAPRGGVVTAALDPQTGEILPAPAAYLSAIERISQIPGGGPETARAVIGEIGLDMAVFSTPQRLCSWAKCSPRTVQSGRKTKGAPTGKGNPYLKAALGQMATGAAKTDTFLGERYRRLVKRMPKKKALAAIERSILVVIFHLLADPSATFTELGPDYYAKRIDAKRRTDQLVRQLEALGHHVTLAPAA

SEQ ID NO: 410056 - protein, 341 aa, unidentified
MENVSIVGIDLAKRSFQLHGAAADGSLVFRKKMSRPQLTAFLSELPKCVVAMEACATSHYWGREIGKLGHETRLIPPVYVKPFVKRQKNDANDAEAIAEAASRPTMRYVSVKSAEQQAQGMVFRTRDLFVRQRSQLVNALRGHLAEYGVVVAQGMVQFRRMIASFDEVAVDLPAQILSLCQAYIDQIALFDERIVVLDHEIKGRAKTDEATSRLMTIPGVGPMCATTIQAFAPPMEEFSNGREFAAWCGLVPRQKSTGGRQILGRTSKMGQRDIRRLLITGAMAVIRWAIRKGPPPGSWLAKMLARKPRMLVATALANKLARTVWALTTTKENYRIPPLAA

SEQ ID NO: 410057 - protein, 344 aa, unidentified
MTHASSLYRLFVGIDVAATTCAVAWMHATTTPSRAITIDQTATGFAALQRKLLSIEPEPQAVLIVMEATGTYWMRLASNLVAAGFAVAVVNPAQAHDFAKALLKRSKTDAIDAQTLAELGARLQPERWTPPPQVYTELQQRLVHRDGLVAARTQFRNQLHALVQQPVVITIVRTRLERLIASLDEEIATVEQEITVALQQDEAWAAAAARLATINGLGTLTIAWILTTTINFTLTVTPEAAANYAGLAPQLRQSGSSVRGRPRVGHGGNARLRRALYMATLSALQHNPVIKAFYSRLCAAGKPRKVAVCAAARKLLRIAWAVANKNQDFDPAYATHSRQEVAVR

SEQ ID NO: 410058 - protein, 387 aa, unidentified
MPQPNDLSRSLVALDQNSTIIAVVELSQSSWLVGGVVPGIERQPRKKLEPSPERLLAVLHRWRDEAVGAGRTITRIALAFEAGRDGFWLARWLEARGVEAHVIHPSSVAVSREHRRAKTDRLDTELLKRGFLGWLRGERGHCSMVRVPTIAEEDAKRPNRERECLVGERTRIVNRIKSTLARLGIRNFKPTLRKAAERLATVHTPEGMPLPPNVLAELQRDMARLGVVVSQIREIEDARQKGLEQKPDTGPHAMVRLLARIVGVGVETADMLVHEVLSRPLRDRRAVARYAGLTGSPDESGAQRREQGLARAGNARVRRGMIQLAWRFLMFQKDSALARWYRARTADSRSGTRKTMIVALARKLVIALWRFVTTGEPLEGVVLRPAA

SEQ ID NO: 410059 - protein, 347 aa, unidentified
MTKHKYVGMDVHSATTVSEVINEQGKTVARSIVETKAAEIKDFIRGLTGTIHVTFEEGVHAAWLHEIIKPLVAEVIVCDPRHNKLIQSGNKSDQNDAHKLAELLRLGSLKAVYHGDCGTRKLREAVRGYNALTGDCLRVMNRIKAMFRGRGIDCGGTEVYRVIHREQWLDRLGDPPAKARLELLYEQLDSVSGLREKARREMVTQARSHSAYKVLKQIKTLGPVRIAEIIGVVRSPFRFRTKRQFWPYCGLAVRTASSADFEIVNGKVRRTAKRAATRGLNHNYNRELKKVFKGAALLATVTEPFKQYYEGLTASGMKPEMARLTLARKIAAITLAVWKSRSRNDYY

SEQ ID NO: 410060 - protein, 480 aa, unidentified
MPYSIRVDEACIFKIKQYNMEKTGYLGCDVSKGYCDFILLGSGKEVLATTFILQDNKEGRDQLLASIKKWESEGLTALFCGVESTGGYENNWFRFLRGLAPQMGLAIKTARLNPKGVKAVTEANLSRTITDAVSARNIALYLMLFPEKVEYGHSSTVNEEGIFSDGRQHHTYIKMLLKQKVQLNNQLEKLLYQNFSEILVYCRHGAPKFVLKLLVEYPGALEVCKAGTEKLSLIKGISTQKANSIIRKASTSEQNLSDHIKHLVSATSKELLHKTELIAAEKSRLEDRFKSDPQVILLSSVDGIGPSSAVSLLLEIEDVKRFATAQKMTSYFGVHPCFKQSGDGIWGNHMSKKGRGEIRAVLYMAAMTGIWRNPTLKKLYKRFREKGMKHYQAMGVVMHKLLRIVYGILKNQTAFDATVDEKNITKANEAKQKDQEVKSKDKKAEKKTLGHKLAMMDAPISRRKYQQIKKAASVPELKIE

SEQ ID NO: 410061 - protein, 393 aa, unidentified
MRKPKQQHKPLNDLSRSLTPFDPNQTLIAVVELSNESWLVAGIIPGVEREPLKKLEPNENDLLMLFERWRAEAEKAGYKIKRITVAFEAGRDGFWLARWLSARGIEAHVIHAASVAVSREHRRAKTDRLDTQQLKRAFLGWLRGERVHCKMCAIPTFAEEDAKRPHREREALVGEHTSIINRMKATLTRLGIRNFNPKLKKAAERLEHVRTPEDEPIPPNTLAELRRDMQRRRLVMEQIRQIEKARLERLKQAPTHRPNVMILLLARVIGIGIETADMLVQEVLSRNLRDQRAVARYSGLTGSPDESGKKRREKGLARSGNARVRRGMIQLAWRFLEFQKQSALAKWFRARTENARGSRKKMIVALARKLLIALWHFLRDGVVPEGVVLRPAQ

SEQ ID NO: 410062 - protein, 408 aa, unidentified
MRLLVGDDWAEDHHDVELMDAAGRVLARARLPEGVAGMARLHAMIAGQLGDTDPDEVQVLVGIETDRGPLVAALAAAGYEVFAVNPLQAAQYRKRHAVSGAKSDAADAHVLADMVRTDARHLRPVAGDSAAAQAVKVVARTHKTLIWERTRTTQRLRHALREYFPAALAAYDDLDAPDTLELLAKAPDPATAARLTISQISAALKRARRRNIAGKAVQIQAALRTEQLGQPAAVTAAYAASVRALTAVLVTLNEQVKAMQRQVETHFGQHPAAEIIASQPGLGPVLGARVLAEFGDDPARYASAKARKNYAATSPITRASGKKKTALARFVHNGRLIDALMGQAFAALNTSPGARAYYQRQRARGAGHNPALRQLANRLVGILHGCLKTGTPYDEATAWSHHVKDLAA

SEQ ID NO: 410063 - protein, 393 aa, unidentified
MVYVGIDVAKDKHDCFIANSDGEILYDVFTIQNDMDGFEDLFFKIKTASRDLSKVKVGLEATGHYSCNILGFLHNKGLTTIVINPLYTSLSRKSVSLRKTKTDKVDARTIASMIMSDVSLKPYSDTVYHNEDLKSLSRYRFDKVSDRSKLKQSVSRLVNILFPELEKLVSSLHTKAVYELLSEFPGAHQVASANLKHLMALLSTASKGHFGREKANAIREAARRSISSYLPAKSLELRHTIKLIRELDAEIAEIETEIKKIMDSIDSPTLSVPGISYALGSVIISEVGDFSRFDNPDKLLAFAGCSPSTYQSGQIYSTHAKMEKRGSKYLRWALLNAAKYVCKWEPTFAVYLRKKLAEGKHYNVAVSHAAKKLVRLLYHLETTGEKYIPQTLS

SEQ ID NO: 410064 - protein, 321 aa, unidentified
MNEIGFTQVVSRGCGIDVHKKVVVATINGAGLKPQTREFSTFTSSLTSLKEWLLSEGVTHVAMESTGVYWKPVYRILECAELTVWIVNARHIKYVPGHKTDKKDSAWLCKLLLAGLLKPSYIPRKQQRILRDLTRYRKKLIEQNASEQNRLLRILEDCNIKLSSVLSHVSGVAGTKLIDKLCNGQTITMSDVEEVYHWRMQCSRSDLYEACQGFVESHHIYLLQMIKANIAHTERVILDINRQVRYLLEPYEHRVEQLRDIPGLDRKTVEDLIAEIGLDMSVFPTEKHLASWVGICPGNNESAGKKKVDESHTATNKPKQP

SEQ ID NO: 410065 - protein, 443 aa, unidentified
MIHPDAAGIDIGHREHWCAVPAGRCPNPVQRFGTFTEDLEKLADWLQDCGIKTVAMESTGVYWIPAFQVLDRRGFAVRLANARQAKNVCGRKSDVLDCQWIQRLHSYGLLNASFRPDDQMCVLRSYLRYRDDLVCARSVQCQHMQKALQQMNVQLHQVLSDVTGVSGLRIIEAILKGERDAPTLAQLADRRVRASQATIEKALKGDYRLEHLFVLQTAFDLHATYDQKIQLCDEQVIGEMAKLPTRANVQEKPLPARKPGRPRHRDLVAGKDLREELYRWTGVDLTAIEGIGVLSAQVVLSECGTDMERWRTEKHFTSWLGLCPDNRISGGKVLSSHTRHVVNPVADALRLAATTLQNSKTALGAFYRRMRGRLGAASAVTATAHKLARLIYRLLKHGEQYVREGLEVYEQKYRQRLLYNVRKTAASLGFQLTPNQVVASGVS

SEQ ID NO: 410066 - protein, 365 aa, unidentified
MNKCHLNTELSSHEGTRCQFNGGTGAIELGIDVHQDFYVVVMQEGGANPKPPQRFGKQAFLHWVAKLARSGSEVHAVYEACGFGFTLQRQLSALSIRCYVVCPQKLDEQNRRVKTDGLDAKALVLKLDRFVEGNRSALALVRVPTQEEEQKRAIHRQREQLVKVRKQLEAQGRSLMVNHGFEPVKSWWKQRTFAALQLPAWMKELLLANTQPLLLALQEKIGALTVQLQSAADPKQPRGLGLMTSVIIDREIGDWNRFNNRRQIASYTGLCPGEYSSGNTRLQSCVTKHGNPRLRAALVELAWRLVRFQPNYKPIFKWRRLLAKGAFATGAARKKAIVAVARQLAVDLWRVRTGRCKAQALGLFI

SEQ ID NO: 410067 - protein, 343 aa, unidentified
MQIASIGIDLGKTTFHLVALGPAGQVLVRRKFSQKQLLTYTANLVSSLVGLEACSGAHFLGRALRSQGHDVRLIPAQFVKPFVKSNKNDFLDAEAIAEAVARQNMRFVPIKTDDQLDLQAIHRVRDRLIACRTAVINQLRAFLLERGMTFAKSPAKLKLAMPEILENADSNLTPRMRNLVADLWTEWKSLDQQIRASDLEVEQIATSDPACHRLRSIPGIGPLIATAIVAAIGNGAAFRKGREFAAFVGLVPRQYSTGGKARLMGISKRGNSYLRKLLIHGARAAVVRMKRERAPFGGWLNGLEQRAPRNVVVTATANKLARIAWAVLSSGDPYRPLTIAIPA

SEQ ID NO: 410068 - protein, 456 aa, unidentified
MSQNQTKKVKYQKSLKMVNSHTAGLDLHKDTIWSCSLDEKLNAKVKTFGTCTADVKALGKHLLKAKVESVAMESTGVYWIPVYNILRNMGLKPVLINAREVKSVAGRPKTDKQDCMWICRLHSYGLLKASFVPDVNVSALKNLCDCRDKMMTDCSSTTQRIRKTLATMNCRLDKAVSDVTGVSGCKVIEAILNGERNPKILTNVMENSLKMKKKDIIRELEGDFREELIIVLKQHYELYKTFQKKIKELNCEILKLLEEKFPKKADRKDIPIKKKGYTEKQLGFDKDLRPILFEILGVDLTQLPGIGALTALFFVGVIGTDVFAWKTENHFTSWLGLAPNLAISADTKKRGKTKIVNNLFTKILKNGAMATQRTDSYLGSQYRKFQARKGGAIAKTAIARKMAIIIYKAIDTGSVIEKYDAEKHELKTLQRKERKFLKDASILGYDVTKLKKLKTV

SEQ ID NO: 410069 - protein, 349 aa, unidentified
MNECMTRVRTLAIDLAKTVFQVAGEDDLFEVVFEERFKSRQAFRSFLYTLKAPLVVLMETGPGAQAWARELRSRGIDARVLPAQRVEEHRSGAKNDRKDCLAILRAGRDASIHPVPVKSAELLAMQAIHRVRSGYLSRRTSISNQIRGLLTEHGIVFARGDAPLAQGLARVLEDATQPIPDRLRELIYELWAERDMLCQRLEKLDAELLSIAKQDPLARQLMTVPGVGPITATALLCKEIDPALFLSARLFAAYFGVVPDQHSSGNRIRLKGMSKRGDGYIRSLLINGAHAVLQRVDPASDDPHHARLRGWKKRLGSKGAAVRMANRNLRIMYALMKNGGSYRDGTTMA

SEQ ID NO: 410070 - protein, 421 aa, unidentified
MNRFLLISQQVVTFSSTRNVRNLNMRRAYTMYIVGIDIAKRKHEAAVIDGEGTVIIKPFSFTNNCSGYNRLLAMLTKAKLPLDEVSFAMEATGHYWLALFTRLQKEGFRVQVINPVQTNSIRSFYIRQAKTDPRDALLIAEVIRFGHFSESTLHPENIYELRELCRGRHAIVSMQADVKRKVVALLDQVFPEYETAFANMFGDTSMAILQTCPTPKELSEMRLEELCHLIEVSSHKRFRMAKAQELQALARNSFGFAMAGDVFSTMIRLYAKHLDFLKQQVREMDRKIAEIMETLDTPITTITGIGLTLGAYILSEIGDISRFSSAAKLAAYAGIDPTMRQSGEYNGVRNRMSKRGSPYLRHAIWLAASSAVLHDPALKLYFQKKRDEGKPYMASVGHACRKMVSIIYAVMRDNKAYCLCA

SEQ ID NO: 410071 - protein, 371 aa, unidentified
MTQSNILFIGLDVHKESIEVAFAEDGLAGEVRHYGKVGGSFSALDKVVRKLVSRDKSLHFCYEAGPCGYELYRHLTSQGHLCVVIAPSLIPKKPGDKVKTDKRDAIQLARLFRAGDLTAVYVPRREDEAIRDLSRAREDSMLTQKAARQRLKSFLLRHNIRYTGTANWSEKHLRWLADEVRCPSPAQQIVFQEYVNTVTEAQQRLQRINEQIDYFVKDWRLYPVVQALMSMRGVKIIVAVTVVSELGDLSRFDNPKQLMSFLGLTPSEYSSGQRQSRGRITKTGNGHVRRILIEAAWCYRYPAKVSPEIQKRQEKIPLPIRDIAWRAQLRLTQRYQHMQKKGKPHNVTVIALARELAGFMWAIAKEVKYPR

SEQ ID NO: 410072 - protein, 358 aa, unidentified
MTPTTIDTQVVVLGVDTHQRTHHAAIVAADGRPLADREFPTTAAGYTEMWQWACGFGRIEYAAVESSASYGAGLTRMLTDQGVAVIEVNAPDLPRRYAHGKTDQLDAYAAAMAVITGRATAVAKDTRGAVESVRMLTVARTSAVEEATRIGNQIRDLCTTAPVEFADQARQARTITARTAFIAGLPVPADQGDLSGPAAAFVRAARSLLERHRLAQREVRSLTRELERLLATVVPTLLSRPQIGPVTAARLVITAGDNVERMRTEATFAKLVGAAPLPASSGKTSRHRLNRGGDRQANSALHMIAVGRMKSHAPTRAYVERRSAEHKTKKDIIRCLKRYIAREVFRDLTTDLGTLDKL

SEQ ID NO: 410073 - protein, 340 aa, unidentified
MKFTPFGVDIAKHLMQIHFVDEYTGEVIDRQLRRQDFLTFFSNRESCLIGMEACGGAHYWARELRKLGHEVRLLQARFVRAFRMGNKNDVQDARAIWQAVQQPGKSVAVKNEEHQAILSLHRMRYQLVKFRTAQINALHGLLLEFGETVHKGRASLDKAMPEILERLREKLAPFLLNLLEEQYHRLNEIDEQIEQVEKQLIAWAKQNADCQRIMKIPGVGVLIATAAIATMGDPRAFRSGREFSAYLGLVPKQTGTGGRIKLLGSSKRGATYLRTLFIHGARVATLTTKTPLPWVTELKKRRPACVAIVGMANKLARTVWALVAHQRDYQKDYVSVRPLN

SEQ ID NO: 410074 - protein, 326 aa, unidentified
MKAFIGVDVSKKTLDVAAVASNKIVFQAQFGNNKKGIADLIAKAARCLKAYNLVFGCEATGVYHELFAKMVRHADFSVAVINPRLVHHELESMGRKTSTDRIDAQIIAYRLSKEQDRLWEPVDADQELLRDLILRRDQILRTIKAEKSRLDRFPEGNRVRKSVKRIIKSLEKELAEIEKEISNTVESSDILKRKTELAKSVPGVGKLVSASFVAVIGDIGRFENAGQLTSFLGLCPKQKISGTSVNRSYLSRSGDGLLRRHLYMGAVSTLARNNVYHDYYDSLISRGKCAKQALSAVMRKMARAIYAVLRDNKPFSREKYGINPAT

SEQ ID NO: 410075 - protein, 421 aa, unidentified
MQNTVASKLKQVPEGFLILGVDPHKKRHAAVAITQDFTTQAKFKFDNTREGLKFLLHRARTEMMKCDCRGVMFAIETGGHYWRNVAYFLDEQGIPFRFINQYTLKRRREGKDLNRRKNDYRDCEVAAQLLCTGEFVESTIPQGVYAELRTAHNAYRRLVKERTRITNLIKGLLDAVFPEFTHVFKDPCGMTALSVLSTCAVPGVIARMTEDEFVATIEAKHQGRLMRKKLTALHYVARSSIGVAAGATSVSCEISFLVEKLELIRGHICTIERKLVKLVDETEEGKYLLSIRGLNYIAVGGLLAELGCFKSYRTAKQMIKMAGSNPTESESAGKKGTHTPMSKQGRPVLRYCAWTSVIPMLRLNPDFRAWAKQRRERPVHANPLNGREIVGAALNRLLRLAFALVKNRSFYKAPGLVRVAG

SEQ ID NO: 410076 - protein, 343 aa, unidentified
MAIVAGFDVHRRQFTFDALDTEAGEVSRGRIASTPAAVSGWVGRFPGQEVEVAVEACTGWLFVCEALAQAGARPHLAEPAETSARRGKKRRAKTDRADACHLRELLCQGRLPEAWLPPAHVCEWRTRTRLRKTLVDERTRWLQRIRATLFHHGVPVADVPERLLGREGRAFLKRVELPESARERIAVALALIETLEAQLAPIERELRSLARSQPGCQALMRQFGIGELLAPTILCELGDVSRLSSSRKAVRAVGLDVGVHRSDRRSRVGRLTKQGSSVARWALYEAAQSACRQTSPDHDAYLELKRRGLSHTRRSLTIARKLTRRCFHTLRELGPTALEPVND

SEQ ID NO: 410077 - protein, 490 aa, unidentified
MNAESKENSKAVHKTKKATHPAIQSQWHQMNREQRRDLARTIQSEEISLEVVHPDAAGIDIGNDVHYVSVPPSRDSEPVRDFGCTTAELKAMADWLKQCRIRTVAMQSTGVYWIAVFDILEEAGFEVFLVNARDTKSLPGRKSDVQESQWLMKLHTYGLLRNSFRPAQEIRRLRTYWRQRNDLVRSASRHIQRMQKTLTQMNVQLANVLTDITGMTGQAIIKAILAGERDPRELAAYRDRRVKATEAEIAAHLEGNWQEDLLFVLKQEQDGYEFCQRQMSECDHKIEQYLAHMEDRSQGADLPVETRKTRLRKKKQGNTPRFELRQELFRMTGKDLTQIDGIDVMTATTILSEVGWDMSKWKTENHFVSWLRLCPDDKISGAKIIGKGRLPTNHRATNALKMAASSLRLSNTYLGAQFRRLRTKLGAPVAIKAMAAKLARLVSRMLRFGMEFIDRGAQFYDAQMHGLQVRHLKWKAAKLGFQLTEITAAA

SEQ ID NO: 410078 - protein, 306 aa, unidentified
MTILTSQTVVGIDIAKAEIVVYRSDLQTTDTIKNDRTALKRWLKTLPAQSAIAVEATNIYHLDTIELAHAMGHQVYVVDAYRVSNYRRGIGQRAKNDPCDARLLARYLTNEQDGLRIWSPPPKAYTSLKSLLHRRATLIQNHAGLMLSWANEPLLKKVQAAQQKAFKQADQAIQKLLRKVSKEAGIEENIDRCKAIEGVGELTATGLATTFMRGDFANSDAFIAFLGMDLTVDDSGKKNGPRYLTKKGDPEVRRLAYNAAMAACRSARWKPFYESYLARGFSKNPGLGGPRPETLPGGICPDEKSE

SEQ ID NO: 410079 - protein, 435 aa, unidentified
MESKLQKIQAQVAGIDVGSRQFFVGIENEEVKSFDTFTSGCHQVVEYLQQHCITSVAMEATGVYWVTLHDMLKEVGIEVAVVNGRHVKHVPGRKTDVKDCMWISQLHSYGLLKKSFIPDAQVKEMRHYMRLRENHIEQKVKAVQRMDKALTMMNIRLSSVVSDLQGKSSLRIIEAIIGGERKTEVLLTLCDESILKHKQTLMQECLNGFYKPEQLFALQQSWEQYGFSEKQIGACDVCIEKLLQALTVNKPEPVFNARPKRIYHNKPQVENLHKMVQQLYDGKDLTVLPGITSYSLLKFFSVTGSDLKSWGSENHFTAWLGLAPNQYQSGKMKKHRSLKSNTEAGQILKECVQPLLRSKHVALGVFGKRIAARRGPSVAIKAMARKLACWIYRMVNNGLDFVENGIKQYEERQKQDTLKWLEKKAKELNLKLAPC

SEQ ID NO: 410080 - protein, 403 aa, unidentified
MNSVGIDISKGRSTIAVMRPFGEVVISPFEVRHTGSELSKLARQLKSLDGETRVVMEATGNYHASVAKLLHDAGLYVSVVNAKLVHDYGNNELRRVKTDRKDAVKLANYGLDRWLTLPRYIPEEDTRLLLKNCYRQYRQYSKVQTVLKNNLISLLDTVFPNANRLFSSPIRGDGSEKWVDFVAEFWHCRCVSEKSERAFTSKYLRWCRKHGYNFSEAKAHTIYAEASGHIGVMPKSETTKLLVEQAVAQLRATSTALAALKLEMQTLASQLPEYPVVMDLFGVGPTLGPQLIAEIGDVRRFYSKKALVAYAGLDAPPNDSGDVTGRHKSMSKIGASSLRRTLFLVMSVYLQTAPLDEPVCQFMDRKRAEGKPYRVYMMASANKFLRIYYATVKAYLESLEHTA

SEQ ID NO: 410081 - protein, 344 aa, unidentified
MNIASIGIDLGKTTFHLVALGERNKILLRRKFSRSQLLAYTANLPASLIGLEACAGAHFMGAALREQGHQVRLIPAQFVKPYRKSNKNDFIDAEAIAEAVTKQNMRFVQIKTQEQLDWQAMHRVRDRLVQRRTALINEIRGFLLERGLTFAARPIYLRKNLPTVIEDAEQNLSSHLRWLLDRLWQEWKQTETEIEVITDEIERISNEDARCRQLRQIPGFGPLVSTATVAAIGNGSAFRRGRDFAAWVGVVPRQYSTGGKQKLYGISKRGNIYLRRMLIHGARAVLFRVKYDTGGFGQWVHRLAQRAPSNKVVVAIANKLARIAWAVLSSGRDYRHQPLQAAAA

SEQ ID NO: 410082 - protein, 372 aa, unidentified
MTSIIYVGMDVHTTNYTLCCYSMEDDRFFAEVQVEPDAKNILKYLARIEKQQSRDCRIVCGYEAGCLGYSLYHQLHAHGIDCVILAPTTMMTKPGKRIKTDRRDARLISKCLAFHTYSPVYIPTEVDDAVKEYIRMRDDANSALARVKQQIIAFCIRHGKIHDGKSYWTNKHLEWLSSLDLGNKVLSEVLQEYLIRYYQLREQVDMYDMRINELAQAEPYRQKVEKLGCFRGIAAHTALSFCVEVGDFRRFATAQQFASYLGLVPGECSSGDKQQYTGITKAGNSHLRKLLVETAQVFGRSATKSGKSVALKERQAKCDSLTVAYADKANARLKKKYFKIAMRSKVNIAKTAVAREMACFIWGMMTDNISCA

SEQ ID NO: 410083 - protein, 390 aa, unidentified
MSLDHRCEEPTAIRSNVGAIFVSLELSRSTWLITSLSPGSGEKMSKYGILAGDLAALLARFSGLKQKAFARAGKSFSIVVIQEAGLDGFWIHRVLQSEGIESYVVDPASIATSRRRRRAKTDRIDGEALVRALLAYKRGEPRVCAIVSAPTPEDEDNRRLCRERKALTAERIQHVNRIKGLLFSQGVSDYEPLRRNRRQRLDELKTGDSRPLPMHLKAQIGRELDRLELLLEQIKAVEAERDALLASAKPTEETSALPAMLVGLKGIGPEFAAVLWSEGLYRIFANRKQVAAYAGLAPTPWQSGTVAHEQGVSKAGNPRLRTTMIQLAWLWLRHQPHSALAQWFKERVKRNGGRLRKTTIVALARKLLVALWKYVNAGVVIEGAVMKVSS

SEQ ID NO: 410084 - protein, 350 aa, unidentified
MIIIGVDFHPEFQQIAWVDKDTGEFQEKRLAHGEEAEKFYRTLAAAGQKVRVGMEASGHARWFERLLAELQIELRIGDAAEIRTKRVRKQKTDRQDARLILQLLLEDRFPQIWVPSWENRDLRQLLWHRHRMVQARPRIMNQLQAVALNEGLGCQKRLWRAHGREQLESFRLAPWASRRRRDLLELLDRLNPMIVELTQAIEQEVEKCPEARRLMTYPGVGPLTALAFVLILGDAERFQCGKQVASYLGLVPLEDSSGNRRRLGHITKQGSSMLRFLLVEAAQVTARSLPQWRSKYLHLMMRRGRKTAKVAMARRLAVHLYWMVRQGLDYQQWIKFGSHAGQLGHRHGVH

SEQ ID NO: 410085 - protein, 349 aa, unidentified
MWIIGCDFHPSWQQVAWLDLETGETGEAKLEHANGEAERWYRTLPVPSLIGLEATGNCEWFVELLQQLGHEVWIGDAAKIRASYVRKQKNDRRDAEHILTLLREKRFPRLWRPTAEQRDVRQLLIHRHKLVEMRARVKNALQHLAMNRGMQKKSRLWSQAGQRAFRELALPGWAGCRRQDLLELLVYLDKKLAPLDRAAEELSQVDEVACLLRTQPGVGPITALAFAVTIGDASRFQRGKQVASYVGLIPREHSSGGKQRLGGISKQGNRFLRSLLVEAAQSAVRCDESLRRSYLHRCHSKPKGVAKVAAARKLAVRLYWMMRTRTAYPEIVPIESSPRVPRDRSAAAD

SEQ ID NO: 410086 - protein, 358 aa, unidentified
MEVIHPRCGGLDVHKETVVACVRLASGGKVTREVRTFETTTSGLLLLLAWLTEHGCTHVAMEATGVYWKPVWNILSDGDFELVLANAAHIKNVPGRKTDVSDAVWIADLLAHGLIRSSFVPEQEIQELRELLRTRKQLVRQQGSHIRRLQKTLESANVKLDSVITDIVGKSGRAMIQALIAGETDPVKLAALADRRIKASAEELREALRGRVTDHHRFLLQLHLQHIEFADAAIQTIDRNVTALITRMDQEVEAGQASFQSLIVLLMTIPGIDVLAAWIILSEIGADMTRFPTAGHLLSWAGLCPRNDESAGKRRSTRLRKGSPWLKTMLVQCAWAAMVFFLSDGVLRFASDMIGAPV

SEQ ID NO: 410087 - protein, 307 aa, unidentified
MKTINYIGIDVSKKTLQIDTAQAALSCPNQAKALMTWLQQLPADSHLVLEATGGYERTLVTLAHAAKVPVSVVNPARVRAFAKARGQRAKTDSIDAAMIRQFALAMQPPATRPPSPVRQRVVELVRARQVLVKERITWTNMLEHVVLPRLKRLYQKRRRQTDALLEELEAQIATEIASCPELSARYQRLLAEFGIGLVAASTLVAELPELGQSNRKQMAALCGLAPFPKDSGQKHGLRFVQGGRAQLRRVLYMATLSAIRKKSSPLADFYQRLRANGKPGKVALIACARKLTTHLNSILKTPDPLAA

SEQ ID NO: 410088 - protein, 349 aa, unidentified
MNHSKSKNSVCVLGIDIGKTKFQLCGLTQSGHKVIDRQLTRKHLPEFVVNLAPCLIGIESCSGANYWARLFRGYGHEVRLIAPQFVKPFVKSNKNDRADAEAICEAIQRPGMRFVAIKEIEQQDVQSLHRIRSQVLANRTALVNQIRSLLHEYGINLPPGRRTVRTNIVLVLEDAANGLTTRFRHWLSDLLDDLIRLDERIENLDKEILQIARSDERSRRLMQVPGIGPMCENALLAAVGDIKHFRNGRELAAWVGLVPRQYSTGGKPTLLGISKRGDVYLRQLLVHGARAVVRRVDGKTNRHSVWLSNLLERRHKNVATVAVANKMVRTAYALLKHGTDYHPVAGTVH

SEQ ID NO: 410089 - protein, 416 aa, unidentified
MNAVGIDVSSRKSTVAVLRPLGEVVCLPFDVTHDIAGLASLAEKLKALDGETRVVMEHTGRYYEAVAKALHEAGLFVCAVNPLLIKEYGANSLRRVKTDKADAVKIARYALDNWADLRDFTPMDAIRYDLKTLNRQFQLASKQRTASANNLIALLEQSFPGIRKCFDSPVRSDGTQKWVDFAHSFWHVDCVRKQPFAAFCERYRKWCKRHAYLFKLSNAEEVYALAKRAVVLTPKAKVVKVLVQEAANQLISISRSVEVYRAEMDRLAAMLPEYPVVMAMYGVGKSYGPQLMAEIGDVRRFERKQALVAFAGIDPMPNQSGDKNVRSNKSSKRGSPYLRKTLFNVIRTYLQCAPQDEPVFQFLNRKRAEGKPFYVYMLAAANKFLRRYYAKLRDYFASLDTLQPVDPIPTILKATL

SEQ ID NO: 410090 - protein, 351 aa, unidentified
MIIIGCDYHPGFQQIAFVDTDTGELQERRLEHREEAERFYRDLGAQGAARVRVGMEASGQARWFERMLSELQFELWIGDAAEIRAKRVRKQKTDRQDAQLILRLMLEARFSRVWVPSGENRDLRQLLWHRHRMVQARTRIMNQLQAVALNEGLRCKKRLWRDAGREQLESFVLAPWASRRRRDLLELLDRLTPTIAELTQGIEQEMEKCPEAQRLQTHPGVGALTALAFVLIIGQADRFQCGKQIASYLGLVPLEDSSGQRRRLGHITKQGNSLLRFLLVEAAQVTVRSDQEWRNKYFHLALRRGRKIAKVAMARRLAVRLYWMWRKGWDYEQLKKFGSHAGQPGHRDGVQ

SEQ ID NO: 410091 - protein, 336 aa, unidentified
MFVLGIDIGKDDLYVRLLETTIQGSATKGQIRVFPNSHVGYQSLGDWLAAEQARPEVTSVVMEATGVYWERVAMALHTAQFAVSVVNAAQIKFFARSTLRRGKTDAMDAEIIARYGATMHPARWVPTEKGLSELRALIHERDTVVELMTIEKSRQHALDHRHEANPIALQLSRDRMTLLCTQLEQVNVAISTLIAVPGELQEQVTLLASVPGIGSLTAAILLTETHHLDRLGSARQWAAYAGLSPAPRQSGAMQGKTHISKIGNARLRRALYLSALSASRLKNLLGDFYRHLVNKGKPRKLALIALARKILCVCFAVLRSRQPFDLTFRSTAPQTP

SEQ ID NO: 410092 - protein, 348 aa, unidentified
MTLTTIGLDVAKLVFQVHGVDENSRAALKRKLHRHEVVTFFEELPRCTVFLEACGASHYWARLFTALGHEVKLIAPEAVKPFAKKGKKNDAVDAAALCVAGSRPEIQFVPIKSVAQQAVLALHTARSLLVKQQTMLANAIRGLASEFGLVVPQGLHRLEELMAQVTAEASFPAVGRQALIVLHAQLQAAAERIVMLEEQIVVHARQNASARRLATIPGIGPITASLIAATVGDNITAFTSARHFAAWLGLVPRQHSTGGKPRLGRITKAGNTEIRRLLVLGATSMVRRAETWNSAAGIWLRGVLARRPVRLTTVALANKMARIAWALLTRNDVYRAQGRSKVAAGAAA

SEQ ID NO: 410093 - protein, 339 aa, unidentified
MALYGGLDLHGDNVYCALLDEQRRTVFAKRLPNDLPTILEALAPYRDRLRSLAVESTFNWYWLVDGLRAHAYPAVLANPARMRQNIGLKHADDRSDAEFLARQQAMGVLPEGYVYPPEVRSVRDLLRRRMKLVRARTGEWLSLQSRVARHSGRELDMGELRELEPGALEALLGNDPLVIMAAQTSFRHIAYLEREIAQIERTVLERVKDTTAYERLAAVPGIGRILAMTIALETGPIARFPGPGHYASYCRAVKTEHTSNGRKKGEGNAKSGNRYLAWAYVEAANFAVRHSPELRAWYQRKAAKTKRVVAIKAVANKLAKACFFLLRDGVEFDVKRLVG

SEQ ID NO: 410094 - protein, 368 aa, unidentified
MSTSIARTTYVGLDVHQERISVALYRPGAQQPDEDQIANSPEAVRRLVRRWKDPAAVRVCYEAGPTGYGLQRTFATLGVDCAVIAPALIPKRSGVRIKTDRRDARKLAELFRADLLTTIRIPPPEEEAVRDLIRAREDLGEDILRARHRLSKFLLRHDRVYREGKTRWTDQHLAWIRRQTFETAGLEDLIGHHLAIIEARLRQRELMDGAIDRIAVSEPYAAAVRRLCCLRGIKPLSALTLLVEVGDFRRFATAAHFMGFTGLVPSEASSGERHQRGSITKTGNAHLRRVLVEAAWAYRQKPALGARWRLRFADQPAELAAYAISAQQRLHARYWRMTNRGKLSTVATVAVARELAGFIWGVMTECWA

SEQ ID NO: 410095 - protein, 319 aa, unidentified
MTLIPVGVDIAKLKFDVAVLLPNQKYKTKKFANTPAGCREFIHWLARFGECHVCMEATGSYSTELATALSDGGYCVSLENPARIHAFSNTELTRNKTDKSDAALIARYCALHQPAQWHPAPLSQRQLTALVRHLKNLEEMRQMEENRLEAADEVITGSLKEHIATLDELIKETKKKIRQHIDDDPDLRKDKALLESIPGVGDVLSTSLLAFAGNLRRFSSSKALVAYAGLNPRRCESGMWKGKSRLSKVGSSELRSVLYMPAVVAGRCNEVVKDLMTRMGSRGKTGKEHVCAGMRKLLQLAYGVVKSGREFNAEIPLAG

SEQ ID NO: 410096 - protein, 320 aa, unidentified
MKESIYVGIDISKQTIDMLVYPTGESCDFTNDNIGIEKAIVWLQKITPTLIVMEATGGLELPLYIALEMAKYRIAVVNPRQVRDFAKATGRLAKTDKLDAGILAFYAATLKPEPRPFPEQALRELKARVVRRQQIVDMISTEKNRLSSSQDEITKAEIKAHIDWLKSQLEAVNKDITKRLDANPVWQEKAKLLKSVPGVGPVLASTLIAQLPELGQTNRCEAAALVGVAPMNHDSGSHKGQRSIMGGRCRIRGPLYMGTLSAVRYNPVIRDFFHRLIADGKATRVALIACMRKLLSILNAMVKHNTYWKNPILINDPVFA

SEQ ID NO: 410097 - protein, 354 aa, unidentified
MTKVKQLSFEGETIYCGVDVHKTNWKVNARMNGLEIAAFSQDPDPLLLKSHFENKYPGAGLKVVYEAGFCGFGIQRSLAMLGADCIVVNAADVPVSDKDRKRKDDRRDARKLSTELAGGKLRPIYVPDKLMEHTRSLVRQRYRLAKDQARCINRIKHLMLSNSIRTDDLSDRISLKYIKKLQQLALESPALKMTLDFALEQYLQTRAILKKITTTIRKISKEEPYASVQRVLQSIDGIGLISGMVIQTEIIDIHRFKRLDSLCDYAGFVPDIYSSNDRMVIKGITPRANEFLRGIIVECSWILIRKDPAMLMKYNEYRHRMNANKAIIRIGKHLLSRIRYLWQNGQTYQRGIIG

SEQ ID NO: 410098 - protein, 349 aa, unidentified
MDRYIGLDVHAASTTIAVVGPSGKRVKEQVVETNGKALIEMLKLIPGQRHVCLEEGTQAEWLHEILKPHAEEVVVAKVESSRGAKSDRRDAFALAELLRTDGVTTRVFKDVGSFGALREACRVHTMVTSDVVRTKNRIKSMFRSRGIPTDSSVYSKRERSAWLKKLPTNKRVPAQALYDELDHQEELKDRCEEHLVREARRHAFCRKLETCPGFGPIRAAQLMAITITPQRFRTKRQFWSYCGLGIVMRSSSDWVRGVDNKWVRAKVATTRGLNFNHNHLAKHVLKAAATTVVAQKTSPLYADYQRLLDAGTKPNLAKLTIARRIAAIALAMWKRGEEYDPTKISKLVS

SEQ ID NO: 410099 - protein, 341 aa, unidentified
MTIKVSGLDIAKDVFQVNCVNEMGEVVIRRRLRRSQVIGFFESLPPCLVGMEACATAHYWARELVALGHDVRLMPPRFVKPFVKSQKNDAADAEAICEAVQRPTMRFVPIKSTEQQAALLLHRTRDLLIRQRSSLISSIRAHFAEFGIVTNHRIRDIERLLRLLTDSTTRLPMLAREMLEVLAAQLRDVAARVSAVEAKLLAWHRSSEVSRRLATIPGVGPITASAIAATVVDANQFSSGRQFAAWLGLVPQQRSSGGKERLGGISKRGDGYLRRLLIHGARAIVGWRKRSARTTDYWIGGLLNRRHMNVATVALANKSARVAWALMKYECEYDHRRARAA

SEQ ID NO: 410100 - protein, 344 aa, unidentified
MTYYAGLDVSLRSINICVIDDQGELLAESKTDAEVADIVAFLDELEIEITEIGLEAGTLTQYLTYGLQFAGFEVVCMEARQVKAALSAMRNKTDKHDARGIAQLLRSGWYSRVHIKSMESHRVRALLTSRKAVLSKCIDLEQEIRGIFKVFGIRLPPRLGHGSFDPHVRPLIETDEVLSQSLLPMLDARLVLYRTFRELDNRTRKLAHSDAICLRLMSAPGVGFVTALTFKAGVDDPTRFRRSRTVAAHFGLTPRRFQSGELDLEGHISRCGDAGVRSTLYTAANALLTRSSKWSPLKAWGMKLAKTRGHKKAVIAVARKLAVILHRMWIDDTQFRWSTEAARS

SEQ ID NO: 410101 - protein, 346 aa, unidentified
MEISTYVGFDVSKSSIAATAVDPLGHRRRQERLGTSDEEIRRFLEDLPGPIQVVLEACNVWEHIYDAAAATGAQVLLANPFQTKLVSKTTLKTDRVDSEKLAKLARLQAIPEAYVPTPEQRALRKLVRERVFYTRLWTGVANHVYAVLLQKGISFRPGLLQRRTLRHSVADPRFPEIERGLQELTSIEEITHSLDRAIRDAYEASTEAQLLATIPGVGKFTSVALVAFLCPIERFSSLDAVVKYCGLCPSVHQSATTSYNGPLVWDANHLLKWVLVEAQWNVRRHEGKGDVYRVGHRVARRKGMGTGAVAAARKLVRITASVLRRRSPYQPHAPESSSRQRPIAAS

SEQ ID NO: 410102 - protein, 315 aa, unidentified
MTIIAEVFVGIDVSKDSLDVAVLGQKYVEQVENSKKGIASLVGKLRQISPTLIVVEATGGYEEALVLGLFEAGLPVALVSPQRVRQYARARGILAKTDEIDAHNLADFGKNIRPRLFVAKTEDGRRLSGLITRRRQVEEMLKSEKNRRRTVNPELLSSIETIVACLQAESSRLDDEIREFLETHADFKEQEKLLRSAKSVGLITAATLLAELPELGKLDRKQIAALVGVAPMNQDSGKRRGYRKTKGGRPDVRSVLYMSTLNGIQFNPLIKSQYEHLLARGKVKKVAITACMRKFLTILNAMVRDQQPFRMPKAA

SEQ ID NO: 410103 - protein, 318 aa, unidentified
MKNKMNQSINVGVDTGKYQLDIYLRPLDIYFTVSNDEKGIKEAIQTIKKYSIERIVIEATGRLEMPFIMACAKAKLPFVIANPIHIKRFAGAIGQRAKTDKLDAQLIAHYGEVIKPNLSQLKPDAMQTMSDLVARRNQLLVMQTMEKNRLQILPKELAMTIKPILTAFKHQITKIEKKLIALIESCPDYQAKNTILQSMTGIGKIASASIISNLPELGYMTSKQASSLVGVAPMNRESGRYKGQRKIQGGRHQVRTVLYMAMMSAIQSNPVFKSMYQRLVAAGKPKKVAIIACIRKMVVILNSMLRDGVMWEAPKAKN

SEQ ID NO: 410104 - protein, 315 aa, unidentified
METGPIYVGIDVSKAQLDVAERPAGERVVIPHTEEGIATLVEQLRARRPACVVLEATGGLQVPLASALAVAGIPVAVVNPRQVRDFARATGQLAKTDAIDAQTLARFAEAVRPTPRPLPDEATQAFSALLTRRRQLIEMLVAEQNRMQRASRPIQRQIQAHLTWLKRQLAALDEDLTHQIQSTPLWREHEDLLRSVPGIGPVVSRTLLAELPELGTLTHKQIAALVGVAPLNRDSGTLRGRRVIWGGRAVVRGVLYMSAVVAARHNPVINAFYQRLRAAGKAPNVALVACMHKLLTILNAIVKHRTPWRLAAQGT

SEQ ID NO: 410105 - protein, 370 aa, unidentified
MSYFSTLSVGLDVHKESIAVAYASEARDAEVVFWGRIGTRQSDIDKLIRTLTSNATQLVFVYEAGPCGYWLYRYLSRKKLHCWVVAPSLVPKTAGDRVKTDRRDATQLARLMRSGDLTPVYVPTVEDEAIRDLTRAREDAIRDRKAAKNRLKAFLLRQDIRYEGRATWGPAHLRWLAEVVCPTPAQQIVFQEDVRAVAEHDERLQRLETELREQVQGWRLAPIVQALQAMRGVQFTVAVTLIAELGDLTRFENPRQLMSYLGLTPSEYSSGERRRQGTITKAGNTFARRALIEGAWAYRYPAKVSRHLQLRSENLPQAIQTIGWKAQVRLCQRFRHLMARGKHANQVAVAIAREMAAFIWAIAREVPIAR

SEQ ID NO: 410106 - protein, 475 aa, unidentified
MNLKGTKKKNQVSNVNIFEQQELLKKIEVVRENLTASTWRELETKGKFDKNAKLSFICDDMLILGCDVGSETHYLRAIDTRGKELSKSAFSFSNNADGFSKAKEWAVKIAAEYDKKQIVLGLEPTGHYWFCLATWMISNGLSVVQVNPYAVKQTKELEDNSQLKDDTKDPKLIANLVKDGNFGMPYLPEQLYADLRRLSMFRDQLNEDRIRSINRLHRELKIYFPEYKEALGKTEGTFSLELLKQAPFPDDLAALKEDGIRQIWHNAKLRGRGYSRAGEILEYAKASVGLREGKETGKLVVQWFVQKILELDAELALIEAQINQKCLEIPHTDKVLEICGIGENTLSGMMAEMGDISRVDDVKEIQKLSGLGLVASSSGKHKGETKISHRGRKRLRYWLFQAAKSAVAHAEEFKELHVYYTTREKNPLKKMQSLIAIACKLLRIIFTILKKGIKYDPRKMLKDIQRKSRRESLVA

SEQ ID NO: 410107 - protein, 341 aa, unidentified
MNTTPQPTTSSLVSSTAHLGFDVSKDTLDACLLIENKRHEKQFANDLAGHRQLLRWAQSTAKESACHFCLEATGPYSQSVALFLADKEQKVSVINPARIKYFGLAQNQGNKTDKADARLIAHYCQRQSPPPWRLATPEVRLLQEMVRRLHALSDLAAQEKNRAQAPGQGKALMASSKRVVASLEKEVLRLKREVRAHVKAHENLQRDSKLLQSVPGIGEITAWDILAEMPAVEEFDSAQSVAAYAGLAPREQRSGSSVRKATTLSKRGNSRLRKAFYFPAVTAMQWNPLVRAHYERLREKGKPKMVALAACMRKLLMICYGVLKHQKPFDPQWMLQPAGTG

SEQ ID NO: 410108 - protein, 350 aa, unidentified
MFIIGCDFHSRFQQIAMLDPTTGEVIERRLEHENGEAKTFYSALSSPARVGMEATCDVQWFERMLREYHHELWIGDAAEIRAAMVRKQKTDSRDALHILDLLITNRFPRIWVPSPAERDLRQMLRHRHKLIRFRTSVMNQLHALAMGQGLCRRKKLWAKAGRKELEGLVLDPWARLRREDLLKLLDQLDPWIDKLDEAVIQAAESRPQAICLMQQAGVGPVTALAFVLTIGPVSRFAHSKKVVSYLGLNPSEDSSAGRQRLGAISKQGNPMMRYLLVEAAQTASRLDPELRRDYQRLKFRRGSGVAKVAIARKLAVRLYWKLREAAQPVPSARMQGSPASPVVGESLSPN

SEQ ID NO: 410109 - protein, 437 aa, unidentified
MEEVTDEPLHRDRVCGIDIGKAGLVATIRVPSDKDPARRAAETRSFGTTKKEVLALADWLRCWQVPAVVMEATGDYWKGPFYRLEAEGLECVLADAKQVRHLPGRPKHDPGDSRWLAACFERGAVTSCFVATPEFRVIRLHTRYRRDLTEERTREKQRAEKLLESAAVKLSSVVTDLHGATGRDIMNHLIAGERSPRALAQLARARARRKIAQLEEALEGAEFFTAEHAALLAAMLERIDRVNAEIARLTEVTERLLAPYEEQLQQAESMPGWGRRTAQDAIAETGVDMSRFPTGAHLASWAGRTPLDNQSGKRKGKAKSKKGNRYLSGLLGETAVAAGKTQTREGARYRRLSRRRGKAKAQVALGNTQLKVYHKLLSSPGTRYTDLGPDYYERQASTRRQIAHHVGKLGALGFEVTLCRLPEPDPDPRPAASTQAA

SEQ ID NO: 410110 - protein, 340 aa, unidentified
MKKEVKFYLGMDVSKLWIDITVMCVLNHIKQATITERFDNDQAGMKALGKWLKKHKVSFDENSLLVIENTGVYHRLVWEYCSAQGLPLHIGNATHIKWSFGIARGKNDKIDSQRLCAYAFKNADELKATPVLNPVFIKLKDMMTARSRLLSQKNSIKVYLGEMKLSNSKETQLIIEEAHKAALEGIKQSIKIVEEQIHQIMGQDAAIKNNYDLLISVPGIGHLTAVYIICCTNNFICKITGKQLASYAGVAPFGNTSGTSIKGRDKVHKMANKDLKKLLHMGAISAITHYPEFKDYYERKVKEGKHEQSVINAVRSKIALRAVAVINNQEKYVNNYKKAA

SEQ ID NO: 410111 - protein, 352 aa, unidentified
MDRYVGLDAHSTSCTVGVMGPSGKRLKSMVVETNGAALVEAVKSIHGRVHLCLEEGAQSAWLHELLSPHVEELVVAVAPESKGPKDDLRDAWARAEELRTGSIRTRVYKAPLHLAALRNAVRGYGFAVRDAVRAMCRLRSVFLSRGVAVNDGIYNPKGRVKWLGELTQPHRRLAEWLGRQLDQLVPLRDEAEEWLLEEAKTHPVIRTLATAPGMGPIRTAQVVAITASPHRFRTRRQYWSYCGFGIVTRSSSDWVQGKDGRWQRSQVQQTRGLTRKRHPLLKAVFKGAATTVITQLPDHPLHKDYERMLAAGIKPNLAKLTLARKIAATVLSMWKHQEVYDPQRQRAVSDKA

SEQ ID NO: 410112 - protein, 467 aa, unidentified
MAARKQKHRRMSAQVVEDEDYQLRYEVVAGIDVAKESAVVCIRMPPAAGRKHRTSHLQTVPATVPAIGELAAELTAAGVQMVSMEATSDYWRIWFAVLEEAGLAVQLVSSSQARNLPGRPKTDKEDARWIARLTEMGMLRSSFVPPPEIRALRVYTRHIWDLTADRTRYWQRLEKLLEDALCKLTSVVSRLAGHQTARAVIEAMIEGERDPRALAALGQGRMRNGKLPALAEALSGMRFGPQHAHAAASLLRAIDLLDAELRDLQERVTAHLAAIPGSWGVDADGVTGPEAGRAADAPALPAAERLDEIPGLGKEAAAALIAEIGLDMSRFPTPQALVSWAGLTPTARQSGPRKGRGKKGHGNTYAKRICVLAAYAAANTDTFLGERFRRLSSRPGGGGRKKAGCAVGRSILIIVWHLLSDPAARYRDLGSGWHARHTDRSRKARNARRQLEALGYDVIITLREDAA

SEQ ID NO: 410113 - protein, 350 aa, unidentified
MDRYIGLDAHASSCTVATMGPSGRRLHTQVVETNAGALIQVLRSIPRDRHLCLEEGTHASWLYEVLSPHVEEIVVAAVRESRGPKSDKVDAFGLAEQLRIGAVKRKVYKKRGAFGPLKHRAKAYTLLVADSVRVQNRIKSLFRSRGVAVAGKGVLSATRREEWLSKLPAAACPLAELLLLEHDGLLELRKRAQKEMLAEARRHRVYGIVKSCPGLGEVRTAQLLPIVVTPYRFANKRSFWAYCGLGIVMRSSSDWVRTQSGEWIRAPIQQTRGLNRNSNRTLKGIFKGAATTVIGQAKDEPLYRHYLQLLDGGTKPNLAKLTLARQVASIMLAVWRNEEVYDPERVGQAI

SEQ ID NO: 410114 - protein, 383 aa, unidentified
MLRAPPGEGGAGGTSRSRKVWTTVQIWRPAGFFAVRNTNGRKGSTPVCNQVLGPDPTNMMEVGMDDKRVVGVDIGKRWLDVSREGAARIERLPNKATAIETFVGSLDPAIDLVVFERTGGYERVLEAALARAGIAWAVVHSPRVQAFRIAQGVKAKTDSLDAQLLRAFGRDRLNAGDLRFARLNDVTLDALMARRRQLNALLHAEQCRHETAAIDVVRVSIERMTAQMQAELAAIEAELTKHESNDQLLGFKEEVLCGRIGVAQTTARALIAELPELGRVDRKEITALGSLAPRVHQSGTIQKRRGLAPGRTAVKAILFNPARAAMRFDPAIAGFRDRLRVRGKPGKVILVAVMRKLLVQLNAVLRDALAEEEARRTAAPAAA

SEQ ID NO: 410115 - protein, 364 aa, unidentified
MANQTVHVIGGVDTHKRTHYAAVIDEQGRRLADREFAANSGGYGALLAWMRSHGQIVAIGVESTGSFGATLTRFLLDAGEAVVEVNKPNRQARHMEGKSDRLDAEQIARSVLASTGVATPKSKSGPIEVIRTLRVARASAIRARTQAFNNLFGTMIAAPSPIRDELVDLTKRTFVNQCLQQEPETENLLELIEEPERLVLASVKLTLRDLARRWKILDAEVKALGRQIKALVSHVAPDLVELFGVSSELAGQFLVTVGDNTNRIRNEAAFAKLCGVSPKPASSGRTSGRHRLNRGGDRAANSALYIVAIVRLRHHQPTRDYVERRTAEGLSKREIIRCLKRYIAREVFAALPKPHDPPPAPQAA

SEQ ID NO: 410116 - protein, 348 aa, unidentified
MEHYAGIDVSLECSSVCIVDASGKIVREGKVASEPGALIVWFGSLKLSVERIGLEAGPLSQWLYAGMREAGLAVELLETRHVHDAFKAMPVKSDRNDARGIAQLMRLGWFRPVHCKSMAAQETRAVLTARKLVQSKLRDVENSLRGILRGFGLKVGKTTARSFAARIRELVAGHPSLEAIAQALLAVHAVLLREFNGFEKHVRAMARSNPRAKLLMTTPAVGPIVALTYACAIDDPVRFKSSKAAGPHFGLTPRKYQSGQTDITGRISKIGDAAVREALYQSAHVMLTKPVKGCPELKSWAMRIARRAGMRKAKVALARKLAVIMHRMLADAKPFNPAAKATTMAAAA

SEQ ID NO: 410117 - protein, 328 aa, unidentified
MKYLGMDVSKENLDNCLLRDAVDTKRKTRKFANSPSGLADFLSFVEKEGIRPDELHVIMEGTGVYHQLAAETLCDAGITVSIVNPAHVKNFARAMAVRTKNDTKDSFVLARYGALLKPAPWIPPPPAARELQAYITREDAIKKDIIRERNRKEKSVIGHALDDVLTSIDETIEFLNAQLIAITKKITSHINKHPDLKEDMKLLISIPGVGPETGHHMLAVMHTHQFRSAEQLAAYLGLVPVERQSGTSLHAQPRLSKAGPKTMRAALYMPAVSALQWNPHIRALKERLAAKGKTPMAIVGAAMRKLVHLCFGVLKTRKKYSPEHVQLA

SEQ ID NO: 410118 - protein, 443 aa, unidentified
MSKKQKIHLRGERGQAFADLLRGVSAEHLMCVSIDVSKYFHVAMVHNGLGEIVLRPFDVDIYQSGFERLFQAIEQAKVKTQAQVVLVGMEPTSHYFENLARHLLSCNQSVKLINSFSVKQNREQQLMQREKSDQIDVAAIGDLLRRGEGTPYQPAAGVYLQLQQLDRVRLSKVKIASMLKNQVIAHLDRIYPGLLLLDESARKRYTPLFATDFWLCQTLQDLIRVCPNPHELVKLAPDELVQAFHAQGRRLGPAAATKIIAHARTILLPDPELAAIRCELLQHDLDLLANVQKLISQLEQRLTDLVAQTPYLVWAKIKGLSMVQAASLAAAIGDPSHYSDAAQIFRRSGLVSDRNDSGNRQRKGKGSHVLKTGDVYLRRALMNAVSTLLLHQPALTHFSKRLQITKPAGVARVAAARKTIGILWAVLRDQSSNTLIACKGAEM

SEQ ID NO: 410119 - protein, 323 aa, unidentified
MNKDTNYYGIDISKDVFDVMDQNGVHYQFKNAEKGFKNFLKILTKESHCVMEATGYYHYQLAYFLLENNIRVSVENPLSVKRFIQMKLSKIKTDKSDAKMICEYAQNVELKLWKGNSKDQQECLQIIRMLSVYSKQSTALKNKIHGEKTLGNTKTCVVKSINRSLKSIKKEVDLLEEQLQEIVKKTHQDLLTRLESIPGLGRKTSLMLIVLTDGFERFETANALCSYSGLTPTIRQSGSSIKGRPRISKMGNPKLRNLLFMCSFTACKYNKACKAIYDRIVAKGKSKKLALIAVCNKLLKQAFAIAKSGLIYDETYRSTLVRN

SEQ ID NO: 410120 - protein, 340 aa, unidentified
MILGIDLGKNSCSVVGVDATGAIVTRRTMRRQTLIDYVTKLPACIVAMEACCGAHHLGRLFTGRGHEVRLMSPEYVRPYIKAQKNDDRDAEGIAEAASRPTMRFVDLKSQEQLDIQTLHRVRSRLVAERTNLINQLRAILLERGVIFPAGRRKLELGVDSMLAEDVKLLSSRVQQLVRELRAEWQELDTKIGALNTELIQLARNDAATRRLTTIPGIGVLNATALVAAVGNASSFAKARDLGAWLGLVPRQYSTGGKPRLLGISKRGNTYLRTLLIHGARASLPSLSKSDTPTGRWLKAMMERGVHRNVMVVALANKLARIAWAVLRKETGFDRSCPAVA

SEQ ID NO: 410121 - protein, 331 aa, unidentified
MKLSDVVVGLDVHLKNTQVTVMKINGEILKRERVSTTKAELRRCLESVPKGSKVALESVGFCWPWIDFLDELEFEVLLANPVKVKYRAEDVKTDRVDSKLLADLTRMNWLPTCYVPPSELRVLRNLLRHRAYRTKLSTGVKNKTKSEFRKRDVDLDVNLGTMKGRRAAFDLGVFEVNQNVELLEVMDRQTKEIEAMLERKYGDVKPVLLLMSIPGIGFISALTLYAEICDIKRFSNPEKLAHYAGLVPCVHQSGEHSFNGRETRGDAWLKWILIEVAWCHVRYCPDGHLAEVFKEAKRRKGNSRDAIKIVARKLVNVVWAVLTYEKEFMVK

SEQ ID NO: 410122 - protein, 341 aa, unidentified
MLIIGCDFHPTFQQIAFTDTETGEYGERRLHHPQEAEQFYRTLAEGKVRVGMEATGSFRWFRRLLSGLGHELWLGNPTQIRASAPRRQKTDKRDARQLLKLLLEERFPQIWLPTVAEEDLRQLLWHRCRLVRLRTKVSNQLDAIAKNEGLVGQRVGTQKGRRQLEALPLSGWYQQRRQDLLELLDQLEQRLAPLNQAVQQRVAERADTQRLMTHPGVGPVVALGYVLAIGDWQRFPRGKYLASYLGLIPEEDSSSNKRRLGHITKQGNSLVRWLLVQAATKAQQSDPAWHRQYLRLARNKHHGVAKVAIARKLAIRLYWMLRSGQDYEQVRERGSHAGQSV

SEQ ID NO: 410123 - protein, 438 aa, unidentified
MSNKVIFNLDELFISVGIDVGADFSWMSIALPNQQFVGKPYKILHNSIDSLTTAVSKIKEAEELYSLESRIFLESTGIYHYPLFCYLRDKGFNCSVINPIITKNSTNINIRKVHNDRFDSKKAALVGLKPDLKVSLMPSDLALNCRNLCREYYDLMDNRSAYVNKLQGELRIAFPQYLGIFSKVTINTSLTLLETYTSPSAFLKADKQEIIDIIKSTARFGLTYAQNKYNAIIQAATDANQFGYIIDSNIKRIRLYISFIRKYDEEINSILESLHELVDANEDSDFVKQIHLIETFKGAGFLSSVSIMGEIGDFSAFSKPKQLFAYFGLDPAVKQSGKFEGTKVQMSKRGSAIARRVIHTLTLQSISISRNREAKNPVLREYYLKKCDSKPKLVAMGAVSHKVCNMIFAILRDNKPFKIIAPQEHIKQYNSAKCDIAA

SEQ ID NO: 410124 - protein, 383 aa, unidentified
MDTAATRTKKYSVEGPVLYMAFELGNKEWKLGFSVGLGQRPRVRTIPARDLERLQREIEVAKKRLGLAESARVVSCYEAGRDGFWLHRYLEEAGIENLVVDSSSIEVNRRFRRAKTDRMDVVKLVDQLMRYERGEKKVWHVVRVPGVEAEDRRQLHRELQELKAERTQHINRIKGLLAGQGVRLEIGSSFLERLSAIQLWDGRPIPEGLKTRLEREYGRLQFIQGQIHQLEAARVEAIRRSENPEVEKVRQLLRLKGIGVNSAWVNTMEFFAWRDFRNGKEVGGLAGLTPTSYQSGDSSRERGMSKAGNRHVRALAIEIAWGWLRYQPESDLSRWYQRRFGDGSSRVRRIGIVALARKLLIAQWRYLESGLIPQGAVLKTRLI

SEQ ID NO: 410125 - protein, 340 aa, unidentified
MKTLYGGIDLHAKNSVIVLVDDQDQVVYRKRLPNELEKILHHLAPYRATVQGLVVESTYNWYWLVDGLMEAGYTVHLANTVAIKQYTGLKHTDDDSDAYWLAHLLRLGILPTGYIYPKEARPLRDLLRKRSQLVRQHTMQVLSIQNVLTRNTGTSWSAKRIKQLTPADVQGLLPTAELALAVQSTLAILQCLDAQIQILERTILAKARLSPSFQPLLTVCGIGQILALTIMLETGDIRRFATVGQFASYCRCVGSTKLSNGKRKGQGNTKNGNKYLAWAFVEAAHFAVRYYPLVQRFHHRKQAKTHAIVASKAVAHTLARACYYVMRDQVPFNPQKAFAG

SEQ ID NO: 410126 - protein, 344 aa, unidentified
MEGYAGKQFVGIDLHRRRSVIVRTTSGGEVLESVRISNDVERLASVMTRAGEKPEVVLEATYGWYWAVDALQADGARVHLAHPLGVKAFEYRRVKNDVRAAADLADLLRLGRLPEAWIAPPATRELRELVRHRAKLVGLRSHCKAEVHAVLAKCGIQVLMSDLFGVAGTDLLDRVDLPAAYAARIASLRRVMDALDFEIDLFAGLVRGRLATEPGYTAVQNIPGIGPTLAAVFVAEIGEITRFPSASKLTCWAGLTPKHHESDTHVHRGRITKQGSRLVRWAAIESVSALGPNTGAGARRTRVADRRGRNVGKVAAARQQLGYVYYALRDGHVRALGQHPTWAA

SEQ ID NO: 410127 - protein, 459 aa, unidentified
MAPRKQKQARSKTTLPPQLAAANLHAAGIDVGAETHYVAVPPSDDPQPVRCFAAYTADLDALADWLAQCHITTVAMESTGVYWIPLFELLETRGFEVLLVDPQQVQKIRGRPKSDVHDSQWIQRLHTFGLLASAFRPADQVCVLRSYLRQRTMLLTYAGQHIQHMQKALTQMNSKLQHVVSDITGVTGFAILRAILAGERDPVKLAQLRDYRCKNDEATIARALEGNWRQEHLFALAQAVALYDVYHQQITACDRQIEAYLQTFADRSQGQPLPPAPRPRKQGRNQPAFPVREPLHRITGVDLSQIEGLDETTSLIILSEIGLDMSRWPTVKHFTSWLGLCPHQRVSGGKVLSRRTKSCANRAATALRLAAAALHHSQSALGAFFRRMKARLGAPKAITATAHKLARLIYTMLKHGTAYVRRGIDEYEQQYRDRVVKQMTRRAKALGYTLVKAPDGAAV

SEQ ID NO: 410128 - protein, 353 aa, unidentified
MAKRREKRSCRPVLLEANAAGIDIGAEEIYVAVPPDRCEESVRRFSSFTCDLHGLADWLIECRIRTVAMESTRVYWIPLFQILETRGIEVFLVNAQYLKSVPGRKSDVSDCQWIQYLHSVGLLKASFRPPGDICAIRSLWRHRGSLLQMAAEHIMHIQKSLSHMNLQIHHVLSDITGVSGQTILDAILAGEHDPMQLAQLCNWRVKSSRATVAKALEGDYRPEHIFTLKQSLDGYRYYQKLIAELDGEIERLMRLLPSASNGSKPIPSRTKHSAFQRHGNDPGFNLRNELYRIAGVDLTDIPGVSAVTAQVVLTEIGSDVSRFRNASAFASWLGLCPEKRVSGGKVCPAKRVR

SEQ ID NO: 410129 - protein, 372 aa, unidentified
MNHNTIYVGMDVHKENFSLCAYTLEAEKASYHQRTEADYKEVLKYLEFLRSIYGNDANFICGYEAGCLGYTLYHQLSANNVNCVILAPTTMLEQRSKKRIKTDKRDAEIIAKCLAQHNYSSVHIPTAKDEETKEFLRMRDDHKLALKKIKQQILAFCLRHSYRYDGKSHWTAAHLKWLRSLTPEALYKEILDEYLLTYQNLSDKLERMDKRIEELASLEEYREAVKKLCCFIGVRTHTALSVLVEVGDFKRFASAKNFASYLGLVPGENSSGENQTRLGITKAGNRHIRLLLTEASQCYARGKIGFKSKELKSRQSGNTPEIIAYADKANERLRRRYYKMILGSCKKHNVAKTAIARELACFMWGMMTDCIA

SEQ ID NO: 410130 - protein, 408 aa, unidentified
MEVLYPRCAGVDVHKKTVVACARIARGGEVDQYVRTFATTTGGLFELLDFLQEHGCTHVAMEASGVYWKPIWHMLEESFELVLGNASHIRNVPGRKTDVNDAMWLADLLAHGLIRASFVPPSPIQELRALTRTRKQLVREQVSHVQRIEKILEDANIKISSVMTDILGKSGRAMLHALIAGETDPTKLADLAFGKLKRKREELVKALHGRVTAHHRFMLRLHLDQIAALDSGITAIEREVSAQLEPFLAAVELIKTMPGVADTVAHVVIAEIGIDMSRFPDAAHLRSWAGMCSRNDESAGKRRSTRLRKGAPWLKTNLVQAAWAAVKVKGSYLRALFLRVKARRGAKKAIIAVAASMLTAIYHMLRDGVIYQDLGDAHFATIDKERTTKSLVTRLESLGYSVDLKATA

SEQ ID NO: 410131 - protein, 402 aa, unidentified
MRSIGLDVHKRFAEVAIIEGKGPPLRQSIGTTTAALRAFATTLRPEDQLVLEATMNTWAIADVLRTSGARVVISNPVRTRAIAEARVKTDKVDALTLAQLLAADFVPEVWAPDEQVRRLRREVAARAALVRQRTQARNRIHAVLHRCLEDAPVTDLFGVAGRTWLAGLALPEAERAQLEATLRVHEAIEAEITLADRRLAEAALADERVDRLMSLPGVGPTVALSLIALIGEVGRFRRPAKLVGYLGLDPRVHQSGERAAWTGSISRAGHAHARSLLVEAAHAAVGAPGPLRAFFRRVARRRGTQVALVAVARKLAVLVWYVLTTGERYRLERATLMRDKRNRLARTLGQSTPRRRPARGQPSLVVRREQELAMLTEAEATYKAGIAERIQRDAAAANGVRL

SEQ ID NO: 410132 - protein, 322 aa, unidentified
MQGKVSPEPSATRVYVGIDVCKARLDVFIHPVGQRLTVGNDPDGVKKLKRSLTAHNVALVVMEATGKYHRAAHRSLHAGGFSVAVVNPLRSRLFAEAAGALAKTDGLDARMLAILGESLDPAVTPPPSELLESLQELVHGRASAIAERTAVLNQLGASKTQCLIRELKRQLRAFDASIANLDAEIARLIQTDRDLARRLAILTSIPGVGDVTAIALIAGLQELGALSAKQVAMLAGLAPIACDTGETKGARHIKGGRAHVRRALYMAAVSASRCNPALSHFYQRLIASGKEAKVALTAVMRKLAILANTLVRENQTWTPNLP

SEQ ID NO: 410133 - protein, 360 aa, unidentified
MSDGSKGRPKITAGLDIGDRYSYLCLLDSESGEVIEEGRLRTTPEAFRRRFASELPMRIAIEAGTHSPWVSRVLEECAHEVLVANARKIRLIYANKRKTDEIDAENLARLARVDSKLLYPLKHRGEDSQAYIAIIRSREALVGSRTQLVNHVRGAVKSFGNRLPKCPASGFRNKAPEHIPEALWPALGPILEQIGSLTERIRQYDRKLQKISKEHYPETRHLRQVEGVGPLTALTFVLTLEDPYRFEKSRSVGAYLGLVPARDQSGDRDPQKRISKEGDQMLRKLLVSGAHYILGPFGSDSDLRRHGQKIATRGGKNSKKRAAVAVARKLCVLLHSLWVSGEVYEPLRNTHRREQREEAA

SEQ ID NO: 410134 - protein, 355 aa, unidentified
MLYLGIDQHARQITISLRDENGDVIEARQVSTKPEKIHDFFQRLTAERLKAGEKFVAVLEVCGFNEWLIRMLRDYRCEKVILIQPEQRTKRKTDRRDAAALSELLWVNRKRLLEGKAIRGLRQVEIASTTDQENRRLTTLRKEAGQTRTRIVNRIRQILRRHNLQWDMPTKLFPTLRAIAWVKKLVLPEIDRLDMQYLLADLEVIQQRLQELEMAITDRCGASQDARQLLSMPGVAGFTATALACRVGNVKRFPRSSSLANYWGLTPGCRNSGEKSQRLGNITKAGSSMARWLLAQVTINVLRKDARLREWFKRIKRKRGSKIARVAVMRKLATIIWHMLSKRKTYDECRAFGTA

SEQ ID NO: 410135 - protein, 357 aa, unidentified
MPYVAGVDAHKNTHSVVFLDSVGRVVKSLKISTNAAGYEEALALARSLDGEVVWGLESTGCYASALARVLIASGAVVYEVPGSFTKRHRQRSSRTGKSDPLDAQAIAEAVLREAHRLPRFEEVEEREALRLRYDQRDRLVQQRTEVINRLRSTALRLDRGDLPQDLLSAPGIRAIQDIIESAQASADTVIQALVDDLRFAIEDIVRINVRIKALEALLRPMVRRLAPELLELRGVSTIVAAGLIGHAGNLRNCRNADAFAMRAGTAPVECSSGRSTAVRVNRGGNRQLNRLLHVIALVQLSRPDHAGRRYYDRKRAEGKTARAALRALKRKLTVVVYYRIIAAAERFAVSAGQQSAA

SEQ ID NO: 410136 - protein, 336 aa, unidentified
MSHYCGIDLHSNNHVVVVIDERDKRVFDKRLNNDLSSTLEVLSPYQETLKGIAVESTFNWYWLVDGLQDHGFSVQLVNTAAVKQYDGLKYSGDHQDGFHLAHLMRLGILPTGYIYPKEQRAIRDLLRRRMSLVRSASTQLISVQSQIWRSTGMRIPSGQLRKLEFIPPHMDKYTLQAVHAGLMVYQAIQQEISGLEKSAFEAIKLTQSFKILQTITGIGKILGLMIMLETGDIHRFAGAGNFASYCRCVDSSRTSNGKKKGVGNAKAGNKYLSWAFSEAAHFAVRFEPLAQRFYERKKAKTNGIIAIRAVARKLARATWMMLKHQVPYDAKLMFPN

SEQ ID NO: 410137 - protein, 330 aa, unidentified
MKKVFIGIDVSKDWIDYAVREAGLQDSAPAKRVNNDLENITKLCQNLLKRHGQQNPHVVFEHTGNFGLLLSCVLESFAIPYSIVPALEIKLSLGITRGKSDVVDAGRIGDYAVINEHKLQPTKLPSEALLQIKELLTYRLQLVKISVQLKNSLKAHKIASSVSHLKNIVEDIEQKIEGYKVDIERIEKQIKELINKEPELKKNFGYITSVKGIGLMIAAYMIVTTHNFISFDNPRKFNCYAGIAPFEHTSGSSIRGKTQTSNLANKTVKTLLYSGAMSAANHDPQLKKYYQRKRAEGKEHQTVINAIACKLTSRAFATVKRQSNFVVLAI

SEQ ID NO: 410138 - protein, 357 aa, unidentified
MTKQPKQPTQTKQLMAGIDLHGNNLVIGIIDQDGQRLKCQKLACDLKLVAAFLAPYKAQLKSLAVESTYNWYWLVDGLQALGYPVKLANPAAIDQYSGIKHADDQNDAYFLADLQRLNILPTGYVYDAQLRPVRDLLRRRMSLVHQRTALLLSFKSLYTRTTGQAMPLCRLKAMTVAEAQTLYEHPANTLIATLQKEHLDQLDQSIEQIEKTVLASARELPCHAPLLTLPGVGRILGMTITMEIGELKRFPSPGDFASYSRTVDSKRMSNGKKKGDNNQKCGNKYLAWAFVEAANFAKRYDAPCRKWFDRKAAKTSTVLATKALACKLAKAAWHVIHDHSVYDPQRMFPGGEPKQTP

SEQ ID NO: 410139 - protein, 347 aa, unidentified
MFYSGIDLHKDNCFITTINDAGELVQQERVANVPEALLAYFARLGSEHQAVVESTSGWYWLNDLLEDHGIDLVLAHAKYLKAISYAKVKTDKVDSHTLATLLRMKLIPQAHKISRELRDIRDVMRGRLRFVQRRTRCIVSVHSIARKFNCDDLIAIEQQTIPDVLPEPYRLQMQLLYQHIALLHEHILTLEQSLHGVLIPNDDIQRLLWVPGIGKTTAFTIYLEIDGIERFSSDKHFVSYCRLVPGAHNSNRTLRQKSGSKDGNKYLRMAFSDCAVRAIQYYPEIRAFYTRMLRRTNERVARAIVAKELARIVYYILKNKSNYRGFKGQPISRVKALQWPRLASPYA

SEQ ID NO: 410140 - protein, 344 aa, unidentified
MNYYAGIDVSLELSSVCIVDATGEIVKEAKVETHPDALVKFIKAFGLPLTVIGLEAGPLSQWLYAGLTKAGFVTSLMETRHVKAALSATTVKTDRRDARGIAQLLRMGWFRPVHAKSAGSQEVRALLVARKQIQHKLKDIERSLRGILRGFGLKVGKVTDKTFEARIRELVTGHPMLEQIAEAMLAARAALLEQFKKLHKAVLKIVRHDEICRRFMTTPSVGAIVAITYKSALDDPGRIKKSRNAGPLFGLTPKRYQSGETDITGGISRVGDEMVRTALYEAANVLLSRVTRFSALKRWGLEVAKRRGLKRAKVAVARKLAVILHRMWIDGSTFRWTKTQAAYA

SEQ ID NO: 410141 - protein, 336 aa, unidentified
MSELATVGIDLAKSVFQIHGVDENGRVLVRRQLRRGQLLAFFQKRPRCLIGMEACAGSHDWGRRLQEMGHDVRLMPPSYVKPYVKRGKTDAADAAAICEAVTRPSMRFVAIKSEACSSVLVLHRTRDFLVRQRTQIGNAIRAHMTEFGIVVAKGAQNVDRLREHLNQLPEVARMPVSVLFDQLTETDKRIERLTDEIEVAHEQDETSQRLATIPGVGMLSATIIAATTPDVDNFDCARDYAAWLGLTPKPHSTGGKQKVGRISKMGNRYIRRLLYLGAMAQIMLRCRLKREPGSDWLSSMLIRKKTKVVAIALAHRMARTIFAVLRDGSRYEPQAA

SEQ ID NO: 410142 - protein, 346 aa, unidentified
MEQISRIGMDSSKHVFQLHGLDAGEKVVLRKKLRRKEMIAFYQKLPPTVIAIEACGSSHHWARLLQSFGHEVKLIPPQLSKPYVKRGKNDAADAEALCEAMSRPTMRFVPVKTAEQQAALMLVGVRDRLIRNRTQLSNALRGYAAEFGLTAAKGMAHLGPLLERIRADDSLPALARELFAAQAEEYQQLQAQIDAVDAKLAAWHKTNECSRRLAKIPGVGPIGAALLQMKTPAPKLFRSGRQFAAWIGLTPRDHSTAGKVRLGVITRAGDEALRSVLVSGATAVIQHVRRGGRAEPWIVELLKRKPPKLAAVALANKTARIAWKLMFTGETYSVKSPCAAVSAVAA

SEQ ID NO: 410143 - protein, 369 aa, unidentified
MGTSVALSSGPIHLGLDTGKNNMLVGILRPEEVSPDAEKIFNDEASVRRLIGRFADRSLLRVCYEAGPTGFGLYRLLASMGVACDVVAPSLIPKAPGDRVKTDRRDCRRLARLHRAGELVAIRVPTEAQEAVRDLCRARADMVADRTRTRHRLSKFLLRHDRIWRGGDAWTVKHEQWLVGQRFDDPALRATYGHYRGMLAARDAELVAAEADLAHWYTHGPFADAVARLAAYRGVAHLAGLTIASEVGDWRRFPTAHTFMGFTGLVPSEYSSGQSVHRGHITRAGNAHLRTQLVESAWAYQHRPNLGLTLRRRQQHLSPATLARSWTAQQRLCARFRRLSVRKTSRNVVTVAIARELAGFLWAEMIATD

SEQ ID NO: 410144 - protein, 316 aa, unidentified
MKNYIGIDISKSSIDVYDGQKSYKFENNEDGFQEVVALSENIKKTVFIFEPTGIYSYSLTEFCDKNSIDCVIVSPKVSRDFARSLKVRSKTDKIDAKVLYKYQSHVEPNMVKVPKINYHAIQVQEMLNSYELLKSTIQQHKNQLESISDTNKDAVRLAKRMIKVNEIEADKLFDKIEKLLFKDESIKRKYEAMLTIPAIGNKSALYLISFFIKYPLANAKELTALIGLDPVMKDSGTYRGKQRISKHGGQQIRNLLFLPTLSSLKCNDRIQLFYTRLTSNAKSKKLAVIAAMRKLVLMAFSIFKSEQNYQPLYVEN

SEQ ID NO: 410145 - protein, 407 aa, unidentified
MYSVGLDYHQNRSSLHILDPQGARFKALEVKGAWPKLLEVIDRQVPRPFTICFEASCGYGPLYDQLAQRAGSVQVAHPGELHTIFRSKKKHDRIDAAKIAKILYLDLVPRVHVPRTDIRQWRALIEFRRRLLGRRAALKVQLRALCRGLGLVDLPPGKKLFTHQGLAQLQALALPEVSALQRDLLLEQLASLQDQQQRVEQELARIAQQHPQMQLLMSIPGVGLRTAEAYLAYVDDVRRFRKVSQVGAYFGMVPCEDSSADTRRLGHITKDGPATVRWLICEAAWQGVRRSPTIRAYHARIMKQDPDRRKIALVATGHYLLRVMAAMLRSGELWRESVSQEDLAPLPQTTQQPGPTPKDRPRRLLHGGARVASQQSPILRVEESKLPQSFAGANVRETGEPSTTQPN

SEQ ID NO: 410146 - protein, 372 aa, unidentified
MDKDSELFVGLDTSKLKISVAVADGERNGEVRFFGDISAEPASVASMVAKLAKRGCKLHFCYEAGPTGYELYRQIIGLGHCCSVVAPSLIPRRPGDRVKTNRRDAVSLARLHRAGELTSVWVPDETHEAVRDLVRAREVANDGLRKARQHLQSFLLRHGRIYAGRAPWTRVHSRWLAVQSFEHPAQNIVLAEYIQAIEDAAVRLDRLTKQVSEAMSSWSMGPVVEAYQAMRGVALITAVTFVVEIGDVRRFDSAPQLMAYLGLVPSESSTGDRVRRGGITKAGNVRARRVLIEGAWTYRFPARVSRDIEARLDGLPRSVREIAWKAQIRLCARYRKLVMAGKTKTVAVTAIAREMAAFLWAIGQEVAPAKAA

SEQ ID NO: 410147 - protein, 438 aa, unidentified
MSPPEIRDYSKEATFRGGRLDFSLGNKPRAWRLADASCRLIIVVESTVLEYGNSPETKVAKHKPYQGVGMEQRANGREKVIYAGVDYHKNSFTVAYLDRLTGVLSTRKYKTEEIGKFKEHLKNFQENGYGVRAAVETLTGVTYFTEEIRNYVEELVYVNTNRFKHILKGVNSAKNDRIDAETIAIYHEMGLLPAVYIPTRKEKELRMKIKERDSYVDMRRGVMNRLHSILLEYGIKTNKRELTTKKGVERIKEETKEKVPPSMQEMIWRYIETIEYLTQKIRETEEDIKGFIENEEEFKERVELLKSIPGIGDIVAISFISSICDEKRFENGDKVAAYLGLVPRVRSSGDNERNGRITKKGNSRMRNKIVQAARALLNSKSDNSIKRFYKGLLKRGVDKKKALIATARKLVKVMFAVLRERRQFVDFVDDKCNLCVVG

SEQ ID NO: 410148 - protein, 334 aa, unidentified
MRQVSQVGVDVDSEKLVCMMQRVGQRMPLTTFANTAAGHKKFIRWATKRARSARVCLEAPGIYSLQFALALHDAKNVEVMVVNPRAIKDFARACMQRAKTDAVDAGGILEYLERMPFTAWQPPAPEILQFQAINRRIVQLQTELTREKNRGHASEFAGASGDAVANDIEVNIRHLERRIERMHDSGLQLVHGVPALATKLAHLVSAKAIGEASAMRILAEVLVLPVDLAAPQWVAHAGLDPRPYESGTSIHRPRRITKVGNRHLRAALYMPALVAIQHEPNVKAFYNKLVAAGKKPMQAVVAVMRKLLHAIWGMLKHDQDFDGNKFFRLAEKTA

SEQ ID NO: 410149 - protein, 360 aa, unidentified
MRIIGCDLHARQQTLAMLDTETGEVVNRTLPHEGQEVREFYSNLPRPVLVGIEAIGPMQWFLNLLEELKIECRVGDATKIRAAEPRKQKHDRRDAELILKLLVENRFPAIWMPGKELLDLRALLLHRHHWVRLRTQIQNALQAIALANGLRRGPSLWSYDGQAKIAFLPLPPHASYRRSMLQALYRQMEEEIAQLTAQVAEQAEQRVGARLLMTHPGVGPVTALATDVFLGDPQRFADGKALASYVGLIPREYSSGAHQRLGALTKQGSPFLRFLWNEAAAHAVRRDPELRRFYRRKLVQKGLGKSRVAAARKLGIRLWIMLRDRIDYEEFCRRGQKQCGAVCAGMLEVGNGANGHRPVG

SEQ ID NO: 410150 - protein, 429 aa, unidentified
MNEVMAGMDLHRNNVVCGLVDREGRRLVEQRLPCELETIVRWLEPYRERLRTIAVESTYNWYWLVDGLQERDFDVVLANPARIVQYSGLKHADDTSDAFFLAELLRLNILPTGHIYDRKLRPVRDLLRRRLLLVRQATAHKLSFKSLYARTTGQTLGLSQLERLTPEEGAKLFGSAAEQLIAREQLRLLGELKQSILTIEKSVVGVVKDWPNYRWLQSVPGVGKILGLTIALETGPIERFAGAGDYASYCRCVQSRRISNGKVKGANNGKNGNRYLAWAWVEAAQYARRYHGPCRRFFDRKAAQVNGALASKALACKLAKAAWHVMREGVAFDWARAFPGGVPGGEPERQVRAAGSAPTPIPPHRPAREKDPTSLTPLGDVSSRVSPGRGGHRTPPPPAQTQSKKKAKRLNPPTPIRTRSRTQRLMKRT

SEQ ID NO: 410151 - protein, 397 aa, unidentified
MYIVGIDIAKRKHEAAVIDGEGTVIIKPFSFTNNCSGYNRLLAMLAKAKLPLDEVSFAMEATGHYWLALFTRLQKEGFRVQVINPVQTNSIRSFYIRQAKTDPRDALLIAEVIRFGHFSESTLHPENIYELRELCRGRHAIVSMQADVKRKVVALLDQVFPEYETAFTNLFGDTSMAILQTCPTPKELSEMRLEELCHLIEVSSHKRFRMAKAQELQALARNSFGFAMAGDVFSTMIRLYAKHLVFLKQQVQEMDRKIAEIMKTLDTPITTITGIGPTLGAYILSEIGDISRFSSAAKLAAYAGIDPTMRQSGEYNGVRNRMSKRGSPYLRHAIWLAASSAVLHDPALKLYFQKKRDEGKPYMASVGHACRKMVSIIYAVMRDNKAYTPCIPNEISA

SEQ ID NO: 410152 - protein, 339 aa, unidentified
MTVKTVGLDLAKDVFQVHCVSATGRKSINKKIKRAKLLAFFETLPRCVVGMEACGSVHHWGRELRKLGHDVRLMPAAYVKPYVKRGKTDAADAEAICEAVRRPTMRFVEIKSEDQQAGLAIHRVRDLAVRQRTQVVNMIRSILREFGHILPTGIEAVSKFAREHGTDDQPGMPEIADGILSVMCHQLNGLNARIDGLTKLIEQHAWLDADARRLMRMPGVGPITASAIVATIGDARQFETARDLAAWLGLTPLNKSSGGKERLGRITKKGDRYIRKLLIVGMTSRALMARNKPEKADTWTAKLLDEKPFRLATVAMAKKSALIIWALLTKREEYRQPIA

SEQ ID NO: 410153 - protein, 392 aa, unidentified
MRISVGIDIAKEIHWVTAIDADGAVQIDRKLPNTPADIATLSDELTALRGTVRIGLDVIGGIAGLAQAMLAEAGFALVHVPGIAVNRARQGTVGGENKSDPRDARTIADQVRTRPDLRPIEPAAELDLEIRLLVSRRGDIVQAQTQRLSRMRDLLVGIFPGLEACLDLKAKGPLHLLTKFVTPAELRAAGKKRLVRHLQAAGGLPKVEDLADLVLIVAAEQTVAVPAEPMTARLIRELANEALASRTRLIELDRELETLLQRHPDAALIRSLPGMGAVLTAELIAEAGNLARFRSADALASAAGMAPVLRQSGRTRFLRRPNGGNKGLKRVFYQSAFCSLNHDDSRAFYERKRREGKRHHQAVIALARRRVNVLWAVLHSRTPFQSGFKTAP

SEQ ID NO: 410154 - protein, 353 aa, unidentified
MRKMQETIVRGKRIYIGLEDSKKTWRVCVRCERMIVHDTGMPAKYEVLRAYLMERYPECKITVMYEAGFQGFWLHDLLVKDGIGCVVTPPNKVSCPKDERVKTDKRDAQRLALNLETRNYTACHVPDQERREDRQISRTLSQIQKDIRAEKNRIRRFLEYHGLNGDMPAGVWKDTDYLRLKEMSLTHSLKVSLDAYLVVLDTLLKTENELKAELKALCKKERYKEPVRIKMSVPGVGSLSAIRFTLEWGPLDRFPTGKRFASFTGLTCREYSTGESIRRGHITGQSSEYIRAWLIECAWRAIRIDPALLDQFRRVWKNSGSRKKAIVAVARKLAIRMRAIELSGQTYCMSVAK

SEQ ID NO: 410155 - protein, 401 aa, unidentified
MSMLAVGIDISKSKSVAAILNQDGSMHTSPFEFHHTQPELDAFIKYILNSNQSATILMENTGHYHYPVLKAFREAGLPVCMVNAYQIKKFGDMDLRKAKTDKKDAVRIARYALEKSYSLVPYTSMEQKYEDLKFLARQYNQRMLTLKTNKVFLLNLLDETMPGITNILPLTTRTPETSLSVLFINRFKSYDRIKKMGKSRFLDAFEKIARKSRNRQTKTYGLVIYEAALRNITTRGENEYTLAAQDQCLELVCESQKAADSIIPKMQTLAETLPEYAVLRSMAGVGDRLGPLILAEIGDIRRFHSGKALNAYAGNDAPPYQSGTFESHNRHISKRGNAALRKYCFEVMQALKLTRPQNDPVYLFLLKKEQEGKPYNVAKMAGVNKFLRIYYARAMETLKQQ

SEQ ID NO: 410156 - protein, 415 aa, unidentified
MKSLYHRVAGLDVHRMLLVLTVLVELDDGSLSKHQRSFGSFKRDLRELVAWLHSLAVDLVVMESTGVYWKSVYAALEEAGITAHVVNAHHVKNVPGRKTDIADSEWLAQLGRFGLVKPSFIPPKDLRELRNVTRYRQKVGATYAAEKNRLHKMLDDAGIKLGAVVADIDGVSARAMVKGLIEGKPVEQLVGLAQGVMRKKVGTLELSLEGDLTPRHRLVLQAIEDHIQFLEGELAKLDAYLVDAMAPYAEYWQLLQTVPGIDQIAAVLILVEIGTDLSAFADAKHLASWAGLCPGNHESAGKRKTGKARKGNHAIRATLCEVANAARNTGSALHDKYQSLVGRRGHKKAIIAVAHTILRIVYILFTRREPYRDSGFDYEAAKVAKNAPRWIKALKKFGYWPNTKPVPKLALAPAC

SEQ ID NO: 410157 - protein, 350 aa, unidentified
MIIIGADYHPGFQQIACVDTDTGELQERRLEHREGAERFYRDLAAQGATVRVGMEASGHARWFERLLGELRFELWIGDAAEIRTKRVRKQKTDRQDAQLILQLLIEDRFPRVWVPNWENRDLRQLLWHRHRMVQARTRIMNQLQAVALNEGLRCKKRLWRDAGREQLESFALAPWASRRRRDLLELLDRLTPTIAELTQAIEQEVEKCPEAQRLQTHPGVGALTALAFVLIVGRADRFQCGKQIASYLGLVPLEESSGQRRRLGHITKQGNSLLRFLLVEAAQVTVRSDQEWRNKYFHLAMRRGRKIAKVAMARRLAVRMYWMWRKGWDYEQLKKFGSHAGEPGHRQGVK

SEQ ID NO: 410158 - protein, 401 aa, unidentified
MVSDFKKGRYNLMKIFVGIDIAKLNHFAAAISSDGEILLEPFKFTNDADGFQLLVSKLESFDKNSIIIGLESTAHYGDNLVRYLVAEFYQVCVLNPIKTCQMRKNNVRKTKTDKVDTFVIAKTLMMQDDLRFITFFDLDMMDLKALGRFRQKTIKQRTRLKIQLTTYVDQVFPEIQYFFKSGLHQNAVYALLKEAPSPKEIASMHMTHLANLLKVNSHGHFTKEQAKELRILAQKSVGANDSAISIQITQTIQQIELLDSQLEKIEAEMTDIMKFNDSVIMTIPGIGYINGGMILGEIGDIHRFSNPNKLLAFAGLDPSVYQSGNFQAKTTRMSKRGSRVLRYALVNAAWNVVRNNATFKAYYDAKRAEGRSHYNALGHCAGKLVRVIWKMLTDEVEFNLE

SEQ ID NO: 410159 - protein, 318 aa, unidentified
MNSHNKVETTEPVRYVSLDISKARLDYAIAGQKCRKVPNTAAGIATLITAIQPLPGVRVVCEATGGYERRLLEQLHHAQVPVCRLQPGRVRSFARAEGTLAKTDRIDVGVIYRYACSMHPRVEKPLLPEVTALRELMDYRRQLVAQSTQTGNRLETAGATLQALLLVQYEQQQAALAKADELIAQHLRAHPALQAKSARLQQVQGVGPVLATTLLAYLPELGEEDDKRMAALVGVAPFAHDSGESSKPRHARGGRVEVRNVLYMAAVSASQHNPVLAPFYARLRAAGKPANVCLLAVMRKLIVVLNRMLKDPNFTLVS

SEQ ID NO: 410160 - protein, 445 aa, unidentified
MFIQSQDDSQCCYSLFIKVVILMMKLKYSICCGLDVHKNVIVATIVTTNKDGISEYKQKSFSTINSDIQKFHIWLIKNNCYHVCMESTGKYWIPIFNYLENDIDVCLTHPKYVKAIKGKKTDKKDSKWIADLYKFDLVRCSFIPPKDFRQLRELSRYRFKLVCMKSSEKNRIQNCMTISNVGIASVLSDPFGKTATEIISYLLEHTADSMDEKAVRKLIKKGAKSKSDEIIEAIKGYTIETDQAKKLELARGHLEYLDDMITQTEVELYVRIKPYYEFVEFVSTMPGMTELSSTIVLAETGVDMDIFDDAKHLCSWCGLSPANNESAGKKKSVRIAKAGDYLKPMMVQCALAAIKSKKQPYFAIKYGRIKKRRGHKKAIIAIARMMMVCIYHMVSEKKPFTPTDYEELMDPQNHVESVVLNENNVFAYLESLGYDSSKLVKRNDN

SEQ ID NO: 410161 - protein, 436 aa, unidentified
MSKTFTKLTRPAMRKLAAGDKLNEHGITFERQANSDGVFSVNVMVDGQRIHRVIGRESDGTTRIEQRQFGAFKRDRRELADWVSSLRPDEVVMESTGIYWKSPYAALEAIGIRAKVVNARHVKNVPGRKTDVGDAHWLATLARAGLLRGSFVPSAKLRELRLIARQRQKLVGQLASEKNRLHKVLTDSGVRLGVVVSDLHGQSARAMVKAIIAGQSPQEVLKLASRRLKASREEIFDALQGDLTASHRFVLDELMRHIEEIEARIARFDTRLLAELESERDALALLQTIPGVDLIGAAMLLVEIGTDMESFGSADRLASWVGICPGNNESAGKRKSGHLRKGNLYVRRLLCEFAHAASRTTSVFKSKFQSLVVRRGHKRAIIAIGHKILRTIFFMLKRREHYRDSATDYEALSVQRNAPRWIKSLTKFGFINPANA

SEQ ID NO: 410162 - protein, 378 aa, unidentified
MGKHKLAFVAFDSAKEKHAVAIADDGRDGEVRYLGEIDNSPDAVRKLVAKLSRQYERLHLCYEAGPTGYGLHRQLTELGHVCDVIAPTMIPKRSGDRVKTNRRDSVTLVKLLRAGELRAIWVPDTVHEAVRDLTRAREVAMIDLKKKRQQLLSFLLRHCRIFPGGKNWTKMFERWLAKQTFNHPAQQIVFQDHLEVINAAQVRLAALEQQLREIVPTWTMAPVVAAYQALRGVSFLVAVTFVAEVGDVRRFATPQQLMAFLGLVPSERTTGDTVRRGSITKTGNHRARRVLIEGAWTYRFSARVGETLRGRLKDLPLSIRSIAWKAQVRLCARYRRLIANGKKTPVATTAIARELAAFLWAIGQQVAPRQQPQQQGSW

SEQ ID NO: 410163 - protein, 377 aa, unidentified
MCGSPSEGEVLSDVFTIPNNMEGFNILLEKIRDCTAPQGKIRVGLEVTGHYSYNPLGFLLDNGLPTYVLNPLRTNLYRKSLSLRKAKTDRVDARMIAAMLLSDAGLKPYTDTAYHNEELKSLTRYRFDKVKERAKLKSSVSRLVCILFPELEKRVSTLHIVSIYALLEEFPGAKQVANAHLTRLKTLLENTSKGHYKRDIAIAIRDAAKHSIGSQMPAKSLELQHTIRLIRELDSEIEDIETAIQNIMDELHSPITTIPGIGYRMGAMILAETGDFSRFDSPDKLLAYAGMSPSTNQSGKMDNCYAHMEKRGSRYLRYALYTATKYACLWDPTFAAYLAKKRAEGKHYNVAVSHAAKKLVRFIFALEKSRQSYRQPA

SEQ ID NO: 410164 - protein, 403 aa, unidentified
MNAVGIDVSKGKSTVTILQPGEQVILKPCDFYHTQTGINSLIKIIKELGGDTKVCMEHTGRYYEPVASWLTDAGLFVSAVNPILIKEFGDDSLRTPKTDKADAKKIARYTLDRWIKLKQYSPMDKTRNQLKTMNRQFGFYMDQKNAMKNNLIALLDQTFPGANAFFDSPARSDGSQKWVDFVYTYWHVDCVRCMSLKAFTEHYKKWCNRKGYNFSVTKAEKIYGASMDYIAVFPKDDNTKMLIHQAVEMLNCASKTVEALRIEMDRTASLLPEYPVVMAMNGVGPTLGPQLMAEIGDITRFTKREALTAFAGVDPGKNESGQYVQKSVRTSKKGSPHLRKTLFQIMDSLIKRKPVDDAVYAFMDKKRAQGKPFYVYMTAGANKFLRIYFGRVNEYLSQLSENE

SEQ ID NO: 410165 - protein, 422 aa, unidentified
MKTLLHEKFSAYISMDWADTKHDVRLQAADGGQCELSVIDHTPEAIERWVLDLHKRFPGLIAVAVELSKGPIIAALLKYDFVRIFPINPATVAQYRKTFVRSGAKDDPTDARWILELLLKHPEKFPQLEQQSPAMCSLASLTEHRRKLVEERVKVSNRLVSTLKEYYPLALELFHDHGTAVFCDFLMRWPTFEKIKRVQPERLQKFFNEHNLRKPQLNQARIEQISRAIPLTQDRGIIEPMSLYAVVLAEQLKVMLKAIKRFDTQIESVAATLADYSIFRSLPGAGPQLAPRLMTALGEQRDRFENASAVQKYAGVAPVMERSGKTKIVHWRYQCSTFIRQTFVEWAAQSINKSAWAKAYYDKQRAKGCSYQAALRALAFKWIRIVYRCWKTSTPYDEAAHIQNLKRRGSSLAGAFDQAKAV

SEQ ID NO: 410166 - protein, 347 aa, unidentified
MRFYTKQHNFYCGIDLHTTKMYLCILNQQGETVFHRNIKTRPDLFLHAVKPFREDLVVSAECMFAWYWLADLCEDHDIPFVLGHALYMRAIHGGKSKNDRIDSKKIAALLRGGLIPQAYVYPRNMRATRDLLRRRNHFMRKRAELFSHTQNTATQYNFQESLGRIAKPKNREGLLERFEIPCVQKSMAANLEMIATYDRVIGNLERDIVNSANNHDPVAFALLKTIPGIGKIIALNLLYEIENINRFPRVQDFASYCRLVKCLKESNGKIYGTAGRKIGNAHLRWAFSQAAQLFLKGNEQGKKYHQKLVNKHNKGKALSILAHKLGRAVYYMLKNQKPFTVNKFFNT

SEQ ID NO: 410167 - protein, 405 aa, unidentified
MDIVFGIDVSSRESSVCMLMDDTRKEFKISNDSFGFKELLKNLAVFSKHPQIIFEATGVYSRRLQKFLEDYGYDYVILNPLKAKKEMDQGLRHNKTDKTDAYNLARIQLQNRHKANKQEAEDYHRLRALSRSYEELTSDIVSAKNRLHRILQLTFPEIETVVSTPKNRNYWELVKLFPHCQTVREIEAEDIINKIKDFKGYGIKRAQKIAQGLKELANKAYPVAELDSPETSDVIYYAQRLIQLDQDRDERLKQMVDISKKLPNRDLEILTSIPGFAQTTAVRVLAELGDIRRFDNPNKIDAFIGIDPGRYQSGQMDSRLGITKHGNAIARKILYRAVGQIDNASKTNPCHIADYYENKKSSQSKGFKKIAIASVHKLIRTIYALIKNDQLYSYEVAKQNQRRKS

SEQ ID NO: 410168 - protein, 453 aa, unidentified
MEQEDIRLEQFRRLRKEIRGSEDYLIVGIDVGKDKHNAYLETPRGKTLYRRLIFENSREGFEKLMFQVQAIRVQQSLNQVVFGMEPTANYHKPLGEFLINQEHQVVLVSPEAVKQNRKLLDGRWDKHDGKDCANVADLIAQGKCLYYEYPLPALHDLRNLLSLKRKLKKLEQGLRLRIRNHLVAQYFPEMDQYCNWGEQEGLALVRWCLDPAVMARLSEAELLSQLHNQSRTLAQRRRLSALREKAPSSIGCRFGISVEFEGQSTVKLLKEVRQTISETEEKIEQVCLRFKEYPCLLSIPGFGPSLSAMVLGAIGNPWRFQNGAQVIKMVGLDLSASQSGKSQGPPSISKKGKAEIRYALYQAALVASSRDKHFVAYFTDQLRGREKEKGIKTKRRVKLAAKMLMIAWTMMKKQELFDPRYLSPQAEPINARKTMKTENRGIPEVQRGSDRGL

SEQ ID NO: 410169 - protein, 403 aa, unidentified
MTKRFAGLDWASRIHAVCVIDARGSVVLKFEVAHDAAGLAELRRRLKGAHVTAVAIERPSGMIVDALVEAGLQVVPIHPNVVKATRPRYRSHGGKSDASDAYLLADLLRTDGHRFSPLAPECDDIRALRALVRGRDDLVAIRVQLANQLRSLLQSFWPGATEVFADVDSPIGLAFIERYPTPESASRLGPRRMASFCAQHAYCGRRSPEELLERLHQAPAVALGEMETEAKGELALSMARVLARVVEQIRLLTSRIEHAVQASEDGRILMSFPRAGKVCAAQILSELGSVRERFDNVERLAAEAGVTPVTYESGKTKAVAFRWACNHRLRAALTCLADNSRHASVWAAAIYEKARSRGCDHPHAIRILARAWLRVIWRAWLDRKPYDIQRHTGAMLHLAAAGG

SEQ ID NO: 410170 - protein, 386 aa, unidentified
MQASNLYTPTVGHIGTIFVAIELSQKSWLVTLHSPDRDRVSRHKLEGGDHVGLLALLESVRQRAAHKLGTRPAVVSCYEAGYDGFWLHRLLSAAGITNYVFDPASIAVEQRSRRAKTDRIDGEQLLRTLMAYCRGEPRVVRIVRVPNADQEDARHATRERERLVKEQTGHVNRIKSLLRLQGLPVGNPRRRDWLTWLAEQRDWQGQAVPPRTMAELEREHARLMLVRKQLDELEKCAAPIQPTPAATEMARRQEMLLQLKALGPALSGTLTNEVFYKDFHNRRQVGAYVGLAPSPWRSGTINRDQGISKAGNPRARQAAVEFAWLWLRHQSGSALAQWFEQRTANTSKRGRRIAIVALARKLMVALWRYLTTGLVPEGAVLKAAKV

SEQ ID NO: 410171 - protein, 348 aa, unidentified
MAVAIVESTRPVTGGVDTHLDTHLAAALDANGGVLGVESFPATRAGYESLSSWLAGFGPIDRVGVEGTGAYGAGLARHLRSLGIGVIEVDRPNRQLRRAQGKSDTLDAIEAARAVLSGRATGVAKTADGNVEAMRALLIAKRSGREARITCLNQIRHLGFTAPDELRERFQSVPRTALAARAAALRPRPDRDAVLFATKLAMRSLGRRVLTIDDEIARLDAALAEFVTATAPGLLGLYGVGVDTAAILCVAAGDNPQRVRSEAAWAHLCGVAPLEATSGKVTRRHRLNRGGNRQANHALWRIVFTRLGSDARTRTYVARRLDEGLSRPEIIRSLKRYVARETYRHLPR

SEQ ID NO: 410172 - protein, 332 aa, unidentified
MVIIGCDLHSRYQVIAMLGTETGEITTRRLEHEGGEAERFYRGLEKPALIGIEATGYTQWFERLVGELGHELWVGDPAEIRARAVRRQKTDTRDAEHLLDLLVSKRFPRVWVPTPEERDIRQLLKHRDKLVKMQTSVRNQLHFLAMSQGVCRKRKLWSARGRQELEGLRLGPWASRRRQELVDLLDGLGPRLEELDRAVKAEALRRGEAARLMEQQGVGPVTALAFVLTVGPVERFANSRKLVSYLGLNPSEASSGGHQRLGHISKQGNEMMRWLLVEAGHTAARLDPELRRVYQRLKFRRGGRVAKVAIARRLAVRLYWSLRRYAAGSHVQ

SEQ ID NO: 410173 - protein, 444 aa, unidentified
MKTTKKREVGKLGIVHLNCCGIDIGSKFHMVAIGLADQDVYKFGVYTKDHEELIEFLQAKNVIHIAMESTGSYWQTLFSALQSAGFKVILVDGKQTKSLRKKTDIKDARAIYQLHTLGLLTGCFLPDQVTEKIRVYYRHRNNLIQESSRLTNRMQQAMRLMNIRLDNVLSDITGQSGRRIIESIISGQTDPITLSKLADKRVRKTSIEIQNSLQGHWKEEQIFVLKDCYEAFLQLQDRILQIDNEIKQILEEVPRHPVPPQGITKKSVRKNQINIGLEQLSYSYYGVDLFAIPSVSYNLVMTLISEIGLGISRFSTSKEFSSYLRLAPNNRVSGGRRISGRTPKGKSSLAIAFRNAANTITKQRSANPLLSFFQRKAVQKGRSAAITATARKLASIVWHMITHNQQYTPVQYETYSKQIKRKAISNIKRKMKRLGIAPQEFAPI

SEQ ID NO: 410174 - protein, 344 aa, unidentified
MSEQYVGRQIVGMDLHRRRSVLVRMSETGERLETVRIANDPEYLRAVMARAGEAPEVVLEATYGWYWAADTLAELGATVHLAHPLGVKMFGLRRVKNDERDAADLADLLRMGRLPEAWIAPPATRELRGWVRHRAKLVALRSCVKNQVHAVLAHAGVAVPMSDLFGPSGRTLLAAAPLVVESRSRVESLLRVITALDFEIDLYTQLVGGRLRTDPGYRAIQQIPGIGPVLAAVFVAEIGDITRFHRPTELASWAGLTPRHHESDTTVHRGRITKQGDRLVRWAAVEAVQRIPGHTRLGQVRDRVGERRGRNIGVVAAARELITLVFYGLRDHHLRCLPARARAA

SEQ ID NO: 410175 - protein, 347 aa, unidentified
MGYFAGLDVSLEETAICIVDDAGRIVREARAASEPETLAAFFGACGMTMDRIGLEACSLTAWLHAGLTEAGLPAICIEARQAKAAMGAMPNKTDRNDARGIAQIMRTGWYRAVHVKSPACRSWRALLTARRLVLNKRRDVENGIRALLREVGLKVGTPSRKVFPGRVRELAADDPVLASLAESLLGVVEVMTCEVERLTRRVLDEVKAEPTCRRLMTVPGVGPLTALAFRATIDQPGRFRKSRDVGAHLGLTPRRYQSGETDVQGRISRCGDELARTALYEAAHSLLIRSSKWSALRAWGMAVAKRRGMARARVAVARKLAVILHRMWADGSEFRWGRQAATPAAAA

SEQ ID NO: 410176 - protein, 373 aa, unidentified
MGDNTAFVGLDVHKETIAVAIAEDGRGGEVRFLGEIANSREAIRRLVTKLTKRHATLHFCYEAGPCGYGIHRHLTDIGHDCTLVAPSMTPARPGDRVKTDRRDAVLLARLHRAGELTAVWVPDEGHEAMRDLVRARTSAMENLRRARQQLSGFLLRHDRIFRTGRNWTKKHRVWLSKQRFEHPAHQIVLQEYIAAVDDAADRLARIEGQIQDLIPEWTMAPVVMAIQAMRGVSFVTAVTVVAEIGDMRRFNTPRELMSYLGLVPSEYSSGGRTARGGITKAGSKDARRVLIEGAWTYRHKAAVGPDNLARLDDLPKAVRDIAWKAQVRLCARYRRLAARGKAQTVVTTAIAREMAAFIWAIARHVQPVEPSFS

SEQ ID NO: 410177 - protein, 400 aa, unidentified
MIDIDAVGVFLGLDVGKSNHHGHGLTPAGKKVFDKTLPNGEPQLRAVFDKLKAKFGTVLVVVDQPASIGALPLTVARDTGCQVAYLPGLAMRRIADLYPGEAKTDARDAAVIADASRTMPHTLRSLELADEITAELTMLVGFDQDLAGEANRTSNRIRGLLTQFHPSLERVLGPRLDHPAITWLLERYGSPAALRKAGRRKLVEVIRPKAPRMAQRLVDDIFDALDEQTVVVPGTGTLDVIVPSLAKSLAAVHDQRRALEAQIEALLEAHPLSQVLTSMPGIGVRTAAVLLATIGDGSSFPSAAHLASYAGLAPATKSSGTSIHGEHAPRGGNRQLKRAMFLSAFAALHDPASRGYYDRCRARGKTHTQALLRLARHRISVLFAMLRDGTFYEPRTPRLA

SEQ ID NO: 410178 - protein, 340 aa, unidentified
MTPAEFFRIRTVAGATRARIARLEVSNDQWTYIGIDICKEKLDVYFSISQQTAQFENNFNGWKKLVTALRKTNNPFVLFEATGGYEKDLMKNLDEKQILFRMLNPRQVRDFAKSRNLAKTDTIDAKVIALFGMSNSDIIPQTLPSVNAQQLEELVTEQRQYIDLIAKIKTMMEHANADQRRRQLHVIETLQSELNEVEKQIKQLIKNAPEYRRKYEQMITVPGVGPKCCYTLLAYLKELGQLTNAQISALAGLAPMNCDSGKYRGTRHIRGGRGNVRKLLFMAAKSAVRFNPVIQEFYNRLKTAGKSYKVAITACMHKLLIILNAIVRTGKPWENRLAKI

SEQ ID NO: 410179 - protein, 430 aa, unidentified
MKSNTQNAKIEAITEKTLVLGIDVGSETHYARAFDYRGIEYSKKPFKFSNTEAGFVTFKEWILDLKEKHEKDKVVPGMEPTGHYWFNLGKFLQDNEMKPVLVNPHHVKKSKELDDNNPTKNDRKDPKVIAGLVREGRYMIPYLPDGVYADLRTASNIRFQLQAELTRIQNRISRWFNIYFPEYKTVYGRPDAKSGMLILKQAPLPEDILTLGIDGVNQIWRDAKMRAVGKARAKTLIEAAEHSVGSKEGAISARMEIRMLLEDYESRNIRLQEIMTLIEELVNQIPMAEKLLEIKGVGIKTVSGFLAEVGDISRFNNPKELQKLAGLALVENSSGKHKGRTTISRRGRKRLRYLLFEVAMSLVAKNPEFRELHTYYTTRRLNPLKKMQSLMAIAAKLIRVFYAMLTKGVDYDPKKMISDIKRPTVYLQAA

SEQ ID NO: 410180 - protein, 397 aa, unidentified
MIKYSVGIDIASKTFDATISVIDTQQKVVVKSSKSKIPNTASGFKEFVNWIEKNHKEKQVALVICMEATGVYYENCAMYLHQQGYHLSVILPNKAKKYMQSLGIKSKNDKIDAQGLAQMGAEQCLKQWNPFAEFYHTLRSLTRQHQSLQELKTNIGNQLHALEYTMYKPKVVIKQLKKSVALLDKQLIEMETAIKKHIQSDVIVFQKVENICNIKGVGLLTTAVIIAETNGFDLFENAKQLVSYAGYDAVENQSGKYFGKTRISKKGNSRIRRCLYMPAFGVVKYNQKVFADLFQRTFANHGIKMKSYVAVQKKILVTIYALWKKNEMYDNDFQQKQRAEIQEEEQVITSRHGSERDEKNSQTKRLATQGKHPVSDHSMIPLGKYKSKKLITEKLKK

SEQ ID NO: 410181 - protein, 340 aa, unidentified
MKLYCGIDLHSNNSYVVLLDETGKVVYKKRLPNDLEGIKAELMPYQAMIVGIVVESTYNWYWLVDGLRNAGYRIHLANPNRIQQYNGLKHTDDKTDAIWLAELLRLNILTEGYIYPKEQRGLRELLRRRMKLVKQQTMNVLGIQGMVTRYENIRLTARIVKCKPDEEEQLLQYVKDEDVKLAVKCQIKILRCILEEVTNLEKAILAKVEDSPAFIKLRGIPGIGPILSMLILLETGEISRFKNPGNYSSYCRCVKSERISNEKKKGENNRKNGNHYLSWAYVEAANYAIRFDKTIKNYYQRKMSKTNRIVAIKTVANKLTKACFFILRDGVEFDMKKIFV

SEQ ID NO: 410182 - protein, 329 aa, unidentified
MSALVCGLDVHKDSTYATILNDEGKIANQARMSNGKVLSYLEHYKVNRVAMESSTAIAPLFRRLASEGFEVLVSHPKKTRYIAEAKIKSDRVDSRAIAELARLDALPLAYVPDTETSRLREKVRRRAFLVRQRAKLKVKIKSVLTYEGIEPPSDSGLFTLRGVQWLHSLNLESIDSYLRIMSTFSREIKLLSKQLLGLAEEDEDVKLLMTIPGIGYYSALLVKSEIGDVSRFPFGERLCSYAGLVPSTRSSGRAVRHGGITKEGSRWLRWVMVQAAQTHVHRFDSTVTRMYNRVAERKSKRVALTAAAHKLLLVCYSVLRNKRPYYDQA

SEQ ID NO: 410183 - protein, 332 aa, unidentified
MILEPQNYSRVIGVDVASKKLDISDSAGQLKTIVANDEDAIVKEIASRIKNKSQTLVVCEGTGGYEDTLVDMMHEFGIAVAVVNPRQVRDFAKGHGFLEKTDKIDAAVIEKFGREVKVHPAKPPTDEEKHFRAIYRRRTQLRKLLQQEKNRLSRCSDDFVRQLVESSVNSTKTELKLVDRKIRELLQERAQTDPRIENWLSVEGVGVVTVAMLVCELREIGLLSRGAIAKLVGVAPFANQSGLGDKKRRPRGGRANARCVLYMAALSASQHNPKLKAFYVRLLKKGKPKKVALIAVARKLLLILNDMARYDRAWDADFSHETKNAAVLLSLN

SEQ ID NO: 410184 - protein, 386 aa, unidentified
MQKLNDLSRSLTSLEPDGTLIAVIEMSQSSWLVAGIVPGIERQPLKKIKVDESTLLKLLHRWREEAEKAGHRIKRISVAFEAGRDGFWLARWLRARDIEAHVIHASSVAVSREHRRAKTDRLDSELLKRAFLGWLRGERDHCKMVAIPTTKDEDAKRPNRERESLVGEQNRIVNRMKATLIRLGIRGFNPKLKKAAERLEGLRTPEGEPIPLNTLAELHRDMVRRRLVSDQIRQIENVRLEHLKQAPSDGPHAMVRLLARVIGVGIETADMLVQEVLSRNMRDRRAVARYAGLTGSPDESGTKRREKGLARSGNARVRRGMIQLAWRFLMFQKNSALAQWFQTRTKNARGTRKPMVVALARKLLIALWRFVREGVVPDGVVLRAAS

SEQ ID NO: 410185 - protein, 317 aa, unidentified
MIVIGVDVHKQSLTAVAVDEAGRALAEVTVAAAPELLGWSASLARERLWALEDCRQLTRALERTLVAAGEGLVRVPPKLMAPQRRAGRTRGKSDPIDALAVARAALREPRLDHPRPGEQRLRELKLLVDHRDDLIDERRRAQQRLRWHLHELDPEWAVPLGALDRGVWLDRLGRRLARLEQTAQVRIARELVGRCRSLTRMILDLDRELQTAAAQTAPALLALPGCGAISASKLLGEIGPIERFESDAQLARHAGVAPLEASSGKHRRHRLDRGGNRQLNCALHRIAITQGRVHAPARAYLERKQAEGRPDGKRSAA

SEQ ID NO: 410186 - protein, 367 aa, unidentified
MKQQHQDSEVTTIGLDLGERRHRFCALDGRGEVVEEGSLLNDRASLARLTARYPGALAVMEAGTHSPWVSRYLEGLGWEVIVSNPRKVRAIYQHERKSDQRDALMLARIGRMDRALLYPVRHGSEQAQQDLLRIKLRDSLVRARVALINSVRFSLKSLGYAVCNPSSERFHKVAMERLPERVQQMIAPSVQALAELSTRIAVLEREINVVARTKYPQTLWLQQVPGVGALTALYFVLKIEDPQRFENVRDVGAYAGLCPRRDQSGQSDPQLRISKRGDPYLRRLLVSAAQYILGPFGPQSALRAYGLMLAADGSARARKRAVVAVARKLAVLLLSLWKNRSHYEAFPHWQTIEDKRSGTIAMHRVEA

SEQ ID NO: 410187 - protein, 339 aa, unidentified
MWYSGIDQHKRDSVIATYGPDGPRVKQVRVVNTPLALAQYFADFPAPHKAVVESTGGWYWLADVLAPLGVELVLAHATRLQAISAAKVKTDQVDSDVLAQLLRADLIPVAHMIRPDQRGPRDLMRTRLRLVEKCVSAQNSIDRLLEKFNVATVAELEPLYQLQASCHTAQMDLLETQITTLERALHPHLIPNPDVQRLLWIPGLGKVNAFTLYTEIDGITRFPSARQFFSYCRLVPGANNSGGRTRHRSGSKAGNRYLKLAFSHAGIRAVQYYPEIRAFFKAKARRKPIRIARTLVALELARIVYQVLAKQEAFNGQFKTHPLSRRKHAQWPRRASPPV

SEQ ID NO: 410188 - protein, 342 aa, unidentified
MQHAAIDLGSKESQICIRQPDGTIVEERKLATRKLTELIKTWPASRVVMEASAEAFKIADAALAAGHQVRVVPGKLVRLLGVGDRGVKNDQRDARQLSQASWQTDVPSVHIPSAAARELKSICGARDVLVATQRNLSNNVRGWLRTQLWKIPGGTMVTLPERLRTHAEASQRELPEHIERQLTMLTQVTEQVQAANKQARRLATEHPVCRRLMTVPGVGPITSLRFVAAIDDPSRFPTAHRVQSYVGLTPGEHSSSQRERKTGITKAGPSELRRCLVQAAWAVMLSRRSHPMLEWVRQIAQRRSRPVAVVALARKLAGILFAIWRDGSTYQANQAVGRNALP

SEQ ID NO: 410189 - protein, 454 aa, unidentified
MSKNATKTKNIVEFPMINVNAAGIDVGDTQFAVAVPPGRDSACVKEFGAFTCDLKLISAWLKQCGIETVAMESTGVYWKPLFAVLVQDGFEVSLVNARHTKNVTGRKTDESDAMWIQKLHSCALLGSCFLPDDQTETLRTLVRFRKTLTQDSTRYILRMQKSLELMNIKTHTVISDITGKTGTAIIEAIIEGERKPEKFMPLVDRRIKADYDTLIKSLQANWRKEHLTTLKLSYEMYKIIQQKIIECEKEIEEALQQFMAAKNDGVIEPIKETEKKAVVKTKKKKTKNQPLIDTRGYIEKILGVDVIQIYGLSETCALEILAETGTDLSKWQTEDKFVGWLNLCPNNKKSGGKLISSTRLKKKPNLASQAFRTAANSVSRSDHWLGDFFRRMKTKGGNKYAIVATARKIAVIYYKMVRYKKHFNPVDLKQYQEKYKAAKIAYLERKLAQLKQVA

SEQ ID NO: 410190 - protein, 353 aa, unidentified
MNYYAGLDVSMKETFICVVDRDGNIILEGQVQTEPEEIASFLKQADVPIKKVAIESGSLTHWLVTELQKHKIPAICVDARHMSSMLAMKVNKTDTNDARGIANALRGGYVREVNIKSQYHIEVGILLQSRGVLVQERTKLKNAIRGFLKAFGIKVSTSGFTSFIKEVRKSIEKRSIEVKKAIEALLNAIEAINEEIKGLEERVQQIGKDNKDAQLLMTIPGVGILTALHFVVAIGDYTRFNDSRKVAAYLGLTPRQYSSGESQRLGRISKCGSRETRSMLVEAATVMLTRTRSWCKPKAWAMKLQRKKGFKKATVALGRKLAVIMHRMLVTKEPFYFGEEPGKTTSKKLEKAA

SEQ ID NO: 410191 - protein, 409 aa, unidentified
MDVVYERCCGLDVHKTSVVACLLISRSAGEPVRTVRTFGTMTGDLLDLADWLAAAGCTHVAMESTGVYWKPLWNLLEDGIELLLVNPRHIKAVPGRKTDVTDAEWIADLLRHGLLRASYVPNRPQRELRELTRYRTSLVRERTAAANRLQKTLEGANIKLASVATDILGKSGREILAALVAGETDGATLAQLAQGRLREKLPQLEQALVGCIGPHQRFLVAEHLAHIDFLEAAIDRVSAEIAERLRPCAEAVARLDTIPGIGPYLAEALIAEIGTDMSRFPTAAHLASWAGMCPGNHESAGKRRSGKTRKGSPWLRALLVQAAHAGARKKDTYLGAQYRRLAARRGKSRAAVAVGHAILIIAYHLLRDGTDYHDLGPRYFDERDRRAVERRLVHRLEGLGYTVSLQPAA

SEQ ID NO: 410192 - protein, 404 aa, unidentified
MIFVGIDWAEAHHDVCIVDDVGKVLGKARVPDGIEGVRRLHELIAEHAEEPNDVVVGIEIDRGLLVGALVAAGYRVYAINPMAASRYRDRHATSKAKSDRGDAKVLADLVRTDRHNHREVAGDSELAEAVKVVARAHQTLIWTRQRQVNQLRNALREFYPAALKAFGTDLASADAVSVLEHVPTPELGKRASRSSLIAWLRKGGRQRNLGDRAVAIREALRSEQLQAPPVVSEAYGDIVSSLVAVISNLNEQIATLESKLAARFDAHPDAEIVRSLPGLGSVLGARVLAEFGDDPNRFADVKGRRCYAGTAPITRASGTRLVVLARIARNKRLADACYLWAFASLTRSAGARRHYDRCRAKGDTHHMALRSLANKLVGILHGCLSHRSFYSEDIAWSTVDEVAA

SEQ ID NO: 410193 - protein, 400 aa, unidentified
MQAQTERVVIGMDPHKRSATIEVMTGDETILGGGRYATDEAGFAAMTDYVNRVQPHVEDRVWAVEGCNGIGHHIAMRLVAAGEHVIDVPPKLSARARVFATGQGRKTDATDAHSVALVGTRMAGLRPVVNDEQLAVLRVLVDRRRSLGEDHTRMVSQLHHLLLELIPGGAKRDLSAAQAKALLAKVRPRDVAGKTRRRIAAELINDLERIYTRKKAADKELRALVAATGTKLLDLKGIGPSGAARLLVEVADITRFPDRDHFASWNGTAPIDASSGDHVRHRLSRAGNRQINRVLHIMATVQLHNPTEGRAYYDRRKADGKTSMEAMRALKRRLSNIVYKTMFDDAITHAVAGSETGPGGQRGNDSDSSATGSHPHAGSSDKPLPGPAKTQPKTPLPAAS

SEQ ID NO: 410194 - protein, 373 aa, unidentified
MNSILYVGMDVHSTSYTLTTFSVDYEDVRFTHKVKADYKQVLLYLESVRTKVAGFGGEVDFVCGYEAGCLGYTLFKQLTEHNVKCIILAPTTMYVKQYKRVKTDKLDAKDIARCLAYNTYSPVYIPDEEDNNVKEYIRMRADHKKVFKSFKQQISAFCLRNGYHYTNGNTWTIKHLKWLKEIELNTMLRETLNEYLITYNATADKIERMDNRIEELASLPRYKEKVKRLTCFLGVKTYTALATIVEISDFKRFSKPARYASYLGLTPGEHTSDQSSKRLGITKAGNTHIRRLMVESAQSFCRGQVGYKSKALKARQGGNSPEVIAYADKANERLRRKYYKLISRGVKRNIAATAIARELSCFMWGMMTDNIAI

SEQ ID NO: 410195 - protein, 351 aa, unidentified
MSHKTAATVALTIGIDTGKNTLHLIGLDDKGAIVLREKVARGRITARLANVPRCLIGIEAGMATHYVARELSALGHDVKQVPPAYAKPFRQGHKNDFRDAHAIAEAVQRPSTRCVPVKTDDQLDLQALHRVRSRLVGQRTAVINQIRGFLLEHGIAVRQGLRFLRQQLPDILAKRSDVLSPRMIRIMEDLSGDWRRLDERIEHVTEEIEVLAHGSEGCRQLMTVPGIGPLIASAMVAAIGNGAAFAKGRDFAAWLGLVPKQMSTGDRTILGRISKRGNRYLRTMIMQGARVILLRPANWAKHSFGPWLTAAANRLHHNVLATALANKLARIAWTVLMQARSYEARVEPRTA

SEQ ID NO: 410196 - protein, 348 aa, unidentified
MTILAERVEFVIGVDTHKQSHVAAVVSSNGGKLDERTVAATQAGYEELLDFAAHHRGRRAWAIEGTSSYGAGLSALLAARGEEVIEIDSPRRAKRRRGAKSDAIDAVRAARDALGQHRHAAPKHGDTRAALRVLLVARSSAVDAHATAQRQLHDLVVTCPEEVRSTLRNRTPRTLITACEQLQAPAHADIHTATAVATLRALANRIRTLQTESKNHHKAITALVQSWRGDLLELFGLGPIGAAIILCSWSHPERFHSEAAFAMLAGVAPLPASSGQTVRHRLNRFGDRQLNNVLHVIAQHRMQRDPTTKAYVQQRRAQGKTTAEIRRNLKRYITRQIYRQLENPPTNP

SEQ ID NO: 410197 - protein, 342 aa, unidentified
MYYIGLDVHKKTISYCVKDASGRVQQEGKVGSTRRELDCWMAGLPQPWTVAMEATIFSGWIYDHLLPHAVEVKVAHPLMLRAIAAAKKKNDTIDAAKIADCLRCDFLPECHMMPREIRDRRRTLRYRHLLVKQMVQMKNRVSGLLMETGVEHTKSRLHKVGYFHEMLSKNAEIDASIRPLLKLSRETIERCQKTEYALVSSLQRDPLLADRIRRLRTVPGVGPITALTWALEMGDVARFRTIRQAISYCGLCGDERSSADKLMRMPLSKQRNKHIQRVLVEAAKLAPRLSPELAMVHEKEKQKGNRNRATLAVARKMVAYLLAVDRQQREFIPAGQRGSRAA

SEQ ID NO: 410198 - protein, 316 aa, unidentified
MITLSVDPHPGSHTVAALDRNGATLANITVSNTAEGLSQLHQFAVPFARRRWAIEGAGNHFIAVFVGQLLERSEIVYSIPPSLTSQYRARRGRKKNDFIDAENVGRALLANPQLTPLHNTEQQRELQALTRAQRRLSEQLRANRGALQELMAESAVRKIIEQVIAVLLKQLTALEKQIQATIQAVMPSLLKLPGVGPIVAGVLLAETGDPKRFASPHHFASYCGAAPVERGSGQNRRMQINPGGNRRLNWALHIVAMVRLRMDGGRSKRFLEQAQLRGKTKRSALRLLKTYIARELFRVLSTGQLHSLPAEAHPIG

SEQ ID NO: 410199 - protein, 326 aa, unidentified
MTDAPELIFVGIDVSKDTLEVALDDSAKTRTLGNDEAALKKLIAMLDAVRERVAVVLLEATGGLEQPAAAALCAQGFAVMVVNPRQAHDFARAMGHLSKTDSIDARVLAQFARTLHASDKRERLLYKLPTVQQQALLAMVTRRNQLMGMRVAEANRLAGAHASQHKSIRTVLKTLDGLIGRIDDDAARMLKEHFKDKLDLLKGLKGVGPGTQAMLMAALAELGQLTQREISKLVGVAPLNCDSGKFKGKRTTWGGRANVRCTLYMATLSATRYDPVIKAFYQRLTHAGKLKKVALVACMHKLLTIINAVIKSGVPWRAGYPQEGHA

SEQ ID NO: 410200 - protein, 319 aa, unidentified
MEGSAEVFVGIDVAKAKLDVHVHPLGTRFEVSRDPRGLAELVTRLRAIAPALIVLEATGGLETVVVSALGTGGLPVVAVNPRQIRDFARALGRLAKTDRLDAEVIALFASRMQPALRPLPDEQAILLSELLARREQLLGMLVAEKNRRQQLQARRLVKQVDAHVLWLQRQISGLERELDEAIRQTPLWRDKAEQIESVPGAGPTLTRTLVLELPELGTLTRRQISALVGVAPMAAESGTMRGARHIRGGRAVVRAKLYMATVSAIQCNPPIKAAWERLLAAGKLKKVALVACMRKLLGILNAIVRSGQKWRNVEIAASA

SEQ ID NO: 410201 - protein, 341 aa, unidentified
MLCKGAAAQGVRAMLGIDVSKATLAYSLLAAGTQQVVAAGQVPNTPAGIAQLAALAPAEHPWVLEPTGVYSRAVVQRAQQDGRTVLLAPPKEAKAFLAVLHPRAKTDRLDSQGLAHYALALPLRPFPVKAESVVQLEQLLAARKGLSESLAQLTQQRQVLPYAAAPLAAAIAALRAQQRELDAQIAQLCQQPELAIAQTLRQVPGIGPVTAAALAACFASHTFTHPDQFVAYLGLDVRVRDSGAYVGRRRLSKRGQPELRRLLYLCAQANLRRRDPDNPFKLQYERERAKGLSSTAALNAVARKLARTAWSLVTHGTQYDPERVHHPPHPSMPDPPLDNQP

SEQ ID NO: 410202 - protein, 428 aa, unidentified
MDFEVKRLICAGLDVHKRSVAAAVCTTDPTTLEATYKAKVFSTSNSDIAALREWLLAQKCYDVCMESTGKYWIPIFNILESQMHVILTHPKYVRAIKGKKTDKRDAKWIANLFRFDIVKSSFIPPADIRALRELSRYRLKLSYMRTAEKNRYQNSMTISRIRIDCVLTDPFGKTATNIMDYLLSDKPFDESECAKLIDRRVKASTESVLDSIRGFEILSEQKFKMTHAKKHMDFINSTIHDLEVELFRLSRPYDELIKRISKIVGFTELSALFVLSEIGTDMSVFESDKHLCSWAGLIPANNESANKKKSTRCSKAGQYLKPLLVQCALAAAKSKKDPYFAIKYNRLAKKRGKKKAIIAIARMMLTSIYHMVQDNEEFHPDDYEAIIHPSKPIKVILTIDNVMQFLGEQGADPETLKLLQQQCAVKTG

SEQ ID NO: 410203 - protein, 340 aa, unidentified
MISTTKFFIGIDVSKPYFDASLMAVVNHLKQSVETARFDNNATGTKTFDKWLKNHKVTFDEQSLVVIENTGIYHRLIWSFCSRKHLPIHIGNAAHIKWSFGIARGKNDKIDSLRLCNYAYRESDTLTAIAPLSPVLLHLKDFISARTKLLKQITSLGVSIKELGNVNEKPHQKLIERSLRSAIDGIAKSISNIETEIKKIIEENKAFKSNYKLLLSIPGIGHVTAVYLIGCTANFAGSPSGKQLACYAGVAPFEHSSCISIKGKTRFHRMANKELKRLLHLCALSAIQHNLEIKNYDNRKKDEGKHGMSILNAIRNKIVLRVAAVVKNQMPFKNNHKIAA

SEQ ID NO: 410204 - protein, 406 aa, unidentified
MGRVDQTALAGRLTVASSLKEAMVSSVIYRLRCTAHLMAWTTPFPRAWCRVLWWRFQAAKGASMSIVVTVGLDLAKSVFQVHGVDYAGRTSLRRRVGRHQLIEYFAKLPPCLIGMEACSAAHHWARELSRLGHSVKLIPPQYVKPYVKRNKTDAADAEAICEAVARPNMRFVPIKAIDQQAVLTLHRVRSAFVRQRTSAINTVRGLLTEFGVVAGKGIQRVAELRQRMDKVEVDLLPEEARAAITETFEHIDALTERIAAVEARIVAWHKSSEASRRLASAPGVGPITASAIVASVGDGRQFQSARHFAAWLGLTPRIQASGGKEHIGKISKGGDRYLRALLIHGARAVVGANFRKDVTPRPWLKQLLARRPVNVATVAIAHKTARALWAMITREEGYRKFAAQAA

SEQ ID NO: 410205 - protein, 369 aa, unidentified
MEKNTTYVALDDSKRKIVAGILRPEAEQPELREIANDPRQIRRLFERLTREGPVAACYEAGVSGYDLHRQLTALGVACSVIAPALTPRRPGQHVKTDRRDAAKLVRLFRAGELTAIHVLDEAEEAVRDLVRCRDDLRRDVLRWRHRVLKLLARHGRTYLAGRNWSQAHWRWIREQSFDQPPLQRAFEATLFALEQALARQAELDHELEALATTAPYREPVAALRCFRGIDTLSAIILLAEIVDFQRFRRPRELMAYLGLVPGEYSSGDTHRRGALTKAGNSHARRVLVEAAWHYRHRPGLGRALAARSHGQPDEIVSQAWRAQQRLHRRYRHLIGHGKRPPVAVVAVARELVGFLWAAMTRYESRRAVA

SEQ ID NO: 410206 - protein, 397 aa, unidentified
MIAVGIDISKAKSTVAVIDSDGTVLASPFTMAHTQPEMEAFVSYLKGLGEPTTILMEYTGHYHYPVLKKLQDEGFPVCIVNPYQMKKYGDVEIHKAKTDKKDALRIAAYALEKSYKLVPYSSMEQKYEDLKFLSRQYNQRISYVAKLKVQLIALLDQTMPGITRILPLNSRNPEKCALLLFIKRFKSFDEIQRIGKARFLASYDVLAKKASERSASSKGLSIYELAVDSITTRGEDPYIWLSQNQCVDLLSATQNAADEIISQMRNIAETIPEYKVLRAMHGVGDRLGPIILAEIGDVHRFHSGKALNSYAGNDAPPYQSGQFESRNRHISKRGSSTLRKACYEVMQALKLTKPQDDPVYLFMLKKEQEGKPFNVAKMAGVNKFLRIYYARAMEFYK

SEQ ID NO: 410207 - protein, 344 aa, unidentified
MQTMYYIGLDVHKRTISYCVKDASGRVYAEGSLPATRFDLDRWMKTLPQPWTAAMEATVFTGWIYDHLQPHAAALKVAHPLMLRAIAAAKKKNDRIDASKICDCLRCDFLPECYMASTAIRERRRTLRYRNLLVRQMVQMKNKISGLLMEAGVSYNKQRLHRAGYFRELLATNSDIDEGLCSLLRLCRETVVRLQKTESAVVLSLERDSLLMDRVERLMTIPAVGPITALTWALEVGDAQRFSSIKKAISYCGLCGAEKSSANTVQRTPLSKQRNKHLQATLIEAAKMAPRYSPNLAMLYDKEKQKGNANRATLAVARKLVAYLMAIDRGQRNFQVVETNCIAA

SEQ ID NO: 410208 - protein, 362 aa, unidentified
MKKNITCTAVKVTKASATVAVGVDIGDMQCQVCARDKAAGITLERKVRTTRAGLALVFEHLPPCRVVIEAGSQTRWIAEAITAMGHTVRVVNPRKMRRIYESDSKSDLQDARELSEAALDRWDRLPEVKLRSRESQQKLSVLRTRDALVRSRVALVNLVRSLLKQGGVKVPKCSTEAFPKKASALVPEEFSVAVAPALAQIASLTAQIKALDVWIEAQAALDPNIRCLRQIQGVGPVTAAAFVWTLDDPARFERSRSVGAYLGLRPRRDQSGETDKQLPITKAGNVYLRTLLVGCSHYILSKKGPDTALKQFGLRLAERGGKRAKRKAVVAVARKLAVLLHHLWATGEVYEAFPEARKRRAA

SEQ ID NO: 410209 - protein, 350 aa, unidentified
MNFIKLNTQYYCGIDLHARSMYICVMNKQGDILLHRNLRTEFREFKRKVHKFLPDLSVGVESTYNYYWLADACKHDGIPFYLGHAYYMKTIHGGKKKNDKLDSRKLADLLRSNHFPLAYAYPDDLRPARDLLRRRHRYAAIRAEAYTHIQTTFHQNGKTIHPSAVKDKKQRHLLSDEFKEQSIRNTIEADLDMICFLDPKIQSLELLIRQTARGNDQIAINILRSIPGVGDMLSLIILYEIHDISRFPTVQQFCSYARLVRGSYESAGKKVGRGKAKIGNHFLKYAIAEIIMKAATSSKEIEQYYNRLESQNGKARAKTIISHKFGIAIYYMLKNKKVFDAKQFVKSNMK

SEQ ID NO: 410210 - protein, 407 aa, unidentified
MDVIIERACGLDVHKDNITACIITPDEKEIKTFSTKTVFLIELVDWIKKHNCTHVAMESTSVYWKPIVNLLEAEDIEFLVVNAQHMKAVPGRKTDVKDAEWIAKLLRHGLLKASYIPDRNQRELRELVRYRRSIIEERARQYNRIQKVLEGANIKLGSVVSDIMGVSSRDMLQSIANGNDDLEMLSNFARGRMKNKKDELKLALQGYIQDHQRFMIKTILDHIDFLTEQINQLDEEIAKRMSTFQEDIDRLDSIPGIARRMAEQMLAELGTNIKEQFPSAPQMCSWAGLVPGNNESAGKRKSSKTRNGNKYLKSALIETAHSVRGSKNYLGALYRRIAARKGKKRAAVVVAHAILRISYYLLTRKEMYIDLGEDYFDKQRQQSIVRHSLRRLESLGYTVTITEPKAS

SEQ ID NO: 410211 - protein, 397 aa, unidentified
MTERHELRVALDVGSRLHRVALGDTRGAVLEEFDIPHTQSGFNRLFERLLAHGAGRMPVAVAMEGYNGYARPLDGQVLRRGFRLFNVNNVKLARFKEIFPAAAKSDRLDARKMLELFQLQAHLPLAKDVLQEVGPIPVVHQELKWLTRRRKQLIREKIVLIGRLHAALLAVSPGLADITGALDNRWFLRFISCRDDLRQLARLRRQSLLKIRGVGRHYADTIQCWQAQATFDAQVAWAGATIIDDARATLGLIDKLKGLEGRILELLPASPVARRILTIPGFGPISAAELAAEIGNLGRFAQEASLALYLGMAPLEHSSGLSGGARSPKQVNVHAKATMSVAAVRHLTQVTQSRAYYERKRTEGKTHQQAVRALGRQLVRVIWAMLKNDRDYEARKA

SEQ ID NO: 410212 - protein, 497 aa, unidentified
MPSTKVAAEVTIDGAMKRKSIFKNNSQNIDAAFIEAGLPEKVLLVPLDFAKSTHYACFCDGLGRYLRQAFTVKNNKEGLDYLVERIEATRKSRAIRDKRHVIVGGEDSASYTRNFMQRLGELGYLAVRLSSCEVHRQAESVDSSTDRTALRAIAKTMLNRDARPIDGHDVYNELRALTRQRRRIVHLNTAVKNRIHTHADRLFPGFLSKDSALAPFSRASLELMSKPSFGAVSISRKNEKTLEQLLKRHGTPRSVEVASALKQQARDSIPADKDSARLSAYILAGELELFRALESNLQTLDKECARLLARTPEAFVTSIKGIGITLTSSVCAESGSLAQVTRADSLNAYAGIVPKVKQTGGPESEAKIRGRRRSFNRVLKDYTMQAGNHLYLHGPEELMQDAVRRKLVGKAVDTAMARRFLRIARALCKNHFIYLPTHLRGQNASSQERVQYILDTWPALLVKWKRLGLHEEAFAPENPLGQWRLIMQEIHDIDLPL

SEQ ID NO: 410213 - protein, 427 aa, unidentified
MPYKIAGIDVHKRMLAVVVADIAGEGEYKFERHKVGTSPDQLRLLAQWLVEQEAEEVVMESTAQYWKPVWQALERYWKAASQKREGAGPKSGTLHLAQAKSNRGPRGRKNDFADAERLVKRLVAQELVLSFVPDTEQRLWRTVTRKKQQLTCDKVRLQNQLECVLEEAHIKLSSLVSDLLGVSARRMLQALADGETNPETLAALADRRLRATPSQLCDALGACQQLNQVYRRLLKMALDELKLLEQQQEQLDKMISELLALHQDAVRRVAEIPGLGVDSAHQVIAEVGPTAAVFPSAKNLASWVGVCPGEQQSADQSQSSRSPKGNCSMRRILNQAAHAAVKVKGSIFEVVFRRLKARLEYQEAIWAIAHRICRLIWKILHENVRYEERGPEVSAKSKQTRTAKMIRQLRALGYLVEPTNLPAGNPA

SEQ ID NO: 410214 - protein, 322 aa, unidentified
MRKHSTICAGIDTGKYKLDVALEGGAEHLRVDNDADGHRVLVAWLRHRRAKRVGIEASGGYEQAVVAELRRNKFVVIVFQPAQVRAYAKFVLQRAKNDKIDAGLIADCTAAAKKIHAPPDPRLAAMAEHLTLIEQIDEDIARLKNRRESCRDPHLKAFWGAEIARLKEQSRLQLKALVVAIRQHADLDRKLDLIASVDGIGAKTAVAILVRMPEIGRVTREQAAALAGLAPYDDDSGVLVGVRHIAGGRKRLRGSLYAAALAAAFYWNPQLMALYQHLRANGKEHKVALVACARKLLIYANTVVERGVPWESKSLPAAAARN

SEQ ID NO: 410215 - protein, 344 aa, unidentified
MTIIRIGLDTSKSVFQVHGVDEQERPVLRRQLRRGQMEKFFAKLPPTRIGLEACGASHHWGRVLRDLGHEVVLMPPQYIKPYVKRGKNDAIDAEAICEAMSRPGMRFVPIKSREEQAALMLLKVRDLLTKQSTMLSNAIRGHAAEFGVVGAKGPQKIKELLERIAGEANVPEPARELLNGLASQLAAIEVRLAALAAKLMAHHKADPRSQLLATIPGVGPVTAVSIALKVPDAAVFRSGRHFAAWLGITPREHSTAGRQQFGKISRQGDEGLRRLLVIGATSVIQQVERRRKANKTSRSDSPWLLQLLARKPQKVAAIALANKMARTIRAMLVSGELYRRPQAA

SEQ ID NO: 410216 - protein, 350 aa, unidentified
MNIKHYIGFDVHKKTISYCVKLADGTIVEESKLAARREALRQWAGKRTELWHGAMEATLFSGWIYDTLKPFAARLDVGHPAMMKAIGASKKKNDKLDARMTSDLVRCNLLPVCWVAPCEIRELRRMLRYRNLVVEQAVQMKNKISGLLMESGAEYNKQRLHGEKYFAELLENLEEVPESVKDLLRLSRGALETFQTTQQQLLCKLRKHPRLAERVTRLQSIRGVGEVTALTWALEIGDPHRFPSIGDAVSYCGLTSALVSSAGKQQRGPISKQRNVNLQKVLIEAAKLAPRWNPQLAALHQREIQCGHSNRATLEVARKMVAYLLAVDKSGKPFEVHVPVKVETEAKPAA

SEQ ID NO: 410217 - protein, 411 aa, unidentified
MEVVHARCAGIDISKKDAKVCVRIAGAGRRRTQESVTTWGSTTGRILALRQHLIDAAVTCAVMEATSDYWKPFYYLLEDAGFEVMLVNARHVKNLPGRKSDVSDATWLAQLGAHGLVRGSFVPPEPIRQLRDLTRTRTAVTRERARELQRLEKLLEDSGIKLSSVASDITGVSGRAMLEALIAGQRDPAVLADLAKRRLRLKIPALTEALTGRFSEHHAFLTRVHLDLIDGHTQAIEELTKRIEVMIEPFRGFHDLICTIPGISTGTADVVIAETGADMSRFPTAGHLASWAGTTPGMNESAGRVKSTKTRPGNPYLQGALGTAAMSNARNTHTYLGAKYRRIAARRGPVKAIVAVQHAILIAIWNMGTNGSLYDDPGADFYTRLHPDKAKHRAIEQLQRMGYSVTLEHTG

SEQ ID NO: 410218 - protein, 330 aa, unidentified
MVSLWKNELHFIGIDVAKAKLDVDILRPDGRHRCKKFDNTLSGHEALVRWLRGHDVNRAHVCMESTSTYMEDAAAHLSDAGYTVSIINPALSKAFAQSEGLRSKTDKVDARMLAHFCREKRPSAWEAPHPTERALKALVLRHQALTEMQTQEKNRRETAPEVQLASIDILLGCLSAELARIEKQIKDLTDNDPDMKRRRKLLNSIPGIGEKTAAVLLAYTGLRLKFGTARQFAAYAGLTPVQHESGSSVMRASRMSKAGPVQLRKALYMPALSALYHTAWGKAFRKRLEESGKRAKVIIGAMMRKLAQVAYGVLKSGKAFDASQHELLIA

SEQ ID NO: 410219 - protein, 437 aa, unidentified
MGFPGTSQDCRHHIHSAKEVIKMPNPLFVGIDVSSRDNVVCCLSNDDEKRPLSRFIVLNNRPGILELKQRISQLVQKHSFDQILFGLEHTGCYSTHAAMYLQHHLDFGCEDVNVYLFNPSLIKEFKKAHFLDAPKNDRVDAWYIASKLMAGHLPHPFTWSEPLMALQRLTRARYHLMQALVRESNFLMTNLYLKCSDYTLVFDNKLSATSLAVMEEFESAEALAEASLDKLTWFLVQHGKNRFDDPQAVAKELQKAARSSYRLPKAMADSVNLAMASSIRVIRTLQEQLKSLKKAIEDHLDTIPQTLDSVPGIGPIFASGILAEIGDINQFDSHKQLAKFAGLAWTQHQSGNFTANNTRLIRSGNRFLRYYLIEAADSVRMHDPVFAQYYALKKAEPKQYAHKRALALTARKLVRLVFYLLKTNQLYQPGGRNRHDS

SEQ ID NO: 410220 - protein, 338 aa, unidentified
MKTYVGIDYHKRFSYGTIMTEAGQIIKQSKFSNHPEAVAAFLGNHCNHDSSAVLEAGYNSLVMHDWLDELVSSVTLADPLKVKAIAEAKIKTDKIDSTTLAHLLRCDLIPSAHVSSPAARIGKKLLRHRMFLVRLSTMVKNRIHALMDGFPLIRDTRSMKELFSKKGVGWLKKIELPQYARRILDSELSLLEYFGSQIRCVDGWISGFGRKDQRVKNVMTVPGLGKFFSLLVVSEIDDIDRFRSPAKLHAYAGLVPSTYSSGGRTYHGRIIKQGNKYLRYAMIEAVWPALSKCVDLERVYNRVYSRRGGNSAKVAAARRLLTIVYRVLKENREYRYRY

SEQ ID NO: 410221 - protein, 341 aa, unidentified
MDKVSTIGLDLAKEVFQVHGADAAGSVVFRKRLRRSSVVRFFAAQAPCRVAMEACASSHYWGREFSRLGHEVRLIPPSYVKPFVKRQKNDAADAEAICEASQRPTMRFVQIKSEAAQAAAVVFRARDLLVRQRTQIINALRGHLAEFGLVVAKGPAHVGRLIAQAEDYARSLPQTVRPIFSVLIEALHSLDEKIVVLDAEISRRSEEDEDARRMKTIPGIGPVTAAAISALAPPAQIFARGRDFAAWLGLTPLQRSTGGKQRLGGTSKRGERTLRRLLIIGASAVVRWAARKGAPAGSWLERMLTRKPRMLVAVALANKMARIVWALLAKGGIYRASIVAA

SEQ ID NO: 410222 - protein, 408 aa, unidentified
MKMLHKRCAGLDVHKAEVVACVRLISKRKVEREVRRFPTTTQGLLALAEWLESAGCTDVAMEATGVYWKPVWHILEGRFALILANAAHVRNVPGRKSDVNDATWLADLLAHGLIRSSFVPPPAIQELRDLTRTRRQLTREIVQHVQRIQAVLEEANIKLCSVITDIMGASGRRMLKAMIAGETDAEKLAALGHERLGCTRAELVEVLTGRVREHHRFLLGQHLRTIEQLKDSVAAFDARIEAALSPFHDIVERLEEVPGLAATSTETVIAEIGTDMSLFPTAGHLLSWAGFAPRLDESAGKHRSTRIRKGAPWLKPVLVQAAWGAARKKNSYFQAQFLRLKARHGAKKAAIAVAASILTTVYHMLRDGTCYQDLGPEYFTRRNPAQAAARLANRIRNLGYHVEIRAAA

SEQ ID NO: 410223 - protein, 344 aa, unidentified
MDTVTLVGIDLGKHSFHLHGQDKRGLAVFRKKLNRKQLIDFFAKFHACTAVMEACAGAHHLARKLIAMGHEVKLISPQYVRPFVKGNKNDFIDAEAICEAASRPTMRFVPPKTEAQQTLAMLHRTRESLVQDRTKTANQMHGFLLEFGISLPTGFAVIKRLPALLDEHELPPQLVSVLQRLHEHFKYLDAHIAELEKELARQVHGDDLGQRLMTLPGVGPITASVLAAEMGDGTQFACSRDFAASLGLVPRQYSTGGKATLLSISKRGDKNIRRLLVQCARAFMQRVDKDASPLAEWVRALLTRRHSNIVACALANKLARMAWALVRGHTVYNPGKLRPTPAAA

SEQ ID NO: 410224 - protein, 360 aa, unidentified
MQVQRKELNFEGQNIYVGLDVHLKSWTVCIMTEHLEHKRFTQPPKADVLYKYLTRNFPGATYHSVYESGFSGFWAHRQLTSLGINNMVTNAADVPTGQKEKIRKDDPVDSRKLARSLRSKELEAIYVPDESTLEERVLVRTRNTLVKDMTRFKSRIKSFLYFFGIPYPERFSNSGNHWSKNFLRWLKEDVQLSEESGKQTLALMIQEVEEQRRLLLQTLLQIKQLSEKEKYSSNVKLLKTVPGIGLVTAMHFLTEIETLERFEDSDHFAAFVGLVPDRHNSGDVKNEGEITFRGQSILKKCIIESSWIAARKDPALSLAYNKYVARMEPNKAIIRVARKLLNRIYFVLKNKKEYVKCVVK

SEQ ID NO: 410225 - protein, 249 aa, unidentified
MYIGIDVSKEHLDVASDDGSLEGQYSNDERGHGELVGRLRTLSPSLVVLEATGNFQLELSITLAAAKLPMAVVNPRQVRDFAKALGILAKTDKIDARSIARFGATVKPAAQPMPDNEALELEALMTRRRQLVGMIASEKNRLQALFGPAKTSWAEKSIRDTLSHLIKQLSQLDKTLRRRIERSPIWKAKDDLLQSVPGVGKVTSLTLSIDLPELGTLNRKQIAALAGLAPVNRDSGAMTGSAASGSSSA

SEQ ID NO: 410226 - protein, 344 aa, unidentified
MNAVGIDVSKGKSMVAIMRPFGEIVSTPFEIKHTTSDIHSLVELINSVEGESRIVMEHTGRYYEVLAHQLSEANLFVSTINPKLIKDFDNDSLRKVKSDKADAVKIARYALDKWQNLKQYSVMDELRNQLKTMNRQFGFYMKHKTAMKNNLISILDQTYPGVNTYFDSPARSDGSQKWVDFASTYWHVDCVRKISLNAFIDHYQNWCKRKKYNFSQSKAEEIYGKAKELVPVLPKDAITKLIIKQAIDQLISVSTTVESLRTLMNETASKLPEYPVVMAMKGVGTSLGPQLMAEIGDVSRFTHKGAITAFAGVDPGVNESGTYEQKSVPTSNVALQIYERPYFK

SEQ ID NO: 410227 - protein, 353 aa, unidentified
MRTYYVGMDVHRATIAIVALNGAGKVVEQLVVETSATRVRNYLKQLRGRVYVTFEEGTQAQWLYDVVQPLVTEVLVCDPRHNKLLKAGNKSDRIDAQKLAALLRNGALQAVDHRDHGVRALKELVRNYDCLVSDTTRVMNRLKAMFRGRAIACGGHEVYRQDRREVWLSKLTERGAKERAGSLYRQLAALRALRQEAKLAMVREARRAAAYSWLMSVPRLGAVSVAQLLAVVGTPHRFRTKRQFWSYVGLAVVTSSTADMEVVEGVLRRSRRPVATRGLNRNHNHLLKRVFKNAATSACQSEPFKQHYERRLQQGMEPALARLTVARQLSAITLSLWKRGEKFQAERMKRPAV

SEQ ID NO: 410228 - protein, 345 aa, unidentified
MIHCGADVHSKSTHLTILSGRGVEMFSGPVPTERVALQAALRPYAKKGVRVIQETGASQAFIQSVFGEIGIDVVTVHASDMKMITRSKKKTDKRDSYQLAWHSLKDNLPEPVYVPTQEEQDLRALLSAHERARKGRTALSNGVRGQLKRYGILLPQGFLTKESGWTALHETDLSPAMRIIVEASFAMWMEHTRAMELLSAEMRDRTKEDDLVRRLKTIPNVGDGCAVAVRAYLADLRRFHGRRAVVSYAGFCPSQHDTGDRHVTGRITKQGPSRIRAVFVQAAHLLIGRKFKGLPHWRGWYERLLHAKDRRNKAVVAVARRLYLLAYQVGRSGDVYRPPAEEGRN

SEQ ID NO: 410229 - protein, 426 aa, unidentified
MHTDTSPEFAALIGLDWGDRSHAIALQPAGGNIKTSTLTHSAESLHQWLDQLETTYGGRPVAVAVEATKGAVVYALLERAWLTVYPIHPATSTRQRSAFRPSGAKDDTPDALVLLSILQHHRDRLRPLQPDDEATRTLARLVEARRKAVDRRSLLVNQLKSTLKDYFPQALAMIGEDLTIPMALDFLQKWPRLTDLQSAKDITLRNFYHRHNVRRSELIQSRLDLRRSARLLTRDSAVVEVSVRVVRMLVAELRVLNEHIGEFELTIEEAFAEHPENSFFRELPGAGPVLAPRLLAAFGTARDLFPDPGSMQRYFGVAPVTEKSGGRRWIHWRWNAPTFLRQTLIEWAGQTVVFCPWAKAYYEQQRTKGTGHHAILRALAFKWLRILWRCWQNRQDYDEEKYLQQLEKRKSPIAARARQLAREIAV

SEQ ID NO: 410230 - protein, 482 aa, unidentified
MKKRNIYQNQSQELLHLFEVAGSGQKVMCVAIDYAKNDHLVLFCNGHGDILRKPFSVKNTAEGIAYIDAQVRRCCRQRNIEKQHVFFGGEDANSFAKNFVSALRNKGFVVANVNAHEAKKQRGHVQASTDRIDLMGIASLLLNCRANCCSSQAGIYANLRTLVRHRRRLVQMLTEVKNRVHGIVDELFPGFLNQNNSGIVAFTQTSLYLMQERFSPKQIARRRRQKLVEILKRLGTSRPEKTAAKLQHHAAKVLHAPVEHVDTLQLSLSQHVKHIRCLKESVCQMEKEIALKLSQTQGAFLTSVRGIGLVLAAGLTAEIGDVNAQKPLNNLASYAGIVPRVKQTGGLRGKTYTGPVAKRCNRILKDYVVKSAYHLGLHGPPDLMADYRRRQVSGQHADFGIARRYLRMAICLMRSSQVYLPLNLRKENSTRQQRAGYYLKSWPYLREKWQRAGALEAAFTTPRPLGLWRQMVQQLYEIKLKL

SEQ ID NO: 410231 - protein, 405 aa, unidentified
MIFVGIDWSESHHDVEVQAGSGKVLKQLRIDADVAGLTRLQETLSELAEEPSQVVIGIESNHGLLVNALVASGYRLYSINPLTSARAREGESPGRSKSDRSDAHVLANLVRTKRQDLRPLAGDSEQAQAVQVRARSHARAVRMQQRLRNQLRSALAKFYAALLPLLSEGEDLRDALAVLSVAPNPELGRRLSLNKLQSTLGRHGRQRNLAGKAAQLQAMLRAPQLELNSPKVVSAYSDEVSYLVRSLLQVRSEIKLLEEQLAEDFRGHPDAEIYLSLPGLADVLGARVLGESGDDPTRYPDARARKNYAGSAPITQRSGKRKLVSRRIARNRLLADTTFLWGLCAISASAGARRYYDQLRARGKTHNEALRVVGNRMVGILHGCLRRRCLYDEAIAWRPSLEQAA

SEQ ID NO: 410232 - protein, 352 aa, unidentified
MVIVIGADVHKATHTFVAVDEVGRKLGEKTVRATTTGHEGALRWARREFSQELRWGVEDCRHLTARLERDLLAAGQEVVRVPPKLMAQTRASSRERGKSDPIDALAVARAVLREPDLPAAVHDESTRELKLLVDRREDLIGERTRQINRLRWHLHELDPEFDVPVKAFRARSQRARVEGWLAGRDGIVAELAGEILADIAHGSVRIDALEKRITGLVEDRYPHLLAVPGCGPLAAAKIAGETANVTRFRSEACFAMNAGVAPLPVWSGSTKGRVRMSRTGNRQLNAALHRIAITQIRLDSLGRTYYRKRLTNGDSTIEALRCLKRRLARVIFHALHADQHPLHTTPNLPLAA

SEQ ID NO: 410233 - protein, 342 aa, unidentified
METTRHIGIDLHRNCFTACVRLENGRNYLTEWKLEQLPKFVAKLRPSDEVAVEVTGNTRLFHDAVAPHVRRVVAVNPNQFKVITHSVKKTDPNDARNLALYLAKDLLPEVRMKDKTRAQIASLTQTRDTMVKLRTALKNKINNIFSAHGINLSKESLASEKGLKAVLETRIDLLVDLEVKILVEQIQALNKSIAQLEGTISRESQKLEGHKNLTSIKGIGSLSAGILLSIIGDIGDFADEGKLAAYFGIVPRISNSNETEHSGHMTKRGTKLGRTTLVQCALIAQRYSPYLKSYYEKKKSRGTGKAIIALARKFLGIIYRTLRNKWVFADFPNFVLAEEATA

SEQ ID NO: 410234 - protein, 463 aa, unidentified
MMKKRKLASKAEKPRREKVDWKTLEIVHPDAAGIDIGGREHWVAISPDRDEDPVRRFDCFTADLEQMAKWLVEKGVCSVAMQSTGVYWMPVYEVLEQSGLEVYLVNARHTKNLPGRKSDVQECQWLLKLHTFGLLNNSFQPTDEIRVARTMWRHRSSLVAQAGGAIQRMQKTLTEMNVQIHNVLSDLSGVSGMAILKAILKGERDPWQLAAFANPAVKASPADIAKSLHGNWREELLLVLRHEMELYQTYQDKIAECDHQLRKHLQSLASRVDLQAQPLGARPKGKKAPRGNTPKFDLRSELYRITGIDWSQVNGIDVQIAQTVITEVGVDLSSFPSERHFASWLGLCPMNEQSGGKILNRRTPKVVNRATVAFRLAAQGLLRSQSYLGAQYRRLRTRLGAPKAITAMARKLACLFYRLLRHGQPYVDKGAQYYESRYREQQIRSLTKRAHKLALELVEPKPA

SEQ ID NO: 410235 - protein, 325 aa, unidentified
MLGVAGKVLVRKKFTQRQLLTYTANMQASLIGLEACSGAHFLGRALRKQGHDVRLIAAQFVKAFVKSNKNDFVDAEAIAEAVERKNMRFVPIKTDDQLDLQAIHRVRDRLISRRTAVINQLRAFLLERGLVFARTPAKLRAALPDILENADLDLTPQMRNLIELLWKEWKTVEDQIKGLSLELERISAADPGCTRIRQIPGIGPIVATAIVAAIGNGAAFRKGRDFAAWLGVVPRQYSTGGKARLFGISKRGNVYLRKILIHGARAAVLRIKRDRAPIGAWLDALDARAPKNVVVVAMANKLARIAWAVLSSGEDYRPHSNLAAA

SEQ ID NO: 410236 - protein, 366 aa, unidentified
MKKGTTFVALDDSKRKLVAGILRPGAEEPEVREIPNEAKLLRRLFERLRREGPVAACYEAGVSGYDLDRQITGLGVACQVIAPALTPRRPGQRIKTDTRDAKKLVRLVRAGELTAIRVPAEAEEGVRDFVRCREDVRRDVGRWRHRVVKFLDRHGRRYVAGRNWTGRHWTWLRSQRFEIPARQRTLEVSLFTLEQALARQAELDREIEALAQSEPYREPVGWRRCFRGIDTLAAMILLVEIGDFHRFQRPRELMAYLGLGPSEHSSGERERRGALTKAGNTHARRAVVEAAWHYRHRPGLGRALARRSEGQPDACRGHAWRAQQRLHRRYRHLVGHGQRPPGAVAAVARELVGFLWAAMTHRPLVA

SEQ ID NO: 410237 - protein, 369 aa, unidentified
MKHFIIFVGLDVHKDSIDIALADDGRNGEIRFYGTIGGDLDSLDKAIRKFRRSGAELRFVYEAGPCGYEIYRHLTAQGFHCDVIAPSMTPKKSGDRIKTDRRDALSLARLYRAGELTPVYVPREDDEAMRDLVRGRGDAVNATRKARQRLSAFVLRHGFRYSGRNAWSVAHLRWLAGIKMPHPAQQITLQEYINSIEESSERVDRLTGQILNLIPGWRMAPVVAALQALRGVAAIVATTMVVEIGDLRRFENPRQLMAYLGLVPSENSSGQTTKRGGITKTGNSHARRALIEAAQTYSFPAKVGKELRKRQEGLPREIKEISWKAQVRLCGRFRKLMTKGKNRNRTVTAIARELSGFMWAIAKEVPMPA

SEQ ID NO: 410238 - protein, 462 aa, unidentified
MTVPTTKGRRKRATPVPTSLPAIRSLVAGLDVGSSEHWVCGPARADGQPNVRCFGTTTDQLQELADWLADHRVESVAMESTSVYWIPIWELLEARGIEALLVNARQLHNVPGRKTDVSDCQWLQLLHSCGLLRGSFRPGEAITRLRALQRQLANLVAERTRCVQWMQKALDQMNVQVHRAVTDLTGTTGLAIVRAIVGGERDPARLAQHRDPRCRKSAAEVARYLTGTWRAEHLFNLASALRLFDALEAEIAAYDAQLLTAIESLQPPDRQAAPVPPHPNLAKEKAIRTHGEQPARTTLWRFAGVDLTRIDGIGAGAAQVVLTEVGPDLAAFPSEDQFVSWLRLCPRTPISGGKPLKKPRNGLGANRIAGVLRLAATSLQRSKTALGAAFRRIARHKGSAVAVFATARQLAKLIYRMLRYGHDYVDIGEQAYDRQFQTRRLAALTETARSLGYTLLPNAPAK

SEQ ID NO: 410239 - protein, 352 aa, unidentified
MARTTKFHSVSTTIGIDMGKNTLHMVGLDSNGAIVLREKVSRGRIGSRLANLPPCLIGIEAGLATHYVARELAALGHNVKQVPPAYARPFRQGHKNDFRDAHAVAEAVQRPTTRFVPAKTDEQLDLQALHRVRSRLVSERTAVINQIRGFLLEHGIIVRQGQRFLRHLLSDILAKRTDVLSPRMVRIISDLVGDWRQLDERIETVTDEIETLAKSDDSCRRVMTVPGIGPLISSAMVAAIGNGMAFAKGRDYSAWLGLVPKQMSTGDRTILGRLSKRGNGYLRMLFMQAARVILLRPANWPKHGFGAWLVRAAQRLHPNVLAAALANKLARIAWTVLAQERNYEARVTKAAA

SEQ ID NO: 410240 - protein, 408 aa, unidentified
MEVLHPRCAGLDVHKDTVVAAVRCVSPPVHHEVQSFATTTRGLFALADWLGAQGCTHVAMEATGVYWKPVWHVLEERFELVLANAQHVRNVPGRKTDVGDAAWIADLLAHGLIRSSFVPPAPIQELRDLTRTRKQLVREIAQHSLRIQKVLEDANLKLGSVLSDVLGQSGRAMLHAIIAGEEDPVRLAELAQGTARKKTAALIEALRGRVTPHHRALLQLHLGLVNAVESALEEVDRHVGKALQPIRDLARLLTTMPGVGDLVAQVMLAEIGTDMSRFPTSGHLVSWAGLCPRNDESAGKRRSTRVRKSGTWLKTTLVTAAWASVRVKDSYLHALFLRIKSRRGAKKAILAVAASMLTAAYFMLRDGVEYQDLGPDHFDRRDRSKVIHRLVRRLRDLGCAVQITEEAA

SEQ ID NO: 410241 - protein, 355 aa, unidentified
MNSIKYIGLDVHQSSISAAVLDREGKLIQQAILATHASAILDFFAGLRGELHVTCEEGTHSAWLYDLLARRVAKLVVCNPRKNALLKAGNKSDAIDAHKLAELLRAGLLSPVYHGQNSTQTVKQLGRSYSALTEDTTRTMGRLKALYRSQAIACRGQKPYGRRHRADYLEQLRGPGLRRRAERLYAQLDSLQQLRREARRDLILECRKHADARILRQVPLLGPIRVATLIGRVQTPHRFRSKRQFWAYCGLALETRSSADYQMVNGQLQRRTKPGFIRGLNLNHNHDLKNLFKSAATSASAHSGALREFYENLLRKGMKPELARLTLARKLAAITLHVWKKGERFDVNFVKPQAA

SEQ ID NO: 410242 - protein, 400 aa, unidentified
MGQPLWAGVDAGKSDHYCVVIDADGKRLLSRRVANDEAALLDLINAITALADGGELTWAIDLNAGGAALLIALLIGAEQRLLYISGRTVHHASGGYRGEGKTDAKDAAVIADQARMRRDLQPLRLGDDIAVELRILTSRHTDLVADRTRAINRLRAQLLEYFPALERAFDYSASKAALILLTGYQTPDGLRRAGAARLAAWLRKRKARNADAVAAAAIEAAKSQHTVVPGQQLAAAMVARLAEEVMTLDTEIGDTDAMIEERFRRHRHAEIILSMPGFGVILGAEFLAATGGDIAAFGNTDRFAAVAGLAPVPRDSGRISGNLKRPRRYNRRLLRACYLASHIAIRTDTASRIYYDRKRAQGKRHTQAVLALARRRLNVMWAMLRDHKPYQPTAPNAATA

SEQ ID NO: 410243 - protein, 354 aa, unidentified
MDVGIPYKGFSQRNHFNKLKYKVMRIKQTIGIDISKLTFDVRIHSNQMFHQFENTNKGFKKLIKWVNSNNSFLKEETIFIFEHTGIYSYLLSVFLTEQQLSFALVPGLEIKRSLGIARGKDDKIDATKIALYGYRLRDEMKLYNMPSEDIINLKRLLSLRGRLVKQRAGYKSSLKELSRVLAFKNNKVLLETQEKMIRYLTKQIDVIEQKLDSVINSNDTLKNVFKLVTSVKCVGRQTALFIIAYTESFTKFKTWRQFASYCGTAPFPNSSGTSLRGNTQVSHLANKKIKSLLDLCAKVAIQHNPEMKAFYKRRVTEGKNKMSTINIIRNKLLSRIFAVVNRETPYVDVMKYAA

SEQ ID NO: 410244 - protein, 349 aa, unidentified
MKIIGCDFHPSYQQIVMWDKATGEMLERALSHERKEEVRAFYAGLQGPVRVGIEASGQSQWFEQLLAELGPEVWIGDAAKIRASCERKQKTDRRDAELLVKLLDEERFPRIWVPTPAERDARQLLLHRHKLVRMRTQLKNQLQALALNQGVQRKRKLWSEAGRKQLEALPLLPWASRRRAELLVLLDQLEASIGELDGAAAEQANTRPAVRRLMTHPGVGPITALAFVLTMGPAQRFRRGKQVASYLGLIPTEHSSGGRGQRLGHISKQGNPFLRGLLVEAAQSAVRHEPERRRAYQRLAQRKCRALAKVAMARKLAVRLYWMLRREVDYAQLIQGSHAGQLESFRGRV

SEQ ID NO: 410245 - protein, 342 aa, unidentified
MSEVTIIGVDLAKRVFQLHGAHADGSVAFRKKLSRGQLIAFVAQQPKCLIAMEACATAHGWGRAFEALGHDVRLIPPSYVKPFVKRQKNDMADAEAIVEAAMRPTMRFVVVKTEDQQARAMLFRTRQMFVGQRTQMINALRGHLAEHGLVAARGPAHLKQLVDALADNDTMLHIEVRELGRMYLEQIEEMNARVAELDAKMRSAAKKADLVRRAQTMPGVGPVTALAIETFAPDLTTFKRGRDFAAWLGLVPKQHSTGGKARLGKTSKMGQRDIRTLLVSGAMAVLQAVERFNTPNNGWLKRLLTRKPRMVAAIALANKMARGLWAMITKHEDYRNPAATMA

SEQ ID NO: 410246 - protein, 411 aa, unidentified
MEVVHTRCAGLDISKKDAKVCVRVAGAGRRKTVETVTTWSSMTGQILALREHLVAEQVTCAVMEATGDYWKPFYYLLEDAGFELLLVNARHVKNLPGRKTDVADATWLAQLGAHGLVRGSFVPPEPIRQLRDLTRARTALTRERSREVQRLEKLLEDAGIKLSAVASDICGISGRAMLEALIAGNRDPAALADLAKRRLRSKIPALTEALSGRFTAHHAFLARVHLDLIDQHTAAIEQISARIEEVIAPFQGFRDLICTIPGISVLTADVVTAETGADMTRFPTADHLASWAGTTPGNNESAGKIKSSRTRPGNPYLQGALGAAAMACAQNPRTYLGARYRRIAARRGPQKANVAIQHSMLVAIWHMATNGSLYDDPGADYFTRINPDRTKKRAIHQLEAMGYEVTLNTAS

SEQ ID NO: 410247 - protein, 406 aa, unidentified
MYSIGIDCAKGKSTVCIIAIETGELIMSSRDYEHTEKDLEKLYETIKKLTGSKDVRVVMEATGIYHWPVLSFLKGKGLFVSVINPLKMKLFAKNYNFRGIKTDKYDALVIASYGAEKWFTLKDFNMKQDETREKLRNLSRVYESYQKPKIILKQNLDAQLEKTMPGIKKIITEDEKLYDFIEYFSHFDNISKLSEAKFTERLDRLAKKKGYRYRRYTPTKIYKLAESGIPTIAFNDECVLINTSLISSLRTIDEGLKDILTRLNELASSLPEYETVINMKGVGYTLAPLIIAEIGDIRLYRSKKSLISMAGIDVPPYESGQFRASHRTITKKGNSHIRRHLYLVMTSLIMAKPKTDTAVYDFMTKKKAEGKLDKQAKVAGMRKFLHIYYARVKDKYKDLDIWNKKQ

SEQ ID NO: 410248 - protein, 327 aa, unidentified
MRAEKVIGIDVASESLTVSIYDGKVHHVEELSYTKASINKILIKPFINQKEQIVIVMEGTGVYHTRVAHQLANENFKVCVVNPLIIKRYIQMHLSRIKTDKSDAKLIAEYGYEHQRKLSYFMPKKEEQIHVDNLIKALDDLLIQKGVCTSQYHALTKQANYSKEAAKSYQRLKEFLQKEIRKLELYLDNYLSTYFSTHYTLLQSIPGVGLKISATILSTYGSFENFQNAKQACSFAGMAPSIYESGTSVKGKSSISKRGNPFIRKMLFMGALSASTYNPLVKQHYKRLIANGKPKMSAMNASAHKLLRIIFGVLKSGKPFEINYVRS

SEQ ID NO: 410249 - protein, 281 aa, unidentified
MEHFIGCDAHKNFSVFVAVNEKGNAGEAVRVAHERQLYQEFLAQLPPQSAIAVEASGHYSWLVDEMERLGHHPKLANPLEAKRRMGLTKKTDKLDAKGLAILLRNGTLPEVWIPPSELRDQRELLRMRIFLVHLKTRVKNRIHGTLARHNVVVPGADLFGVEARLRLKSRLPELPLHSREAIERELATLDFLETQIESAEKQLKSIMQVSAEADLLKTLPCVGEILSMVLMLEIGRVDRFPTAAHLASYAGLVPRVHSSGGHTRMGQVCGNVNRNLKWAFV

SEQ ID NO: 410250 - protein, 322 aa, unidentified
MNKSTIFIGIDISKDVFDVYDPIQGHCQFTNNVKGFRSFIKELGTDHWCVMEATGCYHQQLALFLFDKSLRVTVMNPLVIKRFIQMKLNQVKTDKSDAKMICQYGQEQEMDLWHPSPQYVEECKQLQTITQLYFKQSTAIKNKLHTLQTRGFNKGKMISSLRRQLKSIQKEIKLLEIEMEQLIKANQQDLYNRLNTIPGIGKKTAILLIVTTNGFKDFQSSRQISSYLGLAPNERSSGSSIRGKTRISKTGNPLVRNHLFLCSFTASIHNPQCKALYDRIVVKGKSKKLALIAVCNKLIKQAYGISKSRLAYDKNYVSKLAQ

SEQ ID NO: 410251 - protein, 371 aa, unidentified
MSVYVGIDVHRKRSQVAVIDAKGEVLANRNVPNGVEPILKVIGGLPPGTPAALEAAFGTGWLVELLEDYGFDPHLVHPLRCKAIASARLKNDKVDAAILGQLLRADLLPEAWIAPPPVRQLRALLRHRVQLVRLRTLLRNRIHAVLADHGHDRPAGCWSGAGRAWMASLQLPAVSREVVDDDLALIDALETVIDRLDWEIHQRARSDPRVKVLTQLPGVGPFTALVILAEVGDVSRFGSARKLASWAGLTPTVRGSDRVAHYGHIWKAGLGVAAVGAVRGGTDRQALPAVRRRLPGHRHTAGEEDRHHRGRPQAAHPRLAPAHRRRACRSHTTRRSIRAPGGDAVTDQEEVARLRASSKNTLSGATARSKI

SEQ ID NO: 410252 - protein, 417 aa, unidentified
MAEEIEWFVGIDWASQTHQVCLVDAHGECLGERAVAHGGPGIEELCDWLITRTGATPEVIGVAIEMTQGPIVEALLERGFCVYGINPKQLDRFRDRFTVAGAKDDRRDAHVLGDSLRTDRHAFRRLSNDEPVIVKLREWSRMADDLQQERNRLASRMREQLWRYYPQMLELADDLAADWFLDLWSRAPTPAMAVRLRETTIERFVKAHRLRRWQASEVLSILKQKPLSVAPGVVEAASDHIRTLTVRIRLVNQQLKAAHRKLDELCAQLIPSEEDEPGQQCEQRDVVILRSMPGLGRIILAVLLAEVWQLLRRRDYHALRSLSGVAPVTRRSGKTRVVVRRYACNKRLANALYHWARLATQHDALSRRRYAALRRRGHSHGRALRTVADRLLSVACTLLEQQTLFDPTYEVRDAASG

SEQ ID NO: 410253 - protein, 345 aa, unidentified
MKFTTVSVDLAKAVFQLHAIDQQGKTALRKQLKREQVVPFFANLEPCLVGMEACGGAHYWARKLQALGHTVKLMAPQFVKPYVKSNKNDVADAEAICEAVTRPNMRFVPIKTVEQQAILAVHRARQGFVKARTAQANSIRGLLGEFGVVLPQGIRHIVERLPDILEDHENALPGSLRQLMQRLMEHFKELDRQVVELEREIQQWHRSNEDSCRLAEMPGVGPLTATALVASVGDAKNFSNGRQMAAWLGLVPRQHSSGGKPTLLGISKRGDGYLRTLLIHGARSMVRVVESKTDPSADWLKGLLARRHTNVAVVAQANKTARIAWALLAHGTKFRPDYTPDVTVA

SEQ ID NO: 410254 - protein, 427 aa, unidentified
MSLTQDEKICQVTESTMVIGIDIASEEHYARAFDWRGVELGKVFSFENSAEGFRRFSEWIRGLSEKAEKSHVLIGAEPTGHYWFSLGVYLRDKGVKLVLVNPYHVKQTKELDDNHPSKTDRKDPKTIAKLLIEGRYSEPYIPEGVYAELRVAMNCRWRILKEITSAKNRIQRWLKIYFPEHKTVFGSFDCVSSMAILRIAPMPADLKTLGADGINAVWRKAKLRAVGIKRAARLYTAASDSIGCGDGSVAARIELNLLLDDYEAKLEQYNAIMVMVEELCGQLPEVAELLKIKGIGLVTVAGFLAEVGDLKRFDSPRQIQKLAGLAIRENSSGKHRGKTSISKRGRAKLRAILFRAAIALAAKNPEFREIHSYFTSRTKNPLKKKQSIIAMSCKLIRIFHVIATKGCAYDPDRMLADIHRNMLFDAA

SEQ ID NO: 410255 - protein, 422 aa, unidentified
MDQLQDDAEIVARVAALDIGKAEVVCCVRTPDPAGSRRRVQEVRTFSAMTRSLTAMADWLTGLGVTRVVMEATSDYWKPPFYLLEAAGFAQVWLVNARDVKHLPGRPKTDKLDAVWLCKVAERGMLRPSFVPPTPIRQLRDLTRYRVDLVGERNREKNRVEKLLEDAQIKLSVVASDIFGVSGRAMMDALVAGQRDPTVLAQLARSRMRTKLPALQEAFVGRFTEHHAFLLARMLAHVDAINADIATVEDRIQTLIAPFAAAVARLDDIPGVAATAAHAMIAEIGADMTRFPTAGHLASWAKFAPGVKESAGKSKGTGATGHGNPYLARVLGEAAVGAARTDTFLGERYRRIARRRGKKKAVVAVGRSILVIAWHLLADEQARFTDLGPDHYDTRAGTQRAVRNHIRGLHALGYQVTLQPAA

SEQ ID NO: 410256 - protein, 386 aa, unidentified
MAEVLEKLTGKLDAPTVSTSAQENRRGSTVRPNLDRLTVGVDLGDRWSQYCILGLEGETLAEGQWRTTQEEVREFFQALTVARVVIEVGTHSAWVQDVITEWGHEVLVANPRLMEGSKRRKRKSDRIDANKLARLGRVDPQSLYPIRHRSREVRQDLVVLRARDALVSVRTELINTTRGLVKSMGTRLPGCSSPSFAEKVKDAIPVEVREALLPLVQLTETVNDCIARYDQRIEELGQKKYGYTTLLRQVKGVGPITSLAYVLTLEDPQRFSSSREVGPYLGLVPKQEDSGDCQPQLGISKAGDRMLRRLLVGSSQYMLGAFGPDSDLRRYGLRLCERGGKNAKKRAVVAVARKLAVLLHHLWVTGDVYEPLHHTGAETRTAPAAA

SEQ ID NO: 410257 - protein, 430 aa, unidentified
MKSNTQNAKIEAITEKTLVLGIDVGSKTHYARAFDYRGIEYSKKPFKFSNTEVGFATFKEWILDLKERHEKDKVVPGMEPTGHYWFNLGKFLQDNEMKPVLVNPHHVKKSKELDDNNPTKNDRKDPKVIAGLVREGRYMIPYLPDGVYADLRTASNIRFQLQAELTRIQNRISRWFNIYFPEYKTVYGKPDAKSGMLILKAAPLPEDILTLGIDGVNQIWRDAKLRAVGKARAKTLIEAAEHSVGSKECAVSARMEIRMLLEDYESQNMRLQEVMVLIEELVKEIPMAEKLLEIKGVGIRTVSGFLAEVGDISRFNNPKELQKLAGLALVENSSGKHKGETTISRRGRKRLRYLLFEVAMSLVAKNPEFRELHNYYTTRRLNPLKKMQSLMAIAAKLIRVFYAMLTKGVDYDPKKMISDIKRPTVYLQAA

SEQ ID NO: 410258 - protein, 345 aa, unidentified
MLIQKVPRSFDSGKCAITYDHYIAIDWSMKTMAIGHMSRRDDHPRVFERPSDLKELKEYLESLKGRMILTLEESGTAHWLYLELLDYADRIMICDPFHNRLLCHGPKTDTIDAGKLCELLRAGLLKEVYHSDNGLYELRTLVSAYQDVVCAGVRALNQKKALTLGHRDRGKSACFIGEILQENIDLYRRSKQQYERRLNDVARRNQLVRFQREIDGFGTIGAVRIVATVVDARRFPYAGKYLSYCGLVTHEKLSGGRTYGRRKPRYNRVLKSVYKTAALAALRGASPMREYYDHLLAQGIAERNARHAVARHIARISYGMLKSGTHYEPYRWRGRTKEAIEKRLP

SEQ ID NO: 410259 - protein, 370 aa, unidentified
MAQSSTPYVGMDVHKESIAVAYVAQDYGAEVISLGTIGTRQCDIDKLIRQLQSKSKQLVFVYEAGPCGYWLYRYLTKKGHGCWVVAPSLIPKKSGDRVKTDRRDAIQLARLMRSGDLTPVYGPAVHDEAIRDLSRAREDTLHDLKTAKFRLKAFLLRQDIRYTGRATWGPAHLRWLSEVVCPTPAQQIVFQEYVRAVTEHTDRLQRLDQELHEQVTAWRLCPVVDALQALRGVQFTVAVTTVAELGDLTRFDNPRQLMNYLGLTPSEYSSGERRRQGGITKTGNTHARRALVEGAWAYRYPAKVSRPLQLRLDKLPKPIQDVSWKAQVRLCKRYRQLCARGKNPNQVVVAIARELSAFMWAIAKQVPVTA

SEQ ID NO: 410260 - protein, 362 aa, unidentified
MDYFCGLDVSIDTTAVCVVDDKGTVVLQTSVATDPETLWRTLKPYLPKLKRVGHEAGALSPWLQPELVARGLPAVCLETHHVRSALKAQRNKTDATDALGLAHIVRTGWYKTAYIKSEACYRVRLLLIQRRNLKRKFLDLENTIRHSLKAFGIRLGDTSRGRFDAAVREAVKADEMTSELMDSMLTARAALWKEYTRLHALVVRFTAQQEVCRRFMEIPGVGPVAALTVVTAIDDPERFRRSRDVAAYFGLTSKRWQSGTSIDVHGRISKAGDPDARRALYEAANVLLTRYRGQDKVKTWGQAIAKRRCHQKACVAVARKLAVIMHALWCDGTFYNGNPAEPASERVEKALAKRRKHLGAHA

SEQ ID NO: 410261 - protein, 411 aa, unidentified
MDRIYDNCCGIDVHKKLIVACFRKGNRQEVREFGATTRELLELADWLQSGNCEMTAMESTASYWKPLYNILESSNLNAMVVNARHMKAVPGRKTDVKDAEWIADLLQHGLLQPSYIPDKDQRELRELVRYRKSLVGERTRELNRLQKMLEGANIKLSGTVSDINGKSARSILEYLLTGKFIDEAKYDEMYAQKIIAHNLKATKEQIIDDLNGVMSPLQRRMMKELLNHLDELNVHIKNLDDEIDNFMKPEEKKASKAIQDVTGIGNTSAQAIISVIGTDMSRFPSDKHISSWSGLCPGDNESAKKRKSGKTRKGNSLLRTTLITCAHAAVKNKKSYFYAQFMRISAHRGPKRAYVAVAHSMLIAIYHILKDGVVFKDLGAEYYNQFNKERKINAYLKKLKALGWEAPVVAA

SEQ ID NO: 410262 - protein, 371 aa, unidentified
MRFYSSQHQFYAGIDLHARSMHVCVLDGAGTVVYDRNLACHFPTLLEALAPYRGDLVIGAECMFGWYWLADCCAENHIPFVLGHALYMKLIHGGKAKNDRLDAAKIARLLKGGNFPLAYVYPQGMRETRDLLRRRMYLVHKRAELITHLEILNAQNNLPPFGKKLSYAGNRAELHIPERFAHPSVHMSATLDLDLIDKLDELIAEVELYLTRTAKVDDVQMYHRLRTIPGVGPILALVLLYEIHDLARFEEVGQFLSYARLVRCEHESAGKKLGWGAKKIGNAHLRWAFAEIACLFLRASERAKQWKQKQEQKHGSGKALGILAARLARSVFHMIRKQEAFDAKRFWSGQVSGEQPGPSRKKPAKSRKKAS

SEQ ID NO: 410263 - protein, 332 aa, unidentified
MNMHPQGGVANHDQRPNAGIDVCKQHLDVCLNTLAVRVANDANGWDELTAKLKAAHVDLVALEATGGYERGLVCALQSAGISVARLNLRHARDFAKSMGVLAKTDQVDARTLRDFADVLARHKDRAKYITPVLDERRQALAELMTRRRQLVDMRVAEGNHLEHAGKLTTRSVASVLKTLDKQLAAIDSEIDDHMDQHFKAQRTLLDSVKGVGPVTILTLTAALPELGTLGRRQISKLVGVAPLADDSGPRKGKRRIWGGRANVRAVVYMAALVAIRHNPVIKVFHSRLIAAGKPKKVAIVACMRKLLTILNAMLRDQAMWNAAKHLQIAQPA

SEQ ID NO: 410264 - protein, 493 aa, unidentified
MIGEFYLNIGEVHMGNINIQKHENQTIRKIFDDAGELKKVLIVGLDYAEEAHQVVICNGLGDYRCNPFTVKNNKEGLAFLVSRISNLCSKYTLKKSHVVTGGETPGSWAVNFAYQLHLQGYPVIDLHPHRVAKQSENETTNTDKLSAMTICKCLINKMGHTHYYDEIYTELKLAVRSRSQLGKSRTRISNQIHTCCDTYFPGLMDQKKSGIVPLSKPCFFILENHSIQSIRSEKPAKLMRMLKKYGLSNTNKGVEKIKDLANITLESSPTYERQMRRKLKHLIAQYNLITEQIANAAEEVAYLLRQTPGALLTSLDGISVTLASQLTAEFGDPQLTENIDSKVTYFGLSKRTHQSGGEDKPKKKKGKSQRINKHGKRAILMGVNLVLEHGPDEFRDYFQQRQLSGKNGTHALGRKLLRFVFSVLRTPHEYVPKELEGVNRKDPLWQEHYKKLETKLKRKWRPFTRKPSPNQDHFRQWEKVIKSVFGVTITGEL

SEQ ID NO: 410265 - protein, 354 aa, unidentified
MNSVRYIGMDVHRDTITVAVLDESGRLTMQSVLATRAGTVLDFIHGVRGTLHVTFEEGTHSAWLYDVLVGRVAKLVVCNPRKNALLKSGSKSDAIDARKLAELLRAGMLSPVYHGETSALEVQQVARSYSQLTEDTTRVMARLKAVFRGQAVSCAGKKLYGKRHRGEYLAQLGGGLRRRAEHLYQELDALQPLRHEVRRELIVECRKHAAARWLQSVPFLGPIRAALLIGRVQTPHRFRTKRQFWTYCGLGLETRDSGQYRMVNGQVERRRKPVLIRGLNWNHNHAMKNLFKSTATAASVREGVWREFYLGLLDKGMRPEMARLTLARKIAAITLKIWKKGETFDAEHLKLQAA

SEQ ID NO: 410266 - protein, 344 aa, unidentified
MKIAVLGVDLGKNVCSIVGLSPSGVVVMRRKVRRETLIALAEKLPACIVGMEACCGAHHLGRAFAAQGHDVRLMSPEYVRPYVKAQKNDDRDAEGIAEAATRPTMRFVDLKSQDQLDMQTLHRSRDRLVGERTALINQMRAILLERGMVAAQGKRKLEQFLVVLMDEQSGAGLSPRMVRLVADARAQWAELDRRITAFDDELVRWVRENEDARRLTTIPGVGAIIASALVAAVGHAESFDRGRDLAAWLGLVPRQFTTGGKPKLLGISKRGNKYLRKQLIHGARAALPYVAERDTPLGRWAKGLMSRAHHNVAVVAFANKLARIAWAVLRRGERFAATGVPMAA

SEQ ID NO: 410267 - protein, 372 aa, unidentified
MKKKNRTSPPTNNSRTGTQQKEATPRYDAIKLGIDWHAAHYRVARIIDNAAPEPAQRFTPEAFLRWAQQQLSLAKAVSSCYEAGAGGFVLHRQLTALGVKNLVVAPRKLDREGRGVQTDKTDARDLAMDLDRYVRGNDKALRVVFVPSEEQEQRRAQSRQRQQLQQKRLALAAQGRSLLLSQGWRESNQWWKAQRWEKLRALLPAWLAEMLEVHRGLIVQMEKVATALRRKIQKAAPQERPKGLGAMSLEEIVREVGDFGRFKNRKAPGSYTGLCGGVSASADKVQDLSITKAGNRRLRTMLIEAAWRWVFYQPQCPAVQRWRGVLLDPAAHKRGRKRAIVALARQLFVDLWRWQTARATPEQLGWTMTTAA

SEQ ID NO: 410268 - protein, 380 aa, unidentified
MNAMTVGIDLAKSIFAICEGDSRGHGSRSSILKSGEFLKRLRTLPTGTVVAMEACSSAHSWGRTMQALGLEPRLIAAEFVRPYRKNQRIKNDTRDAEAVLTALHAPGMRFVTIKTEDQQQRLAWHRLREGWKAERTALFNRIRGLLSEFGIVVELGAAKIRRKLAELASDIAYPQSIQLMAESVREQVGVLDQRLAECERQIARQSRSDPAVDRLRSRPGIGPLTADALVATVGDARQFKNGRQFAASLGITPRQHGSGGKTHLGAITRRGDAYLRCLLVQGARCVLQAALRLRKNKPDTLNRLQLWMVKLNDRVGYHKAAVAIANKHARQVWAMITRGEAYNAEAYKDWEAAHATVRPSDIQEASDDDLSTAALAAASV

SEQ ID NO: 410269 - protein, 451 aa, unidentified
MPKDRTRSKPTGLPIIHPFAAGIDIGSRFHVVAVSPDLCDEPVQTFQAFTGDLQRMADWLVATGTKTVVMESTGVYWVAAYEVLESRGLEVILANAREARAVPGRKSDVNDAQWLQRLHACGLLRASFRPGRDIAELRAYLRSREKHTDYAAAHIQHMQKALTFMNIQLHHVIATITGVTGMRIIRAIVAGERDPDKLAAMRDVRCKESLETIRHALVGNYQPEHVFALKQALALYDFYQQCIDECDVEIERAVALLNVAHSIPEAPLPKAKHRSKMPSDPNFDVRTAMYQLAGTDLTQIHGIGPFLALRLIGECGTDLSRWPTAKHFTSWLTLSPGCKISGGKVLSSHTRKTSSRITVALRLAAVTVGRSNTALGAFYRRLAGRIGNAKAVTATARKIAVLFYNAMRYGMDYRDPGADHYEQQYRDRVIKQLHRRAAQFGYSLQPQDSPA

SEQ ID NO: 410270 - protein, 356 aa, unidentified
MISRGVLHIPRIIVGVDTHKDEHVAVVIDKLGARIGQRNLPTTNTGYVGLEHWASGLGEIEAFGVEGTGSYGAGLARFLRGQGHSVVEVNRPDRSTRRRLGKSDPTDAEMAARAVLAGVARDQPKSGVDKVEMIRMLKSTKDSAIKSRTQAINQMKALIVTAPVELRAVLRGLTASQLVARCTGWRNGQLETPTTAAKYALRSLARRYSQLAEEIEGLNKELARLIVAFAPMLMEALGVGPDTAAALLVTAGSNPERLKSEAAFAALCGVSPIPASSGKTNRHRLNRGGNRQANAALYRVVLVRLRYDVRTMTYLQRRTEEGKTKTEVIRCLKRYVAREVFGILHNIGMRHTVQNA

SEQ ID NO: 410271 - protein, 317 aa, unidentified
MSAPAAQFVGIDVSKHQLDIAVRPSGETWTVAHHEAGLSALVARLRELAPTLIVLEATGGLEVPLAGALATAALPVAVVNPRQVRDFARSTGTLAKTDQLDAQILAQFADAVRPEPRPLPDAQAQELTALLQRRRQLVEMLTAEKNRLQIAPRRIRPQLQAHIEWLQQQVAQFDEDLRQLVRSSPLWREKDDLLRSAPGVGPVLATTLVAALPELGTLTRHQIAALVGVAPLNRDSGTLRGRRTVWGGRAQVRTVLYMSTLVAVRHNPVVAAFYQRLRAAGKAPKLALTACMRKLLTILNAMLKHHTRWAPVITQHP

SEQ ID NO: 410272 - protein, 365 aa, unidentified
MTTRQRSTSSSTDPPVRREVVLGVDTHGEVHVAAVISPLGKILGTESFPATAAGYRQLLVWARKLGTVRRAGVEGTGTFGAGLSRYLLAQQIQVFEVNRPDRSARRLLGKSDPLDAQAAARAVLSGRARARAKSGDGPVHSARIFKLAKDSAVKARTQAINQLKAVLVIADPALREGLSSLGNRELFRTCARLGPDDGEDGENAVAQATHMTLRMLAERTEQLTGQINELNQRLTRLVEHHAPQLLVPVGIGPDSAVTLLITMGDNPERLNTEASFAALCGVSPIEYSSGRRITRRLNYGGDRQANAALHRIVFTRLRHDPRTQAYYERRTQEGKTRREIIRCLKRYAAREVFNLVRPVSRAPAL

SEQ ID NO: 410273 - protein, 350 aa, unidentified
MCSLPVFVGLDYHDASVRVCVLDSDGSELANADRRNDWKAIAEFADRFGRPVQAAIESCCGAADLAEELISCAGWSVDLAHPGYVQRMKQNPDKTDCQDAQLVADLERVGYLPRVWLAPHYIRELRQVVRYRLQLTEQRRATKLRVRALLREQRRHAPKGLNAWTKAWEHWLRHEAELSEQGHWLVKQHLAELGRLGMQIRQVEKRLERLTAHDVEVQRLQEQRGIGPVTAWTIRAEIGHFDRFRTGKQLARFCGLSPRNASSGQRQADAGLIRAANPALRAVLIEAAHRLVNYDRYWQKFAQRLRAAGKPGSVVAAAVANRWIRRLYHEMKTPSGELAVAVGPAPSEDS

SEQ ID NO: 410274 - protein, 359 aa, unidentified
MIVIGIDPHMKTHTAVAIEAGTGRSVASTTVSCSAEGHDELTSWARDLDAERTFAIEDCRHVSGRLERHLLSSKERVVRVPPKLMAGTRVSARARGKSDPIDAECVARAALREPRLPEACPSGPGHDIRLLTDYRDDLAQERQRIIQRLRWNCHDLEIGAELPARVLNRYVWLDRLETELGALPPSTRQRIAIEQVRRCRCLTEEVRFLEREIRGLVATLAPELTAIPGCSSICAAHLIGQTGGVARFKGEAAFAMHVGCAPLPISSGKSERHRLNRTGNRRLNSVIHIIAVTQARMHPPAITFLDKKRTEGMSNREALRCLKRHIARQLYKTMLRAENTSGATVVRPGFGSGDAALAV

SEQ ID NO: 410275 - protein, 389 aa, unidentified
MPSVSERPEAPTAIQTHLAASFVSLELSRSIWLITSLSPASGEKMSKHSVRAGDVAALLARFSELKRKASERTGKSFPIVVIQEAGLDGFWLHRVLQSEGVESHVVDPSSIATSRRRRRAKTDRIDGEALLRALLAYKRGEPRVCAMVKAPTPEEEDRRRLCRERKVLIAERVKHVNRVKGLLFSQGISGYEPLRRDRRQRLDELTTGDGRPLPVHLKTQIGRELDRLELLLDQIKEAEAERDALLAAPQPAAPAPAGRMLLEFKGIGAELAAVLWLEALFRHFDNRRQLASYAGLAPTPWQSGSVDHEQGVSKAGNPRLRTSLIQLAWLWLRHQPQSALTLWFKERVSGNGGHFKKSTIVALARKLLVALWKYVTAGVVIDGAVMKDA

SEQ ID NO: 410276 - protein, 375 aa, unidentified
MKGTSPSRGARGEAEYGIEVPRWEVFVSINHLRKGKSMSILYVGIDLAKNVFAVHGVDEHGKPALVRPAVPRAKLHELIACLPPCTVAMEACSGGHHWARLFAGHGHTVRLIAPKFVAPYRMSGVRGKNDAADAAAICEAVQRPAMRFVPVKSIEQQARLMVHRARQGYVQARTATINRLRGLLSELGIVLPLKAATVRRQAGAALEELPGWANTVVGDLLSELHRLDERIAQYDRHMQVIAREDQRAGQLMRLAGVGPTTASAVLAMIGKGHEFACGRQFAAWLGLTPGQYSSGGKTRLGRITKAGDAYLRTLLILGARAVLAAAKNKHDPISRWAIALEARRGYWKAVVAIAAKNARMCWAMLARGEAFKLPA

SEQ ID NO: 410277 - protein, 342 aa, unidentified
MQITTIGLDIAKNVFQVHGIDANEKVVVRKQLRRSQVIAFFKALPPCLIGMEACATAHYWARELTKLGHKVRLMPAKDVKAYVKRNKNDAADAEAICEAVRRPTMRFVRIKSPEQQGQLMQHRTRDVLIRQRTQIINALRAHLAELGIVAAQGNAGVNELRAIVADERETRLPIDARASVIVLAAQLEALECVIGAIEKRIKMQHRSNEASQRVETIPGIGVIGATAIVATVADPTIFRSGRDFAAWIGLVPRQDSTGGKQKLGPISKQGDRYLRRILVVGAIAVLRRALENPGKYPWLTQLLARRPFKVVAVALANKMARTAWALLAHGGTYRAPELAEAA

SEQ ID NO: 410278 - protein, 348 aa, unidentified
MNATIVGVDLAKNIFELAVADADWHIAQRQRLPRGKFLAFFVQLAPCQVVMEACGSAHFWARRIGALGHTVRLLPAHYVKAYVRRNKTDQADAAALIEAARCADIRAVPVKTVEAQQIQSLHRLRSQWLSTRQRYVNTLRGILREFGFAIPLGVNVAKTQIGSAIADADSEVPDALRATLADMLQEIRLLEEKILGIERQLNALTRADLRVQQLHQIPGIGALTSTALRAIVGDIQRFPSGRHFASWLGLTPNERSSAEKRRLGKISKQGDVYLRTLLVHGARSALLAAHRAERAGHSLDRLRRWALDCERQRGHNKATVALANRLARIVWATWKYERAFDGNWSAAA

SEQ ID NO: 410279 - protein, 367 aa, unidentified
MEKSSKVYVGMDVHKESIEVTLAEPGGELRRLGRIGGDRGSLLKMARKLQSKGGERVFVYEAGPCGFWIHRELAALGERCMVVSPALVPKRAGDHVKTDRRDSERLASLARAGELEAIHVPDICDEAIRDLVRGRDDALIAQRRVRQQLKALLLRNDIRYVGKTSWSGAHRRWLSELKLPEPAQQIVFEEYVDAIAVATARIERLTRAIETETLTWRFAPVVAALQAMRGIQFVHAVTLIAELGDLTRFGSARQLMGYLGLVPREASSGEQRRQGSITKAGNGYARRALIEAAWAYRHPARVTRIIATRQTGLPKAACDIAWRAQLRLSAKYRRLNARHLNHNKIVVALARELSGFVWAIGQCVKPQ

SEQ ID NO: 410280 - protein, 363 aa, unidentified
MMIIGCDFHPSGQQVFGIDSASGEVFADAWIAHGGEEVDRFYGGLAAGAVVGVEASGNMVWFERKLEQYGHRLRLGDAAKIRRQEIRKQKHDRRDAELIAQLLLKNEFPDLRWVPSLGERDQRQMLIHRDKLVRMRSQVKNQLQHIALNQGQQKKRQLWSKRGRELLETLPLEPWAKRRRDDLLRWLDQLEGECKQLDAAVEQAAQAHGEARLLMTHPGVGPVISLAFVLTVGPIERFARSRQLVSYLGLNPGEDSSGERRRLGGISKQGSPFLRRLLLQGAQTAVRGDVELGRQYRRLAAKKHRAIAKVMVARKLAVRLFWMRKTQQTYPELVRMRGSSSHPGVSKTDRLSERPASPQASAS

SEQ ID NO: 410281 - protein, 353 aa, unidentified
MSELAEEREVILGVDTHLDVHVAVLIDVVGRVVATTSVPTTAVGYEHLIEWACGFGRLTRAGIEGTGTYGAALARRVQELGVAVLEINRPDRSRRRLRGKNDPTDAENAARAVLAGEANAIPKAQSGVVEAMRAVSMARRSAVKAKTQAINQLRALLVTAPASIRATLWKVKPEQCVARCARLQSLGDTPLLKALTSTLRLLARRWISLAKELHELDAALEELTKRAGRRLLARFGVGPQTAATLLVTAGDNPDRLRSEAALAALCGASPLEASSGKTTRHRLNRGGDRAANNALWTISMVRMRSDPRTRAYVTRRTAEGLSTKEIQRCLKRYIVRELYPLILADLADSIRES

SEQ ID NO: 410282 - protein, 355 aa, unidentified
MKYYTSTTEFNCGIDLHAHQMYVCLMDREGRKLVHTNVRNNDFAYFLKLVAPYRHDLTICAECMFGWYWLSDACQAAGIPFVLAHALYLKVIHGGKNKNDRIDSEKIAHLLRTNLIPPAYVYPADQRPLRALLRQRILYVWRRSELLCRIQSHQLAHNRPPLRQTRPDRQPWAERLLAQEDNPIRQLALQNDLALIGHYDAQIATLETQLQKLTQANAWRDYTLLQTVPGIGEHLGLTILYETGDIARFPTVKDFVSYCRLVKGTVASAGKIKGLRGAKLGNPYLRWAFGEAAVIAKRDHAVIGPLAQRLEARMNGNKFKANTVLAIKLARAVYFMLRGHTVFDPERLVAALTHP

SEQ ID NO: 410283 - protein, 414 aa, unidentified
MLKIVYRVCCGMDVHKSFVVACIASTNEYGVTTYKSKRFSTFTGDLRRCAVWLAENNCKDVCMESTGKYWIPIYNILESTCNIVLAHPKYVKAIRGKKTDKRDAKWIADIFKHDLVAGSFIPPADIRQLRDLVRYRWKLTNFTTGEKNRAQNCLTVSNIKLDDVFSDVFGKTASAITTRILENPAEKITDVSGFRTKGMKATNEQVLAAVDGEMCEEQAEKLRIIRSHMDSLQLCKLDLESLILATAEKYLPQLGLVMTVPGIQSFTAIGIISEIGVDMSVFPTSKHLCSWAGLTPQNNESAGKKKTTRISRAGAYIKPLLVQCALNAVRAKKFPEVRNRYLALKKRRGHKKAIIAIARMLLTAIYNILKKNESYNPELYRQTDRPPAHREVSVAEAIFILQRQGYLVAAPPTP

SEQ ID NO: 410284 - protein, 346 aa, unidentified
MYYAGIDYHKRYSFVSIQNEAGEIKLEYQIPGNHPHLFEEAFGRMKGEVAVVYEASFNWGWLYEVLEGMVNVKSITVANPYKVRLIAETQIKTDKLDARKLALLLRLGVVPECHVPDRQTRARKEVLRQRAYWVRQRTGIRNRVHRIIGRQHGLQMPQVSDLFGAKGKAALHKAVLPEPDNMLLRQNLEMLDNLDKVIRLDEAQIKAEGRQDRAVEIAASVPGIGLVIGSIIATETDGVQRFLGPERYTGYCGLSPSTHSSGGKTYHGRMMWQCNKWLKWAFIEAAWIAVGCSSYFGGFYRYHRGRGKQANTAITLVARRMGRIIYQLLMEDRLYEERNFSPAALI

SEQ ID NO: 410285 - protein, 336 aa, unidentified
MKKIKLFIGIDVSKGWIDIAVIHYQNPYEYGYKRFSNTTEGFVDFLNWLEKNYTTNIEECLVCLEHTGLYSMPICVFLTEKNAQYVVESALQIKRSMGITRGKSDKADSKTIARYIKLHKDDVRLYKMPCRTLIDLKALLSFRERLKKQKHALKVASKELNGFTIQSTYEFVDEHSSEIISIINLKLKEIEKQINQLMNSDKQLRPLFKLSTSVKGVNLIISAYMIYYTNCFTRFESWRKFSCYAGSALFEYTSGKTIKGKTKVSHLANKMMKALLTNGAYSAIQHDRELRNFFQRKIKQGKEEFFVINIIRNKLISRVFAAVKRGTPYVPIMNYC

SEQ ID NO: 410286 - protein, 423 aa, unidentified
MNKSENIRLEEFRQLKKEIRGSQDYLIVGIDVAKNKHNAFFGTATGKTLFKRLVFENTIEGFKRLLIQADAVKIQHNITKTVFGLEPTANYHKPLGEFLIKGNHMVVLVSGVAVKRNRELLDGRWDKHDTKDSANVADLISQGKCLFYEYPPMALRELRNLLSLKRRLKKQEHGLKVRIRNHVLAQYFPEMDSYYGQSESDSLAIVKWCLNPSVIAGLEYEQFLQLVAPQKRGIWHENRLKAIWKKAVDSIGCDAGKSLEFEAKAMVEALEHIRETIRATDAKIKEICLQFPEYSYLLTIPGFGPDVSSKVLAAIGDPFRFETGKQVLKMAGMDLSANRSGKNSDSAIPVISKKGKAYLRYALYQAALIASIRDRHFIVYYTNTLRGREKERGIKTKMRVKLAAKLLIIAWTLMKKKEVFYTP

SEQ ID NO: 410287 - protein, 348 aa, unidentified
MTIAVIGLDTAKTVFQVHGVDESGRAVLKRKLHRSELVRFFEQQPRCTVFLEACGAGHHWGRLLSGLGHEVRLIAAEAVRPFVKRGGKNDAADAAALCVAGTRPETRFVPIKSVEQQAVLALHAARSLLVKQGTMLANALRGLAAEFGLTVPKGLHKLEELVALVGAEEGIPAAGRQAMAELYAHGRTVAERVVALEEQVVRHARRDATARRLATIPGIGPITASLIAATVGDNIGAFRSARHFAAWLGLVPRQHSTGGKARLGRITKAGNAEIRRMLVLGATSVVWRARGWNSKAGLWVRGVLARRPVRLVTVALANKMARIAWALMTREQVYQAQGCAPAAAEAAA

SEQ ID NO: 410288 - protein, 350 aa, unidentified
MSDKISRHTLKPSDGKELLDLCERIRTRVAKETTKRVEMVSCYEAGYDGFWLHRLLQAHDIRNHVIDPASLQVDRRARRAKTDRVDAERLLRSLMAYLRGEPKVWSVVRVPSVAEEDDRRLHRERGRLINERIQHVNRIKGLLAIHGIYDYQPLRRDRIQRLQQLHTADGRTLPPRLEAEILRELQRLEIVIGMIKTIEAERDAIASANTETERGSVKKIQHLAKIKSIGPEFATTLVGEVFYRSFDNRKQLASYVGLTPAHFQSGAMSRDQGISKAGNAKARTVMIELAWLWLRHQPDSDLSVWFRDRVGKLKGRIRRITIVAVARKLLIALWRYLETGLAPEGAILKV

SEQ ID NO: 410289 - protein, 355 aa, unidentified
MIASTAQSKLEELLDPWSPTKSPMRSYRKVESELHLPVYINKKPSSNMNPSPVYVGIDIAKKTLAVSAPGMKKQYTNTPLGHAQLIQALPENAHVVMEATGGYERDLSLCLHAKAIAVSVVNPRHVRDFAKAMGQLAKSDNIDAQMIVAFARAKVPGPDSAPSQSQIELEELMARREQLVALRSIELNRREHHRQKLLKVRADKLIATIEVQIEEIEAKVRELIESEASLKSKRVRMLQVEGIGEITAASVLAFVPELGRVDRSQAAALVGVAPFVCESGMERGKSHVWGGRANVRTCFYMAALTAIRNNRILRDFYQRLRAVGKPGKVAIVAVMRKLVCLLNHLLKKPDFALAH

SEQ ID NO: 410290 - protein, 346 aa, unidentified
MLYAGVDTHKKYSRVVVTNGRGQMVAQASLSNDIASFKDFFIKMDEPVKSVVEAGRTWGIIYDMLEDLGAEPVLANPLKARAIAEAKIKTDSIDARTLADLLRADLIPIVHVPSREVRAQKNLLRQRLWLVSIRTMVKNRIHHILDRNHIVMTQFSDIFGKAGRCEMERLDIPAPDYQLLKAHLEILDNIKEQISSTEKWIAEAVGYHPAIAIVRTVPGLGKIFAPLISLEIDDVKRFSNPGKLCAYAGLVPSTYASGGKVRHGRLISSCNRWLKWAFVEAAWIAQRTSPYCHEYFERIKRRKGANSAATALARRLCEITWYCLTGNRPYEERVCARLPSRVLGRN

SEQ ID NO: 410291 - protein, 340 aa, unidentified
MKLYGAIDLHSTNNVTVVIDEQDRVVYQKRLPNDLALILMELSVYQTELQGIVVESTYNWYWLVDGLMEQGYKVHLANTAAIQQYEGLKYTDDHSDARWLAHVLRLGVLPEGYIYPRADRPVRDLLRKRSQLVRQRTTNLLSIQNLVTRNTGESLSANQIKGLDVQQVDELLPNGDLALAVKANLSVMCSADEQTKILERTVTQRVKLSPQFSLLRTVPGIGQILALTIMLETGDIRRFCSVGNFASYCRCVGSQKVSNGKKKGKGNTKNGNKYLAWAFVEAANFAIRFNSKIKSFYQRKKAKTKGVVAIKAVAHKMCRACYYIMRDHVAFDVTKAFGQK

SEQ ID NO: 410292 - protein, 364 aa, unidentified
MSEPITYVGIDAHKVELHVALLAPDASAPVIWKVQNEARAVERLRRKLEKAAPGPVACCYEAGPCGYVLQRQLERGRVQCQVIAPALVPRKPGERIKTDRRDARKLAELHRAGLLTEVRPPTPAEEAVRDLCRARDDARADRQRCRHRLGKLLLRRGLHYPGRAWTQAHRRWVNGLTWPHPADRVVLDDYLLAIDHLEARLMELDAQLATVATTDPYREPVGWLRCFRGIDTLTAMLLLAELHDVQRFPTARALMAYLGLVPGEHSSGERHRRGPITKTGNTLARRLVVEAAWHYRHRPAVSRTLAQRRSGQPPRVIALADKAQQRLCRRFRRLAEHKPGPVVTVAVARELVGFLWAALHPEAA

SEQ ID NO: 410293 - protein, 409 aa, unidentified
MEVLFERVAGLDVGKASVTVCVRMPGLRGRRGETRTFPTTTRALAVMRDWLLACEVTIAAMESTSTYWKPVFYCLEEVMETWLVNAAHIKSVPRRKTDVKDAEWIAQLLECGLIRPSLVPPADIRRLRMLTRYRVQLMGDRTREVTRLEGMLEDASIKLSSVAASLTSVSARAMLTALIAGERDPRVLADLAKGKMRIKIPQLVEALTGHFNEQHAQLARTMLHRLELIETALAELDAVIATACRPWAHQLELLQTIPGVGPKVAQVILAETGGDMSRFPSAEHLASWAGLAPGVHESAGKHTPVNAPHGNKWLTSMLVEAAGSVGRMKGSNYLSAQFARLTTRRGMSRAAVAVAHSMLVSAYFMLTRDEPYQDLGPDWLAKRNDEAHTRRLVAQLERLGHTVVLNPAA

SEQ ID NO: 410294 - protein, 361 aa, unidentified
MSESMCLAGLDVHQGQSVAAVLDPLTGELSVERLRGGPVDVVPAFLEGLGRPVRAVYEAGPAGFSLARVAAARGLDLRVIAPGSIPSSPGDRVKTDRRDAKRLVRLFAAGELSFSYVPSEEEEHFRDLVRCIDDARKDLMRSRHRLSKFLLRRGLRFPGRSWTQPHQRWLGKISFDDAPSKAVFVDYCCAIDGLVHRRRELIGVLEDAVATSPHADTIARLRCFRGVNTLTAAGLCAEVGNFERFAKPALLSGFLGIVPAEYTSAEKRVQGQITKAGPTHARRLLVEAAHHYRRVPRVSLDLASRQNGQDPRVVAVAWRAQRRLHQRWKHLAETRGKHTGTVAVACARELASFCWEAVTLN

SEQ ID NO: 410295 - protein, 327 aa, unidentified
MEYYVGIDVAKDKIDCLWLRDTQSLKVKTKVLPNTPAGFDLLRAWFEKNITTELSDIHVSLEATSIYHEALAYALYNMGVKVSVVNPAQVRDFAKGLGVRNKTDRKDSHVLARYGALTNPRLWQPEPEAVRTLKALISRLSALETDLQREQNRMEKAQISQSSEAVIKSIQTMIEQLEKEYVRVEKQIDDHIDQNPQLKQDRDRLLTIPAIGKVVSREMLAVLGSRQFERASQVAAFIGVVPKLHESGKLKGRTTLSKQGSGRIRAKLYMAAVVAIQHNPDIKRQYERLLKAGKTKMQALGAAMRKLVQICFGVLKHQSEYRPQIAN

SEQ ID NO: 410296 - protein, 339 aa, unidentified
MFIIGIDPHKGSHTAVAVDRSEAVVDTIRVDADRHQRSRLLEWAARFEPRTWAVEGATGMGAMLAQQLVGVGEHVVDVPAKLSSRVRLLERGRIDKTDPNDARSAAIVAWRTPALNVVASSDEHTVVLRLLADRDHQITAQRTRSICRLHALLCLLIEGGTGRSLTVARAEELLVNVHVDGPITIERIATAGQLLDEVRALDAARTEVRRRHVRALEASKTTVTEVYGIGPLMAAIIVGRTGDVRRFPSAGHFARHNGTAPIEASSGPTKRHRLNPRGDRQLNHAIHMAAVTQVRHDTPGRAYYLRKQAEGKTRKEALRALKRRISDAVYRRLVADTQR

SEQ ID NO: 410297 - protein, 319 aa, unidentified
MFVGIDVAKAELVVGVRPTGKGWTAVNDDQGVRDLVTRIQALGPTLIVLEATGGYELLCVAALAAAGLPVVVVNPRQVRDFARATGQLAKTDRIDAEILARFADTVRPETRTLPTVEAQELDALLTRRRQLLEMLGAERNRLGQVFGSGKKPIKKSLTAHITFLERAVARADAELDAAIAQSAIWKAQDDLLRSVPGVGPILSRTLLADLPELGRLSRREIAKLAGVAPLSRDSGTMRGRRFVQGGRAPVRAVLYMAALVAARRNPVIRAFYERLVAAGKPKKLALVACMRKLLTVLNVMVRTATPWNPEFATMSVATA

SEQ ID NO: 410298 - protein, 403 aa, unidentified
MIVGIDMAKDKHNAFFGTATGKALFKRLVFENTSEGFERLLIQTDTLKIQHGLTKTVFGLEPTANYYKPLAEFLIKCGHIVVLVSGVAVKRNRELLDGRWDKHDTKDSANVADLISQGKCLFYEYPPMALRELRSLLSLKRRLKKQEHGLKGRIRDHLLAAYFPEFDRYYRQSDSQGLAIVRWCLDPSVIAGLKYDEFVRLVAPRTRTIGQRDRLKAIWKKAADSIGCDAGESLEFEAKIMVEGLKHVQEAISEVNAKIEDICCEFPEYSYLLTIPGFGPDVSSKVFGAIGDPFRFKTGKQVLKMAGLDLSANRSGKNSDAAIPVISKKGKADLRYALYQAALIASIRNQSFVMHYTNKLRGREREKGIRTKMRVKLAAKLLIIAWTLMKKKEVFDCKYLNRA

SEQ ID NO: 410299 - protein, 421 aa, unidentified
MENTAARKRKQVPEGYLIIGIDPHKKRHAAVAITQDFTTRDKFKFDNTREGLETMLRRARTEMMKSGCRGIMLAIETGGHYWRNIAYFLDEQGIPFRFINQFTLKRRREGKDLNRRKNDYRDSEVAAQLLCTGEFTESKVPQGVYAELRTAHNAYRRLVKERTRITNLVKGLLDGLFPEFTQVFKDPCALTALSVLCTCPIPRGIAGMTENEFVAAIEVKHQGRLMRRKLRTLHYSARTSIGINAGARSVSSEILFLVEKLELIRRHIRVIEGTLVKLVDETEEGKYLLSIRGLNYIAVAGLVAELGCFKAYRSAKQMIKMAGSNPTESESAGKRGSHTPMSKQGRPVLRYCAWTSVIPMLRFNTDFRAWAKQRRERPAHANPLNGREIVGAALNRLLRLAFAMVKNQTYYRSPQLVQVTG

SEQ ID NO: 410300 - protein, 328 aa, unidentified
MAKGIMICAGIDTGKYKLDIALEGASEQLQVDNTPADHTVLADWLRRHRVKRVGIEASGGYEQPVVAALRRKRFVVVVFQPAQVRAYAKFHLQRAKNDKIDAALIAACTAAVKTIHAPPDPRLAPFAEQLTMIDQIGEDIARLKNRLETCRDPRICQAWSEEIARLTKRRNNELKALVAAIRQHRDLAERLALIESVDGIGLPTAVAIVVRLPEIGRITREQAAALAGLAPYDDDSGEYVGIRHIAGGRQRLRQALYCAALPASMRWNPQLIALYRRLIAAGKEHKRALIACARKLLIFANTVVARGTPWGRTAPTLPTTSHAQLAVA

SEQ ID NO: 410301 - protein, 387 aa, unidentified
MPELNDLSRSLVALEQDATLIAVIEMGLSSWLVAGIVPGIERQPLKKLAADQDGLLQLLHRWRNEAVQAGRTIKRIAVAYEAGRDGFWLARWLRARDIEAYVIHASSVPVSREHRRAKTDRLDTELLKRAFLGWLRGEPKHCSMAAIPAPEDEDARRPSRERESLIKECTRIVNRVKANLARLGIRGFRPSLAQASSQLETLRTPEGAAVPTNTLAELRRDMTRLSFVKQQIKEIETTRAKRLEGPARQGRNAMVHLLARVVGVGVETADMLVQEVFSRNLRDRKAVARYAGLTGAPEESGQKRRERGLAKAGNARVRRGMIQLAWGHLLHQKDGALAEWYRKRTADARGGTRKTMIVALARKLLIALWRLATTGEAPAGLLLRSTA

SEQ ID NO: 410302 - protein, 321 aa, unidentified
MNKEKKYAGVDISKDYLDIAIVGSPDKWRFGNNQTGIKKAIKEFRKKSPVMVVFESTGGLEIDLWLALNEAGIDAAPINPRQIRNFAQALNQQAKTDAIDAQVIAQFGQAIKPKPQVVPNTQELKELVARRNQIVEMISAENCRIKAARQNAIKTDIRANIDWLEKRRDEISKEILQAIENDPELKEKAKLLQSTPGVGPITTSTLLTELPELGKLNRREVAALVGVAPFNHESGRWKGKSIIWGGRGSIRRVLYMAAVAATTCNPVIRVFYQRLIKAGKPTKVALTACMRKLLIILNSMVKHQTHWQHFTPLVETNGHRV

SEQ ID NO: 410303 - protein, 426 aa, unidentified
MADTNHPIAALHWVAIDVARYWNAVLVETASGQRHRFRMTNSAADMQRLIDFLLGLGGRCRVALEPTGDYHRPIAHRLLRANLEVVSISSVAQSRFREAMFNSWDKNDPKDAAVILEMLKQGRTQKYVDPMLAGHHDIQELSKTYYQISRARTKVQHAIINHHVPLYFPEMHKYWTSTRNEWWVKFMIEFPTPAHVRQHTCQEFIELASPVVGRRVHRVAKLTEIWECCADSGALPHDPHSVAVQTFLFTLHHYQHLNDMRRQLEEQAQDLLASDADYINLMSLPGVGPINALTILAEAGNLRRFGHHRQFLKYCGFDLAKSQSGVQRGREQLSKRGNARLRLAFWLAAVVAIRVRENSFREKYDRYVSSNPKDPDLKRKALTAVAAKMARVAYGIIKKNQPYRRFFEQSLPSGSIPLNRAVGAPT

SEQ ID NO: 410304 - protein, 331 aa, unidentified
MIENYVGIDVSKLSFDVFVRENSAHKQFKNESVGFELFTQWLKKQVGHSLNTVLICFEHTGLYSLPLAMFLETGHIPFAMIPALEIKRSLGITRGKNDLVDSKRIAEFAYRFSDKISTTKLPAADIRKIHSLLTLRDRLMTSMKGYTVSRNEMLRVMQKEDIPELFSSYESAITSLQDEIGKLEQAIKAIIKGNEQLRSTFELITTIKGIGFIIASFLIVYTYNFTRFDNWRKFACYSGIAPFEYQSGTSVHGKTQVSSIANQQVKRMLHLAAMTAIHFDTELREYYIRRQADGKSKMAIINIIRNKLVARVFAVVKRGTPFVDMKRYAAR

SEQ ID NO: 410305 - protein, 375 aa, unidentified
MSDHSEAFVGFDTSKLRNAVAIAEGGRDGEVRFVGEIENSAAATAKLVRKLAAKYDRLTFCYEAGPTGYGLHRQIKNLGHACVVAAPSLIPKKPGDRVKTNRRDAVSLAKLLRANELTAVWVADQGHEAMRDLTRARETAMLDLRTKRQQVSAFLLRQGRHYPEAKKTWTKAHMGWLASQKFDHPEQRLVFEEMMLAMRQAQERQVRLAQAIRDAVPEWSLAELVTALMAMRGMDLIAAATFLAEIGDLSRFASPSELMAYLGLVPSEASTGDTIRRGPITKAGNRRARRILVECSWSYQHPPRVGRDKQHKVEAAPPAVREIAWKAQCRLYKRYRALIRNGKLKTIAITAVAREFAGFIWAVSREIATARAAAR

SEQ ID NO: 410306 - protein, 370 aa, unidentified
MKDTIKFVGLDVSKEKIAVAIAEEGREEPRYYGMIAHTPEAIRKLMKKLGEPHTLRVCYEAGPTGYPLYRLLTSLGVHCEVIAPSLIPKRPGERIKTDRRDSIRLAQLYRSGELTSIYVPTPEDEALRDLVRAREDAKEDELRAKHRLTKFLLRNNIKPPTGVNKWTKKYREWLDALKFEKSSLRVVFQEYYHQIKELEQRVRRLEEEIKVQSIEGVHAPIIQALQALRGVALVTATSLAAEIGSFRRFRTPKKFMAYIGLIPSESSSGDKRRQGDTTKTGNRHVRRLLIEAAWSYRYQPAVKGELKRRQDGQSPTVQAISWKAQNRLHRKYFRLISRGKEHGKAITAVARELAGFIWAIAQEVEEASRA

SEQ ID NO: 410307 - protein, 340 aa, unidentified
MSLIKVVGIDLAKYVFSIHGVDEHGKCKLRKTIKRNNLLAEITKLPPCLIGMEACSSAHYWARAFTKLGHTVRIMASKFVIPYRQNEKNDANDAEAICEAVARPKTRFVSIKSEEQQAVLCLHRIRQGLIKDRTASINRLRGLLAEFGIVMPQGRYPAQNTISSILEDAENGLPQLARELLTDVWLSIQGLNQEILKYDRQLYALSKQMPAARLLMSIPGIGEVTATAVVATVNDAKHFSSSRQFAAWVGLVPRQYTTGGNVHLGRISKRGEKHIRTSLIHGARAVIANCKTKTDKTSLWVQGLIERRGFKRAVVALAAKNARLIWALLQSGKEYQVDYV

SEQ ID NO: 410308 - protein, 362 aa, unidentified
MEYFAGLDVSIDETSICVVTDKGDVVAQASVATDPAEIAAALQHYIARLRRVGHEAGSLAPWLHAELAALGVPIVCLETRHVRAAMSAQRNKTDANDALGIAHIMRTGWFRQAYIKTEDCYRMRLLLVQRRSLKRKFLDLENTIRHSLKVFGIRLGSVGRTGFEQAVRKAVAADPVTAGVMECMLRARAALWLEYLTLNKMVVQIAMRDELCRRLMAIPGVGPVTALSFKSAIDDPKRFRRSRDVAAYFGLTSKRWQSGSSIDVQGRISKAGDPEVRRALYEAASAMLTRFKGRDTIKTWGLHLAKTKCHAKARVAVARKLATVMHAMWTDGTCYIGDPDASEADVAASWSAKEKRLSYARS

SEQ ID NO: 410309 - protein, 308 aa, unidentified
MHYLYYVGLDVSKETFDASLVAFEDANEMAHRKFANSRKGICSCLHWVEKRHGIRLDDVIFCAEDMGSYISEMAVCASDRTLNFNFSLISPLVIKYSMGIARGKTDRVDARRIAEYAITHYRKIALYLPAEKELCQLRTWLILRAHLAKQRVAKLVLLEKLDYKEKFADVSIQRSMLQEEIAYAETHMKTIEREMKELITADSNICRNYKLLTSIKGVGPITAIVMLCSTLNFTKITDHRKFACYCGLAPFEHSSGTSVRGGCHTSSMANRDIKVQLNRRALIAIRCDPQLKAFTNAKWLKVNINSAS

SEQ ID NO: 410310 - protein, 393 aa, unidentified
MFIVGIDIAKRSHEAIVLEDSGKVAHKAFSFKNDVSGFQRLLDILLSLSADPNDFLIGMESTGHYWLALYSALRKHGFSVCVLNPIQSNALRNLYIRQVKTDQRDCLIIADVLRFGRYQQGNVPPSELYELRELCRARSFLVDTTADLKHKVIALLDQAFPEYETLFTNIFGLTSSELLLNCSTPEEILAIDTDKLAKILETPSRKRFGRAKAEQIKETAANSFGVILEFGSAGFLIKQYMEHIRYTESQIAQLEEKIAELFSHFDTQLTTIPGIGPTLGATIFSEIGDISRFPSPAKLAAFAGIDPSVKQSGEFQSSHAHMSKRGSPYLRRAIWQASVIAAMHDPAIRAYFEKKRSQGKSYMVAIGHVTRKMNNIIFAVLRDNKPYYPSLDS

SEQ ID NO: 410311 - protein, 364 aa, unidentified
MAHLTNWIGIDDHADKLTIAHFVGNQKQAAKEWEVAPTEAGLRQLVRWLKDLKGPVRCVYEAGPCGYELYRLLVSKGIDCSVAAPSLTPRKPGERIKTNRRDARKLAELLRGGVLTMIIVPDQRQESVRDLQRARDDVRRAVMSARHRLSKFLLRHGRRFRDGSNWGGRHWQWIRSQKMDQPYEQIVLDHYIEVLEARQEELRTLDRHVLNVAKEPDYAPMVAQLCTLRGVDVLSAMIILSELGDLRRFTSARQLMAAVGLVPSEYSTGDKTRRFGITKTGNAHVRHVLVQASWHYQNTPRSGSTVRKRRADQPASVVAVARKADERLHRKYRRLMGRGKRSTVAVTAIARELAGFVWALGQQR

SEQ ID NO: 410312 - protein, 350 aa, unidentified
MKKNSRRQTQMPVTTIGIDLGDKTSRYCMVNQAGEVVEEGSFRNEVHSIEAHFGGEQRRIGLEAGAQSPWISRELKRLGHEVIVANARELKWITSSDSKNDATDARKLALLARADVKLLAPVEHRTAEQQAELAVIRARDAILRARTLLINSARGIAKGFGVRLPKSITSTFGARALADLPATLRLALEGLLQQIDSLSQHIGSYNQGVGELAARHPEVERLTSVPGVGKLTAVAFVLTLGRAERFEHSRDVAGFLGLRPKQRQSGGRDPQLGISKSGDPYMRKILVQCAHHILGPWGKDSALRRWGLAKGEGGRKASLRAIVAVARKLCVLLHRLWASGQYYKPFPKMG

SEQ ID NO: 410313 - protein, 355 aa, unidentified
MRFYTKQHQYYCGIDLHARSLYVCIIDHTGEIVKHKNIDATPEALLDIIKEYRTDIVIAVECMFAWYWVADLCRAEGIPFVLGHALYMKAIHGGKAKNDRIDAHKIAVLLRGGMLPMAYVYPSEMRATRDLLRRRNYLVRKRADLLAHIQNTNHQYNLPRFKKVIAYKRNREGIAEQFSDACVQKSIEVNIALIDQYSCLIKKLEYYLCKKAKIQDMDSFVRLQSIPGIGQTLALVILYEIHDIKRFPRVQDFVSYSRLVKCAKESAGKRYGTSGAKIGNAHLKWAFSEAAVIMLRECKDVNKYKLRLQKKHGKAKALTILAHKIGRAAYYMLKRKEVFDVDRFLNKQLIQTGRA

SEQ ID NO: 410314 - protein, 404 aa, unidentified
MERLHPYCCGLDVHKRIVVACRMSDGEKKTRTFKTTTPALRELVAWLQADGCTHVAMESTGSYWKPVYNLLEDHFELVLVNTRHLKLVPGRKSDVKDAEWIAELLQHGLLRASFVPSREERELRELSRYETSLKGERTAEINRIQKVLEGANIKLATVASNVMGKSGREMLEAIASGIDDPRALAVLGIGRLRAGQDVLTEVLTGLVQPHQRFMLRQQLRHVDELDRHIAEVAAEIGERLAPFAETRDRLETIPGVGGRAAEIALCEIGTNVDRFPTAQHLASWAGLCPGMNESAGRNRSGRTPKGNQALRPALVQAALAAGRTQTYLGAQYRRFKLRMGPKKAAVAVAHSILVIIYHILRDQTDFHDLGPNYFEPRDRHRAARTHIKRLERLGFTVTLSPEAA

SEQ ID NO: 410315 - protein, 389 aa, unidentified
MLSEEKEYREGERTAVGIDPCKEFLQLAILSPDGKKEFKKLPLSPSITSEISKSTVPERTQIGIESYASYGKLFVFELLKKGYDVREVNPSISNKLTNLITEGHSDCLDAESIAKALVLIPDLPRVSFTEPKLLLSKLSRLRKRLSKDLNGYLNRLHVALTESYGAVYKRLFRSIFSQKALAFFDRYPTINDAFGHKREVMAALGEEAWELLCEAGKWGESFYLEYLKVEIRCLIAIIKALLEAKKELGKKIEEVGREDEDVRLLRTFPGIDYVTAATLLSEIGSVERFGKESSLSSYCGVSPVMWQSGTSGVKAKRRKRYNRHLKGMLYFLSLSQIRINPESRDYYRRKRQEGKTHWQAMNALSRQLIKIIYYMLTNQECYKRERIVH

SEQ ID NO: 410316 - protein, 325 aa, unidentified
MSRIQGKDYTDSATAYAGIDVCKAWLDVHVLGAGRDEGFRVANTAEGIAELLARLEGLPLGRVVLEATGRMHHAIWRTLDGAGIAVVELNPYRSRKFADTIGQLAKTDAIDARLLALAAASLALAPTPPRPQSILRLKELQALRRNLVTRRVALANQLAAATDATVRKILAAEQRLVQRHVAELDAEILALVEADARLARTHAILVSVPGIGSVSACTLIAGLPELGAATDKQIAALAGVAPMNWDSGATRGRRCIKGGRAPLRAALHMAALAAARANPALAAVRDRMRQAGKHASVIRIAILRRLIVLANALVAQDRLWTPQRP

SEQ ID NO: 410317 - protein, 403 aa, unidentified
MNSVGIDISKGRSTIAVMRPFGEVVISPFEVRHTGSELSKLAKQLKSLDGETRVVMEATGNYHASVAKLLHNAGLYVSVINAKLVHGYGNNELRRVKTDRKDAVKLANYGLDRWLTLPRYIPEEDTRLLLKNCYRQYRQYSKVQTVLKNNLISLLDTVFPNANRLFSSPIRGDGSEKWVDFVAEFWHCRCVSEKSERAFTSKYLRWCRKHGYNFREAKAHTIYAEASGHIGVMPKSETTKLLVEQAVSQLRATSTALAALKHEMQSLASQLPEYPVVMGMFGVGPTLGPQLIAEIGDVRRFYSKKALVAYAGLDAPPNDSGDVTGRHKSMSKIGASSLRRTLFLVMSVYLQTAPLDEPVYQFMDRKRAEGKPYRVYMMASANKFLRIYYATVKAYLESLEHTA

SEQ ID NO: 410318 - protein, 346 aa, unidentified
MLYAGLDLSRKRLDVCLLDEQGARVVVTAAPPDADGLRGLAERLAGHGEPIYAALESMNGARFVRDELAQLGWEVALADAQKVKGLAPLAAKTDRIDAYVLAELARRDLVPAIWLPSPAVRAERERARFRLHLVRHRAALKARIHASLIAYGHPCPVSDLFGTRGRALLDSFALPEAWRASTAASLRLIEHLDDEIGACEAELRRLGADHRYVPLLMSTPGIAWILAYTIASEIGEIERFATPKKLVGYTGLCPRVYQSGACDRRGPLAKNGPEYLRWALIEAAMHAAHHPAYAAHYEATKRRLGRQRGAKVARVEVARKLAEAIWYMLTRSETFAPAGPTAALVA

SEQ ID NO: 410319 - protein, 360 aa, unidentified
MSFNGTSVGLDVHALSVVAHAFDEETGRVERARLCPDHGEILDWLHQLRGPVRVVYEAGPTGFGLARALADAEIDCVVAAPSKLIRPSGDRVKTDARDAAHLARLLRLGEITAVTVPEADVEAVRDLIRAREDARADLMRVRHRLSKLLLRQGRVYSGGKAWTGVHEIWLRRQRFEDSHTKAAFDHHVDAVLTATAARDRLDEQIIDVAASPRWADLVDRLGCLRGISALSGLALTVEIGDWTRFTGSSIGAYVGLVPTEYSSGATRVQGSITKAGNAHVRRLLIESAWHHRAAYRNPGPTMRARWAKVDPALKARGHAGNRRLHQQWCRFDERKKPHVVANVAVARQLAGWCWSLATLT

SEQ ID NO: 410320 - protein, 345 aa, unidentified
METIYYIGLDVHKKTIAYCVKNISGKIVQEGTIKANRQSLSQWVSTLPGSWMGALEATMFTGWIYDFLKPHAVELKVAHPQMLKAITAAKKKNDRADAAKLADLLRVNLLPECTMLPENIRELRRVLRYRNLVVRLATQMKNKISGLLMEVGAEYEKKRLHGSKYFTELLETIEDVPDSVKDLLQLSRGNLELFTTAQRRLTQGLRKQPLIRNRVDCLMSIPGVGEILALTWVLEVGDVNRFGNSRQAISYCGLCSAQRESAGKEKRGPISKQRNKYLQTMLIEAAKLAPNWNRQLAELREKELTKGNRNRATLAVARKLVEYLLAVDRRGTPFIVKESQQERVA

SEQ ID NO: 410321 - protein, 347 aa, unidentified
MKTVMAGIDLHSNNAMVGLVDQDGARVAHQKLQCDLKEIVAFLEPYKAGLESVAVESTYNWYWLVDGLKAAGYPVVLANPSKIDQYSGIKHADDKNDAFFLAELSRLKILPTGYVYDPILRPVRDLLRRRMSLVHQRTSLMLSFKSLYTRTTGRAMKLGQLKAMTVAQAKGLYEHPANQLIAQVHKGHIEGLSQSIEKIEEVVLKASSHLPYYPKLKTLPGVGIVLGLTITLEVGEIGRFADAGHFASYCRTVDSQRLSNNKKKGENNQKCGNKYLAWAFVEAAHFARRSDDLCRRWYDRKAAKTSTVIATKALACKLAKAAWYLMAEGSEYDERRVFPELAVKAQN

SEQ ID NO: 410322 - protein, 371 aa, unidentified
MSNDALGFARLLGDLRTVHKPEIIFEATGVYSRRLQTFLEDNGYAYTRLNPLEAKKQLDSLRVRKTDQIDAEKLAQSQFVLNRKPTYVQEEVYQELRDLSRFYQNLTEDIVRAKNRLHKVLQVTFPEIETVLSKPTGEQYWNLVTAFPCKDFVLDLSKDELLESIRQSTSKRISDKRVAYLAEKLIALANQSYCAVKKTSPILEEVRYYAKELLRLSEQRQTVLDQMVELAQPLPEYDILLSIPGIAETTAASIIGELGDIRRFQSTNQINAFIGIDLRHYESGNFLAKEHITKRGNPYARKILFKCIHNIASASHTNPCHIADFYEKRKRQSQTTSTKPHTIASIHRLIRTMYYLITHNKLYDHTSTQNR

SEQ ID NO: 410323 - protein, 352 aa, unidentified
MRRSKHQVTSEENLFVGIDLHKVRWHVTIRTVDLELFSASIPGTWEALHRVLARYPGHPLQAVYEAGYFGFRLHDRLVAHNIPCIVTPPSLVPQEYGNRVKTDRRDSSKLAHLLAKGMLKRVWVPSEEELYHRQVIRRRRQLVRDRVRTQSRIKAELSFFGIRLEEPRGRWTQIYFETLQSIRFGNRWMQESFNRLLEQYEFLSAQIDKQTQLLRELSETALYQERVKILQSIPGVGLISSMELLLELQDVSRFRRAEQLAAYVGLTPSQYSSADKVRMGRITGIGKNTLRAILVEASWKLITKDQVMREKYERIKIRSGGKRAIVAIARTLLLRMRRMLLDGRAYALPLAA

SEQ ID NO: 410324 - protein, 419 aa, unidentified
MEVLVECCAGIDIGKDEVVACVRTPVARGRGRCKQTRTFSSFTGSLEAMADWFTAEGVTEIAMEATGSYWKPVWYVLEDRAFAVKLVNAHHVKILPGRKSDVLDAEWLAELLEHGLLRGSFVPPPAIRQLRDLTRYRKRLIQAHTSECQRIQKTLEDAGIKLDSVASDVLGVSGRAMLAALVAGERDPDVLAELAKGRLRRKIPALRQALRGRFTDHHALLIGLCLDHTAHLEAAIARLDERVDTLFATHTSETGLPFVHARDRLDTISGVGKRAAETIIAEVGVDMTRFPTAAHLSSWAGLAPGNNITGGKRGSGKTTKGDVWLIDILTQCAWAAARTRDTYLSAQFWRLARRIGKKKAAVAVAHSILVICWHLLTHDCDYDDLGGDWFTRRNTDRQRDRLIKQLTGLGYYVTLDKIA

SEQ ID NO: 410325 - protein, 344 aa, unidentified
MKVTTLGIDLAKNVFQLHGVNEYGKTVIKKQIRRDQMAEFFANLPACLIGMEACGSAHHWARKLEGFGHTVKLMAPQFVKPYVKTNKNDAADAEAICEAVARPNMRFVSIKNIEQQAVLALHRVRQGFVKARTAQANQIRGLLSEFGLIVPQGIGYIASRVPELIEDAGNELPGSFRMLVERLLDHLRTLDRQVVELETQIVRWHCQSAASSKLAQVPGIGPITASALVASLGDAKNFDGGRQVAAWLGLVPKQHASGGKQKLLGISKRGNTYLRTLLIHGARSVIYRAQNKPESCRWINGVVSRRNKNVAAVALANKNARIVWALLANEREFRPDYTTAKAAT

SEQ ID NO: 410326 - protein, 317 aa, unidentified
MTTTYAGIDIAKQGFDLAFEPKRKVQHFANNAKGIAQCCKLLKRCQPERIVMEPTGGYEVALLIQLQAAGLKVSVINARRIREFARATGQLAKTDTLDAQILARYGKVLKPELQEPLDPHSRTLKALVARRRQLVTMHTAEANRLEHASDTGVKDSIDTVLKMIEVQIETIERQIAEQIESRAELKTKTEQLQSTPGIGVTTAALLVTELPELGRLNRRQVAALVGVAPINRDSGTYRGKRMTGGGRRDLRARLFMPTLSAIRFNPAIGNFYRRLLSKGKAKMTAVIAAMRKLLTILNLMIAQNQSWNPAKAQIQCD

SEQ ID NO: 410327 - protein, 310 aa, unidentified
MNSETFVGVDVSKSSLALNMLPDNHSQQFSNDDRGITQLVKFLRKINPTLIVFESTGGLEMLAVSSLAQHRLPVVIINPRQIRDFAKATGKLAKTDAIDAATIARFARDIRPQIRPFKDEQTQALTALNTRRRQIVDMLVAEKNRLHTALKPNRRSIEDHIDWLQKALSGINNDIDQMIKQSPIWCKNDKILQSFKGVGPVTSATLLCALPELGSLDRKKIAALVGVAPVNCDSGRYRGRRRIMGGRAEVRHSLYMATVSALRYNPTIKSFYNRLINAGKPPKLALTACMRKILVTLNAMMKNRSYWIAS

SEQ ID NO: 410328 - protein, 392 aa, unidentified
MTATRNSKFTTQSGALYLAFELGEGAWKLAFTIGMGQQPRERCMPARDVIRLHQEIAKAKKRFGLPEDAPVHSCYEAGRDGFWLHRHLTAQGIDNSVVDSASIEVNRRLRRAKTDRLDAAKLLNLLLRYHGGERKVWSVVRVPNLSDEDARQLHRELEALKDERTSHVNRIKGLLASQGLEAPEVNKDFSDWLKQARLWDGSALPRELHQRLLRELERWQLLKRQIRDLEAERRRRIRCDDTPHVDKVRALLNLWGIGLSGGWLVIYELFAWRRFDNRKQVGASVGLTPTPYQSSKMRREQGISKAGNRRMRRMLTELAWCWLRWQPDSDLSRWYMYRFGTGKGRSRKLGIIALARKLVIALWRYVEHGELPKGARLADWRTKVKGCSKAVA

SEQ ID NO: 410329 - protein, 410 aa, unidentified
MTGTEPHAWETGLMENITYIGLDVHKATVCVALAENGRGGEVRQIGVFENRSEILVKLAARLSKGGRRLSFCYEAGPCGYGLHRLLTGCGYDCVVVAPSLIPVKAGDRVKTDRRDAAMLAKLHRAGELTSIWIPDAAHEAMRDLVRARATAGRVLSKARQHLQSFLLRHDQIYRGVRAWTLAYRRWLTTVRFAHPAQQIVLQDYIHAVQDAEARVDRLTRQIEELLPNWSMSPVVTALQAMRGVALVVAVTVVAEVGDFRRFANARQLMAYLGLVPSEHSSGATVRRGGITKAGNTLARRVLIEGAWTYRMPARVSRKLHDRNEKLPPAIRDIAWKGQMRLCSRYRRLAAAGKPKVVVTTAIAREMVGFIWGIASIAQPNLGLTKTASHDPAQPTSQVQLANVTVTIPGG

SEQ ID NO: 410330 - protein, 373 aa, unidentified
MYYGTSAHKRINNYMVLGGVVMKVYAGIDLHSSNNYVGIIDEQDRRLYQKRLPNQIDHILCALEPFKETLEGVVVESTYNWYWIVDGLQEHGYRVHLANPSAIKQYEGLKHTDDKWDSFWLAHMKRLNILPEGYIYPKEERSVRDALRRRLFFVRHRTSHILSIQSTITRNLGYKVSARDVKRLDESDVDKLFDDPYLRLVVRNGISAIRFLKESIKEIEGAVTSHVQVKPEFEYLQTMPGIGKILGLTIMLEVGDINRFPSAGNYSSYCRCVKSEKLSNNKKKGEGNRKNGNKYLGWAYVEAANFAVRFYPEFQRFYQRKKAKKNGVVAIKALSNKLARASYHVMRDRVPYDIDRHFYNYSACGRESEKGLV

SEQ ID NO: 410331 - protein, 427 aa, unidentified
MPYAIAGIDVHKKMLAVVVADVEVEEEYRFERLKVGTSPGELRALADWLVEREVEEVVMESTAQYWRPVWEALERWWRPRRQAHARATPMSGTLHLAQAQSNRGAGGRKKDFPDAERLVKRLVAQELTLSFVPDVEQRLWRTVMRRKYQVTRNRVQLQNRLEALLEEAHIKVSSVVSDLLGVSARRMLQALANGETDPAALSTLAAARLRATPEQLCDGFQACATLHPVYRRLLKLALEKLRVIEDHLGQLDQQMADLLAAHHDAVQRLAEVPGLGVDSAQQIIAEVGATAATFPSPKHLASWMGACPGTEESAGKNYSHRCPKGNRQMRRVLNQAANAAVKAKGTIFAIVYRRLVPRLGHGQAIGAITHRLCRLIWKILHQGVRYEERGPAVSAEAKKVRARKMVRELRSLGYRVELLPAPSNSPA

SEQ ID NO: 410332 - protein, 454 aa, unidentified
MPKKAKIEKTATGKILKVVNPNAAGIDIASSEKQVCVPEDRDSECNRTFGCFTQDLKQIADWLKSCRIDTIAMESTGVYWLPLYFILKERGFDVILVNARDVKNYSGRKTDEADAEWLMMLHSYGLLKCSFQPENEARAIRNLTRHRSNLLQSSSREALHMQKAMEQMNLKLGNVISDLLGKSGMSIIRAIISGNHDPRELAALAEENCKASKEEIAKSLEGSWAEDHLFELEQAFDLYNFIQEQVNKCDRQIEMHLIRYRAKLDHPSDDNFQRCKKKIGKKNAVDFDVEKYAFDIWKVNIMAIPGMSAISLLQLIGELGHNFADKFETCHSFCSWLNLVPNNKVSGGKLLSSKVPKKTNICGQVFRLCANSLKRNKTTLGYYFRRIQSRCGYSQAIVATAHKIAKIFFTMIKNRTEYDESETGINERDLLERKITMTQRRLDKLNRQLEVALV

SEQ ID NO: 410333 - protein, 452 aa, unidentified
MAQGSGLTRGDRNRNAKIAALREVVRPGRAVLAVDLGEDKQVAVVMDDQGRVLARKVVKAKAHQLGGLVGWGAERAARAGSGGLVVGCEPTGHRWKALMGLADAAGHGFVCVQPLAVHRAREGDDYTLGKTDHRDSYLIGKLVIRLECYLPERAGAEWARLRHLGARRFALVAEVTACMQQAGDLLGCAWPAPLAAAARPLESVTWLAAMAVITGRCCGDPRRVRKMGYEKFLAAIRRELPRWGGKIVRHSIVRGLWQALGDAGGVAAQRRGALERVHLLLGDWRALRARLADTGARMTALLDELGLTELVTSIDGMSALSAAVILAETGDPARFASGRAVVKHAGLNPAERTSATITGQARISRRGRPGLRTAAWRAVWGALRHNRVLGAKYAHLTGRDGNRLADGQARAACAATVLRWLWAVITTGQAWDARIAAGQIPPRRAGAVPAAA

SEQ ID NO: 410334 - protein, 349 aa, unidentified
MTTMADPRAAVFGGVDTHLDVHVAAALDSVGAELGVKSFPTTAAGYVRLLEWLTGFGAVTKVGVEGTGSYGAGLTRHLLDAGVVVVEVDRPNRQKRRRLGKSDPVDAMSAARAALSGDAHGAAKTRNGSVEAIRVLRVTRSSARHDRTEALNQLRSLVSTAPDELRQPLRYLTGLQLIATTAALRPGQQVDVLSATKTALRELGRRAQYLADQIAFLDTLLVPLVATTAPKMITRHGVGTDTAGALLVAAGDNPERLFHEAAFAHLCGSSPIEASSGKVTRHRLNRGGDRQANHALWRIVMVRMVSDPDTRAYVERRTKEGKSKREIIRCLKRYVARELFPLLPRDTSP

SEQ ID NO: 410335 - protein, 327 aa, unidentified
MIGVDLAKNVFVLHGASMSGDLKFRKKLSRLRFRQFMAEQPSAVVVMEACGGAHYWAREMIKFGHEVRLIAPQYVKPFVKRQKNDAADAEAIVIAAQRPEMRFVEPRSEEQQAKAVLFRARERLVHERTDLVNVLRAVLYEYGLVVPQGICHVTRIEGIILEPNSDLPELVRKECRDLIDQIRDKTARIQTKTAQLKEMAAQTDESRRLQTMPGVGPLTALAVGTFAPDMASFKRGRDFAAWLGLVPRQHSSGGKERLASFAILRIPSEPANHRCAGGTVFPPLLRGAWPPRRIRCPQNQWAKDHMIVMRRFELLQINGTYCRDTCL

SEQ ID NO: 410336 - protein, 457 aa, unidentified
MPWKKGKPKSDRTMSMVHPNAAAIDVGATLLMAAVRADRTPEPVRSFGTFTTDLHRLVDWFAECGVETVAMESTSVYWIPIYEMLEARGFTVFLVNARDAKHVPGRKTDVSDAQWLQRLHSYGLLRASFRPKGQFTALRAYVRQRERLLEYAASHIQHMQKALTEMNLQLHHVVADITGATGLRIVRAILSGEHDPKVLASLRDYRCHATAETIEKALTGNYRAEHLFALEQALALYDAYHEKVSACDARIEAVMKDLSIDRSHDAATLTPSRRRTDQMNGLAFDVRAALFALLGKDITKIDGFGPYLSLKLVAECGDDLSAWPNAKHFTSWLGLAPNNKISGGKVLSARTKRSGSRAAALLRLAAVTVGRTDTALGAFYRRLSARIGKAKAVTATARKIAVLFYNAVRHGMEYVDPGASFYETRYRKRVVENLHRRAKTFGFVLQPIEAASSGAVS

SEQ ID NO: 410337 - protein, 334 aa, unidentified
MPSKADTAVARTIGIDTGKNTLHMIGLDERGAIVLREKISRARIAARFVNLPPCLVGIEAGMASHYVARELVALGHEVKQVPPAYSKPFRHGHKNDFRDAHAVAEAVERPSTRCVPIKTDGQLDLQALHRVRSRLIGNRTAVINQIRGFLLEHGIPVRQGHHFLRKQLPLILATRTDVLSPRMIRIIGDLMADWKYLDERIERVTDEIEALAHADEGCQQLITVPGIGPIISSAMVAAIGNGAAFCKGRDFAAWLGLVPKQMSTGDRTILGRITKLGNRYLRMLFIQGAATRRLHRNVLAVALANKLARIAWTVLAQGRRYEARVEPRVEPAAA

SEQ ID NO: 410338 - protein, 367 aa, unidentified
MTVTIVDAARPVTGGADTHRDLNLAPCLVTGGVDTHLDVNVAAALDAIGGLLAVAEFPTTSAGHRELLGWLAGFGPVARAGVEGTGSYGAGLARFLRAAGVAVVEVDRPNRQARRRSGKSDPLDAIEAARAALSGRASGAAKSRDGNVEAIRALVVAKRSARSAKIQALNQIRHLSFTAPEQLRQRLAGVSRHHLAARAAALRPATGAGADPVVAATKTALRLLGRRVLALDEEKARIDALLTGLVTQTAPQLLALFGVGVDTAAALLVTAGDNPGRLRSEAAWAHLCGTAPIPASSGKVTRYRLNRGGDRQANRALWGIVITRLRNDPRTKAYMDRRLGEGRSKPEVIRILKRYVAREVYHHLPRT

SEQ ID NO: 410339 - protein, 412 aa, unidentified
MNKRVEKACGIDVHQAFLAATILTSSGIKDTREFSTCLDGLLDLKTWILENRCQRVAIESTGIYHIPTYTILEGEVETIVANPLQIKSIPGRKNDDIDSEWIAEVCLNGQIKPSYIPGKEIRGLRELTRSHVKFTHTRTVLKNKVHKILQRAGVRISGVLSDIFGKSGIIILNGILDGKAIEQISSELNDKRIKKRMPELKDAIKGELSQNDIFVIKECLETVKFLDAKIKEFDSRISQSLSEMQREQEILMSIPGIGFTISAAAIAEIGDIKVFPRPKNLVSWGGLAPAVDESAGKSSNGHITKHGNKYLRTILVLAANSIAIGKPNKLRFFYQRIKGKKGHKKAIVALARKLAAIIHHLLSNNEKYSEEELKEKKVIFPKFVPVQDLNLDEMIELLCEAGYTVNKNSSAG

SEQ ID NO: 410340 - protein, 342 aa, unidentified
MQITTIGLDIAKNVFQVHGIDATEKVVVRKQLRRGQMLAFFKALAPCLIGMEACATAHYWARELTKLGHQVRLMPAKDVKAYVKRNKNDAADAEAICEAVRRPTMRFVPVKSAEQQARLMQHRARDLLMRQRTQLINALRAHLAELGIAAAQGREGIKELLAIVAQDGDTRLPVDAHASLIVLAAQLQAVQTMIGSIEKRIVAQHRSSEENKRLQTIPGIGVLGASTIAAVVPDPKVFRSGRDFAAWIGIVPREDSTGGKQKLGPISKQGDRYLRRILVVGACAVLRRARQQPEKYPWLTQLLARRPFKVVAVALANKMARIAWALLAKGGTYRAPALAAAA

SEQ ID NO: 410341 - protein, 464 aa, unidentified
MGWTLGIDLACRAAHVASLAGPDGALVWSGRTFFTRPDDLERLWADVGVDAGELTVVMEPTRNAWAPVAAWFDRRGVKVVLVPTTQSADLRAYYSKHTKNDRLDSTLLARLPLLHPEGLRAHTGHGPADPLRRAAKQRSSIVKRRTAVFARIDALLELLGPGWYQELGTDYGNAAMHLLARYADPNDLIRLGPARLSRFLIRYSHGQWREPKAAALLQAARQSLALWDTDGMDFAALSADIAVEAEQALQLSEQLDTLKVRLTQLYVQADPDQIVRTAPGVGPILAATITGRLGDPHRFTSLAAVRSYSGLVPKVSQSGQAEHHGGITKAGDRTLRQAAFMAADMARRCDPQLAAKYVRLMNAGRHHDSAVCHIATVLLTRIAACLRTGQPYVIRDLDGTALTEAQGRRIVTEQHQVDPKIRAMNASTRKSQRLKYRTSRVSQKSLSASTSRPVTNQPTSRHVA

SEQ ID NO: 410342 - protein, 424 aa, unidentified
MSKKKSRVAGLEALYARVCGLDVHKKVIVACVRILDAKDGTVQSTLRQFGAMTADLKDLRGWLGEFKVTHVAMESTGIYWQPVFNLLEGHFKTWVVNAQHIKKVPGRKTDVKDAEWIAQLLQCGLLRPSFVPERQQRELRDLTRQQTKLVQQRNSVDNRIQKVLETANIKLGSVASDVMGVSGRKMIEALIGGEKDVTVLAELAQRKLRGKIPELQRALEGELTEHHRFLLSRLLGQYDFLEKEIANVSERLGAVAPPLFRAAVEQLDAIAGVGERGGRALLAETGIDMSRFPSHKHLASWAGQCPGNHESAGKRRSGKTPPANRHLDAVLTEMAHAAVRTKNSYFKAQYHHLAGRRGKKRAIGAVKHSLLVTVYFMLRDNKPYTDLGVDYFDKLNPQQRIRYHVRKLQQLGQEVELSPMAVAA

SEQ ID NO: 410343 - protein, 387 aa, unidentified
MPQPNDLSRSLVALDQDSTIIAVVEMSQSSWLVAGMLPGIERQPRKKLEPSAERLLGLLHRWRDEAVKAGRKITRIALAFEAGRDGFWLARWLRAHGVEAHVIHPSSVAVSREHRRAKTDRLDTELLKRGFLGWLRGERGHCTMARIPTIAEEDAKRPNRERECLVRERTRIVNRMKGTLARLGIRNFKPTLRKAAERVTTLHTPEGSALPPNVSAELQRNMARLGFVVSQIKEIEAARQKRLEQEPETEPHAMVRHLARVVGVGVETADILVNEVLSRPMRDRKAVARYAGLTGSPDESGAKRREQGLAKAGNARVRRGMIQLAWRFLRFQKESALALWYRARTADSRVGTRKTMIVALARKLLIALWRFVTTGETLEGVVLRPAG

SEQ ID NO: 410344 - protein, 393 aa, unidentified
MTQSSSSERVVIAVDPHKASWTAAAVDAALQPLEVIRVGVSAEGYRRLRRFAQRWNDHSWAIEGAAGLGAPLTQRLHTDGIEVTDVPAKLAARVRVLSTGHGRKTDEADAISVGIAALTATRLNTASVDAAITALRALVEHRDDLVKTRTQTVNRLHVLLTHLTPAGAPRGLTADRAAEILRQIRPREPAAKTLRSLAADLIAEIRALDRRIIKAASDITTAVESSGSTLTELSGIGTLNAAKIIARVGTIDRFRSADAFASYTGTAPIAASSGDVTRHRLSRAGDRQLNCCLHTMAISQISRDTPGRTYYRRKRAAGKSHREALRCLKRRLSDTVYRQLVRDAETLKGAGPARHTGATPTSCAAGLHPITSTSDKSLTGPTKPHPTTGDRTA

SEQ ID NO: 410345 - protein, 390 aa, unidentified
MVYVGIDVAKDTHECLIVNGDGVIVSQPFAIANNHVGFEHLFSKMESCHNDLSDIKVGLEATGHYSDNLLAFLVSKGLTTIVINPLHTNLYRKSLSLRKTKTDRIDAHSIVTLLRTETLKPYSPMSSHIRELKSLTRYRFSLVQDLARIKGSYARLCVILFPELEKIVPTLHLISVYTMLAELPTAETIAACHLSHLENILSASAKGRYGKDKAVEIHKAAMESIGSHSDAKALELQQTIQRILCLEAQIEAVEAKINPIIDSLQSPIMTVPGISYRMAAIIIAETGNFTNFTHAEQVLAFAGLEPSVYQSGQLTSTHAKMVKRGSKYLRYALFNAAKYVCRWDPHFGAYLAKKRSEGKPYNVAVSHAAKKLVRVLFHLVKTNQSFISQA

SEQ ID NO: 410346 - protein, 386 aa, unidentified
MQKLNDLSRCLTPLEPASTLIAVIEMSLSSWLVAGIVPGVERQPLKKLAVDESVLLNLLHRWRGEAEKAGYMIKRIAVAFEAGRDGFWLARWLRARDIEVHVIHTSSVAVSREHRRAKTDRLDTELLKRAFLGWLRGERDHCKMVAIPTIMDEDGKRPNRERESLVGEQSRIINRIKATLVRLGIRGFNPKLKRAAERLEGLRTPEGEPIPPNTLSELHRDMERRRLVRDQIRQIESARRDRLEHAPGEGAHAMVRLLARVIGIGIETADLLVQEVLSRNLRDRRAVARYAGLTGSPDESGKKRREKGLARSGNPRVRHGMIQLAWRFLLFQKDSALAQWFRDRTENARGTRKTMIVALARKLLIALWRLVREGVVPDGVILRPAQ

SEQ ID NO: 410347 - protein, 404 aa, unidentified
MWYVGLDWADTHHDVEVLDEAGKRVGVRRFAHNHQGLNELKQFLLGIAPSPEELACIIETNHGLLITFLLGAGFPVYPVNPKIANQLRKVAGAKTDRIDAHLLAKLGRFELAELRRLEPDSPSVAELKTLSRDQDALIQTQTRLVNQLTACLKEYYPAALQLFAKLQQRSTLLFLQAYPTPQAVASASVEEITATLRASKHTNPTAVAPKIFEEVHRPHLVANEVVVRAKSRLMLSLVKQLLVVIQEIASYDKAIKTLFLTHNDQEIWSSLPGAGKRLAPRLLAEWGDDRSRYADAASVQALAGTAPVPFESGNYAKAHKRFACSKPLRNHLHQFAWQSTRQEAWAASYYQRKRAEGKTHSMAVRALANVWVRIIYRMWVNKTCYQTATFEAAKQAHAPRQHAA

SEQ ID NO: 410348 - protein, 351 aa, unidentified
MRVNQDEVILGVDTHLDKHVGAAISAAGKLLGTQAVDTNSAGYLQLLAWARSFGDVRRAGIEGTATYGAGLTRVLRDNDIEVFEVNRPDRATRRSRGKADPTDAESAACAVLSGRATAIPKEQSGAAYAMRAVAVARRSAVKARTQAINQLRGLLVSAPQEIRERLLHAKTEECVSACARIRSLGTTTLLKSLTTTLRILAKRWLALAAEIKLLDGQLEHLTGDHAPKLRAEFGVGAQTAAVLICVAGDNPERLKSEAALAALCGVSPLQASSGKTTRHRLNRGGDRAANNALWTIAMVRMRSDPRTQAYVARRTSQGLSRKEIQRCLKRYIVRELYPLILADLGHLAPAS

SEQ ID NO: 410349 - protein, 310 aa, unidentified
MDAIYVGIDVSKDRLDVHVRPGGEAFAVTRDSKGLEELVDRLRALSLTLVAVEATGGFETIVAAALAGAALPLVVVNPAQVRHFAQALGKRAKTDPIDAEVIARFIEAVKPAPRPVPGEHARLLAELVARRRQIIEMMVAERQREKRVENVRVRKSLSRTIRTFEKELLGIDGDIDGLVRGSPAWREKEDLLVSFPGVSNTLARTFLAEVPELGTLNRREIASLAGVAPFTRQSGRWKGKSMIGGGRAPLRAALYMAALSAIRCNQTLKAFYQRLLSAGKPKMVGLIAVARKILTILNAMLRERKQWQLA

SEQ ID NO: 410350 - protein, 341 aa, unidentified
MKVTTVGLDLAKQVFSVHGVDEHGKVVLRKRVSRGKLVELFAQLPSSLVGMEACSGAHHWARELERLGHRVGIMAPRFVAPYRKSQKNDGNDAEAICEAVSRPSMRHVPVKSAEQQGLLVLHRVRQGLTAERTGAINQLRGLLAEFGIVLPKGRYPLRAHIGAVLENAENAIPSLARRAFADLNTRIGELDQKILAYDRELEALARQSDAAKRLQQIPGIGPITATALVASVADAKQFSNGRQFAAWLGLVPRQYTTGGHVRLGRITKRGDVYLRTLLIHGTRAVLSSTKEKPDRLSRWAEAVRERRSTRKAAVALAAKNARIAWVLLARGEDYQLRRAAG

SEQ ID NO: 410351 - protein, 320 aa, unidentified
MMAQNDLVVVGIDVAKDKVDACIRRFTLRQTFPNTAQGHRKLVAWLRKSQVGKAVMEASGGYEREWRNVLHNAGIEVRIVDPRRVRSFALSAGRLAKNDPIDAEMIAWFAETFSQAPGQIPDAAREELAALAKARKALVDVKIRLQAQDEHASPEPARKAYARVLKSLAAEIDKLEAAISAKVKATPEFAERAEIIESVPGLAQATSAILIAGMPELGQVSDEVAAALIGVAPYDDDSGKRRGERYIKGGRRWVRNAIYMPCLGAATQYNPVLKAFYQRLLAKGKEPKVALVACMRKLIIILNTMLARRQKWNPGRHAMA

SEQ ID NO: 410352 - protein, 410 aa, unidentified
MVKENFIYVGIDLHKETHTAVMIDCYNQKLGEITFPNRPADFPKLVTKVKKCNTDGKEVVYGLENAYGYGRALAVWLIDKGYLVKDVNTAISHRQAKHRGAMYRKSDSDDAKAIALATLNMLDKLPDACPNDAYWSLGQLVHRRDNIMKQRTRLVNQLHEQLCIAYPSYKQFFNDISRPTALYFWEHYPSRKYLKGKSVEDLRAELVPVSHNKCSTKTCEKILDAVASDKVKNNAYQDARDMVTLSIVSDLQHYDSQLTEVDKMLEQMYKMLGCTLTTIPGVNVITAVKILAEIGDIKRFSNANKLAQFAGIAPLHLSSSGKGKDVATKQGNRRLQATIYFLAIQMVQVSSKGTPRNSVVRAYYEKRKAEGKTSQQALICISRRLISIIYGMLKHGTEYRMPVVESAGEK

SEQ ID NO: 410353 - protein, 361 aa, unidentified
MIIGCDFHPSGQQVYGIDTATGEVFADGWIGHGGQELDQFYSQLPTGVVVGVEASGNMLWFERKLAQYGHRLRLGDAARIRACEVRRQKHDRRDAELLARLLEQDRFPELRWVPSLAERDQRQLLQHRDKLVRMRAQVKNQLQHLALNQGQQKKRQLWTKSGRELLAKLPLEPWTARRRDDLVRWLDQLEQECAGLDAAVRQAAEANAEARRLMTHPGVGPVISLAFVLTLGPSERFQRSRELVAYLGLNPREDSSGERRRLGKISKQGNGFLRRLLIQGAQTAVRGDAELGRQYRRLAAKKHRAVAKVMVARKLAVRLFWMRKTQTAYPELVRMRGSSSHLGVSKTDRLSERPASPQDRA

SEQ ID NO: 410354 - protein, 406 aa, unidentified
MKQIVSVGIDVSKGKSTVCAMIHPNTIIKESFEVLHTVEEMSMLADYIGSLDGEIRIVMESTGHYHLPVAQFLYQKGFFVCVENAYIIRQFSRIMLHGAKTDPLDAKKLAKYGLAYWSELKPYKFHPSCYTELSLLSKQYQTYIKLLIAAKQNVIHLMDEMLPGFKEALDTASSVQFSKVKYVDFAKEFYHVDMIKSMGKEIFRENYKQWCKEKGYRFQSEKADELFHLAEDGIPTLPTEFPSTRLCMEVATEQVSQLGYALEQILSQMQNLAKTLPEYQTIRQMGGMGEKLCVRFIADIGDVRRFHNGKALVAYAGIDAPPYQSGQYTGTKRRISKRGNSALRKTGYEVMKSLKSHPPKTDTRVYDFIIKKENEGKSKNQAKIAGLNKFLQIYYARVMEIYKNIV

SEQ ID NO: 410355 - protein, 331 aa, unidentified
MENKWIIGIDVSKASLDVYIQTVQYYFVVSNDTHGFTKLLETCCIQLKCRIRELYFCFENTGRYSRLLAVFLTESGILFTMAPAMDIKKSMGMKRGKSDRIDSKAIALYAWQKRDEIRPTVLNSGMVAQLRQLLTLRDKLVRHRTAYKNSIKDLRDTFFEGETSFLNESHHRMIEYLNHEILLVEKEIETIIESSEQWLTNYKLIQSVKGIGPVLGKYLIIYTENFTRIDNPKSFACYAGIAPFEYSSGTSIKGRTRVHPFANKLLKSLLNTAAMGAIRINGEYKTYYQRRTQEGKNKMSTFNIIRNKLVVRVFAVVKRKTPYVDLTKFAA

SEQ ID NO: 410356 - protein, 358 aa, unidentified
MQIIGVDLHTRQQRIAMLDTETGELVEKTLQHEGEEVREFYSALTGSVQVGLQASGSMHWFLELLEELGIDYRVGHPSQIRKAETRKQKHDRRDAALLLKLQVEKRFPSIWMPASELRDLRTLLRQCHPWVRIRTRVQNTLQAMALSHGLRRGKTVWSQAGQHGMASLPLPLHTAYRRSELQHWYDQLQGPIDERDKRVSAQAWQRAGARLLLTHPGVGPVTALASDVFLGDAGRFADGKAVASYVRMIPREYPSGGRQRLGGLSKQGNPLLRFLWCEAALHVVRRDPELQRFYRRKLAAKGWGKARVAAARKLAIRLWILLRDQIDYPEFCRRGQLRQKSGATCAGMPDVGHSPAIL

SEQ ID NO: 410357 - protein, 410 aa, unidentified
MRRVIGIDIHRTFGEVVFWEDGRLRRAGRIDMTRTALEGFGKRLLASDEVVIEATANSMGVSRVLAPFVARVIIANPLQVKAIAQAHVKTDKIDAGTLASLHAAGYLPQIWTPDVGTECKRRSAARRYQIVRHRTRLKNEVHSILHAHLIPKCPHADLFNTRGRAWLAAQPLPEDERAAIDRHVRELDRLAEDLAVLDRQIAQDAVDDPAVNRLMTITGVNLTVAAGIVAAIGDIGRFNSPQKLVSYFGLNPRVRQSGLGAAHHSRISKIGRSHARAMLVEAAWAAAKARGPLRAFFVRIRARRGHQIAAVAVARKLTVLCWHLLTKGEDYQWARPALVANKTRAMQLLAGHPQQKGSRRGPTYAYNIKALRDREMLLAAQAERSYERFVAQWKPRRPKAGARAPQLGKT

SEQ ID NO: 410358 - protein, 350 aa, unidentified
MNNSLIAFDPCGIEVSHLTLVVALRCGDRDESPREFPNTPEGHQGILRCLARAGQPVRVAMESTGLYGLDLALCLHRAGVAVMVANPRAVRHFGQALLQRSKNDQLDAVVLREFAARMPFQPWRPPSAAALQLVSVARRLEALTDMLAAEKNRRHAASLSEALPAIIRRDIQRSIQTQQRAIDRLTRAALDFLVEDPELSRRFQLLLSIPGFATTSALRLLPELLLLPADLDVRQWVASAGLDQREYSSGTSVQKKVRISKAGNKHIRRALYMPALVAVRHDPQVRAYYEHLQARGKTKMQALVATMRKLLHAIYGMFKHDQLFDGHKVYAASSPSVPAPLPEPQEVACA

SEQ ID NO: 410359 - protein, 380 aa, unidentified
MAAQITGGVDTHLDVHVVAALDQLGGLVGVESFPTTPAGYRALLGWLGSHGEVVVVGVEGTGSYGAGLARHLQREAVAVVEVDRPNRQRRRRQGKTDPHDAVTAARAAQAGDALGVAKLRDGNVEAIRVLRVARGGAKRDRTRAINQMRSLVSTAPDDLRQQLRGLTIPKLVRRAAAFRPGGRSDAGSATRLALRTLARRVLELDREVAALDEVLEPLVAATAPELVAQVGVGTDTAGALLVAAGQNTSRLRNERSFARLCGAAPLDASSGKQHRHRLSRAGDRQANSALWRIVISRLSHDPHTRRYLQRRLAQGKTKAEAIRCLIGRVSAGGPSRLVRRERRGTASMSCHWMACLSWSPSPLVGPRDRHERPAPQRAEQ

SEQ ID NO: 410360 - protein, 430 aa, unidentified
MKSNTQNKKIEAITEKTLVIGIDVGSETHYARAFDYRGIEYSKKPFKFSNTEAGFVTFKEWILDLKEKHEKDKVVPGMEPTGHYWFNLGKYLQDNEMKPVLVNPHHVKKSKELDDNNPTKNDRKDPKVIAGLVREGRYMIPYLPDGVYADLRTASNIRFQLQSELTRIQNRISRWFNIYFPEYKTVYGKPDAKSGMLILKEAPLPEDILTLGIDGVDQIWRDAKMRAVGKARAKTLIEAAEHSVGSKEGAVSARMEIRMLLEDYESRNMRLQEVMVLIEELVKQIPMAEKLLEIKGVGIKTVSGFLAEVGDISRFNSPKELQKLAGLALVENSSGKHKGETTISRRGRKRLRYLLFEVAMSLVAKNPEFRELHNYYTTRRLNPLKKMQSLMAIAAKLIRVFFAMLTKGVDYDPKKMVSDIKKPAVYLQAA

SEQ ID NO: 410361 - protein, 311 aa, unidentified
MESTIVVGIDVSKDRLDVAVRPSGAAFVVERNAGGLEVLIARLRELSPAIVALEATGGFETVAAAALAGAQLPVVIVNPAQVRAFAKALGRHAKTDPIDAAVIAHFAEATKPQVRPLPDEATRLLADLVTRRRQIIDMMVAERQREQRMTTPRLQKSIARLIKALEKELASLEQDIDDAVRGSPAWREKEDLLASVPGIGAVIARTLIAELPELGTLGRKKIAALVGLAPYTRTSGKWKGKSYIAGGRPDVRCALFMGAMVAKQHNPILKAFFDRLVAAGKPKMVAIIAVARKLLTILNAMMRDNRPWQIA

SEQ ID NO: 410362 - protein, 414 aa, unidentified
MAEEYKIAAGLDIHKQFIVATILSVQELKIQQRFERTMQGLLALKNWIIEHKCQVVACESTNNFWYHIYDSLCDHATVIVGNAHDMKVLTHKKTDKIDSEIIAKLALKGMITPSRVVPRHQRDFRNIVRMRHFLVRKRTDLKNRIHNIFDTELFHLSNVLTDVFGKSGRMIMDGILQGKSADEVIMALKGQVRIKKGGEIRELLEQSLSVYALMQLRHSLEVLRVLDAEINYLTKVSSQFAQQHYPREYEILITVPGVGEIAAFTLLAEIGNFKDFSSADKLAAWLGIVPKVYQSADHNSRRSITKRGSRLARWILIQVAHAAAKRKVSIFYDFYESKKDIIGKGKAAVALARKIITIIWHLITNDEPYEDKYARPKKIPKVPTVKIPVTFTIEEAIKLFTEASQVLKAPDPGL

SEQ ID NO: 410363 - protein, 343 aa, unidentified
MEQYVGLDVSQEQTSVCVVDGGGQVIWEGKCTSTPEAIARTIRTRAPEAVRIGLESGPLSAWHWHELRKLGLPVVCLDARHVKAALALQLNKSDRNDARGLAQIVRTGWYREVVVKSVDSHLVRSLLTTRAQLVRMRVDLANQIRGTLKPFGLIAGKGGGRAFAERVRALVAGGPLQEVAGALLAAWQAIGEQIAVLGCRLVAIARQNEAARRLMTAPGVGVLVALAYLSVVDAPERFTKSSSVGAYIGLTPRRYQSGEEDYTGHISRCGDKLLRTYLYEAAGIILHRVPRWSVLKAWGTRLAKRIGTRKATVAVARKLSVILHRMLRDSSEFRWSAKEVHAA

SEQ ID NO: 410364 - protein, 466 aa, unidentified
MAFPEVINSSIMGKQEIPFKIIHPHAAGIDVGSRSHMVAVDQVKENVREFGVCTKDHEELITHLYACGVTTIAMESTGSYWQTLFSALQQADFEVLLVPGSQTKNVKGRKTDVLDCQWIQKLHSLGLLSGSLLLSDTFQQLRTYYYHRQHLVEQSARYSSKMQKCLRLMNIRLDVVLNDITGQSGMAIIEAILSGARDPEYLASLVSARVKRSRQQIAAALHGWWREELLFELEACLDFYRLYEGKLKECDQVIEQFLIKHAPETEVSAEEEQQLKANRKKRGKHAPGFDLPHLAFRYFQTDLFAVNGISFNTVLCLLTNMGHDLHRFPTAKSFACWLGLVPNNKVSGGRIISNRTPVGKNYIAKALRHAANAIGNHKNHELTPFFRRIAFRKGRIAAIIATARKLAVIIWNMVTKKEPYRKELVQVSSQKQKALKLKQIEKRLYALELNKEELDRLFLRSSLAVS

SEQ ID NO: 410365 - protein, 338 aa, unidentified
MHKSDHSGIEVSSEQLLVALRRDGQTLPLKAFPNTPAGHRAVAAYLARKGRVVRVCMESTGVYGLDLALLLHRQAGLEVMVANPRAVRHFAQALMQRSKTDALDAGMLLEFAARMEFQPWRPPSRAVLHLCALARRLAAITELCVAEKNRLHAARAAQALPAVIRQDLDRSIAFHQRAAARLTRQARKLIEADPLLRERFEQLDSVPGIAETSAIPLLAELGMLSPDLDVRQWVASAGLDPREYSSGRSVHKKVRISKTGNRHLRRALYMPALVAVQHDPHLRAFYEHLLARGKMKMQALVAVMRKLLHAIFGMFKHHQLYDGARLFHRPAQTSAQAA

SEQ ID NO: 410366 - protein, 346 aa, unidentified
MILIGCDFHPSWQQVCWLDPDTGETEDTQLVHAPGEAERFYRRFPAPALVGLESTGNCQWFVDLLGTVGHEVWIGDAAKIRASDSRQQKHDRRDARLLLRLLAEGRFPKIWTPSSEQRDQRQLLLHRHKLVRLRVQVKNELQHLALNQGMQKKRHLWTAAGQQALLELPLRPWASRRRKDLLSVKSMLDQAIGELDQALALAAAQNQQARLLMTQPGVGPVTSMAFVLTMGDVRRFPRGKQVASYLGLIPREYSSGGHQRLGSISKQGNRFMRMLLVEAAQVAVRHDPDLRNEYLHRCHSKAKGVAKVAAARKLAIRLYWMLRTNTGYPEVVRIESSSRVPLVSAS

SEQ ID NO: 410367 - protein, 377 aa, unidentified
MGWTGCFPTELASDSKRRSAGEAAMKPKTESDTALPMVIGVDIGKEVFHLVGFGGDGKIVFRRKIKRLGFAAVFEKVPPCIVGMEACLSAHFVSRTLRRLGHEPRIIPAIYVKPFVKGQKNDYNDAEAIAEAALRPNLHFVQEKSQDQLDLQACHRVRARLVSRRTATINQIRAFLIEQGIAVRSGPRALRTSLFAILENRKDEISPRMARLIFDLYKDWCHLDERIDTVTGEIEELSRVEAKCQRLMTVPGIGPVISTGLVAAIGSGEAFERGRDFGAWLGLVPRQYSTGGRSVLGRISKRGSKYLRTLLIQAAKVLLMRPRNWPRYSFGAWLKTASERLHRNKLAVALANKLARIAWSVLRHDKAFDTHLETAAI

SEQ ID NO: 410368 - protein, 346 aa, unidentified
MEHYAGIDVSLELSSVCVVDGAGKIVKEAKVASEPEALVYLFKELGFPVNRIGFEAGPLSQWLHAGLTQAGFEAVLLETRHVKAALSAMTVKTDRKDACGLAQLLRMGWFQQVHAKSIGSQEIRALLVARKQLLGRLLDVELSIRGILRGFGLKVGQVTRKTFEARIRELVTGHTTLERIAEAMLSARATLKAQYEKLHKAVLAIVREDAVCRRLITVPGVGPVVAVTFKSAVDDPSRIAKSKAVGALFGLTPRKYQSGEKDVTGGITRTGDEMVRTALYEAANVLLSRITRFSKLKRWGMDVAKRRGSKRAKVALARKIGVILHRMWIDGTTYRWAEAKPIAAQG

SEQ ID NO: 410369 - protein, 354 aa, unidentified
MIIIGADYHPGFQQIAFVDSDSGEFQERRLQHREEAEKFYRELAAQRMEVRVGMEASGHARWFERLLAELQIELWIGDAAEIRTRRVRKQKTDRQDAQLILKLMLKNDFPQIWVPSWENRDLRQLLWHRHRMVQARTRIMNQLQAVALNEGLRCKKRLWRKHGRQQLESFRLAPWASRRRRDLLELLDRLNPTIAELSQAIEQEAEKFPEARCLMTHPGVGALTTLAFVLIIGRADRFQCGKQIASYLGLVPLEDSSGNRRRLGHITKQGSSMLRFLLVEAAQVTARNLPEWRSKYFHLAMRRGRKIAKVAMARRLAVALYWMWRKGWDYERVKKFGSHAGQLEPGHGVQSNTE

SEQ ID NO: 410370 - protein, 387 aa, unidentified
MVVIGVDPHKSSHTAAALEPGAGAASDTVRIEAALPGYRRLLAWGRRFGQRRWAVENAWGLGRHLAQWLIARGETVVDVPATATARVRQLSRGRRKNDVLDAAAAAGVAAAQGDGIPVAAEGPSTVLGMLDERRRNLTRQRTRTVNQLHALLRDLLPGGARAELTARRAAGMLAGIRPASPAERARKDLARDLVEDLRALDARLRANRTRMQDAVAGSGSSLPGIAGVGPAVAARLLGRTGRASRFPTAAAFAAHAGTAPVEIASADKARHRLSRHGDRRLNNALHTIALTQARMPATRGRAYYDAKIAEGKTRNEAMRCLKRRLADHVWRVMIADERRQARAAGPGGHTGATLTSSATSPTPTAGSSDKSLPGPANHNPTAPNPTT

SEQ ID NO: 410371 - protein, 378 aa, unidentified
MTRLRFVGLDVHAESIAVAVAEAGRGEVRSLGVIPNRVGSIRKLMRKVGPPEKLRVCYEAGPTGYVLYWQLSELGIKCEVVAPTLVPVKSGDRVKTNRRDAEKLARCYRAGDLTAVWVPDAAHEALRDLVRAREAAKKDQLRARHRLSKFLLRQGRRPPDGTKAWTQKYILWVKEAVHFEQAAQETTLLDYIGEVDHTAVRIERLERGIDEAVARAPAQIQTVVAALQALRGVAKISATTLACEVGDFSRFNQATELMSYAGAVSQERSTGEKTWRGGITKAGNAHLRRIVVEAAWSYRHRPNLGYALRKRQIELPQEVKEIAWKAQHRLHQRFWALTAHGKTQPVAMMAVARELLGFIWAIGVSVEKHTPQQRRLVA

SEQ ID NO: 410372 - protein, 345 aa, unidentified
MIPQDVYAGLDVSLETTSICVVDSTGATVWRGSCPTDPAAIAGMLRRHAPKARLIGLETGQLSNWLTRTLCELGLPVVCVDARHAKAALKLQVNKTDANDAWGLAQIVRTGWFREVAVKSMDAQALRMLLVARTHLISQRQATANVIRGLMKTFGLVIARGASGLFAPRVREAAAGNGTLLAIVEPLLAAWQALREQIAVFDRQILSRAKTDAVIRRLMTIPGVGAIVALSYTAVIDDPARFRRSSSVGVYAGLTPRRYQSGEIDVSGHISRCGDSLLRSHLFEAANVILARYSKASALKSWGLALAKHIGKRRAKVAVARKLAVIMHRIWVDGTSFIAEGKAVS

SEQ ID NO: 410373 - protein, 391 aa, unidentified
MIYVGIDVAKDKHDCFITNSDGEVLFKSFTIPNNREGFKTLFQKVQSVSDDLTKVKVGLEATGHYSYNLLGFLLDNGLPTFVINPLHTNLYRKSLSLRKTKTDKVDAHTIASMIMSDVNLKSYSDTSYHNEELKSLTRYRFDKIKERAKLKSSVSRLVCILFPELEKLVPQLHMASVYALLSEFPSAHAVASAHLTRLANLLSESSHGRYGKDTAVIFREAARNSIGSNMPAKSLELKHTIKLIRELTSEIDEIENEIKIIMDEIHSPILSIPGINYRMGAMILAEIGDFSRFDSPDKILAYAGMSPSTYQSGQLDNCYSHMEKRGSRYLRYALYNATKYVCHWDESFGAYLAKKRTEGKHYNVALSHAAKKLVRTIYAMEKSGRVYNKAA

SEQ ID NO: 410374 - protein, 355 aa, unidentified
MRQLEKVLKEVAGIDVAQKELVVSLGRLLESLSIEIFAYKVFVNSDKGIQSMIEWVSSCCENAAQMRYVMEATGVYHERLAYALESMNIDLSVILPNKISNYARSLDIKTVTDKTASQAIAQFGLERKLDNWVRPKDIYRELKQLTRERDQIVEERAMVKNQRHAEKSEAMPNQKSLVRIEDRIKFLNRQEKEIKLDITTLLKSHPELKQRVDNICTIPGVGELTAVTVLAETNGFELIRNKKQLTSYAGFDVKEKQSGTSIKGKPRISKRGNRHLRKSMHLPSLSSVKYNQSHKDLYVRLVSKSGIKMKALIAVQRKMLELIFVIDKNQNPYENDYHQKRVHHTNAEVPLQANL

SEQ ID NO: 410375 - protein, 403 aa, unidentified
MSKPQVIDDEEHERVHERVAAVDVAKDSGMVCTRLPHPSRPGARPSTVWTVKARMGAVGKLGRQLKDSGIELVTLESTSDYWRIWFFVLEACGLAVQLVNAAQAKNLPGRPKTGKLDAQWLARLTELGLLRASFVPPAAIRALRDYTRARTRLVQERTRCYQRLEKLLEGALVKLSSAASKLTTESAKDMVKAMIAGQRGPRTLAALARTRMKAKHDDLAEALDGMFDDRHGELAGLLLDQIAFLDERVTQLTARITAAVAAMPAAWGVDGDGTTGPDAGTGPDAVVLPAAARLAEIPGVSQDLARAIIAETGLDMSRFPTAAHLVSWAGLCPSARQPGPRTRAGKKSQGDTWLRGSLGQAATGAARTDTFLGERYWRSPAAAARPRPRSPSPAPSWSSSGTC

SEQ ID NO: 410376 - protein, 390 aa, unidentified
MAIRHHPVKSRKKLPGAKVRDSVFACIVNENGVVFHEKFGVLTPELERLASVLQEHEVNEVCMESTSIYWMPVWRVLEPYVVELKLVNPYFIKQLPGKKSDVKDAEWIATCLLKDLIRGSYVPADIIQQLRQYDRRISDLNAECVRKLCKLDAALQRCNIRISNYVSTTDGKSYKEVVRLISEGIRDPAALLKVIHGRITNRVGKDVIQASLTGVISDTDIDVIRQLREEVDLAQRHKDECQSKMDAICQQYFPEQLKNLQTIPGVKGRSATAIIAEVGSDVSSFQDAAHLVSWCGLKPRNEESAGKVKARSITHGNRYLRKTLIECAWAASKTQGCYLNKFSYYQTVVRRKNKMKVQVAIARKILTAVWYVLHDNVAYRDYNPDIAPAA

SEQ ID NO: 410377 - protein, 312 aa, unidentified
MQVITIGFDLAKNVFQVHGVDANDKVMFNKQLRRSQVLPFFAKFAPCLIGMEACASAHYWARELKKLGHDVRLMPAKDVKAYVKRNKNDAVDAAACCEAVRRPTVRTVPVKTPEQQAQLMQHRVRDLLVRQRTQTINALRSHLAELGIVAAQGYDGLKVLLSIIADENDARIPEDARASLSALVAQIASCQAEIGAIEKRLLAQHRKNDDSKRLATIPSIGVLGASAIIATVPDASIFKTGRDFAAWIGIVSREDSTGGKQRLGPISKQGDRYLRRILVVGAFAVLKQARAHPEKYPWVTQLLARKRAKELR

SEQ ID NO: 410378 - protein, 354 aa, unidentified
MNSLHYIGFDVHKKAISFCVKTAAGEIVEEGSVLAQREVLRQWGSARPQPWRGAMEATLFSAWIYDTLRPYSEQLEMAHPAKMKAISAGKKKSDTIDARTIADLVRCNLLPACYVASPRIRELRRLLRYRSLVVSEAVRMKNKMAGLLMESGALYVKEKLHRKKYFANLLEELEEVPESVIDLLRLSRGALEMFESTQKRLVRELLADPELAQRVERLMSIPAVGEITALTWALEVGDPQRFRSGSDAMSYCGLTAALQSSAGKQQRGPISKQRNRWLQTTLIEAAKLAPRWNPQLAALHARELERGHRNRATLAVARKLVAYLLAVDKSRQPFQVRGPSSEARTQKDWAQKAG

SEQ ID NO: 410379 - protein, 316 aa, unidentified
MQLILNLGADVDSRFIVVAYAGRSLAPHRIANERSAIKMWLRSVPRGSRLAMESTGDYHELLATMAQKAGLQVFVINPRDLRRYAEGVGRRGKTDRTDAEVIARYVEREHAELHAYLAPSKAQRTLQRLIARRATLVKTRGSIVQSLRGMSSLQRESSALIARLDRLIEQLESLMQQALKRLPHAHRTAQHIATVPGFGTLSSTCLAHSFTRLPYGNGDAVIASTGLDPRPADSGQKRGRRRLSKRGPAEQRRLLFNCGRSAARMKIWRPYYQAQLAKGLSATAATIILARKMVRIAFALHKQGRSFDPACLHVRA

SEQ ID NO: 410380 - protein, 346 aa, unidentified
MNANQVTIGWDLGDRRIAVCVLSAGGEILAEESVVNTRACVAAYAQRWPGALMVMETGTHSPWISRLLESLGHCVLVANARKLRAIAQSPTKSDQEDARMLARLGRADPALLCPIQHRSEQGQRALLRIKVREALVRSRVNQMNSVRFLLKSLGLGVPSGSKAMTFTRKLRPMLDDSTRLLVEPLLTMIDALNARIHQMDDELEAFGRERYPATERLRQVPGVGPLTALAFVLTIERPERFADTRDIGAYLGLVPRRDQSGNSDKQLPITKAGNVQLRCLLVNCAHYILGPFGPPSRLREAGERIAARGGKSAKKRAVIAVARKLAVTLLALWKSGADYEALPAAA

SEQ ID NO: 410381 - protein, 406 aa, unidentified
MRYYIGVDWADREHAVCVQDENGARVTQRRVAHSAEGFADWGRWVDERRAEGIELWAAIERPDGRVVDFLLDHGVVVFPLNPKALDRARDRFRMSGAKSDPFDAQVAADFLRTDHAHLAPLRPSSEAAQELKAVTRDYARQVRQQTRVLNQLTVTLKEYYPRALEVCPDLKSRWAQEFLAAYPAPAALHGLSERQWTRWARGHRLSAARAAELWLVIGGAQLPVPGQVVRVNARRLAVLLEQLAVTGRAVAAYREAVEGFFARLPAAQWAATLPGGRSGTTVPAVWAELGDAQGRWQTAKHLQGHAGMVPVTARSGKAHVVLFRFACNTHLRAAVQQLAFVSLRHSPWARTYYQQCRARGHAHQHAVRALGAKWLKIIFAMWRRAVPYDEQYHLASIGRHHVGQPA

SEQ ID NO: 410382 - protein, 427 aa, unidentified
MTVSELKRRPQILVAIDIAKAKHDILAEFPDGTRKRMIIKNQLVDFNRLADYLRNFDSDVTIGIEPTADYHRNLAHFLKLQKFNVCFLSSIAVARTREALHNSWDKNDPKDAQVILHLMRTGVTQYFYDPVIEGTNDIQELSNTHFQISLRKVKLQHSLLNHYLPLYFPEAEAFLCATRAGWFTKLLEHFPLPSMVTAKSKQDFIDQAAKVLPSKHSKRAMLDSFYEAAATSVGIKVSADSHTVAMFRLTLREHLDLCSKRAELEELAHSILKENSNYKILRSVPGIGPIIALTVLAEAGDLRRFSHERQFLKYCGLDLSTQQSGGFRGGSKISKRGNARLRSALWIAAGVAVRMRENSFRNKFSRYVQREPTDKDLKRKAMTACSAKMARVVYGLIKHQQFYRSYHEEAVPGGRTRSYEPLEQLTP

SEQ ID NO: 410383 - protein, 438 aa, unidentified
MSNKVIFNLDELFISVGIDVGADFSWMSIALPNQQFVGKPYKILHNSIDSLTTAVSKIKEAEELYSLESRIFLESTGIYHYPLFCYLRDKGFNCSVINPIITKNSTNINIRKVHNDRFDSKKAALVGLKPDLKVSLMPSDLALNCRNLCREYYDLMDNRSAYVNKLQGELRMAFPQYLGIFSKVTINTSLTLLETYTSPSAFLKADKQEIIDIIKSTARFGLTYAQNKYNAIIQAATDANQFGYIIDSNIKRIRLYISFIRKYDEEINSILESLHELVDANEDSDFVKQIHLIETFKGAGFLSAVSIMGEIGDFSAFSKPKQLFAYFGLDPAVKQSGKFEGTKVQMSKRGSAIARRVIHTLTLQSISISRNGEAKNPVLREYYLKKCDSKPKLVAMGAVSHKVCNMIFAILRDNKPFKIIAPQEHIKQYNSAKCDIAA

SEQ ID NO: 410384 - protein, 349 aa, unidentified
MAMTIVGLTRPVVGGVDTHLDVHVAAVVDSIGGVLGVESFPVNRAGYVALTSWMTGFGELQRVGIEGTGSYGAGLSRHFSAAGVEVIEVDRPNRQERRRNGKSDELDAIEAARGALSGRVTGQAKSRDGNVEALRALLVAKRSARSTRIASIVQLRHLMFTAPDELRVRFACLRAEALVREASRLRPRPEADPVAYATKTTAVILAKRVQALDDEIAVLDRQITPLVKATAPALLNIYGAGTDTAATLLVAAGDNAGRIRNEAAWAKICGVAPVPANTGKRDDRFRLNIGGNRHANNALWHIVFTRLGQHEPRTVAYMQRRVAQGKSKREIIRCLKRYVAREVFSALPR

SEQ ID NO: 410385 - protein, 353 aa, unidentified
MTVIEPIVKCAAGLDVHHDSVMCTVLEEQDGGALRRQTRRYATFPRRLQELAGWLAQLGVELAVLESTGVYWKSVYAALEAAGIRTYLVNARHVKQVPGRKTDVGDSEWLAELARCGLLKASFVPPRDLRELRLLTRYRRKLSGCLAAEKNRLQKVLEDAGIRLGVVVSDIDGVSAQRMIKALVAGETDPEKLANLALGSLRRKQADLVLSLEADLSDRHRFLLQRITNHIRWLDEQMQELDAQVVAAMGPYQEEWQLLQTIPGIDHLSAAMLLAEIGPDMGQFGSKERLSSWAGMCPGNHESAGKKKACAPRRGTNTSGNSCAKRPTVRPGRTASSRGSSRGSSSDGGPSEP

SEQ ID NO: 410386 - protein, 407 aa, unidentified
MFVGDDWAEDHHDIEVQDETGRVLARRRLPEGIEGITTLHELVGEHSSGLESPPQVVVGIETDRGPWVQALLAAGYQVFAVNPMSVARYRERHAVSGAKSDPGDAHVLADLVRTDRHRHRPIAGDSELAEAIKVLARGHQSLCWMRGQQANQLRSTLREFYPAALVAFEQLTSADALAVLAIAATPDQGRALTRPRIQAALRRAGRQRNLTARAEAIQIALRTEQLAQPPLIAQAFGATVSALVGVLSASVAAVTDLERQLEASFGQHPAAELIRSQPGLGTVLGARVLAEFGDDPDRYADAKARKNYAGTSPITKASGKSHVVLARYKTNKRLRDALRQQAFAALTASPGARAFYDARRAAGDGHDKALRALANRLVGILHGCLRHATLYDEHTAWAHRSDHTQAA

SEQ ID NO: 410387 - protein, 354 aa, unidentified
MQNDRQSSETVILGVDTHLDIHVGAVISQAGKLLGTHIIQTNQAGYLELLDWARSFGSLERAGIEGTGTYGAALTRYLIKNSIYVVEVNRPDRSKRRLEGKSDLLDAENAARTVLSGSSKAIPKMQSGACEALRIISVARRSAVKACTQAINQLRALLVSAPQDVRDKLWKSKPHECVTACINSEVSEHSPLRIALCSTLRSLAKRWMALTEELNELDESLDKLTRKYASNLRSQFGVGPQTAATLLAVAGDNPERLKNEAALASLCGVNPLPASSGKTVRHRLNRGGSREANNALWTIALVRMRSDPRTRIYVDRRTGEGLSTKEILRCLKRYIVRELYPLILSDLAYANRRS

SEQ ID NO: 410388 - protein, 418 aa, unidentified
MTKFSGNYSVYIGIDWANDKHDVCVQVANSSTRNFKVIKHSANAINDWITNIHKQYKGKIAVAVELSKGPIVYALQKFDFVTIHPINPSMLATYRKAFSPSGAKDDPTDAELALDLMLNYLNKIKALKMESESVRKLMYLVEQRRRLVEDRRRFSNRLINTLKKYYPHLLDWFSHRGSGLFCDFITRWPNLQKVKRARPETLRKFFISHKGRSSGYTEQRIQAISEAEPLTLDKAVIDSHQLLAVALAKQMLVAVEVIKVFDTEINELFETLPDAELYKSLPGTGPCLALRLLVAMGENRSRFNSASEIQMYSGIAPVTERSGQNSWVHWRYQCSKFNRQSFIEWAAKSVHQSYWAGLYYQQQRGKGNTHQSSVRSLVFKWIRILYRCWKTKVPYSEAKYLKALKERNSPLLFKEKAC

SEQ ID NO: 410389 - protein, 549 aa, unidentified
MKLCLSIVEEKSKLLCAAVVGREGRLIIGALCPSRSLVSGVSVFNIGDVFILQSGYDPVKEMAAVSAPLRPQLLAQSPVDKTRKRDQIISHLQKQSQRTAQNSISNLPQHLQHININAAGIDIGSDRHLVAVPEGRDTVSVREFATFTADLHAIADWLEQCGITTVAMESTGVYWIPLYEILEQRGFEVYLVDARRVKNVSGRKSDVLDCQWVQELHTYGLLAKAFRPAEEVCVLRGYMRQKEMLVQTAAMHIQHMQKALQQMNLLLHNVVSDITGVTGMKILKAIISGERNPQVLAKERDPRCRNSTETIAKSLVGNYRPEHLFALRQAVELYEIYQTKIADCEAAIVAYLEQQEHHTEDEPPAPQKAVSARDRMRGGSDIRAKLYKMTGVDLFAVPGLAADTLLTLASEVGLNTSPWQSEKNFTSWLALCPGTKRSGRRVLSSKTRPSANRAAQAFRMAAATQARANTALGAFYRRIRARSGGREAITATAHKIARIFYAMLKNGTEYVEIGQAAYEQKFKERRLRSLKHQATALGYQLTPIAAGSF

SEQ ID NO: 410390 - protein, 400 aa, unidentified
MGQPLWAGVDAGKLDHYCVVLDADGKRLLSRRVANGEAALLELINAVTALADGGELTWAIDLNAGGAALLIALLIGAEQRLLYISGRTVHHASGGYRGEGKTDAKDAAVIADQARMRRDLQPLRPGDDIAVELRILISRRTDLVADRTRAINRLRAQLLEYFPALERAFDYSASKAALILLTGYQTPDGLRRAGAARLAAWLRKRKARNADAVAAAAIEAAKSQHTVVPGQQLAAAMVARLAEEVMTLDTEIGDTDAMIEERFRRHRHAEIILSMPGFGVILGAEFLAATGGDIAAFGNTDRLAAVAGLAPVPRDSGRISGNLKRPRRYNRRLLRACYLASHIAIRTDTASRIYYDRKRAQGKRHTQAVLALARRRLNVMWAMLRDHKPYQPTAPNATAA

SEQ ID NO: 410391 - protein, 428 aa, unidentified
MNMTTQPGELAALVGIDWASQRHALCLYDCATGKRENSTLEHTPKAITQWARALQERFAGKKIALCLEQSKGALMNALLEYPFFVLYPINPATAARYRQAFKTSRAKDDPTDAQVCLELLLHHREKLTPWLPNDAPTRELSRLLEARRTVVDLRTLLTNMLPDVLKSYYPQAIELAGQDLFAPLGCQFLLQWPSLQELQRARKERVRKFYYAHNCRRLDVIEKRLHCVAQMIPLCRDRALVEPAIIQVKMLARQLLQLSRALKEYDAKIEQLFAQSSDASIWESFPGAGLTLAPRLACAFGSQPSRYQSALAIQQYSGVAPVIEKSGKNQHWIHRRWGRPLFIHQSFFEYASQSVLHCSWAKVFIQDQMARGKTYPTAVRALAFKWQRIMFVCWRDRIPYDETTYLQSLKRRGSHLAPKLNQQLPKAA

SEQ ID NO: 410392 - protein, 323 aa, unidentified
MNTLDFLGIDIAKRTYNVALLRNDKLRHKKFENNPEGFKQLDNWLVKQGVIEIHVCLEATGSYSEGLAMHLHKAGHKVSLVNPARIKAFGQSELRRNKTDRADATLIARFCSMHRPAAWVPPPAEIRELQALVRHLDDLIGTRTQLANRFTDGPKVQSVLDSLQSLIEAVDAEIELTRKKIREHIDRHPGLKEDCELLETIPGIGAQTATTLLAEIEHLRHYKHARQAAAYAGLSPRLRESGTSGKRSRLSKTGNSRVRKALFMPAISAKQHNPVLRQFSERLARRGKPKMAIIGAVMRKLLHLAFGVLKTRKPFDPNHPVAA

SEQ ID NO: 410393 - protein, 391 aa, unidentified
MVYVGIDVAKDKHDCFIMGLGGEVLRDVFVISNNMDGFNDLFQTIRDASESFDNVKVGLEATGHYSYNLLGFLIDKGLAPFVINPLHSTLFRKSLSLRKTKTDKVDARTIAAMLASDLDFKPYTDTAYHNEELKSLVRYRFDKVKERAKLKSSIARLVNILFPELEKLVPSLHINSVYELLREFPSAHHIADAHLTRLKNLLYVASKGHYADDTALLFRDEARRSIGSKMPAKSLELQHTIRLIREMGVAIDEVESRIKAIMDEMNSPILTIPGISYRMGAMILAEIGDVSRFDSSDKILAYAGLSPSTYQSGQLTSCYSHMEKRGSRYLRYAIFNAARFVCHWEPTFAAYLAKKRAEGKHYNVAVSHAAKKLVRLIYALEKSRLPFMSAA

SEQ ID NO: 410394 - protein, 353 aa, unidentified
MTLYIGVDLHPHQQTAAWCDTRTGEADTVDLKHDLGKVRAFYTGFREPAIVGIEASAKMSWFETMVFETGHKLFVGNPVLIRKRATSRHKNDRRDAELILELLLRSEFPAIWRRPLESNQVIEIMGLRQSLVRQRIQCYNRLQRLAHSIGMPKVRMKTAAAQSVLKAAGMDEADSMRREHLFSLIEQLDGQIDKLSKWLMKKAEENSSARLLQTQKGVGYLTALVTVHTLGDVTRFKKVSKAVVSFAGLDPREMSSAGRARFGSITKAGSPLLRHHLGQAVMTATRYDPRLKAFYKRLTKKKPKAVARTAASRKLLVKLSIMLRDNITAEEFDQRGRTVGNARRIARSEMTAA

SEQ ID NO: 410395 - protein, 331 aa, unidentified
MQSKEFFIGIDVSKLTLDVSVNGTKNHIRIQNSAEGFKQLQAWLKSLNIAVSNSWFVFEYTGGYEYRLVQYLQAKGIVFTRVPGLQIKKSMGMQRGKSDKMDSLRIADYGYEKREKLTEHKACSTAINRLKLLLTQRSGFVDDKKAHEHRLKELKAMMDLKKGDAIVKRYQQAASFAVKMISKTEAEIMKLFTKEEAMNKNFELITSIPGIGKVNGWMTIAYTENFERFPNGRAYGAYIGVVPYDHSSGTSIRGKSRVSHMANKTLKADLSMAAKASVMHDPEMKMYYERRSALGKNHMGIMNEVKFKLVLRMFAVVNKGEVYVKNVKSAA

SEQ ID NO: 410396 - protein, 349 aa, unidentified
MGEVSTIGVDIAKSVFQIHGVDADGAVVIRRRVSRAKVLEFFAKLPPCLVGMEACATAHHWARELKKFGHNTRLMPPTYVKAYVKRGKNDAADAAAICEAVTRPSMRFVPTKSVEQQSALMLHRTRDLLIRQRTQLINALRAHLAELGLVAAKGREGLQQLVTAVTESSDERLPSHARFACQSIIAQLYAAQTQINGFDKRITQVHRANADSKRLDAIPGFGVILSTAVVATMTDPKAFKSGREFAAWIGLVPRQNSTGGKERLGSISKQGDRYLRRLFVVGAISIVRTARMRPDKYPRVVELLGRRPAKVVAVALANKMARVAWAVLAKGETYRTPTRSSNAAIAAAA

SEQ ID NO: 410397 - protein, 339 aa, unidentified
MMKVHVLGIDLGKNVCSLVGLDETGAVVLRCRAKRETLIHLAAKLPPCIIGMEACCGAHHLGRLFADQGHDVRLMSPEYVRPYVKAQKSDDRDAEGIAEAATRPTMRFVDVKNQDQLDMQTLHRSRDRLVAERTALINQVRAVLLERGIVVPQGKRALDQYLTSLTDESGEASSLSARMLTLDADARAQWLELDRRIAAFVKENEDARRLVTIPGVGVTIASALIAAIGNAESFEHGRDLAAWLGLVPRQSTTGGKPKLLGISKRGNKYLRKLLIHGARAALPHVSGRDTPLGRWAKGLLARAPQNVAVVALANKLARIAWAVLRRGKEFNVAGSPMSA

SEQ ID NO: 410398 - protein, 467 aa, unidentified
MSPRSGKHFRTSESLDDLTVTHRHAAGADVHAAVHFVAVRPEDVPAGFVPPDAKLPKGVRKFGANTGDLEALAAWLKDCGVTTVAMESTGVYWIALYDLLASQGFEVLLVDPRQTKHAPGRPKSDVLDCQWIRRLHSYGLLTASFRPADEIVRWRGFQRQREMLIRYAAQHVQHMQKALEEMNVKLTEVVSDIVGQTGLKIIKDIVHGQRDPIKLAKHRHPSCKRTEADIAQALYGTWRVEHLFALEQTLKLYEFYQKQLRACEGQIEACLRGLKDKSNGAPLPANLRARKAQKNEVRFGARALLFKMSGVDLTVLEGISETTALVILSEIGVDLSAFPHEKNFISWLGLCPQHRGSGGKIFKRRTRRGANRAARALRMAAQSCHHAKNALGAFYRRIQARAGGAKAIVATARKIAERVYRMLKYGQEYVRQSEEAYEAAYQLRVTKSLAKKAASLGYRLVPESLPG

SEQ ID NO: 410399 - protein, 409 aa, unidentified
MQMLWGRRRGDGTIVAGPVMELPYAKTSRLEPMPCPSGSGSYDYRRHRDEPIELAGGGVVPGIARHPLKKLAPDQDALLKLLHRWRAEAGQAGREISRIAVAFEAGRDGFWLARWLRAHGIEAHVIHPTSVAVSREHRRAKTDRLDTALLKRVFLGWLRGEPEHCHMAAIPTLEDEDARRPTRERECLVGERTRIVNRIKAALVRLGVRGFKPTVRNALEHLDALRTPEGTALPPNTRAELHRDMARLHFVTEQIQQIEAARGERLEQAGAGPNAMVRLLAQVVGVGIETADMLVHEVLSRNLRDRRAVARYAGLTGSPDESGSRRREKGLAKAGNARVRRGMIQLAWRFLLHQKESALAQWYRARTADARGSTRKTLIVALARKLLIALWRMVTTGEAPTGVVLRPAA

SEQ ID NO: 410400 - protein, 391 aa, unidentified
MIFVGIDVAKDKHDCFILNSEGTVLADVFTIANNRIGFETLLSRIQSCSQGESKIKVGLEATGHYSYNLLGFLLDSGLATYVINPLHTNLYRKSLSLRRTKTDRIDARTIAMMLMSDVDLKSYSNTAYHNGELKSLTRYRFDKVKERAKLKSSVARLVNILFPELEKLVSSLHIAVVYALLSNYPGASYIANANTEELAETLCTASKGRYTKSKTAKIQVAAGVSIGSKMPAKSMELKHTIALIRELDKEISEVESAIDKITSQMDSPIFTIPGIGRHMGAMILAEVGDFSNFASADKLLAYAGLSPSTYQSGQLQNCYAHMEKRGSRYLRYALFNAAKYVCLWCPTFSAYLEKKRSEGKHYNVAISHAAKKLVRLIFAMQRSGKAFLADY

SEQ ID NO: 410401 - protein, 400 aa, unidentified
MTTRHERIWVGIDAGKGHHWAVAVGADGETLFSTKVLNDEAQILALIDTAREKADEVRWAVDISGRASALLLALLIAYGQQVVYVPGRTVNRMTGAYRGEGKTDAKDALVIADQARMRRDFTPIEIPPELVSTLQLLTGYRRDLIADRVRLINRLRDLLVGICPALERAFDYSAAKGPVVMLTEYQTPAAPRRIGVKRLTTWLERRTVRGAGDIAARAVEAAQSQTTALPGEKRAAKLIRDLAHQLLALDERIKDNDREIRETFRTDDRAEIIESMPGMGPILGAEFVAIVGDLTGYRDAGRLASHAGLAPVPRDSGRRTGNYHRPKRYNRRLRWLFYMSAQSAMMRPGPSRDYYLKKRAEGLIHTQALLALARRRVDVLWAMLRDKRLFTPTPPVTQAA

SEQ ID NO: 410402 - protein, 357 aa, unidentified
MESTQPDFTGQLIFVGLDVAQRSWKINVLPGELFHKRFSQEPDPPALVRYLRRHFPGAVYRCVYEAGYCGYWIYDELTRLGVDCIVVNPADVPTSDKERRTKTDHVDAGKLARHLRSGELRGIYIPPPWCREDRTLLRTRAQCVRKQTRCKNQIKSLLRFYGEKCPEERSERYWSGPYIRWLERLAGERTSRGDSLEALVQELLFLRAQIARLTRQIRTLSHQEPYQKKVQLLCTIPGISIITGMTLLTELMRVDRFRSLDELSSYAGLVPGERSSGEEEHDTGMTPRRNPAMRHMLIESAWVAARQDPALMMAFRTLSARMPRNQAIVRIARKLLNRIRYVLKNEKPYVEAVLETA

SEQ ID NO: 410403 - protein, 482 aa, unidentified
MKKRNIYQNRSQELLSLFEKAGNSAKVMCVPIDFAKKDHVVMFCNGYGDILRKPFSVKNSPDGVKYLVDQATRSRQRRGIKKNHIFFGGEDPNSYAENFVNTLRSKGWLVAGVNAHDAKKQRANLQASTDCLDLMGIATMLLSCRANCCPTQSGIYRNLRTLVRHRRKLVVMSTEVRNRTHTVVDRLFPGFLDERKTGIVPFTSSSLYLMEDRFSPKQIRRRKREKLIEILKRFGTSKAEKTADKLQQYAAQVLHTPVEYIDTLQLSLAQHVKHLRCLKESIEQLEREIAVNLAQTQGAFLTSVRGIGIVLAAGVTAEIGDPNEQKPLNNLVSYSGIIPRVKQSGGPEGKTYTVSVAKRCNRILKDYVVKSALHLGLHGPQDLMADYKRRDASAQHADFGIGRRYLRMAMCLMRTSQIYLPYRLRKAEAKLEERASYYLMTWPYLRGKWKKLGALKAAFSKDRPLGQWRRIVQELYDIELKL

SEQ ID NO: 410404 - protein, 340 aa, unidentified
MDVVIGIDPHKASHTAVALGDGEVELARLQLRSGRSQVGRLLRWAEPFPQRRWAIEGAEGLGFLLAQQLVAADQVVMDVPATLAARTRLLGSGRSNKNDPNDAWSVAVTAARHRDLRVVRPAAHAELLRLLAKRHIDLSNQRTRLVARLHALAVELSPGGIAKRLNSTDAVKFLATVTPTDPVAGLRKDLIAELASDIAGLEAQIKQSERRIRDAVGASGTTLTDIFGIGPIIAAMLIGNSGDIRRFANRDRFAAYNGTAPIEFSSGGRVAHRVSQRGNRTLNHALHLAAICQLRHPESEGRTYYERRVAEGKTSKEAVRALKRQLSNIAYRHLVADAIS

SEQ ID NO: 410405 - protein, 345 aa, unidentified
MQPMYYIGLDVHKRTISYCVKDGSGVIHSEGTLAATRLDLDRWMKTLPQPWTAAMEATVFTGWIYDHLQPHAAALKVAHPLMLRAIAAAKKKNDRIDAKKICDCLRCDFLPECYMASTAIRERRRTLRYRNLLVRQMVQMKNKISMLLMEAGVSYNKQRLHKAGYFRELLATNPDIPEGLRSLLRLCRETVVRLSKTESALVRSLEQDSLLMDRVERLMTIPAVGPITALTWALEVGDVKRFSSIKKAVSYCGLCGAEKSSGNTIQRTPLSKQRNKHLQTTLIEAAKMAPRYSPSLALLYDREKQKGNANRATLAVARKLVAYLMAVDRGQRNFQVMETSNCVAA

SEQ ID NO: 410406 - protein, 360 aa, unidentified
MEEPAMFNDSMLFIGIDLGDRMSDLILLDPEGELIEESRLPTSPASFQQKFSALPSARVALEVGAHSRWVSHLLEQLGHEVLVANARKLRAIYANPRKGDRTDAETLARLARLDPSLLSPIHHRSAQDQADLAVLRSRDAGVRSRTLLINHVRSVVKASGARLPSCSSDGFSKKVGPSIPEPLRPALLPLLDMIASVTQQIRAYDRQIETLCQAQYPETRSLQPVSGVGPLTALAFVLTLEDPSCFPKSRDLGPALGLVPRRDQSGDRDPQLGITKSGHAFLRRLLAGSAHYILGPFGPDCALRRWGLELADRGGKNAKKRALVAVARKLAVLLHHLWKTGQTYEPLYQSQRRREPRLAA

SEQ ID NO: 410407 - protein, 409 aa, unidentified
MHQRCAGLDVHEAFVVVCRRLLDPRGRLTKDVREFSTMTRDLLGLGDWLAEAQVTHIAMESSGVYWKPLWNLLEDRFAIVLVNARHVKQVPGRKTDISDAEWLAQLLQHGLLQASFVPPTPIRDLRDLTRHRTSLLQERTRAINRVHKTLEDANIKLSAVASDIMGVSGRAMLQALIDGHTDADQLADLARRRLRAKRAALVEALTGRVRPHHRFLLRTLLTHIDFLTTQVTDLDTRLEEQLRPFAAELALLRTIPGLKHRAGECVLAEVGPTMTVFPSAAHLCSWAAVCPGNNETGGKRRSGKTRRGNRWLRGALTEAAWAGARTTGSYFQGQYRRLAARRGKKRAIVAVSHSLLIAVYHVLHQQVPYRDLGAAHFDRLVPAQLTRHLVKRLERLGHKVTLEPSGAAA

SEQ ID NO: 410408 - protein, 348 aa, unidentified
MRCYQHRHRFYCGVDLHARTMYVHVLDADGKTVFEQDLPADPAAFLNAIEPYRPDLVVGCECMFAWYWLADLCAAEQMPFALGHALYMRMIHGGKTKTDRIDAGKLASMLRGGLFPLAYAYPKAKRQTRDLLRRRSFFVRQRAQLLTHIVNTNTQFNLPALTKKLTYAANRTGDLVERFVDPSTKRMVAADLALIDAYDERIAELERYLVPHAKVDDPVTFGLLRTVPGIGVVLGLTLLYEVDDIKRFPEPGNFLSYSRLVRCPHESAGKKKGTGGKKVGNAHLKWAFSEAACLLLRACPAARAWMQRRERKKGKKKALSILEAKLGRTVYHLCRKQVPFDLKRFLAG

SEQ ID NO: 410409 - protein, 404 aa, unidentified
MNNVAGIDVSKGKSVVSVLRPFGEVVAKPFAVGHTGSELKELANYLKSLDGETRVVMEHTGRYYEPVARFLHEEGIFVSAVNPKLIKDYGNNSLRKVKTDKADARKIARYGLDNWVELRQHTPMDTIRIQLKTLNRQQGLYSKTKTMMKNNLIALLDQTYPGVNALFDSPVREDGSQKWVDFATAFWHVDCVRDMSLTAFTERYRKWCRRHGYNFNQSRAIEIHTQAQDLIAMLPKDTLTKTMIRQAIDALNAVSASLERLKTEMRILAAQLPEYPVVMAMRGVGDSLGPQLMAEIGDVTRFTHRGAITAFAGVDPGADQSGAHEAKSNRTSKSGPPELRRALFLVMDCLLKTMPQDDPVYRFMDKKRSEGKPYLVYMTAGANKFLRIYYGRVKEYLASLENAD

SEQ ID NO: 410410 - protein, 357 aa, unidentified
MLIIGCDFHSRFQQIAMADTETGELIERRLEHRNGEAAKFYTSLQKPVRVGMEATGYAQWFERILAKLGHELWIGDAAAVRAAMVRKQKTDARDARHILDLLLENRFPRIWIPTPVERDLRQLLRHRHKMVCLRTSLKNQLQALALGQGTYRKQKLWTSLGRTELEALVLDPWAHRRRQELLQMLDQLAPLIAELDRAVAEEAAQRRDARRLMEQPGVGPVTALMFVLTIGPAERFRSSKQVVSYLGLNPRESSSGGRQQLGAISKQGNSLARYLLTEAAQTAACYDEELRRNYRRLKFRRGSAVAKVAIARKLAVRLYWMLRNQSAPPARMQGTSRKPAGRRTPIVSVIGGPASSS

SEQ ID NO: 410411 - protein, 436 aa, unidentified
MRGCRCSMIMGFTKPIEHFNLQRKKVITMNTLYVGIDVSSKSNVIYLMLPNGDKHSNFSVANSHEGSTQLVKRILSALTSHSLDTVLIGLEATSVYGDNLVYFLREDATLAPFNRKIHVLNPKQVKKFHDAYNDLPKNDYVDSFVIADCLRFGRINKEVYMGDYRYKALQNLTRARFFAVQNLVKEKQRFMNVLFKKYSTMTQEKVFSDTFSTTALAVYDEFESAEALANMDLHELTDFIIEKGKNRFPDPDAVAKAIQKAARSSYRLPKTVNDSVNQVLSISITSMKALESQIKEFDKAIIALMELLPNVLISIPGIGPVYSAGIMAEIGDINRFDNQASLAKYAGLAWKQHQSGGFEAEVTRLIPSGNRFLKYYLCEAAFSLVRCDKEYSDFYHLKYKEVNRCQHKRALALTARKFVRLVFRLLKDNRLYCPAK

SEQ ID NO: 410412 - protein, 347 aa, unidentified
MNFYTQQHKHYCGIDLHAKAMYVCLLDQHGTKLVHKNLPTTPEAFLRSIAPYREDLVVGVECMFTWYWLADLCAKEGIAFVLGHALYMKAIHGGKAKNDKIDAHKIAVLLRGGMLPQAYVYPAEMRATRDLLRRRCHLVQKRAELLAHIHNTNSQYNLPEIGKKLAYKANREGVEEHFPDPSVRKTIEVDISLIDHYDKLLGEVELYITRSAKAHDGQTFARLQSVPGIGQILALVILYEIQDIARFPRVQDFVSYCRLVKCAKESGGKRLGTSGKKIGNVHLRWAFAEAAVLFLRHTQPGKEYFTKLEHKHGKAKALTVLAHKLGRAVYYMLTREQAFDLKRFVTA

SEQ ID NO: 410413 - protein, 408 aa, unidentified
MQLPPMHKRAIALDVHQAKITACAIVEHDDGRVEVTMREFGAFKRDRRALAQWALEIRPEVVVMESTGVYWKSPFAALESVGITAWVVNARHVKAVPGRKTDIADAQWLATLARAGLLRASFIPPLLMRQLRLVARQRQKLVGMCSAEKNRLHKVLVDAGMRINVVVSDIHGTSARAMVKALIADKPMHEVLDCKGRLRASREELFEALDTEQFSAVHRFVADEIVQHIEQIEQRIARLDAYLLEGLKAYGPQLNLLQTIPGIDLQGAAMLLVEIGADMSPFGSAERLASWVGICPGNNESAGKRKTGKIRKGNAWVRRLLCEFAQAAARTRCALRAKFEALAIRKGHKKSIVALAHKMLRTVYAMLSTGAHYQDKTVDYEALSVARNAPRWIKMLRKHGFIATPAAA

SEQ ID NO: 410414 - protein, 451 aa, unidentified
MSKPQVIDDEEHERVHERVAAVDVAKDSGMVCTRLPHPSRPGARPSTVWTVKARMGAVGKLGRQLKDSGIELVTLESTSDYWRIWFFVLEACGLAVQLVNAAQAKNLPGRPKTGKLDAQWLARLTELGLLRASFVPPAAIRALRDYTRARTRLVQERTRCYQRLEKLLEGALVKLSSAASKLTTESAKDMVKAMIAGQRGPRTLAALARTRMKAKHDDLAEALDGMFDDRHGELAGLLLDQIAFLDERVTQLTARITAAVAAMPAAWGVDGDGTTGPDAGTGPDAVVLPAAARLAEIPGVSQDLARAIIAETGLDMSRFPTAAHLVSWAGLCPSARQPGPRTRAGKKSQGDTWLRGSLGQAATGAARTDTFLGERYWRIARRRGKAKAQVAVARSILVIIWNLLKDPAARFTDLGPGYYQARTDKVKKIKNHIRQIEALLGHPITITPKAA

SEQ ID NO: 410415 - protein, 346 aa, unidentified
MLHAGLDLSRRKVDVCLLSTQGEIVDEWASPPDADGLRGLAARAAMRGPAVRGVIESMNGARFVHDRLEEHGWDVLIADATKVKGLAPLACKTDKIDARVLATLSARDLVPEIWLPDPSIRRERELARFRLHLVRHRTTLKNRIHAALIAFGHPCPVSDLFGHAGRELLNRLAIPDPWRRNIEVSLRLIDDLELQIAQLTVQLKRQGADHRYIPLLVTAPGLGWINAFTVASEIGDIGRFASPAKLCGYTGLCPRVIQSGASDRRGPISKHGPKYLRWALFEAALNACKHPYYAERYQHTKRRLGRQRGPKVAQIDLARRLTEAIWHMLTRNQPFAPAGAPFRLAA

SEQ ID NO: 410416 - protein, 409 aa, unidentified
MEVLYSKCAGLDVHKDSVVACIRLHEGSQGVYSVQTFGTTTTALLKLSDWLSEHEVTHVAMEATGVYWKPVWHVLDGTFELVLANAMHIKNVPGRKTDVKDSEWIADLLAHGLIQASFVPPTAIQDMRTMMRTRKQLVRERAQHVQRIQKTLEDANIKVSSAISDVTGISGRAILQAIIAGRTNPDDLLAVTTGRLKASDSVLREALRGRIRAPHRFLLKLHLEQIQGLEKSIADIDQEVGALLEPFRAKCQRLTTIPGVSDVVAEVILSEIGIDMSRFPTPGHLISWAGLCPRNDESAGKRRSTRLRMGAPWLKTTMVQAAWSASRGKSGYLPAQFHRIRSRRGPKKAVIAVTASMLTAAYFIIRDDVEYRDLGSSHFERTINRDKTASRLVKRLINLGFNVEIKEAA

SEQ ID NO: 410417 - protein, 396 aa, unidentified
MLRTKLQKQNDFTGQVFHIGLDVHKESWCVTIRSLGIEVGHFTQVPDAAALHQYLQRNFPGGQYHSAYEAGFCGTGAHEELCKAGIDNMIVHAADVPSTDKQKKSKTDLHDSRAIADHLERGNLHGIYVLSQEQQELRSLFRLRECKVKDTTRANNRLKSFLMYYGIVIPAGISKRGVLTGRALAWLDIEMQSAAGTIVLQEYIAELRYQRKQLFQLTKKLREQVMAYDKQTYINLITIPGMGSITAIGLMTEIGDFRRFDDPDEYSSYLGLYPWEDSSGDCIKTKGMQPRCNSHLRPLLVEASWHAIRKSRNLFAYYSKHAGGKYGKKAIVKVARKLAMIARGVATSGQPYQEDYQKKDRKQEPAKKMKAGRFSSGIAEQHINKQPNYGRMPMPG

SEQ ID NO: 410418 - protein, 356 aa, unidentified
MSRDIKYIGMDVHKEAIVIAVLNGSGKLVMETIVETKASSILQFIHGLRGELHVTWEEGTWAAWLYDLLQPQVEQVLVCNPRRNALLKEGSKSDKVDAQKLADLLRTGMLRPVYHGENGLRTLRELGRSYQTISKDLTRVMNRLKALYRGWGIPCAGTQVYGPRYREEWLNKIPQAGVRRRAELLYQQLDGLQGLRRHLRPEFLAESRKHKAAKLLRQIPCIGPIRAARLIALIQTPHRFRSKRQLWTYSGLGIETHDSAQFRFVRGQLQRSRKPQQIRGLNRNHNHEMKEIFKSAATRASCGRGPFHDFYASLLAKGMKPEMARLTLARKIAAITLTLWKKEERFDVEQLKTQKQ

SEQ ID NO: 410419 - protein, 371 aa, unidentified
MKSIIYIGMDVHKKTYSLCALLKETGEIIGETKIPADVSLIIKFIENAKKSVDSDDVQIKTGYEAGCLGYSLYWQLAAKGIECDILAPSTMHRSAKNKVVKNDRRDAKNIAANLANGTYKSVYVPTDEDVEIKEYIRMMHDFKIELKKVKQHINAFLLRFGHHYPGKSKWIPAHIKWLKELELSDIYREILDEYLSQLEILSEKIERFKHRLEELSQKETYNEKIGQLRCIKGIDTTAAMTMHAETSDFDRFPTANAFASYCGLTPGEDSSGESYHRLGITKQGNSMIRTTMVEAAQVLVRGTIGKKGKKVKSKQKDQDVKVIDYADKAVVRLQKKYHRMIFRGVKRNIAITAVARELACFVWGIETGHIS

SEQ ID NO: 410420 - protein, 356 aa, unidentified
MPQNNRLSFAGQDIYVGIDTGKRSWTVTILTDHFEHKTYSQSPRPEVLLSYLHKYFPDGHYLCVYEAGYFGFWIYESLTEHGVDCIVVHAADIPTKDKERRNRNDRVDSRKLARNLRNGELTPLYVPSRQAQEDRTLVRMRMQMVRKQTRCKNQIKSLLSFYGIDPPEDLMRSRWSNRYVIWLESLDFQYVSGNYSLSALLSELRHLRQSICDLTKHIRHLARQEPYSNLVPYLKSVPGVGILTSMVFLTEIVEIDRFKNIDHLASYVGLIPGEDSSGDQEIHTGISRRRNQHLRHLLIESSWIAVRKDPALIKSFNELAKRMPKNKAIIRIARKLLRRIHFVLKNQEYYEPCVVS

SEQ ID NO: 410421 - protein, 394 aa, unidentified
MRYVGIDIGSEAHVVAIVDATAAVLQAPTQCREDAGGYAKLRQLLGPSADTLVAMEATGHYWKNLFAMLAAEGFAIALLNPRRTSRFAQEELERTKTDAMDALNIARFAAQKQPAVTRLPDRAADELRELVRHRDRLVQDFGDRTRQLHRLVDLGFPEFTRHVHSLDSSLATTLLHEYPTAEAFHGLAPGRLSRLRYDGRHVVGPELAKALIQAARVSVGRHHGHAYRLQVHHCCEDMDLLRRRLREIGGDIERTLAEHQVGTLLTTIGGIGPTTAARIIAEAGDPADFLSPATLAAYVGVVPALKQSGKRQPRRAGCSPIGNARLRKALWMPTLTAVTKNPWLKAYYDGLIARGKLPKVALVAAMHKLLGAVHSVARRRQPFVPILHTAEVPS

SEQ ID NO: 410422 - protein, 400 aa, unidentified
MDKDRIVAGLDVHKDTIYLCVMDNTEAVIFAKVYGTLTPDLELMCSEMVSHGVTEAAMESTSTYWVPVWNALCESMSLKLVNPYFIKQLPGRKSDVKDAQWIAECLLKNLIRGSFVPDKRVQDMRKYNRRIFDLNEDLTYNSNKQDAALQRCGFRLSNYVSRVNGKSYQKCVRAIITGITDPEELVKLIHGKTLRKYGRNIIKDAVTGDFHQADICLLKQYAELIEVIERQIEECRNALIAMCQEHFPKQFKRLQSIPGVKERAASAIIAETGADMKPFEKATNLVGWCGLKPRNDISNNKVKSNRTTHGNRFLRQILIEISWVASRTRNCFFSNFSYVQCTQRRKNKMKIQVAIARKLLVAVWHMLTKDEDFIDVYLKRLEKQAEWQNDIQALESLLVG

SEQ ID NO: 410423 - protein, 312 aa, unidentified
MENTIGIDVSKAKLDVHVLAEKRYIQFENSDFGIAELIKLCLKIKPDLIVMEATGGYESRAAGMLGAEGLPVAVVNPRRIRDFARAIGRTAKTDKIDAESIALYAANCQPMAQERIDDNSRKLKALTARRQQLLDMRTAENNRIEHAVDKEISRSLETVLRTIDREIAKVDKKIQDHIDNMPELKQRAEKLRSVPGIGDTTAAMLVSELPELGTFNRRQIASLVGVAPMNRDSGTFRGKRMTGGGRRNVRNRLFMPTLVAIRHNPVLKKHYRRLVDEEGKVKMVAVIAAMRKLLCIMNAMLKNNREWELKTP

SEQ ID NO: 410424 - protein, 353 aa, unidentified
MDNGSRYVGLDVHRDTISVAVRDSRGKLMLERVIPTSAAAVLELLELLRGHLHVAFEEGTSAQWLVGLLQPRVAQVLVCDPRKNDRRGSKNDRIDARELADLLRCGRLSPVFHQDCGLTALQELARTYLVLTKDQTRVMNRIKAIYRSWAIPCAGQSCYSSKQREAFLSQLPHAAVRGRAQIYYQQMDSLVALRQRVRQQLLREGRKQPALRLLRQIPYIGPLRATLLVVFIQSPHRFRTKRQLWAYCGLGIETHDSGEYRFRQGQLERKRQPTVMGLNRNHHHLLKYILKSVAARCCSGSGPVRDFAQTLLDQGMRPEMVRLTVARKIAAIILVLWKKGVSFDAHYLKPQAA

SEQ ID NO: 410425 - protein, 351 aa, unidentified
MTNDITAILTVGIDLGDRRSEVCVLGSDGEVKRRFGVATTREGLEKKLGGLVRARVVIEVGTHSPWVSRWLEAKGHEVIVANARAVRSIAESDRKTDRNDAEQLARLGRADPKLLHPIRHRGEAVQRHRMLLAVRDHLVRTRSSFVVQARGLAKGLGERLPKCKAETFAKTMRREVGTDVFPAMEVIVTTVEQLDAQIAALDAQIDELARRAYPETELLRQVSGVGPITALAFVLTLEDPRRFANSRAVGPFLGLTVRKRQSGSRDPALRITKAGDPFLRRLLLQGAHYILARGPDCDLRRFGLRVMARRGRPKAAIALARKLAVRLHHLWVNGEVYQPLYDAERKTLAAA

SEQ ID NO: 410426 - protein, 399 aa, unidentified
MRTVFGIDVSKHTINLAIVVNKVKVDELKLTLNRPGLDDLLKLLKSFHQPEVVFEATGIYSRTLQHFLDCNKFEYTMLNPLAAKKQLDSLCPYKTDRADALNLAQTSFIVHRSLSYKQDPIYEQLHDLSRFYQEVSRDVINHKNRLHRALQLTFPQIESLFSNTNSELYWAIVLRFARPSRVLKVTHAELTSVILHSTNKIISSDRASRIAQKLSVLAKKAYPVVNDNSYVYEQIQYLANRIVEEVHEKDKIITKMQHEAENLPEHKLPLSIPGFGVRTVTSLIGELGDIRRFHSSNALNAYIGIGLRHYESGNFVATDHISKRGDAVARKILFKSIQNIAVTSHFHPNHINDFYQKRKRQSPQSGTKKIAIATMHRLLRTIYHLVKYNQSYNYQIAKA

SEQ ID NO: 410427 - protein, 345 aa, unidentified
MKIVGCDLHTRYQQIAMLDAETGELVERRLEHESGEARAFYAGLAGRVRVGIEATGHTRWFERMLGELGHELWIGDAARIRAAMVRKQKTDARDAAHVLELLLSDRFPRIWRPSLEERDLRQLVWHRQKLVWMRNAVGNQLHALAMGEGVCRKKKLFTKKGRVELEGLKLGRWASHRRQELLRMLDQLDASRKELDQAVAEQAEQNPAAVLLMTHPGVGPVTSLAFVLTLGPVQRFERSKQVVSYLGLNPREHSSGGRQRLGTISKQGNPMMRSLLVEAGHTAARLDAELRQDYQRLKLRRGSGVAKVAIARKLAVRMYWMLRSPASYAQLVRMQGSPRGTLVGP

SEQ ID NO: 410428 - protein, 326 aa, unidentified
MLDTETGDYSEHRLKHSDGEAEKFYRDLKLHTLKIRVGLEATGHRRWFERLLMELDCELWVGDAARIATMRVRKQKTDRQDAQLLLKLMMEDRFPRVWISSLEDRDLQQLLWHRHRTVQMRTRILNQLQSIAMNEGIQRRGGLRSVQGRKRLEQIPLGPWGTRRRSDLLVLLDRMNERVNELTAAVQQEAEKRPEAQLLMTHPGVGPVTALAFVLIIGYPERFQCGKQIGSYVGLIPSESSSGVHRRLGHISKQGNVLLRSLLVEAAQAAARFDPEWHKKFSHLAMRRERKIAKVAIARKLAVSLYWMWRRHRSSQIASKVGSYAG

SEQ ID NO: 410429 - protein, 343 aa, unidentified
MQAVTTIGLDIAKSIFQVHGVDAEGNVVVRRKLKRRYIVAFFQKLPPCLVGIEACASSHYWSRELQALGHTVRLMPPAYVRPYVKRHKNDAADAEAICEAVTRTNMRFVATKTSEQQSCLMLHRTRHLFIRQQTAVINATRAHLAEFGIVAPVGRNGVEELLNVVADSTDKRVPEIARACLAALGAQLRMLKTQVLEFDRLIMAWHRSNETSKRLDEIPGVGPALATALVASVGDPRAFRSGRDFSAWIGLVPKQNSSGGKEKLGNISKRGDRYLRSLFTIGALAVIRYAKLHGTQHRPWLAALLARRPTKVAAIALANKMARMAWAMMAKGERYKEPVALAM

SEQ ID NO: 410430 - protein, 355 aa, unidentified
MGRSIGVDLHRNNFVAATRAGNGRTYVRTWELAEMVRFAGQLRPDDRVAVEMTTNTRLFYDAVRPAVAEVQVVNTAQFKVITKSVKKTDRRDAETLALYLEKDLLPTVRLKEMEQGQLAGLVSTRDTLVKQRTTLKNTINNRFAMYGRAIKREMLSSEKGLAAVEAEPFDTLAQAEIRVLVAQVRALNASVRELEKSIEASTEKLKGDESLTSIKGVGTMSAAILLPVIGNVNDFENAGKLAAYLGLVPRVSNSNETERSGRITKRGSKLARTALVQCGLIAKKYSPYLHAFHERVKQKKGGGKANVALARKLLEIIYRTLKNDWVFEDFGRFQLKGGISPVKSKMKTKTKRRAG

SEQ ID NO: 410431 - protein, 325 aa, unidentified
MPPRRELVTNKAEFNPNFMSEKIYFGVDVCKESLAFCGANVAGQVPNNAPGVRRLLARLPQGAHLIIEASGGYERELVKVAQQSAVLLSVVNPRQVRDFARGVGRLAKTDPIDAEMLARFGAEVNPPPDAVPTTAELALQELVSARQQLVEQRTVLLQQQSQQLNNVVRRLDRARLKLLQRQIDQLELAISSILEEQSALKQKVERLQQVKGVGFITAVTCVALCPELGSLSKRQTAALVGVAPYDEDSGARKGWRHISGGRPKLRRALYMASISAVRSNPILRRFYQQLRQRNKPPKVALVAVIRKLAILLNRLLRNASFLPAS

SEQ ID NO: 410432 - protein, 354 aa, unidentified
MRSEVKRSEGTSPEGTSAACKSPVYMGIDVAKRTLDAAVICAETGQVRAREETANTPAGHRRLVEQARAYTVERVVMEATGTYHLHIAKAVHEAGLPVSIVNPLQVKRFAQLKQRRAKTDREDAALLAAYGREEEPEESEPPHPEQAKLKQIATLIEQLTRQRTALKNQQQAEETRPDRARVCHEVLTDQIQTLTRNIDQLKEEQERIAHEAFAQAKALAESVIGIGPRITCALLAYAGDLSGFTSHKQLTAFMGLDPRVHQSGTSRGPRGITKRGHKRLRTLFYMGAHSARVYNRACKALYQRLRAKGKAKKVALIAVANKLIKQVFAVIKSKTTFDNDRYSYTNQPMNQPGT

SEQ ID NO: 410433 - protein, 393 aa, unidentified
MHNCLAIDVAKGKSMVTLVSSNGEVLIDPYEVNHSIIDFTNLLNRIKKFKLDNISVIMESTGIYHRPIERFLVENNFKVFVINPIYGKMKKRNLRKTKTDKEDCFNLVNLFISNTFKEYIKPDQLYLDLNALSRQYFALDELCVNIKNRYRNLVYLCFPEYENIFKDSLIYSNIALKFIEAFPHADIIFNTRIDKLQNFFKKHKFRYWKSKAFKIKEISSSSYPSVNMNDEIVSNLSQIARLVNEYQKEIDIIKYKITFLAKKSKYFEPINSIYGIGEFTTSIIIAELGDINRFNNIKELTAYCGLDPSIKQSGKSINVHGPISKSGNKYMRKILYITCSNIIRLTAISKSENDIEIYYRKKRNEGKHHYASIVACTTKLLRKILALCKQLDN

SEQ ID NO: 410434 - protein, 426 aa, unidentified
MALVDEITEEPERVVQRVCALDLGKAGLVACVRVPHETRPERRLQEVREYSTVTRQLLELADWLRVQQVELVAMESTSDYWKPVFYLLEAEGFTCWLLNATHVKHLPGRPKTDRLDAVWLAKVVERGMCRPSLVPPKPIRQLRDVVRYRRSLIRDQTREKQRLEKLLEDAQIKLTSVISDLHGVSGRQMLQAMIDGERDPKVLAQLAHGIMRRKIPVLEEALTGFFGDHHADLCRRMLRRIDDLSADIASLDARVEELIAPFAHAVATLDEIPGVGVRAAQEIIAETGVDMTVFPTAAHLASWAKFTPIDHNSAGRKKGGGTGKGNPWLAGTLGEVVASLARTDTFLGERYRRLARRRGKKRAIVAVGNSVLTIVWHLLNDPDQHYQDLGSDFYESRINKRRRERDLIRQLEHLTGHKVTLTPTAA

SEQ ID NO: 410435 - protein, 372 aa, unidentified
MGHHTEAFVGIDTSKSSNAIAIADGGRGGEVRYLGDFPATEAAIRKLVAKLAAKYRDLMFCYEAGPTGYGLYRLLKSLGHECLVVAPSLVPKKAGDRVKTNRRDAVSLAKLLRAGELTAVWVPDERHEAMRDLSRARQAVKKDLQGKRQQISSLMLRLGRIYPGKTTWGPAHMKWLMAQKLEHREQRITFEELLDGIRQESERVERLEKAIREAVPEWSLAEVVAALQAMRGIDLIAAVGVLAEIGDLSRFQNPRELMGYLGLVPSESSTGDKVKRGGITKAGNGRARRILVEAAWSYRYPPRVSREKQPKVEAAPRRVREIAWKAQTRLCGRFRSLERKGKRRTVIATAVARELSAFIWTINCELMAHRQA

SEQ ID NO: 410436 - protein, 343 aa, unidentified
MQVNTIGVDLAKNVFQIHGVDSAGKVVITRQLRRKQVLEFFSKLPGCLVGMEACGTGHHWAREISKLGHTVRLMPPSYVKGYVKRSKSDAADAAAICEAVTRPSMRFVPIKSTDQQALLMLHRTRDLLIRQRTQLINALRAHLAEFGLVAETGREGLAQLGAIITDESNRGSLPAAMKQALQAIVDQLAALELQVGALDRAIHAHHRANDMSCRLETVPGIGVIGATAIASTVTDPSGFKSGRDFAAWIGLVPRQHSTGGKERLGGISKQGDRYLRRLLVIGATAVVRQARLHPQKHPWIMRLLAKKPAKLVAVAVANKMARIAWAIMAKGGHYRAPELAAAA

SEQ ID NO: 410437 - protein, 401 aa, unidentified
MPTMRDNATRVKRFRELKATLRTNRQRLLVGLDVAQAEHVVQMRLAHTRIVGPTLTVPNSTRGFTQLWTRIQQAQRATGCAEVVCGLEPTGTYHEAVATFLEGQGADVVLISSSVAYWNRRTQDGTWDKHDRKDAANCAELVEQGKILFYSRPDGPLAELRRLVKCLRRARTELAACKARWRTTLRPALGPMGEPLPNRLRAELPAVLQAWERAASGRPAVPKGRLPLGLATACADLGAQVTAVQARIAALEAACMPVAERLPAYPLLRTIPGVGPTVGAILLAEIGDIAWFTQFSQLRKLAGLDIVRVQSGQFAGQARISKCGRGLLRWALYHAAMGIARTVAGRARLAALQAKRQGDRYAGFKAIVELAAKVLRIVWGVWRSGQPYDPRRTGGLCRQAR

SEQ ID NO: 410438 - protein, 344 aa, unidentified
MNATTVAVDLAKNVFELAVADEHWKLVERARLTRGQFERWFRNRSVRLVVMEACATAHYWARTLRARGIEVRLLPAQYVRAYVKRNKTDAADAVALLEAARGCDIKPVVVKSVEQQALQALHRLRSAWMATRTRRINTLRGFCREFGMEVPVGAVRGLAQIARLLADDHSAIPVMLRTPMRLALEEIRLMEARIESLERELAQIARPSEACKVLASVPGIGLLTSTAMLAAVGDPRSFDSGRHYASFFGLTPREYSSGEHRYLGRISKRGNRYVRMLLTHGARSVLRAATVARRAGRKLDRLRSWALEVQARTNHNKATCALANKLARIAWAVWIKHERYQAAA

SEQ ID NO: 410439 - protein, 339 aa, unidentified
MMKKAPTFERFCRCSGIGIDVSKATLEIVGIEKEQVWRAEIDNAETAIESLAKTLKDGGYRHKIVCESTGHYHLLLGLVFARYGLDLRIINPLQSSKHQKSRIRKTKTDQIDGYVLATMCETERDLPKAANLQSKQVLMRLKQGQLHALDKQLQRMSRSISTYTETYQKLGLEPGSSAQALQQVVTGLKAVRRALQQELEAMMVQETVASDDIDKLRRLPGYSLMVAGLVSTAFDRQVKSDRSWVAYVGLDISVRESGKWRGKGKLTKRGNSFLRKRLIGAAWGAMMNYDEVREYYLKLKAAGRNHIEALCIIARKLLRIAYVVLVQGKEYDANIAFAT

SEQ ID NO: 410440 - protein, 426 aa, unidentified
MSERDYNKQVAKRQRIRSTTLVVGVDVGKVYNAVGFMNKEGEVLGSCAKVYNSREGFEQFTKMVEDLKARHGLKDVLIGMEPTGHYWRKLAYFAKECGYEVRFVRTTALKHHRELDESASAKSDQRDALTITNITREGKYIDTVVEDGPLRQLRTLAKARERLLRYSVSAKNSLHAALDDYFPELHELFWSMGSRSLWAILERCPFPEDVLPIKVSTLEGWIVQRSRKKAGAAQKAKALYQAASKSIGLKQIGSADRYRVQMSLEEVKRTVLTLKSMDQQMKNILKEIPSAPYLLSIPGIGALSAAVFLGELGDPAHFHNARQIVKYAGYDPQESDSGSWVSRKFISKKGRWLMRKYLFFMSMRVVVLTHYFKTYYERKLETKNRVGQLPRRKEILCAVAIKLIKVIFALLRDKRDFEDTVTCSDQ

SEQ ID NO: 410441 - protein, 424 aa, unidentified
MREHDTPAQARGTPTPWKATMTDTDHIGVFLGLDVGKSAHHGHGLTPAGKKVFDKPLPNSEPKMRTVLDKLKAKFGTVLVVVDQPASIGALPLTVARQAGCEVAYLPGLAMRRIADLYPGEAKTDAKDAAVIAEAARTMAHTLRSLETGDEITAELTVLVGFDQDLAAEATRTSNRIRGLLTQFHPALERVLGPRLDHPAVTTLLERYGSPAALRKAGRSRLVELLRPKAPRMAARLVDDVFTALDEQTVVVPGTDTLDLVVPSMARSLAAVHTQRASAQEQISALLEAHPLSQVLTSMPGVGVRTAAVLLVTVGDGTAFPTAAHLASYAGLAPVTKSSGTSISGEHAPRTGNRQLKRAMFLSAFACMNADPASRAYYDKQRSRGKTHTQALLRLARQRINVLFAMLRDGTFYQSRTPAVDLAA

SEQ ID NO: 410442 - protein, 454 aa, unidentified
MAQRNAKISLKPSKSRAALTITHPNAAGIDIGSASHYVAVPPDRDDEPVREFSSFTEDLHALADWLKACKVDTVAMESTGVYWIPLFELLESRGFTVLLVNARHVKNVSGRKSDVLDCQWLQQLMSYGLLRGAFRPVDAICVLRALWRQRGMLLRSQGRQVQHMQKALTQMNVQLANVISDVVGETGQKILRAIVAGEHDGQVLAAMKDARIRASHAEITKSLQGNWRPEHLFSLQQALAMFDFIGTQVAECDREIEEQLRALQTHDGEPPEGKKKARARNAPKFDLRTQLFKMCGVDLTRIDGINVTTAIAVISETGNDMSRFPTVGHFTSWLGLCPGTKITGGKVMSGKTKRVANRAAQALKLAAAALRSSQSALGAYFRRLCARMDKPKAVTAAAHKLARLIYMMLTKGEEYTDQGQDYYEERYRERVLRQLAQRAEKMGMRLVPGEIVTP

SEQ ID NO: 410443 - protein, 338 aa, unidentified
MRLYCGIDLHSTNSYVAIIDEEDRAVYRQRLPNDLGLILSELGPYADRLVGVVVESTYNWYWLVDGLADSGYRVHLANPSALGQYHGLKYADDQSDSRWLAHLLRLGILPEGYICPREQRGLRDLLRRRGRLVQQRTASLVSLQNQFHRHTGRRLPARAVRALDIESIGQQLVDANVALSAMATWRVVECIDKEVQSLEREVQRQLKPDRMVKLLKTVAGVGDVLAPTIRLETGDVGRFRSPGKYVSYCRTVGSRHLSNHKVKGRGNTKNGNPYLSWAFVEAAHFAVRFHPPVRRFYERKKARTHRVVAVKAVAHKLARASYHVMRDQVQFQVERAFG

SEQ ID NO: 410444 - protein, 430 aa, unidentified
MMTARQEVTPAATYVAIDIAKRTHAVLIETSDGKQRRFRMASTHEDHQRLVDLLRTCPAPVRVAMEATGDYHRTLAYRLLREGLEVCLVSSMAAARYREAVFNSWDKNDPKDAGVILALLKQGITQRFVDPLMAGHHGLQELSKTHYQISLARTRLQHSLLTHYLPLYFPEVERYFCTTQAAWFAQFLLRFPTAASIRVLSFEAFEREAWGIVGRKVNKRAWIRELYDAACTSVGLPIADDDIALDTFRLQLRRYQQLIEQRDTLVETARGVLQGRTDYEALCSLPGVGPVLALTILAEAGDLRRFAHHRQFLKYCGLDLAKCQSGQFRGQEKLSKRGNARLRFAFWFAATVAVRMRENSFREKYERYIRSDPLNADRKRKALTAVAAKMARVAYSLVKHQSSYRCYFETSLPPVDRPLSVGPSGPLRIL

SEQ ID NO: 410445 - protein, 340 aa, unidentified
MVYGAIDLHSRFRQIRIVTADGAVVRERRVVTSRSPLRNAFAAVGAVRIRVEASTESEWVAQVLEAAGYEVIVADPNSASMDGTRHRRIKTDTRDVAALSDACRLGVFRRAHRVAAAQRTLRQELAVRRQLVRRRTGLIAHRRARLRQDGFRLGSGSRTTVHERVARLERPASLRGSLTPLLETFAALTPIIATTTRRLTTTANADPVAVRLHTVPGVGPLVALTDRATVDVVTRFPSAGHVSSALGLVPREDSSGERRQRGHITKVGPSEARTMLIQAAWPCWRSRTARTTPLRQWADRLAARRGARIAVVALARRLSRILYAVWRDDTVFRVTPARAA

SEQ ID NO: 410446 - protein, 388 aa, unidentified
MAPSVFHASPEQPATVLPDLTLYASLELSRSTWLVTCLLPDRDKMSKYSTPGGDGGALLGLLERMRARAQQLTGRPVDIVAIQEAGLDGFWVHRLLEANGIESHVVDPASIAVPRRRRRAKTDAIDGETLLRTLLAWTRGEPRVCAMVVPPTPEEEDCRRVCRERAILLQERIRHTNRIKGLLAGQGITGFNPLHKDRRQLLDAAPTGDGRSLPPHLKAEILREIELIELLLRQIADVEAAREALTRPKSAQAPSPIVLLKQLKGIGPEIASVLYLEGLFRSFGNRRQLAAYAGLAPTPWRSGTVEREQGISKAGNPRLRSTMIEFAWLWQRHQPASTLSRWFHSRVGKERGRIRRISIVALARKLLIAVWRYVTQGEIPEGAVLKAA

SEQ ID NO: 410447 - protein, 400 aa, unidentified
MDRNRIVAGLDVHKDSVFLCIMRYDEAIIFEKTYGTLTTQLRQMRDDMLCHGVSECAMESTAVYWVPVWNELCEYMTLRLANPHFIKQLPGRKSDTKDAQWIAECQLKRLIRESFVPNPVVQDMRKLNRRIFNLNEDLTYNKNKLDAAMQRCGFRLSNYVSNTGGKSYQSVVRAISQGETDAGKLVLLVHGRTVNKHGRDTIAGSVTGNFSPIDIAVIRQYLAMIDLINAQIDECQKALTAMCEEHFSEQYKRLQTIPGVKERTTTAIIAETGADMSIFAKATNLVGWCGLKPRNDESNRRIKSNRITHGNRYLRLILIEIAWVASRTRNCFFSNFSYVQVTVKKKRKMKIQVAIARKILVAVWHMLSNEEDFIDIYLKRLEEQRLVQLQIEQLESSMAL

SEQ ID NO: 410448 - protein, 412 aa, unidentified
MAMEALVERCAGLDVHQASVVCCVLVGPPGCRPRKLLRTFGTTTHELGKLRAWLAEHGVTHVGMESTGIYWKPVYAALEGSFDLTVGNAHHIKNVPGRKTDVKDAEWIARLVRHGLIGKSFVPPPPIRDLRELVRFRRALVEARTAERNRLLKLLEGAGVKLAGVASDVFGVSGTAMLKALAEGAAEPAAMADLARGRMRRKLEALAAALDGQVREHHRFLIAVQLRRLEAIARDLGELDARIEAHLEPFRAQHRLLMQIPGVDRVVAAGIIAEVGVDMGVFATAQRLAAWAGVAPGNHESAGRRKGAATRKGNVFLKATLFAAASAAVKTKGSYYRDKYHRLRARRGPVRALVAVAHKLLIAAFHMLRTGSPFRELGEDFLDRVSRKRSTTKLVRRLAALGYDVLLVPKAA

SEQ ID NO: 410449 - protein, 341 aa, unidentified
MAQVTTIGLDIAKYVFQVHGADVTGQVVFRKRITRGKLIGFLAAQSPCIVAMEACAGAHYWAREISKLGHSARLMAPAYVKPFIKRQKNDAADAEAVCEAVQRPSMRFVPVKTEEQQANTIVFRARDLLVRQRTQCVNALRGHLLEYGYAFSQGISQIASLVALIEDPGSSLPEGVCSILKLLVDTFNGLETQIAVLDAEINRRSKTDPAARRLMTIPGVGPIVSTAITALAPAAHSFAAGRDFAAWLGLTPLQRSTGGKQKLGAVTKRGERTIRRLLIIGASAVVRQASRRGAPKGTWLAQMLARKPKMLVTVALANKMARIVWALLVKGGSYRAQVAAA

SEQ ID NO: 410450 - protein, 451 aa, unidentified
MVCERLAVGDGCRRIAPRSLMRRPRPLIEIGEVENNSLRREPSAGYSESNLGRRRTEVAMNKAWVGVDAGKEFHWAHVLDTSERELLSRRVENDEAELLKLIDDVLSLAEELMWALDQPGGSAALLVALLWERNQRAFYVPGLTVDRARDAYRGESKTDARDAHVIADQARMREDLGELEPGEQELAELQLLLARRRDLVSDQGRTITRLREALLSLFPALERALDLNNSKGPLTLLTHYQRPTHLKRAGHKLIASYLRNRGVKGSNKLGKKALSAARSQSVSLPAQEVASRIVAELAKDILGLKQRIESIDEELQKRFFARPEARILISLPGMGPILGAEFLVCVGDVSAFESADRLAAYAGLVPAARDSGGRVGNNKRMRGGNKILKRLFYQSAFSRLRSTPESRAFYDRKRAEGKRHTQALIALARRRVNVLWAMLRDGTTFESRSAA

SEQ ID NO: 410451 - protein, 403 aa, unidentified
MQHIIIGVDPHKLSATIEVVDDRERFLGSGRFTTDQAGYTAMRTYAKAWPQRTWAVEGANGAGRPLAQRLLEAGESVLDVPAKLAARVRLFDTGHNRKTDALDAHSIAIVAVRTRGLRVLKVDGELEALRMLTDRREALTRRRVQTVNRLQALLAELLPGQAKKDITTGQAKAMLASVRPRDVAGKTRRRVAAEELSELIAVEAKIKKATAELKALVLARGSRLMDIHGVGPVVAARVLADVGDVARLADRNRFASWTGTAPLDASSGEQNRHRLSRAGNRRMNHMIHIAAVTQLRLDTEGRAYYRRKRSEGKKPMEAMRCLKRRISDAIYRQLLADQHGATDAKAGAGPGGHCGASQESSAAGSHPHTGTSDQPLPGPAEPTLRPAPAPRKTSRCRNLQTTG

SEQ ID NO: 410452 - protein, 315 aa, unidentified
MSRDDGIWVGIDVSKDSLDVGALPSGQVWSVPNDEAGVYQLVVEFGPMQPTLVVMEATGGYEMLAALGLSAAGIPVAVINPRQARDFAKAMGRLAKTDKVDAAILALFAERIRPEARPLADAEQAMLKALVNRRTQVVQMLVAEENRWASTIPAVRDHVKEHIDWLRQERDQLDAELGRYLEKTKVWTDNDRLLQSVPGVGIVTSLTLLAELPELGTLNRKQIASLVGVAPLNRDSGKMHARRSTWGGRSSVRATLYMATLVATKHNHEIKIFYERLCAAGKAKKVAIVACMRKLLVILNAMIRNQTPWHAARTA

SEQ ID NO: 410453 - protein, 404 aa, unidentified
MYNAVGIDVSKGKSTVSVLQPGGVILRKPFDVRHSHEQLNELAEYVLSLDGDTRVVMECTGRYHQPVLNALSGKDIFVSAVNPHLIKNFGINTLRKVKSDPADSKKIARYALDNWADLRQYSAMDTIRTQLKTLNSQMDFFMVQRTSAMNNLISLLDLTYPGINDLFTSPVRNDGHLKWVDFISVFWHVECVSKLNLKAFAQRYQAFCKKYGYRDRVGKADQIYAYSLDIAPSVPKDNTYKNVILIAAQQFNQLSASVEHIRNEMDKLASTLPEYETVMSMAGVGKTLGPQIIAEIGDISRFTHREALTAFAGVDPGVSSSGKRNTRSNRSSKVGSSRLRKALFLVMSALLQTKPENDPVYKFIDKKRSEGKPYLVYMTAGANKFLRIYYGRVKACIAAQSESE

SEQ ID NO: 410454 - protein, 407 aa, unidentified
MTVQPPAVFIGLDVGKAEHHAVALTAAGKKVYDKALPNDETRLRGILAELTTTYGPVLLVVDQPATIGALPVAVAQACEGVEVAYLPGLAMRRIADLHPGSAKTDAKDAAIIAEAARTMPHTLRSIRVDEEQIAELAMLAGFDDDLAAQITATSNRLRGLLTQIHPALERVLGPRITHPAVADLLGRYPTPAQLKTAGAGNVRARLRKHAPRLAGSLTEQIFQALDEQSVVVAGTQAAATVVPILAEQLAGLTRQRAGLASQVEAVVEAHPLHPVLISMPGVGIRTAARILTEVVGKDFVDAGHLASYAGIAPVTRRSGTSIRGEHVARGGNKRLKRALFLSAFASLSHPPSRAYYDRKRAQGKRHNQALIALARRRTDVLYAMLRDGTLYQDPTAPPAPSSVALAA

SEQ ID NO: 410455 - protein, 422 aa, unidentified
MSYCPVAGIDVSKRFSDMCILSPDNKIFAHEKIYHDETSINRANALLQKAERLFFSKPVIVMESTSHYHLILFQFFSEHGYDVIVVNPLQSNSMKDFSIRKRKTDRVDAFKLAMMYRTKTLRPSQIPQTATRALRQLCRHRAELLNDVSSYKNRLTALLDQTFPGYDKVFSDVGGVTSCAMLVRFPTPTILLVEEESELVEVIAAASKSGYSFAKKKAGLLISAAQKAQTLGIHSCADETLIVCTIQMLRTLSESVLQIETAIDNLLAQIKEMRNNVSLLQSIPGVGSHSAALLLGEIGDISLFKKPKQLAAYFGLDPTERQSGSFRGTKNKLSKRGSPYARAALHMGVVNSICKRGKDSAANPVLLSYYEKKCKNKPAKVAQAASMHKLVFIVFAVLRDQKPFELKTPEQHAVEQGFVKAA

SEQ ID NO: 410456 - protein, 353 aa, unidentified
MTNSKYIGMDVHKESISIAVRNAAGKIVMECVLETKANAILDFIHGLRGELQVTFEEGTWATWLYDLLKPHVTRLVVCDPRKNSRQGNKNDRIDARELSDRLYMNKLSSVYHGGAGVRTLKELARSYLTISKDLARVMSRVKAIYRSWGIPCTGKQVYSPRHRAEWLAKITEVGVLRRAEFYYQQLDALRSLRHEVRRELLAESKKHPATKLLCQIPAIGPIRAALLIALIQTPHRFRTKRPLWKYSGFGIEMHSSADYRKVQGQLERTRKQVSVRGLNRDCNHDLKNLFKSAATIASVKPGPFQEFYAALVAKGMRPEMARLTLARKIATIVLIVWKKGVSFDAQYLKPQTA

SEQ ID NO: 410457 - protein, 337 aa, unidentified
MNEITTVGIDLAKHVFSLHGVDSAGRMVLRKTVRRGDLEATVAQLVPCLIGMEACSGAHEWARRFARHGHRIKLMAPKFVAPYRTGGKNDDNDAAAICEAASRAQVRAIPVKSAEQQAVLCLHRARQGFVEERTATINRIRGLLSEFGIVLAQRSQTVRTQLEAAIEELPVLARRVLRDLRAHLRLLDERIAGYERQLEQLAAKDERCLRLMQLRGVGPITALAIVATVGNASDFKNGRQFAAWLGLVPRQHSSGGKTRLGRITRRGDAYLRTLLVMGARSVLNTAARHHDRMARFATAIQSRRGYFKALVAVAAKHARIVWAMLAKNQPLNAAAMR

SEQ ID NO: 410458 - protein, 388 aa, unidentified
MRVLYERCCGLDVHKQSITACALTPEGKEIRTFGTLTDDLEELVDWLKEKKVTHVAMESTGVYWEPVYNLLEAEPVEVLVVNAQHIKAVPGRKTDVKDAEWIADLLRHGLLKGSYIPHRAQRELRELVRYRRSLIEERARELNRIQKVLEGANIKLSSVVSDINGMSARLIIRALIEGKDDPAALAQLAKGRLKQKTEELRRALKGVIGPHQRMMLAEQWRHAEYLDEAIARLDREIEERTSPFHEALELIDTIPGVGRQSAEQIAAEIGTDMSRFPTAAHLASWAGMAPGNHESAGKRLSGRTRKGNKKLRSCLVECARAAARTKNTYLSAKYHRIAKRRGANRASVAVGRTILEMIYYILLERNRIKSWEPTTGIGSEKRASCVKR

SEQ ID NO: 410459 - protein, 357 aa, unidentified
MGKSIQKLSSVTRVGLDLAKKVFQVHAVDANGEIVVARKLARGRLVGFFSELPRCVVAMEACSSAHHWGRQLLALGFEVRLIPPAHVKPYVRRNKNDTVDAAAICEAAGRPGQRFVPVRSIENQAELMRHRARELLAGQRTAALNALRGHLAEIGVIAPQGVQHAYDLKRLAVDGFDEYGEVVVPDCVRVALRPLVSQIDALDAAIGAIDNEIAMSVKADETAKRLMTVPGVGPVTASAIVATIQDIGDFASGREFAAFLGLTPRQSSTGGKPRLGRVTKMGDRYLRKLLVVGACSTLSHRKGHNDALRRWASGMLERKTVRYKFKLTAVALANKVARIVFVLMTRGGQYDDRPVAA

SEQ ID NO: 410460 - protein, 312 aa, unidentified
MEFTSEIERGCGIDVHKETVVATINGKGLKKQTREFSTYTSSLTSLRKWLMDNRVTHAAIESTGIYWKPVFNIIGEEVKLILVNARHIKNVPGRKTDIKDSEWICKLLLSGLLKASFIPPKEIRDLRDLTRYQLKLTQQAAAEKNRIIRELEDANIKLSSVLQSVSGATGTKIINSIIEGETNPNNLIRFYHGKIKVSREEFKEALHGTLTDHHRFMLGQMQQHILSLDKQIEEIDKEITKRVSPYETDIALLMEIPGIDRKGAVGIISEIGTDMSVFANEHHLASWSGLSPGNNESAGKKKVEEPPMETNT

SEQ ID NO: 410461 - protein, 357 aa, unidentified
MFTERTSIGLDVHARSVAAAAIDSLTGEVVQGRLTPSYEHIRSWISSLPGPVAVAYEAGPTGFGLYRDLAAAGVRCEVVAPSKLQKPSGDRVKTDARDALHLARLLRLDEVISVAIPSVDQEAAREDCRGDLMRARHRLSKLLLRHGIVYYGGRAWTGAHDRWLRTEAAPQLILPATRMAFDADYDHVLTMQARRRRLDAAIEEMAAASEFTPIVRRMCCLRGVSTLTGFALAVEIGDWNRFTGNTIGSFVGLVPSEYSSGSSRVQGSITKTGNAHARRLLVEAAWHHRPRYHIGAVMRSRWEQAPAAARARGDEGNRRLHQRWVGFLERSKRPVIANVAIARELAGWCWSLAVMDC

SEQ ID NO: 410462 - protein, 415 aa, unidentified
MKVHRNCCGLDVHKQTIAACLIREDGMGNTCKEKRLFGTMTRDLRELAQWLRGAEVSAVAMEATGVYWVPVWNVLEREGLHLLLINPEHYKAVRGKKTDLKDGERIAELLQDGRLEGSFVPSTPLRILRDLTRYRVKLVEHQSAVACRIQKLLEQCNIKLASVASNVLGVSGTAMLQALARGETNPERLAELAKKQLRKKIPALRLALDGHLLPHHRFLLRDMLDELAHIEGQLARLEAEIERNMPPFQKTLQAWMSIPGIKQRVAWTLVAEIGPDMQVFPSPAHIASWVGVCPGNNESAGKRKSGKTRKGNCWARRALCEAAWVAAKAKKTYLAAQFRRLAATRGSKRAIIAVAHTILTIGYHILQRGTLYQELGANYFDQRHVLRTTKRLVKRLQALGHRVILESPLPNTRIA

SEQ ID NO: 410463 - protein, 355 aa, unidentified
MVGMVVVGVDAHKRTHTLVAVDQVGRKLAERTVATTSAGHLQAVTWAAQWPQPQVTFALEDCRHLTRRLEADLLRVGHRVLRVPTRLMATARRSGRQPGKSDPIDALAVAQAALREPDLPVAHLDGPTRQVKLLADYRADLVVERTTLCNRLRWHLHELDPELHVPSRGLRRYKVIDELAVRLAGVDGTVAQIARELLGRCRELTVRINQLEGDLRDLVRVLAPGLLAIPGCGVLAAATILGETAGATRFRSRHAFARFNGTAPIPVWSGNAVRVRLNRGGNRTVNWALHMIAVTQARGVGPGQAYVERLLGAGKTRTEALRLLRRRLSDVVFRVLLADEHRQAATQPADTPIAA

SEQ ID NO: 410464 - protein, 321 aa, unidentified
MAKRITICAGIDTGKHKLDVAIDGSSEQLRVDNTAEGHRALAEWLKGHKVKRIGIEASGGYEQAVVAELRRRRFVVVLFQPKQVRAYGTFHQLLAKNDKIDAALIAMCTAAVRTIHPAPDPRLQPFAEHLTMIDQITEDIARMKNRFESCRDTRIQGVWKAQIAFLAKSKRAEFKALLAAIRKHPDLAARLDLINSVAGCGLPTAVAVLIRMPEIGNVTREQAAALGGLAPYDDDSGNRTGARHIEGGRERLRRALYTAALAASFRWNPQLKALYSRLIAAGKCHKCALIASARKLLVTINAVVARGTPWVAEASQRLSAV

SEQ ID NO: 410465 - protein, 369 aa, unidentified
MNNSNTVVGLDVHKKTIVAAVLPSQSETVTETVTIENCPEAVEKLINRLVAKGPAEFVYEAGPCGYETHRQITALGHKCVVIAPGLTPVRPGDRVKTDRRDAEKLARYHRAGELTEIHVPTREKEADRDLPRAREDVLEDRLRARHRLSKFLLRQGRVHRETKSWGVTHRVWLKAQRFEWTTLQQSFEANLRAVEEAEARLAILDQQMQDLAQKEPYRTPVKYLRCLKGIDTVSALTLLVEVQDFTRFKKARGFMSFTGLVGSENSSSDRIRRGGITKVGNAHIRRILVESAWCNRHRNVVRQELTNRRSGCPQQIVSIARKAQTRLHRKFWRMTSRSKLQQVAVVAVARELAGFVWSIAQHFPKEVAA

SEQ ID NO: 410466 - protein, 454 aa, unidentified
MPSPNESQRVQNSQQSKPQPKQHTTFMNTTTTSTELAALIGLDWASQRHALCLYDCATGKRENSILEHTPEAIAQWAQGLQARFAGRKIALCLEQSKGALMNALLEYPFFVLYPINPATAARYRQAFKTSRAKDDPGDAQVCLELLLHHREKLTPWLAQDENTRALAHLLQSRRSAIDLRTLLTNMLRDTLKNYYPQALELAGQDLFAPLGCQFLLRWPSLQELQKARKESVRKFYYAHNCRRMDVMEKRLNAIAQMIPLCRDAAVLAPAVVQVKMLARQLLQLSTALKEYDCKIQQLFAKHSDASIWESFPGAGPTLAPRLCCAFGTQRSRYESATAIQQYSGVAPVQEQSGKNQHWIHRRWARPHFIHQSFFEYAGQSVLHCDWAKLFIKEQRARGKTYSVAVRALAFKWQRIMFVCWRNCLPYDETIYLQSLKRRGSHLAHKLNQHLPKAA

SEQ ID NO: 410467 - protein, 353 aa, unidentified
MKKISYLGMDVHAKNCVLGEMDYNGKFIGNQTFSTSEQNIIAAIKTIKAKEKYLTLEESNLAYWAARVARPYVTEVIPCDPKENALIFKSSIKKDKVDTKKLCRLLRLGELKKVYHPESDDRAIFKASALHYIDLRGQQTVLKQKIKAMYRHWGVIDVSGESVYSVTGRHDYLKQVKHLHIRNQINRLYTLMDETESMEKKALKTMTVLGRKYPEIKQFKKIPGIGDISAHIFDAFIQTPDRFANRSKLWRYCRMGVTDRSSDNKPLGYKKLDRSGISEIKGLLYQAWMAALKGNNEVRQFYLNSLNRTRNRVHARLNTQRKIIGVMYCLWKKGGSYNPNLFLGSDKIVALYN

SEQ ID NO: 410468 - protein, 349 aa, unidentified
MHYVRVNKQYYCGVDLHADVIYVCVMTKAGRAVFHHELPTDFPRLLQHLKPYLSSIAVCAESTFNWYWLADGCAKHNIPFFLGHALYMKLIHGGKTKNDRIDAKVMADLLRTGFFPPAYPYPEKMRATRDLLRRRSHFSQQHAEALRHIKTLLYQQGYMDLPSVHNFDAEKISKTFSVYKLPDDADYSLQADLDMIRYLDTVTAKLEWRIEKNARGHDNHALALLKSVKGLGTILSLTLLYEIHTIKRFKSPQCFSSYARVVKVERSSHGKKLGSKNSKIGNPYLRWAFGQLAVSAQRFYPGVKEYTQKLIRKYGKAKAYTLLAHKFAVAIYYMLKNKTAFDVNRFVAA

SEQ ID NO: 410469 - protein, 421 aa, unidentified
MKFKAQDKQNQLIENISSSHLVVGVDIAQETHVARAVSFRGIALGSPLEFGNHDEGFQLFSRWIRDLLKSYKLSKVIVGMEPTGHYWLSLARWFSEQEIEAVLVNPHLVKKNKENRDNTPSKSDRKDALVIADMVKNGYYSPVRFNPEAYKELRILMANRDTVTKRLNSAVNQIHRWVDIVFPELRQVFKILTCTSSIATLRLFPLPTEISRLTTEQVIAGWKQYVKRHAGLQRAAQLIALAKRSVGATQALHAYKLHLSQLLEEYDLAQRQLEQIENELQLVLKRIPYAKKMLAIQGVNAISLAGILGEAGDLSGYAHGNALLRHAGLNLAEASSGKWRGKMVLSKRGRPRLRRFLYLMTMCMVMTNPDVRALHHYNVDVKKLKKMKSIMKLCGKVARMLVSLAKSNEAYSSAKVFPQAA

SEQ ID NO: 410470 - protein, 343 aa, unidentified
MGEVSTIGLDIAKSVFQIHGVDAGGAVVIRKRITRAKLLEFFASLPACLVGIEACPSAHYCSRRLQALGHTVRLLPPSYVKAYLKRSKNDANDAAAICEAVTRPSMRFVATKSAQQQSGLMLHRSRQLLVCQRTMLSNAIRGHMAELGIISAKGRNGTAKLLEMIADEQDDRIPAAARFSLAILARQYAAIRAEIVAIEKRIHAWHRSSEESRRLEEIPGVGPIVATALVAEVGDWNTFSSGRSLAAWIGLVPRQHSTGGKERLGSISKQGNRHLRWLLVVGAMAVIRYARQHGTKRLWLARLMERRPIKVAAVALANKIARMAWAMMVRRERFKEPKLLPAA

SEQ ID NO: 410471 - protein, 323 aa, unidentified
MSKDMNYFGIDISKDVFDVTDSKSSHHQFKNTHKGFKAFLKLLDTTSHCVMEATGYYHYQLAYFLRDNDIDVSVENPLSVKRFIQMKLSKIKTDKSDSKLICEYAQQVELKLWEGQSKHQIECLQITRLLSVYTKQSTMVKNKVHGEEVLGNPSLFVVRSLKRSLKSTQKEMAILEERLLRLVRQTHQDLLTRLETIPGIGRKTAIMLIVLTDGFNRFASASELCSYSGLTPLIRQSGSSVNARARISKMGNKKLRNLLFMCSFNACKYNKACRELYERIVAKGKSKKLALIAVCNKLLKQAFAIAKSGLIYDETYRSTLVKN

SEQ ID NO: 410472 - protein, 426 aa, unidentified
MWDAQRRVLKIKSLKHGIIQDKRGNVMRAVFGIDVSKTSSEVAILVNGEKVHGYTILNDAFGFNRLLGDLKTVHNPEIIFEATGVYSRRLQAFLEEYGYAYTRLNPLEAKKQLDSLRVRKTDKIDAEKLAKSQLVHNRKPTYVQEEVYQHLRDLSRFYQNLTEDLVRAKNRLHKVLQITFPELENLLSTPTGEQYWNLVMAFPCKEFVLRLSQSDLCEIIRQSTSKRISEKRIAYLTDKLIKLAKQSFCAVKKNSPMLEEVRYYAQELLRLSERRQVVLNDMVTLAQPLPEYDILRSIPGIAETTATSIIGELGDIRRFQSSNQINAFIGIDLRHYESGKFLAKEHITKRGNPYARKILFKCIHNIASASHTNPCHIADFYEKRKRQSTIASTKPHAIASIHRLIRTMYYLITHNKLYDYSLTQNR

SEQ ID NO: 410473 - protein, 345 aa, unidentified
MKSTLIAVDTAKVVFEIGESDHLSRISRRLRVNRGTFSEYIAKHDKAEFVLEACGGAHYWARQMIAAGHTVRLLPGQYVRAYRQRNKTDRADCRAMLEAARNPDILPVPVKSETHQAIQGLHRCRSAWMETRTARINTLRGLLREFGILLPVGAKKALALLPEALDDTALPSALRPALRDLLDELRSLQIRIDDVEAHLEAVCQQTPAAHHLREISGIGLLTATALYASANDARHFRNGRHLASWLGLTPREHSSGNTRRLGSISKKGDRYVRMLLTHGARSVLTTAERAQTAGKSLNNLQRWALALKQRIGFNKATIAVANKLARIAWATWRHGTVFNPNQAAA

SEQ ID NO: 410474 - protein, 415 aa, unidentified
MINDVQWFVGIDWATQSHCVCLLDAEGRRVGQREFAHGGAGLAELCDWLLEKTQAAPGQIAVAIETPHGPVVEMLREHGFVVFAINPKQLDRFRDRFTVAGAKDDRRDAYVLGGSLRTDRAAFRQLAADNPVMIELREWSRMADELKQERTRLANRLRQQLWRYYPQAAKLTDDVADGWFLALWQKVPTPDSAAKASEKTIARVLTAHRIRRLDAATVLKTLRETPLFVAPGTTQAACAHIRSLAARLHLVNQQIKEAQQNLDRLCAQIEGEENASGQSFEQCDVTILRSWPGIGRINLATLLAEATEPLRRRDYHALRALAGVAPVTRQSGKQRFVVRRLACNRRLQSAVHHWSRVAIQHDAAARQRYDALRRRGHGHARALRSVGDRLLCGLCAALKRQIPYDAGHNSAKMSA

SEQ ID NO: 410475 - protein, 438 aa, unidentified
MSMTFARLLDPCFEDDDDPFRHYDYRGEPLEDRLYLPCGIDPHKKVCHAAFVHPLPHRQDILSHRQVQNQHLPDALWLVEEGQRLAEPFQATPLYIFESSGPYWRPYRLFLHQLGLPTATVSGRQTRRAGGTGTRKKRNDLQAAFLVAKVFKQGESHASRIPPEPLATLREYTRLHLFFVEQSVAIQNRMFDLRYQIHPGFDDLFSKSIMPTTLALAKEELVHPVKLLQADPEMLTEVIHQASNGKLGAPRVEAILRSARHTFYLPYAPEAQSFNLKLMAQAHEYIIHHLLPPLQARIEECLQEIPFPQHLTEIPYFGPIVTATFLAELGSPFWFRTVDSVVAWFGLDPSVSESADHTTGISRLTKRGTKFGRRIMWLVARNWSRYVSQGNRMFRKERDENKLSYDGAICVIAAKLVRIAFAMARDGSHFDMDKAFPS

SEQ ID NO: 410476 - protein, 334 aa, unidentified
MENIALIGIDLGKNSFHIHCQDRRGKAVYRKKFTRPKLIEFLATCPATTIAMEACGGSHFMARKLTELGHSPKLISPQFVRPFVKTNKNDFVDAEAICEAASRPSMRFVQPRTESQQAMRALHRVRESLVHDKVKTTNQMHAFLLEFGISVPRGAAVISRLSTIIEDNDLPLYLSQLLLKQQQHYHYLVEEIKELEAQLQRILSNDAAGQRLLTIPCVGMITASTISTELGDGKQYASSRDFAAATGLVPRQYSTGGRTTLLGISKRGNKKIRTLLVQCARVFIQRLEYQSGKLADWVRELLCRKSNFVVTCALANKLARIAWALTTRQQVFTT

SEQ ID NO: 410477 - protein, 408 aa, unidentified
MKTLHQRCAGLDVHKQEVVACLRLVTQGRVHREVRRFPTTTRGLLELAAWLEAARCTIVAMEATGVYWKPVWHILDGRFELVLANAAHIKGVPGRKSDVNDATWIADLLAHGLIRASFVPPQPIQELRDLTRTRKQLSREIVRHTQRLQAVLEEANVKLASVITDILGASGRRILKAMITGETDPSHLAELGSRRLGCSRDTLVEALDGRVREHHRFLLDQHLKTIEQLEETMAAFDARIETALAPFRDTVERLTQVPGLSTRAAEVVIAEIGLDMSRFPTAEHLLSWAGLVPALDESAGKRRSTRVTKGAPWLKPVLVQCAWAAARKRGSYFEAQFLRLKGRRGPKKAAIAVAASILTTVYHMLRDGTCYQDLGPNYFARRDPARTARKLADRIRSLGYVVEIRSAA

SEQ ID NO: 410478 - protein, 461 aa, unidentified
MDMRAGELMCDGHPVGSCASSASTGADETSHALDQESSVNRLPYRQLVGIDLGQWLHHACVLDAHGEFVEERGFEHSLDGLAATVEWLVDLAGNDAERIAVAIEKPHGAVVETLLERGIAVFAINPKQVDRFRDRHSMSGAKDDRRDAFVLADALRTDGHRFQRLQIPPPEIVALRELLRARDQIVKNHVALSSQIRDLLTRCWPHLVALAPKDKALDSFFCELLQMFLDRHPSSDFSLENIHKLVHHHQIRRLRPKQILEVLRKNPLRVAPGTTEATSAHLKLLLHQLLLVRQHRRDSDRHLERWFQQLQPTSDQPYTDAAILASLPGVGAFVLASVLSYAHDPVRLRNLDALRSLGGIAPVTKKSGKRGQQRPQILMRRARSLPLGNALHHWARIAVLRDPLAKEHYNRLRVRGHGHARALRGVMDRILATAVAMLRDRTLYDPTRRVRRDDIRKKTFS

SEQ ID NO: 410479 - protein, 403 aa, unidentified
MCPASLLQREALRALMIYADRVRIKIAHSCCIDGVDGPAHRHRNVPGCGCYVLQLKERTIHMNITTIGIDLAKNFFQLHGVDETGAVILRRKLRRDRVLAYFEQSPPCLIGMEACGSAHHWARELSNLGHDAKLMPPAYVKPYIKRQKNDAADAEAICEAVARPTMRFVPVKSADGQSILLLHRTRHLLIRQRTGAVNALRAHMAEFGIIAPKGIRNIIRLIAVIDDACDARLPDLARSTLALVVEQITMLSQQITAVERKLRDWSKANEICRRLQTIPGIGFITATALAASVADAGAFRSARHFAAWLGLVPRQNSTGGKQRLGRISKMGDRYIRQLLVNGAMAIQAHRPKTPSPLRIWSDGLSARKSKKLVAVAVANKLARIAWAVMANNEDYRRPEPGAA

SEQ ID NO: 410480 - protein, 427 aa, unidentified
MEKSITWVGIDAHKKTLAVAAFQRHGQEPDEFTIDNDERAIRKLVRRLERDGDGREIRICYEAGTCGYTLQRRLEASGGVVCEVIAPSLVPRKPGERIKTDRRDARKLAELYRAGVLTTVAPPSPEQEAIRDLCRCREDVRADLGRCRHRLIKMLVRRGYVFNTASRLWGKVHRGWLKSLVFDNDVDRVVVTEYMLAVEQAERRLHAMDSEMEKAAQLPLYREHVAWLRCFRGIDTTIAMIFVAELHGLERFESPRALAAYLGLVPSLYASGESAHRGKITKAGNGHIRRALVQACWGYRHRAGVGPALRKRQEGQPQRVLTIADEAQRRLTARFQRLVARGKHTNKVVIAIARELVGFLWAALRDDREPARHGARTSARLEGAKASASPRSGPSENATKESRPEVGQRRKARKEKRATQICDTAHS

SEQ ID NO: 410481 - protein, 307 aa, unidentified
MCCVLMVVIAPKNSLTPTKGHDELVSWLKGHKIDHAHICIEATGTYMEPVAECLYDAGYIVSVINPALGKAFAQSEGLRNKTDTVDARMLAEFCRQKRPAAWEAPHPLERALRALVVRHQALTDMHTQELNRTETAREVQRPSIDAHLLWLEAELKRLEKQIKDLTDDDPDMKHRRKLLESIPGIGEKTSAVLLAYIGLKDRFAHARQFAAFAGLTPRRYESGSSVRGASRMSKAGHVSLRRALYMPAMVATSKTEWGRAFRDRLAANGKKGKVILGAMMRKLAQVAYGVLKSGVPFDASRHNPVAA

SEQ ID NO: 410482 - protein, 371 aa, unidentified
MEHSSKTLYVGLDVHKDSIAIAYAPEDRGAEVVFLGTIGTRQCDIDTLIRKLQSKGAALVFAYEAGPCGYWLYRYLTRKGFGCHVVAPSLIPRKAGDRVKTDRRDAVTLARLMRSGDLTWIYVPRVEDEAIRDLSRGREDAMRDLKATKYRLKAFLLRQDIRYEGRANWTAAHLRWLSEVVCPTPAQQIVFQEYVRAVTEQTERLRRLENELHEQVKGWRLYPVVEAIQALRGVELTGAVILIAELGDLTRFDTPRQLMSYLGLTPSEYSSGERRRQGGITKAGNTHARRALVEGAWAYRYPAKVSRHLQLRLEKLPAEVQSIGWKAQVRLCKRYRQLSARGKHANQVVVAIAREMAAFAWAIARTVPLAN

SEQ ID NO: 410483 - protein, 339 aa, unidentified
MKLIRVGVDLAKNVFQLHGVDRGERAVWRRRLRREDWIKVLTERVEVGCEIGMEACSGAHHWARELQKLGYSVKLIPPQFVKPYVKSNKNDANDAEAICEAMSRPGMRFVVVKTLEQQDVQAMHRVRSGLVEQRTAKASQIRGLAAEYGLVVSRELVQLRIALPRWLEDQANGLSASFRRLLEGLREDLARLDERVKELDREIEHLAQSEPTAKRLMQLRGVGPITATALVATVGNARQFRNGRQMSAALGLTPRQHSSGGRERLLGISKRGDAYLRTLLIHGARAVIRTAHSKDDRLSKWATRLAARSHINVAAAALANKTTRMAWAMLSRGTNYQPA

SEQ ID NO: 410484 - protein, 404 aa, unidentified
MRVFVGHDWAEAHHDVLVEDGDGRRLGGGRLPDGLEGISRFHELVAPHIGDPSEVVVATETDRGLFVGALVAAGYTVLAVNPMSTSRYRERHTTSGAKSDPGDARVLAELARTDSHNLRPVAGDTEMAEAVKVLARAHQSLIWTRQRQLNQLRSTLREFYPAALEAFAELGHSDALAVLAVAPTPTLGRQASRSKIASALRRGGRQRRIDERAEQIQTALRTDQLTAPALVSEAMGSTVTALVSIAGELTAQIARIEAEMAESFDQHPDAEIIRSLPGLGMILGARVLAEFGDDPNRYADAKCRKNYAGTSPITRASGKSNAVLARYARNRHLSDACYLWAFATLTCSPGARAFYDQHRDAGDTHSRALRALANRLVGILHGCLRHRTLYDEHTAWGHRSQLAA

SEQ ID NO: 410485 - protein, 318 aa, unidentified
MTNITYQFNIGVDIAKQKFDVSFSDQKVALFENNLAGFKRLLKELQDKSQTRVVMEATGGYEKPLAHFLQSQGVAVSIVNAKRVRDYAKALGVLAKNDIIDAKVIRMFADAVNPKLLPTASDTQQALDAQVHRREQLVKQRAMEKQHLETEGNKEAVRSIKRTIAFLDKEIERIEKALKALIKDDSTLTEKVDRLSGVKGIGDITALTLIADLPELGQLSNKEISALVGVAPFCHDSGAQKGKRTTWGGRTQVRTILYMAALSAVQHNPPLKAFYNRLVTKGKTKKVALVACMRKLLIVANSMLRNNTEWNPNHGKLA

SEQ ID NO: 410486 - protein, 453 aa, unidentified
MKIPQSTIRLLTGRLVKILLNREVSTMKSNTQNKKIEAITEKTLVIGIDVGSETHYARAFDYRGIEFSKKPFKFSNNEAGFEMFKAWILDIKEKHEKDKVVPGMEPTGHYWFNLGKFLQDNEMKPVLVNPHHVKKSKELDDNNPTKNDRKDPKVIAGLVKEGRYMIPYLPDGIYADLRTASNMRFQIQSELTRVQNRISRWFNIYFPEYKTVYGKPDAISGIMILKKAPLPEDILTLGVEGVNQIWRDAKIRAVGKKRAQTLVEAAGHSVGTKEGTTAARIEIRMLLEDYESRNNRLQEVMLLIEELVKQIPMAEKLMEIKGVGIKTVSGFLAEVGDITRFSSPKELQKLAGLALIENSSGKHKGQTTISRRGRKRLRYLLFEVAMSLVGKNSEFGALRHYYTTRKVNPLKKMQSLMAVAAKLIRVFYAMMTKGVEYDPSKMLGDIKRPAAYM

SEQ ID NO: 410487 - protein, 419 aa, unidentified
MIHPDAAGIDVGAKEHVVAVPCDRDERPVRTFQAFTPELHELAAWLKRCGIRSVALESTGIYWISLYEVLEQHGFEIRVVNARHVKNVPGRTKTDVLDCQWIQKLHSFGLLNGSFRPDQQIRKLRTYMRLRDNLVVNSTQAVHHMQKALFEMNVQLSNVISDIVGETGLRIIEAIIAGERDPEQLAALCSTRIKASRQTVAKSLHGNWDEALLHCLKTALETYHFNQEQIQHCDGYIHRHLGQFESRAQLPSSPKDLQGQLHRVCGVDLTKIPAIKEQSAQIIISEVGLDMTKWNTEKQFSSFLGLCPNNSISGGKVLRRATRKVYNRAADTLRLCAQSLTHSKSALGAKYRRLRARLGAPKAIVAMAHHLARLVYRMLRYGDKYVEKGIEHYEQKFRLQRIKWLKKEADSLNLQLVAV

SEQ ID NO: 410488 - protein, 408 aa, unidentified
MQVYIGIDWSEKKHNVCFLNAAGAVIQELVMAHRPEGFLQLVTICQQLQVAVGEAVIGLETAHNLLIDFLIDRQLGPLYVLPPNLVKSNQGRFAQSGAKDDRRDARLIAEILRTDRGRLHAWQPDSLLTRQIRAQVNLLAFLEHSIRQYSNYLRALLLRYYPAGLTVFSSLDGPVSLAFLQRYASPMAASALSYAAFTQFLKEQHHTRKDTWPQAYERLSAPQPAPSPDTLTLYQEEMLMVVGLLSQLVAERRLTRLAMLHTFAHHPEASLYRSLPGTGDWLAPALLAKMGDDRARFPTPAVLQAVAGTCPVTKRSGRTKNVQFRRACDHRFRHIVQQWAKAALLKNPVAQVYYAQVRPHCPSDNAAYRRLANRLLAVLWRLWHDHLLYDEATHLRQRALRAKPAKHS

SEQ ID NO: 410489 - protein, 443 aa, unidentified
MTASSSPVAGIDVGDATHWVCVGEHPDDLREFPAHTAGLRELVHWLRQRGVSGVALEASGAYGRVLHLTLLEAGLNPRVTSPKFTRQIQGRPKTDRRDCQWIWRLHSLGLLPPIFEPDDRTQTLRDLVRQRGNLVRLSAQHIQRIQKALELMNLKLTRVVGDITGATGLKIIRAILAGERDPRVLAELRDRRCQHSESDIAVSLDGRYRPEHLMALRLHLQLWDQYRLAIAELDDEIDRHLRTMKKSTTLPPLPRRTRVRGRKPHDPGFDVRTALYLATGVDLTAIEGIDEIHALTLVSELGSDFSKWPTVKHFSSWLGLCPNFKQTGGQVKSSATRKGKNRAAHALRLAAWGLMRSTSGLGCYLRRQRGRLGAPKAITATAHKLARIVYHLVRYGGAYAKQTEAEYAEQMRERLERQLHRRAKELGYEVMKKAEAEPPVLSA

SEQ ID NO: 410490 - protein, 408 aa, unidentified
MTTAEYELYVGIDWATQEHRVVVLDAARRPLHDRVVRQDGAALEAFATWLVALGAGRGDAIAVALEVPRGALIDTLLARGCHVFAINPKQLDRFRDRFTVAGAKDDRRDAHVLAAALVTDRLAFRPLAPEDARIIELRELSRLDEDLGQEGRRLTNRLREQLSRFYIQILQLAPAADEPWIWALLQRAPTPAAARSVPRAVIQRLLTRHRIRRVSADEVRATLRAPALPVAAGTVPAAQIQVGMLVARLQLVHEQRATCGARLEALLEALAESQEHRDVPILRSLPGVGSRVSATMLAEASRLLAERDYHALRAHSGLAPVTKQSGKRAVVMMRYACNRRLRDAAHYWGQSAVRHDPHSAAHYQGLRARGHSHGRALRGVVDRLLRVLIAMLKTQTLYDATRRPALSA

SEQ ID NO: 410491 - protein, 345 aa, unidentified
MECYVGLDVSLKQTSICVVNEKGLVVREGVVDSVPEAIAGFVRSKAPGAVRVGLETGPTATWLWTELARLDLPVICIDARHAKAVLKMQVNKNDRNDAAGIARIMQTGWFKEVRVKDLDSHAVKALLASRALLVKIKRDLENQVRGLLKNLGLVVGHGTFNVFAARAKELIADRPELTSAVSPLLTARTAIEQQIGELDRQVLKLSRQDAQARRFMTVPGIGPITALCFKATIDDPARFRRSRSVGAYIGLTTRRHASGELDWSGRISKRGDAMLRMYLFEAAGVLLTRVPKWSALKAWGTRLTKRNGLRKAKVAVARKLAVILHRMWVDGTEFNWSNNNKEVAA

SEQ ID NO: 410492 - protein, 359 aa, unidentified
MTVIEGKERRIVGGVDTHKDLHVAAVVDERDRVIGTRSFATTRQGYRQMLAWMCSLGDLQRVGVESTGSYGAGLLRFMQQAGIAVLEVTTPDRQDRRRRGKNDDLDAQNAAHAAFAGKRTVTPRSRDGMIESLRVLMTCRKTAVTARRVALQLIHNTVVCAPDGLRDQLRNMTRMQLIRTLALWRPDLTAYRDVEMAYRITLKSLARRYLELHDEIADLDAMIAAIVDELAPNLVARNSIGHAGAAQLLLTAGDNPERLRSEASFASLCGVSPVPASSGKTVRHRLNRGGDRAANSALHIIAIGRLRTDQRTKDYVARRIAEGHSKLDAIRALKRYIAREVFTLITQRRKEINATQIAA

SEQ ID NO: 410493 - protein, 407 aa, unidentified
MDLLKTVFGIDVSSRKSNVCIMVNGQKVDDYAISNDMVGFNQLLDDLKQFTKPQIIFEATGVYSRRLQAFLDMHELRYVMMNPLEAKRKTKDDLHQNKTDKLDALYLAKLQSEHPQRLAYVQSKEYQELMANNRIYEQASHDLITNRNRLHKAIQLTFPEIEHLMVNPRGKNYWSIVLRFPHPDIVLETKEADIIDFLKGLSGIGKKRANDIMQSLIRLAKVACPAVKKDSAHIRGLEMAINNILSAEEACQTALKEMTKLAPKRDLEILTSIPGIGENTALRIISELGDIRRFNNPSQLNAFVGVDPQVYESGNLTAHLSISKRGTAIGRKVLYLAINQIQSAKKAGNPSHIADYYEKRKRSSETASHKKAAIASIHKLLRTIFALIKNDQLYSYDVAKHNQRLLS

SEQ ID NO: 410494 - protein, 387 aa, unidentified
MARKRTLSTLDTSIAYEAVGLDLAKTDVALAAFDSDHKEPYLIDRIPYDKLYELLADMAPTLVAMEPCSGAHQIAEQIQELGHEVMMISGRHVQAWVKDHCNGQKTDLNDAFAILNLAYDRWLTPIRGKTREECRLLALQASYRQLKGQRTKTMVHVKATLHAWGFPIRAGSFNQKALHELIDANREAFGDEVVETLHLMINRVHDLDHDIATVLKLLTEATQRDPRASLLRSIPGFGVLTTSRWCAVVGDIARFDTPKQTMAFIGLVPNNRITGHHTETSSGREARGQGKMSKRGDKMLRSLCILGAGALCLMVRNDRLPDCPFVASIKERLASPRPWFKVLVYVAAKLVRIATALLKYGETFSFEKAGISKAVLKQWELEQAKAA

SEQ ID NO: 410495 - protein, 408 aa, unidentified
MEIIHKRCAGLDVHKETVVGCVRVRERGDVRHEVRHFVTTTAGLLALGEWLRAAGCTHVAMEATGVYWKPVWHILEGEFELILANPLHIRTVPGRKTDVNDATWIADLLAHGLIRSSMVPPGPIQELRDLTRTRRQLIREVVQHKQRIQKVLEDANVKLASVVSDMFGQSGRQMLKALIAGQTDAQKLAALGSERRSASRATLAGALHGKVTAHHRFLLKQHLQMIERLEQTVSEFEAQIEAALQPFRVAVERLITIPGVSATAASVIIAEIGVDMSRFATVAHLRSWAGLCPQLKESAGKVMSRRLRYGAPWLKTVLVQCAWAAIRNKSNYLHAQFLRLRARRGPKKAILAVAASILTAAYYVLRCQVPYRDLGVLYFARLDQDRTAQRLARRIKELGYEVEIRKTA

SEQ ID NO: 410496 - protein, 340 aa, unidentified
MGHVATIGLDIAKSVFQVHGVDAEGGVVIRQKLTRARLLKFFEKLGPCLVGIEACGTAHHWARELVGLGHDVRLMPPSYVKPYVKRQKNDMADAEAICEAVTRPTMRFVPVKSPEQQSVMVLHRTRSILIRQRIQISNAIRSHMAEFGMAAAVGRQGLHSLIEVVHDPADERVPVEARGCLAMLAAQLQLVNEQVLETDRLIRTNARSTEVGRRLMEIPGVGPLLASALVGTIADPRAFKTGRNLAAWIGLVPKQNSSGGKERLGGITKQGDRYLRQMLVVGSLAVVRYAVKNGTRRPWLVQLLARRTPKVAAVALANKTARMVWAIMTSGERYREPLAA

SEQ ID NO: 410497 - protein, 350 aa, unidentified
MSNHMFAAADVHAATTTFAVLDSSGKFVMETVVETKAESLLSVVKSITGAVHLTFEEGTHAAWLYDLLKPHVAELLVCNPRKNRNDSGNKSDRIDARQLARWLRSGDLSSVYHGHDGTKVLKELVRGYENLVSDSVRTKNRLKAVYRSQGESTSGGDVYKLEQREEWLSKIQSSGLRSRAGWLYSQMESLGELRREAEKAVLREAKKHRPCSLLRTVPGIGPIRSATIVAHAATPFRFRTKRQFWSYCGLAVVTWGSSDWVIDGEKLIRKRQPVATRGLNRNYNRRLKDVFKGAVRDAGLFRPHFDSLVASGTRPEMARLTVARKIAATTLAIWKKGEKFIPSKAVIRSE

SEQ ID NO: 410498 - protein, 356 aa, unidentified
MPRQKSSKNPDSQNVYIGLDVHLRQWNVCIYQGGIARKPFQQSPSASVLLAHLKAHYPEMNYYSAYEAGVCGCSAHYELLAAGIENIIFNAADISQTHKERVRKTDAVDAAKIARSLAYGELRCIHIPPKWRLDDRNLLRLRSTLVSDMKRLKSRLRHYLHVNGITIPPEFQPRRWPLAFIKWLKKTAIDNNNTTGSTLAMMVDKIENAVTELKNIDKLLLAMMKEKRYKSDYQLLRSIPGVGAQTATTILLECGDLADFGSADAFCAFVGLIPDIYRSDEHDGKCGITRRHHRVLRYMFTECAWRSIRKDPYLSGLYAGYCRRMPTTKAIIKIANKLARITKFVLKNKKAYVQTE

SEQ ID NO: 410499 - protein, 364 aa, unidentified
MKNCITWVGMDDSANKINIAIFQGQEGSPREEMVVVNDSTGLGRLAKKLKAQPGEVRCVYEAGVNGYHLHRFLNKHGISCDIAAPSLTPRRAGKRVKTDRLDAKKLATLYRAGELTSIAIPEKEQESLRDLIRAREDALEDQQRARHRLARFLMRRGLRYGSGKNWSLGHLKWIKSLRFEDDRDQMVMDEYRLTLDERTERLKRFQQRIEELAAQEPYQKRVRNLMALKGIQALSAMTIIAEALDLRRFTDAPAFMAAIGVVPSENSSGDIESRGRITKTGNNHIRRVIIESSWHYRHSASIGKTLKKRREGLPANVIEIARKCDYRLNQKFRRLINRGKDTRKTAVAVSRELAGFIWAIGQVA

SEQ ID NO: 410500 - protein, 328 aa, unidentified
MTVSDPISLGIDISKFTFDVALLKGAKRTKRGKFENTATGFAELSQWLQAQGVELVHGCLEATNIYGHALASYLHQQGHAVSIVNPARIKGYAKSQLSRTKNDRADAALIARFCRDLKPSLWQPAPEEVVKLQALSRRLAALEQMMTQEKNRLQLCEDEGLEGDIKTHLGFLEGQVEALKKRLQEHVQAHDSLAEQQRLLVSITGIGSTTAMTVLSEIGALEHYGSARQLAAFAGLTPQEFQSGTSVNGKTRLCKIGNARLRKALYFPALVMIRHCREIQAFRQRLLDAGKEKMQVVGAVMHKLIRIIYGVLKSGQVFEAQKLVPQNT

SEQ ID NO: 410501 - protein, 345 aa, unidentified
MTEAYDGRQVVGMDLHRRRSVLVRMTEDGQKLETVRIENSPHALRAVMARAGKNPRVVIEATYGWYWAVDVLQEAGAEVHLAHPLGVKAFSYRRVKNDERDCADLADLLRLGRLPEAWIAPPPVRALREITRFRHKLVGQRTSCKDQVHAVLAKAGIPVTRTDIFGRGGGIWLDGLPLPQPYAGKVASLRALIAVLDGEIARLEEQAAAMLAGERGYAAIRRLPGIGPVLGAVICAEIGDITRFRNPGQLASWAGLTPRHYESDTRVIRGRVSKQGSRMLRWALVEAIQRAPAGTKPRQVKDAIIARRGADARGIAKTAAARIMLTQVFYGLRDGHIRRAISPAV

SEQ ID NO: 410502 - protein, 430 aa, unidentified
MKSNTQNAKIEAITEKTLVLGIDVGSEMHYARAFDYRGIEYSKKPFKFSNTEAGFVTFKEWILDLKERHEKDKVVPGMEPTGHYWFNLGKFLQDNEMKPVLVNPHHVKKSKELDDNNPTKNDRKDPKVIAGLVREGRYMIPYLPDGVYADLRTASNIRFQLQAELTRIQNRISRWFNIYFPEYKTVYGKPDAKSGMLILKAAPLPEDILTLGIDGVNQIWRDAKLRAVGKARAKTLIEAAEHSVGSKEGAVSARMEIRMLLEDYESRNTRLQEVMVLIEELIRKIPMAEKLLEIKGVGIRTVSGFLAEVGDISRFNNPKELQKLAGLALVENSLGKHKGETTISRRGRKRLRYLLFEVAMSLVAKNPEFRELHNYYTTRRLNPLKKMQSLMAIAAKLIRVFYAMLTKGVDYDPKKMVSDIKRPAVYLQAA

SEQ ID NO: 410503 - protein, 408 aa, unidentified
MGLDVIRERCAGIDVHKRQITVCVQVPQQQVIREFATDTASLLTMVDWLQELRIDDVAMEATGSYWKPVYNLLEASGLRPIVGNASHMKAVPGRKTDTKDAEWICDLHRHGLIKASFIPARAQRELRELVSYRSTLVAERASEANRIAKVLEGGNVKLGSVVTDILGKSSRRILAALAAGVEDPKVLADMAEGRLRTKHDDLLLALHGRMTAHQRKMLSWQLQHVEFLDQQIAALDAQVAECLGPYEQEIERLQTIPGVSQRVAEVILAAIGTDMERFPNADHLVSWAGMCPGSNESGGKRRPARTRHGNEPLKVALVQAGQAAGRSKGTYLGATYRLLAARRGGKRAAVAIGRHILQTAYYILRDGTTYRELGANYHDERRKEAVKRNAIRRLQRLGLSVTVTPLSA

SEQ ID NO: 410504 - protein, 421 aa, unidentified
MEEDPQVEEIIARVAALDIGKAELVCCVRVPHEGKPGRRLQEVETYSTMTRSLLAMSDHLRCLGVSRVVMEATSEYWKPVFYLLEAQGLEVWLVNARDVKHLPGRPKTDKLDAVWLCKVAERQMIRPSFVPPPEIRRLRDVTRYRIDLVGVRTAEKQRVEKLLEDAQIKLSVVASDIFGVSGREMMAALVGGQTNPKALAALARGRLRAKMSELEEAFTGHFTGHHALLLRKMLARIDALDADIAELEAAIEEMVTPFASAVARLDEIPGIGTTAACVIIAEVGTDMSRFPTPAHLASWARFAPGVKESAGKKKGKGTTGHGNRYLARALGEAAVAAGKTNTFLGERYRRIARRRGKKRAIVAVGRSILVIVWHLLSDPEARFHDLGADFYDNRISPDRKKRNHIRQLEALGYKVTLEPAA

SEQ ID NO: 410505 - protein, 367 aa, unidentified
MKKISTAAAKQTRNFQDQKLTIGLDLGDRTSWYCVLDGAGEVVLEQKLSTTPKAMKEVFGGMPRSRIALETGMHSPWVSRLLSELGHEVIVAHARNVRLIGESRKKDDRLDARTLARLVRIDPQLLAPVKHRSVQAQAHLMVIRARAGLVRARTSLLNTARGLTKSYGERLRGCNPRNMNPEKAQGLSPELRAALEPLLGEIESLSERIREYSARTEQIAKENYPEVARLKQVQGVGTLIALTYVLTLEDAHRFGKSRDVGCYVGLQPGRRNSGQSEPQLHISKEGDPYLRTLLVQGAHHILGPFGADSDLRRWGLKLAERGGKNGKKRAVIAVARKLAVLLHRLWVSGEAYEPLRNHQPVALPAVA

SEQ ID NO: 410506 - protein, 343 aa, unidentified
MQTITTVGLDIAKSVFQVHGVDVQGEVLIRRQLKRRYVLAFFQKLPPCLVGIEACASSHHWSRELKALGHTVRLMPPAYVKPYVKRQKNDAADAEAICEAVTRANMRFVETKTPEQQSGLVLHRTRHLFIRQQTAVTNAIRSHLGEFGIVAPVGRNGVEDLLDVVADPSDKRVPEIARACLAALGAQLHRLKEQILEFDCMIRAWHRSSEMSLRLDDCPGVGPVLATALAATVADPKAFRSARNFSAWIGLVPKQHSSGGKNRLGSISKQGDRYLRSLFVAGALAVIRYAKIHGTKHRPWLTALLARRPTKIAAIALANKIARMAWAMMARSERYKEPVALAA

SEQ ID NO: 410507 - protein, 296 aa, unidentified
MLARSRAGFFIQLEQLPGPEASRKRAESVDKPETMNTTNQTHTVQAPVYCGIDIAKNQFDADLGGKIRQFDNTPNGIKKFFAALPADSHLVMEATGHYHLQLVDLAHQAGIALSVINPAWIKNFSRSGGKRAKTDPIDAAIITAYARVFKPAPAVALSESLKVLREMYAVRESLIGMRVALQNQKDRLTDRKLRSMIQAQIKTLLKKEEQIDARMAETVNADQDLKAKSEVLRRNKGVGPQCATTLLCELPELGTIGRKNAAALAGVAPYNNDSGKFQGKRRIAGGRKKVRNALYM

SEQ ID NO: 410508 - protein, 413 aa, unidentified
MEVLHPRCAGLDVHKQTVVACARLAAAGGEVVREVRTFGTTTASLLELAEWLTENGCTHGAMEATGVYWRPVWHILAEGGFVLVLANAAHVRNVPGRKTDVSDAAWLAAELLAHGLVRASFVPGPATQALRALLRTRKQLVREKAAHTQRLRKTLEDANIKLDAVLANLSGTSGRAMLEALTAGETDPAKLAVLAHPRLAATPERLREALRGRVTPQHRFFLLRLHLDQIDSLDAAIGRIDREVDAGLAPFRAAAELLASIPGIGPLAAQVILAEIGPDMGRFPTAGHLLSWAGSCPRNDESAGKRRSDRLRKGAPWLKTTLVQCAWAASRKKASYLQAQFHRLRGRRGPKEAVCAVAASILTAAYHMLKDGTPYQDLGPDHFERRAKQAQARRLLRRLADLGYAVEITPAAA

SEQ ID NO: 410509 - protein, 443 aa, unidentified
MARKQSRQRFERVHPHCAGIDIGSREHWVAVDRDHKQSVRSFSSFTDDLIKLADWLESLKIEVVAMEATGVYWIPLFELLDARGFKVYLVNSRATRQISGRKSDVLDCQWICQLMSHGLLRGAFRPDDAICSMRALIRQRAGKVRNQAQTLNRMQKALSQMNIQLANVISDISGVTGMKILRAIIAGERDPAALAELTDRRIKASKETIARSLHGNWRLEHLHALEQEVQCYDFFEQQIGACDKAITDALSQLPEREEAPQPSRKILRSPHRCAADQAALHQSLWRVMGVDLTAIPTIGVDTALIIAGEIGPDLSRFPTMEHFCSWLGVAPPTRISGGRQLSGKSQKTRNNAAQALKQAASNARNDKSFIGASHRARLARMDTSCAIKATAHQLARLIYAMLTKGQPYVEQGIEAFEERSKEKQFRALLRKARKLGLDLVKAS

SEQ ID NO: 410510 - protein, 417 aa, unidentified
MKTWTELTHFAALDWADDHHDLVVVDAQGQVVLELTFAHNAEGWQQAQQALAAWPGLPVAIETSAGPAVDQLLQRGFVVYPVMPKAAVRYRERKRPTGSKDDRHDAWSLADALRTDGQGWSALSPLDPLTGELRALCRDEITLIEQRTALINQLQAALKEYYPAALEAFEDWTAPYTWAFVLAFPTPKALTAAGKRKWEKFLHSHKLWRPQTSSQRMEIFARAMAFSGAEAITAAKSLLAQSLARLLQTLEQQLANYRARIQALFDQHPDHDLFGSLPGAGAKLAPRLLAELAGADWSQLSQVQARAGTAPVTYQSGKIRRVKIRRACTHPLRATLHLWADLSRHYSTWAAAFYRAHRDKGQSHSCALRCLAHRWLEVIGAMSRTHTIYNAEQHLREIQKHGSYVLRLISSPDPKPL

SEQ ID NO: 410511 - protein, 425 aa, unidentified
MKYALVQVLPDVPAGGVCAGIDWATAGHVACVVDMAGRVTGRFTVIHDRAGIALLIGRLREAGAAEIAIERGDGVLVRSLLDAGLTVVVISPRQVRHLRLRYGSSGAKDDHFDAYVLADTLRTDRARLRPLEPDAPATIALRSAVRARRDLVAHRAAACNRLRAHLDLVFPGAIGLFCRLDSPISLAFLARFSTQQAADALGEQQLTAWLKTIPNRGKTAPASVLCGRLQAAARGATGPEGAAQAAVTAALTATVTTLAAQARALEDEISRQLAAHPDAPVFTSLPRTGTLRAARLLAEIGDCRARYPDPGSLAALAGITPVTRQSGKHQGHSFRWAVNRELRDAFCDFADGSRHASPWAATIYADARDRGKDHPHAIRITARAWSYIIWRCWQERTPYDPAKHTALQRILDQHNSTTAGPEHTR

SEQ ID NO: 410512 - protein, 347 aa, unidentified
MLIIGCDFHSRFQQIAVLDTETGAVEERRLEHERGEAQEFYAGLQEPALVGMESMGYTQWFEELLAECGHELVVGDAAKIRAMEPRKQKHDRRDAEHLLHLLVKGDFPRLWLPSAAERDARVWLEHRHQLVQMRTRTLNGLQAMALNHGLCLRQKLWTKRGQEELKKLPLREGRARRRADLLALRAQLEGWIAELDQRIAQEVAHRPEAQRLLTHPGVGPLTALGTVLILGPVERFPDAKHVTSYVGLIPQEESSGGRQRFGHLTKQGNGLLRFLLVEAAQIATRYDAGLGRVYRRLTFRKGRASAKVAVARKLAIRLYIMLRDQIDYEEFCRRGSHAGMLGEVALA

SEQ ID NO: 410513 - protein, 395 aa, unidentified
MFIVGIDIAKRSHEAIIITEDGQVVRKAFSFRNNCTGYNLLLEQVRRLTLVKSQIVFAMESTVHYWLALYARLLKDGYTVMVLNPIQSHSLRELYIRKAKTDARDSLIIADLVRFGRCKASNVPQDKILALRELCRSRAYLVDMAADLKRKLIALLDRIFPEYESLFDSVFSKASIAVLSKYSTPQKVKNANLRKLTDILMESSNGHFGEWKAHQLKEAACSSFGIDDSGGVYSTLLGMFLEQILSLTAQADSLEKQISVFFQEFNNPLTSIPGVGTVLAATILSEIGDITRFSSADKLLAYAGLDPSVKQSGEFKSNQNRMSKRGSPYLRRAIWLASTVAVHRDPMFQTYYEKKISEGLHYMNVIGHVSRKMTAVIFAVLRDGQPYQPILQSAG

SEQ ID NO: 410514 - protein, 370 aa, unidentified
MGKSALYVGLDVHKMSVDVAVAEPGPGAEVRFYGRIGGDLEALDKVTRKLQAKGAELRFAYEAGPCGYQVYRHLTAQGHSCLVAAPALIPRRPGDRLKNDRRDALALARLLRAGELTPVKVPDADDEAMRDLTRAREDAICVERRARQRTVAFLLRHGRVYPGKTTWGRGHWGWLLEQVMDHPAQQIVLQEYLDAVREASARVLRLTGQIRDLVPQWHQAPFVAAYQALRGVSFIVAATVVAEVGDLDRFNNPKELMAYLGLVPSEHSSGASVRRGRITKTGNSHARRVLVEAAWAYRLRARVSRTLLKRQEGLPERVRQLAWKAQLRLCTRYRRLLARGKARQTIVIALARELAAFLWAIGRAVAPATA

SEQ ID NO: 410515 - protein, 402 aa, unidentified
MNPVVGLDISKEESHGQAFLARGKPFRGTFHFEHTRDGLANLHPVLKDVETASRLRPLLILEATGHYQSPVVQFLEEHHYIYIVINPLISNRLRKSQLRKVKTDAADAYLLGELYYKEEFEPFKKRGVQLLNLRYLTRQYESLSKMCVQTKLQFQAVLDQVFPAYKGVFGAMYSRISLRFLSEFPTSYSVLQTDAITLKAKMKELLSSKRGRSEGWINQRVQRLLDAAKQNPFQQTMYASHLINLEVLITLILQYQEHLAELEQNIDALAEEIEEYELIQSIPGIGHKIAATILSEIGEVDRFDHPKKLVAFAGIDPSVFASGKFTATRNRITKRGSRQLRYALVMAVQCGLIRSRNMRIKAFYDRKRAEGKPHKVALIACANKLVHWLYAILKNKKEFRPI

SEQ ID NO: 410516 - protein, 390 aa, unidentified
MNNEKYIGLDVHQATIVVAVLDSTGELVMESIIETEAAPILQFIAGVLGTLSVTFEKGTWSAWLYDLLNPHVDKLVVCNPRKNALLKDGNKSDRNDARKLAELLRGNQLKPVYHGETGVRMLRELSRSYLTIVKDLSRVMNRLKAVYRSWAIPCAGRDVYYTRNRVQWLAKIREAGVRRRAERLYEQLDMLQHLRQQARRELLAESRKHAITAKLRQIPYLGPIRSALAVALIQTPHRFRSKRQLWAYSGLALETRISAEYRMVEGQVRRSKKMLSIRGLNKDHNHDLKGLFKGAATMASARPGPFREFYQAALAKGIKPTMARLTLAQDYSHHADSVEEGRRLRRRKTKIASRLSVSGEEPFHLRVVFSGGGQSVLETLGFEGEYDKRL

SEQ ID NO: 410517 - protein, 387 aa, unidentified
MARKRTLSTLDTSIAYEAVGLDLAKEDVALAAFDSEHKEPYLIDRISYDKLYELLADMAPTLVAMEPCSGAHQICEQIEALGHEVLMISGRHVQAWVKDHCNGQKTDLNDAFAILNLAYDRWLTPIRGKTREECRLLALQASYRQLKGQRTKTLVHVKATLHAWGFPIRTGSFNQKVLHELIDANREAFGDEMAETLHLMINRVRDLDHDIATVLKLLTEATKRDPRASLLRSIPGFGILTTSRWCAVIGDIARFDSPKQTMAFVGLVPNNRITGHHTETSSGREARGQGKMSKRGDKMLRSLCILGAGALCLMVRNDRLPDCPFVASIKERLASPRPWFKVLVYVAAKLVRIATALLKYGETFSYEKAGISKAVLKQWELEQAKAA

SEQ ID NO: 410518 - protein, 353 aa, unidentified
MKDKYVGLDVHQSSTMAAVHDEKGKAVMESILKTEAEAMRDFLKGLSGTIHVTFEEGAQAGWLYEIVKPLVGEAVVCNPRANKLLAVGNKGDRVDAHKLAELLRGGQLKSVYHGGTSSRQLKELAHNYDSLVSDTTRVMNRIKAIYRGRAIGCAGRDVYYARHRQEWLEKLMEAGVRRRAEFLYQELDTLRKLRREAKQAMLRESRRHPAYPTLKQIPVLGPIRIAEILAKVVSPHRFRTKRQFWAYCGFAVVTRSSADYEFVEGRAQKRQRAPMTRGLNPNFNRRLKYVFKSAAVDGMQQEPFQSYYLRRIAVGMRPEMARLTLARKIAALTLTLWKKGEGFDELKVSEPVA

SEQ ID NO: 410519 - protein, 414 aa, unidentified
MKDIKTEKGKKINRKTMIVAFDIAQEKHVVSIRCPDGRKGKPFVVFNRREEYDQMWERISRTKEAYGMEEVVVGFESTGPYAEPLVHYLMKKEVKLVQVNPMHTKRVKEIRGNSPNKTDEKDPEVIADIIEIGNYLTVVIPEGASAELRRLTQGRERAVERRTMLVNQVHSLVSIVFPEFLWVIKDIKTKTAQYLLKHCPRPQDIVGLGCEGLEAILKRISRGRMREDRAEALYKAAVNTVGVKEGQGGMVFEIKQLVEGIEETGRLIDEIEEKMREYLKEIPYSRCMLSIQGVGEVTVAGLIGEVGDFTKYRTIAEITKLAGLDLFEVSSGKHKGERHISKRGRPLMRKLLFYAAINVVREGRIMHERYERYLQRGMPRMKALTAIARKLLGILFALARDQRNYEEIPLKEAA

SEQ ID NO: 410520 - protein, 368 aa, unidentified
MDDISAFVGLDVHKATISVAIADSGRLGEVRHIGNIENTPTAIAKLARRIGKQHKIVEFVYEAGSCGYNVQRQLTALGFTCRICAPSLTPRKPGDRIKNDRRDAIALARLHRAGELTYVWVPDVLHEALRDLVRARHAACQDVRRGRIRIQAFLLRSDLRYEGKSWSYRHRMWLCNRQFVHPAQQIAFQNYLNALEYEEQRKAELEKQIQDLLQTSHWAPLLTALQALKGVGPVVAATIIAEVGDFTRFAHPRQLVAYFGLAPGEHSSGSTVRPRGITKAGNAIARTVLCEAAWNYRTTPKVGQWMKQHRPPTSKEVIAIAWKAQLRLHKTYKRLTSRGKRTVVATAAVARELLGFVWSIGRLVPIGP

SEQ ID NO: 410521 - protein, 315 aa, unidentified
MHAPRTFMVGIDVSKAHLDVAVEGKRAVVRFDSDAAGRAALAAAVAGAELVVVEATGGYEMATVRALMAADSPVAVVNPRQIRDFARASDRLAKTDQVDARVILHFARAMRPAQIPHIDDGRIALAALVTRRRQLIDMAVAEKNRLEHAPQAVAVLIGETLAALKAQLARVDAAIALAIEAEPDMAARRDLLLTVPGIGEVGAAVLIAELPELGGIDDKKLAALVGVAPMAHDSGAWRGQRHIAGGRATVRCALYTATLSAIRCSPAIKAFYKRLRDAGKPPKVALVAAMRKLIIMINTILKRHTPWNEPQQHGC

SEQ ID NO: 410522 - protein, 348 aa, unidentified
MSKIKLVGIDLAKRCYQICAVSEHNKVLYNRKYTAKKFAEAVHQLEPITVAMEACAASHYWGRRLHALGHQVLLVPAQHAKAFRRVHKSDEHDALSIAEAAQRPNLHCVPVKTLTQQDLQILGGLRERCVAQRTSLINQARGYAREYGVNFPVSRPALMRELPLAIEAANNDLTPIAREALAGVYEEIKQVSTRIDDLLARMTTLAQEDPAHKGLQTIPGVGPVLAPTLLAKLGHAQQFDSGRDCAAWVGLVPKQNSTGGKTQLGGISKNGDRLLRTLLIHGARTVIRWADKHDHAQSRWIKQLVERAGKNKAAVALANKMMRMIWAVLTQGVTFDMSKAYRAQPAAR

SEQ ID NO: 410523 - protein, 472 aa, unidentified
MGKGSGISRAERRRNARKEYLRGLLPRDGAVVGIDLGEDKQALCVVDHDVRVLWRKTARVKAHRLGGALDEAAAAARAAGFSAVTVACEPTGPRWMQVQRLCAERGLVLVCVQPLVSHIAREQQDYTPHKRDESDCVLVGRLAAELHCYVPEELDETWAFLRGLGRRREQLVKAAAASVLRIRSFLSVAWPAAETAAAYPLVSATWLACLQVVTQQCGAGPARLAGIGEEEFCALAAAAARGWGAARADKRIARKVLAALDDPDAVGWSRRGLFRRIAGELADLQRARGQLRAVEADMAAVLGELGLSRLGDIPGLSVTGAAVILAEAGDPRRYETSSSLVKHAGLSPADQSSGASEGQSRISRRGRPGLRTGAWRAVFPLLRHNPVMAAKYQAMVSAAEDAARAGAAAARPGSAQAAQAGRAVRAARAKARVACAASLLRWIYFLAVHGADWDPVAASGGRLAPPEPAAAA

SEQ ID NO: 410524 - protein, 456 aa, unidentified
MTKHKRQKSPAEQQLPAQLHAVNVHAAGIDVGAEAHWVAVPVEADPQPVRAFPAHTASLHALAAWLTLCGITTVALESTGVYWIPLFELLETQGFEVILVDPGTMPKNGRPKTDVHDCQWLQRLHTLGLLSAAFRPDDPVVVLRSSLRLRLTLLAAAARHIQHMQKALTQMHITLQHVVSDIPGVTGLRIIKAMLNGERDPRRLATLRDQRGKENEATIAQALHGTWREEHLFALHQAVAASEFCHQQIQECDAKIAAQLQTFEDRSKGEILPPKARKRHRNRFSFETRPLLHRMTGVDLTKIEGIDETTALIVLGEIGLDMSRWPSEKQFTSWLGLCPRVRVSGGRVLSSRTRPTANRAAAALRLAAASLHHAKSALGAFFRRMKARLGTPKAITATAHKLARLIYAMLKHGTAYVAGSMAEYEQKYRQRMMHTLSRKARELGYELHPVLGGPPA

SEQ ID NO: 410525 - protein, 344 aa, unidentified
MKKVLKQTAGVDVALDELVVTFGQLYEDFSIELIGYKVFKNTNTGILSLVDWVKKIADSQVSIQYIMEATGVYHEKLAYFLDDNKHEVCVLLPNIISNYRRTLETKTVTDKSCSRAISQFGLERKLDLWSKPNEVFKKLQQLTRERDQIVQERSIVKNQIHAEKSEANPNQRSLERMESRIKFLNTQEKEIKTDIESITKTDIELQETIARISTIPGVGTLTVVTVLAETNGFELIRNKSQLASYAGLDVKEKQSGTSVKGKPRISKKGNRNLRKAVHLPALSAVRWDENFKNIYTRLVGKHGIKMKALVAIQRKLLELIYTLFKNETVYDKEFHKNSVQTALV

SEQ ID NO: 410526 - protein, 347 aa, unidentified
MRFYTSQHRYYCGIDLHARTMYVCILDHKSGEIVLHRNLRSEPAAFLRAIGPYRDDLVVGVECIFCWYWLADLCAQEDIPFVLGHALYMKAIHGGKAKNDRIDAHKIAVLLKSGAFPTAYVYPRGMRATRDLLRRRLLFVRRRSELLTHIRIVFHQLNLPAPSGALLDPRNRDALLEAVPEPGVRASVEADLVLAERLDQVIGSLERTVEREATVDDPRTLQLLKTIPGVGRILGLTLLYELHHVARFPRVGDFLSYARLVKSQKASAGKVTGTSGAKIGNAHLKWAFSEAAVLFLQKNPRGQRFMSRLRAKHGRGKALSILSARLGRASYFMLRRYAAFDMDRFLN

SEQ ID NO: 410527 - protein, 313 aa, unidentified
MTMPQTTLGIDVSGARLDAHVHPAGRTRSFANSPAGVDALVIWANELDAFVVLEATAPWDQPLIRALEQADRPFHRANPKRARDFARSLGALAKTDAVDARMLALYGARLPLARTPPIAPERLALQGLNSRRDQLVEMRKAERIRLKGVFDPVLIDSLKAVIAVFDVQIRTLERRIAETVARSADLAREAAVLRSAAGVGPVCAAVLLAALPELGQVDRRAVASLAGLAPIARESGLFKGKRHVQGGRKRVRDALYMAALAAIRIGRWKQAYDRLRALGKAPKAAIVAVARKLIVALNAAVRNQTMVLNTTVA

SEQ ID NO: 410528 - protein, 394 aa, unidentified
MKLVGIDVGKNSHHFCVMDKETGEFNVTPSSFPNNKEGFDFLINSLKPYSKKSILIGMEDTGHYHVALLKFLLSNGYTVALINPKTTDLTRKMEGGITKNDKLDTITICDVLDTPERKKQYRITKVDRFDLYEQRQLTRHHHNLKEELNVYCNRLQKSIDLVFPEFNTLFSSKYGIVYMNLLKTFGSAEAIASTDIRTIRKCFEIKGKGNRISLTPEKLKECAKNSIGISSGVETIQIKHLVSQITLIKEQIAEIDKKIEEFSITNNSPILSIPGISHFSGTSILAELGDIGNYSKPSQIIKFAGVAPYHYESSQYNAQHTAITKKGSKYLRKTLYQIILPVINNNPVFKKYYLLKISQGKGHRCAQGHCIRKLLRIIYHLLETGQSFDPALLR

SEQ ID NO: 410529 - protein, 341 aa, unidentified
MKVSTLGIDLAKNVFQLHGVDHEGHTILRKKLTRAKFVQFVIQLEPCLIGMEACSSSHYFARLFSRYGHEVKLIPPQYVKPYVKTNKTDAADAEAICEAVTRPNMRFVQIKTEEQQAVLALHTERGILIRERIACSNSLRATLAEFGITIAAGQSHLTRELPAILEDGENGLSPFVRTSIYRQSKHIRELEEQVKQVEEALASWYRTQEACQRMAKIPGVGMLTATYVVAAVGNARQFSTAKQFASWLGLTPKEHSSGGKQQLGGISKRGDGYFRYLLVHGARALTAWVNRNGAVEENSWLQGLLERKHYNVAVVAMAAKTARIMWSILSHNTEYQPRQLA

SEQ ID NO: 410530 - protein, 340 aa, unidentified
MVNIKDKGMEKFFIGVDVSKKTLDCVLYDGDLSKMKGNYHLKTTNDEDGCNKILKWMRQVKVSKKTSIFYMEYTGRYSYTFAENLAGKGLLFCMVPAIKIKGSFANARGKSDKVDAIRIAQYAYRYRDELNPTSLKDNDVMKLRDLMNDRKMLVKEMASRKNIISEYKNFPEGGRYKRAKEGLELLKKQLKEVEKEILDLIKFNPAIERNYNLLISITGISFVNAVNIIIFTDNFQSFTDSRKFAAYCGVAPFEYTSGTSVNKGVHVSKMANRTLKADLSMAARCAITHDTELRIYYKRKREEGKSFGCVLNAVKFKLIGRMFAVVKRGTPYVNTQKYAA

SEQ ID NO: 410531 - protein, 317 aa, unidentified
MRKHSTKAAGIDTGKHKLDVALSSGSDVLQTGNNEDDYRQLGDWLRRHRIKRVGIEASGGYEREVVAWLRNHGFIVIIFQPVEVRAYARFSRKRAKNDRIDARLIAICAAQSEEIREPSDARLAAFKERLRLIEQIEEDASRMKTRLEGYLDKALISRLKAEIRRLSEWRRSAMKEMFAELAMHADLQRKLELLSSIDGVGPRTALAMLVHMPELGTLSREEAASLAGLAPFDDDSAERRGQRHIFGGRHRLRRSLYAAALPAAFYWNTALMAIYKRLIAAGKPHKLALVACARKLLIYANAVLERGTPWMTSAQAG

SEQ ID NO: 410532 - protein, 343 aa, unidentified
MKLMRVGVDLAKSVFQMHGVDRHEQVVWRRKLTRANWLRVFLETVEPGCAVGMEACGGAHHWARVLQVRGYSVKLIAPQFVKPYVKSNTNDANDAEAICEAMSRPNMRFVAVKTVAQQDVQAVHRVRAEVSKQRKAKGNQIRGLVSEYGLVAPKELVHLRAAIPAWLEDGENGLTGRFRRLLNALWHDLRALDQRMIELDREIAQIAAADPVAKRLQRLRGVGPVIATALVATVGDVRQFANGRQLAAALGLTPRQNSSGGKERLLGISKRGDAYLRTLLVHGARSALRTARNKEDRLSRWISRIAETRHHNVAAVALANKTARIAWAMMKNGTDYEPDRAAA

SEQ ID NO: 410533 - protein, 460 aa, unidentified
MSIIGIDLGVTAKHRAVIADERGRFIGPTIKFETRMRDLERLQARAREGTEPGEPLTVVMEATNIVWYPISVYFLRHEAAVHVVNPRIAADLARFYKRHASSDRLAARVLARLPIVSPDSLYSLVLSGADYLALQHGCREVDRLTTEASAIKNRLQCTDHLGWPGLKSRVFPEPCSPAARWFRDHYYNPQQVLEAGVEGLRRGWRAAEGIYDEDEDWITPLVVLAEEVRQLHGYQDTYLDYDALAAEVHRAQHWLANLEADAHYVRLKVVRPRYRDLHPSRNVETLRGVGQDGGAVYVAFIGASHRFPSNRNFRGWSGLVPRSAQSGESESKGLRITKAGPNLIKKYAYLNAGVARQWDPQIAAIYYDQMVNKGKHHSQAVCACATHLLDRVRVILAEDRPYQLRDVDGTPVTLEQARAIALERYTVPEEVRRRNTRRSRRERAERRAESKEEKRRRRSR

SEQ ID NO: 410534 - protein, 436 aa, unidentified
MFVGHRFRTDPDELDTLWARLPKDAERIEVVMEPTRNAWVALAAWFRRHGATVVMVPPEQSADLRDYYNKHTKTDRLDSKVLARLPLLHPEGLHREDSLGPGDELKRAVKIRSGLVHRRTACMARLDALLEILGPAWIAALGSDMTLTALRFLARYANPVQVKRLGKARLAAFFRRSSRQAWADERADAVIEAAATTLRLWGADGGELDFDALAADIAAEARLALTLTDEINGFDKRIGALYDKADPAGIVRSVPGAGRVCAPQILGRLGDPTRFANLAAVRSFAGLVPAADSSGQADGHRGPTKAGDSCLREALFIAADHARKVDPTLAVRYQRLMLAGKHHDSAVCTLAAVLLTRIAACLRAGTHYLVRDTDGRVITEAQGRAIVAERYTVPPEVRAARRKVTPHRHPRRNERNERAKTGVATRSKASPVPQPA

SEQ ID NO: 410535 - protein, 441 aa, unidentified
MDSSATLWMKDPNNENGHHSNAVELEAKAVFGRLEEPLIVAPYSEARRGISHVERRPVGDLSEKASDQFSGGTPMEVVYPRCSGLDVHKRFVVACLSIIQHGQRHKELRQASTMTSDILALKAWLLAAGCRQIAMESTGVYWKPIFHLLEDSFEIVLVNAQHMKAVPGRKTDVKDAEWIADLLQHGLLKASFIPGSEQQAVRDLTRTRMRLLQERTRLVNRIQKVLEDANLKLASVVTDSMGVTGQAILRALVAGEVDPERLAHLAQGSLVRKHEQLQAALAGKLTPHHHVLLAELLQLIATLDRSIAHLDREIAERLRPHDALIERIDAVTGLARRSIEVLLGELGSSMSHFPDAAHAASWVGICPGQHETAGKQHSGRTRQGNSFSQNGTHSGGSCGGAYPDLSWRTISPHQGATREQESRDGCRSQYPGDFLSHGQER

SEQ ID NO: 410536 - protein, 355 aa, unidentified
MSQEKYIGMDVHQATISVAVMDARGKLIMECLLETKAATILEFMQGLRGTLALTFEEGTSAAWLHDLLKPHVSRLVVCDPRKNALLKDGNKSDRVDARKLAELLRTNQVKPVYHGKHGTRALKELGRSYLTITKDVTRVMNRIKAVYRSWAIPCAGTSVYAPRHRAEWLAKLLEPGVRIRAEHLYQQLDSLEPVRLAARRELLLESRKHAAVKLLRQIPSIGPIRAALLVALLQTPHRFRTKRQLWAYSGFAVEIHDSGEYRSVRGKLQRNRERITVRGLNDNHNKDVKSLFKSAAISASTRPGPLHDFYVTRVESGMRPTMARLTLARKIAAITLTMWKKGVSFDPQQLQRQAA

SEQ ID NO: 410537 - protein, 344 aa, unidentified
MYHYAGIDVSLESSAVCVVDGGGKILREAKVASEPEALIAWFRSLGLPVERIGLEAGPLSQWLYAALRQANLAVELLETRHVRDAFKAMPVKSDRNDARGIAQLMRLGWFRPVHCKSIEAQETRAVLTARKLLQSKLRDIENSLRGVLRGFGLKVGKTTERTFAERIKELVAGHPRLELVAQALLEAHAVLLREFNGLDKHTQKLARSHPAARLLMTTPAVGPIVALTYASAIDDPKRFRSSKATGAHFGLTPKKYQSGQTDYTGRITKIGDASVREALYQAAHVMLTKPVRNCSALKSWAMRISRRAGMRKAKVALARKLAVILHRMLADAKPFNPPAKAVAT

SEQ ID NO: 410538 - protein, 355 aa, unidentified
MNDTKYIGLDVHQATISAAVLDSTGKLLMESILETKAATILQFVDGLRGSVHVTFEEGTCAAWLHDLLKPHVANVLVCDPRKNALLKSGNKNDRIDARKLADLLRSGLLSPVYHGENGVRTLKELARSYLALNRDVTRVMNRLKAIYRSWAIPCAGQRVYAPRYRSEWLGKISEVAVRRRAEIYYQQLDALRSLRQQVRRDLLAEGGKQGATKLLRQIPSIGSIRAALLMALIQTPHRFRTKRQLWAYSGLALKTSASGEYRFVEGQLKRSKKFLAIRGLNVNHNPDLKNIFKGAAIRAAAVPGPFQQFYAALVATGMKPTMARLTLARKIAAITLIVWKKGVRFDAEYLKPQAA

SEQ ID NO: 410539 - protein, 343 aa, unidentified
MEHYAGLDVSLDETSICIVDAEGRIIRETKVATDPAVIAAVLTAPGLKCRRVGLEAGPLSQWLFSGLAEAGVPVICIETRHAKAVLKAQTNKNDRNDARGIAQMMRVNLYRAVHVKTLQSQQLRMLLTSRKLLLNKWLDIENDLRGTLRNFGLRVGPVSERRFEARVLELVDGHPMVAAIAGPMLAARAALREQFIALDKMLIDQARADPVCRLLITAPGVGPVVSMSFRAGVDIPQRFVKSRAVGPHFGMTPRQYQSGQTDWSGRITKCGDEMVRTALYEAAQVILRRTGRWCSLKAWGMKIAQRRGMEKAIVAVARRLGVILHRMWVDRTEFRWGKEPVAA

SEQ ID NO: 410540 - protein, 445 aa, unidentified
MVIQRSHIGMPYIIQKNGSDTKCREVLPGIHVFIMKGGIRMDGPIITVDVSKGNCHYQPFLEKGKPLRKPKVLYDTIEGFEELQKSIDLTRQKSEKEVSVVFEATGVYHRCLQKYLDDHDIPYYIISPLLSAKYRQTDLHANKTDALDCGHIAKAYYGDEKLYVFKKQEDRFIVLERLNRMYEDELQHLRKRKVAFRSTLDIIYPRLDRCFSGKASLYDPVIMEILRKYPHPKLLLRHKEETIVKTIERKTDHNVLFISKIVHKVYERALQCYSGCDINDIEVRKLPDMVEELQDQMERCESLLSELVKEASKIEYFNNVASIVGIGVNLASRIIAEIGDISRFKNRKAISAYSGLNPKILQSGDKDGIHLKISKKGNRHLRCLLYLGATCNYRLKKGDPLYEFNKKKRQQSISPLKSKAANIAAAHKLLVIIYALCKNGEQYRF

SEQ ID NO: 410541 - protein, 337 aa, unidentified
MSVYVGIDVHRKRSQVAVVTQDGQVQLNKNVVNGSTPMLRLIGDLPAGTPVAFEAAFGWSWLAELLEDYGFEAHMVHPLRCKAIASARLKNDKVDAAILAQLLRADLLPEAWIAPAKVRQLRALLRHRISLVRLGTQLRNRIHAVAADHGYDRSASYWTGPGRGWLAELDLPATSREIITDCLAVIDALAVLIDRLDGELHAHAKADPRVKVLRTLPGVGEFTALVMVAEIGDISRFPSARKLASWAGLTPTVRGSDLKVRHGHISKQGSVWLRWVMNQAAQTAKRSPEFAATYSSIAKRRGTKIATIAVSRKLLTRAWHLLSEMQAAEASTPPRRP

SEQ ID NO: 410542 - protein, 348 aa, unidentified
MDHYAGIDVSLECSSVCVVDASGKIVREGVVASEPEALIAWLNSLGFGLARVGLEAGPLSQWLYAAMRDAGLAVELLETRHVRKAFEAMPVKTDRNDARGIAQLMRLGWFRPVHCKSPAAQEVRAQLTARKLLQSKLFDVQMSLRGILRGFGLKVGPTTPKRFAGRIRELVAGHATLEIVAKALLAAHEVLLREFGGFEKRVRTMARTDARVRLLMSAPGVGAIVALTYVSAIDDPARFKSSKMVGAHFGLTPRKYQSGETDYTGRISKIGDGSVRTALYEAAHIILTRPVKGSGLKSWAMKLAKRVGMKKAKVALARKLAVILHRMWVDGTSFTLTAPRHSAAAATR

SEQ ID NO: 410543 - protein, 435 aa, unidentified
MCCVDDIRLEQFRQLKKEIRGSEEYLIIGIDVAKEKHRAFFGTAQGKTLLKNVVFDNTIEGFEKLDAYVERVKVQYSLQKVVFGIEPTADYHKPLAEHLLKCGLMVVFVGGTAVKNNRQLLNGRWDKNDDKDSANVADLIAQGKCMFYEYPLMTLQNVRVLNALKRRLKKREHGISAYIRNHILAQYFPELDKYYGPSETLAVVRECLDPSVIAGMEYDDFCRTVAPGKMTLARERRVGAIWRTAVNSVGCTMGEAAFHEAQIAVDSLKQVRQEIKAIEDKLEDACLEFSEYTYLLSIPGFGPDVSAKVLGAIGDPHRFTSGKQVLRLAGLDLCAKRSGKTSNRATPIISKQGKADLRCALYQAAFIASLKSKDFIPYFTNKLVGRAKEKGIGTKMRVKLAAKLLIIAWTLMKKKEYFDPKYLKLGNRGEQKTAA

SEQ ID NO: 410544 - protein, 344 aa, unidentified
MYFIGVDHHKQASVMTILEADGRELKNGRVLNLREKVERFLAEYHPFTAVLEAGRSSYVMADLLRELGGEVKMANAAQVKAIAHARIKTDKRDSRVLAHLLRADLIPEVYQRGEWNRRAQRVMRLRAYWVAKQTEVKNKIRALLAQQREEIRLEVEKHEAGLFTLKGIEFLRTLRLRDPDKMVMEDLIRGCEEAQTHIRRTDGVVRALYGEMEEAARIDTVPGFATTLSVLVAVEIADIKRFPTVSDLHSYAGVIPSTYASGERTHHGRITKQGSAWLRWAVLEAAYPAIKKDLSLRVLYNRLAKRKGANVAKIVVARRLLTIIYRVLTEKREYYPDKMKQSAA

SEQ ID NO: 410545 - protein, 340 aa, unidentified
MNKLLNKKHFIGVDISKDTLDLARIKEETYGSFDDKKVENSFKGFDHIIEWLQKKNIQIKDCVFCMEHTGTYGLLFFAWLSQMEIDYCVEPALQIKRSLGMTRGKNDKVDARRIADYAFTNRAKLKLFEIPSVLIIKIKQLLTYRKQVVRIRTSLKNSLKSHKQYQKISGLENVSKQIEEQIEQQDKLTGEVEKQIRDLISSEPQIKKNFDLATSVPGVGLIITAFMIVTTNNFTSFENGRKYACYSGIAPFENTSGTSIKGKTKVSHLGNKTMKTLLSNGANSAITWDPEMKTYYKNKEAEGKEHKLIINSIRCKLVNRVFATIKRQTPYVKIYQHNFS

SEQ ID NO: 410546 - protein, 329 aa, unidentified
MQNFIFIGTDVSRLTLDHGVHTSMVHQKLPNNSEGFKSWLKWALQFGSKEQLWVVMEHTGYYSYQFEVFLQGHQIRYTKVAAIEIKRSVGLVRGKSDKIDALLISRYGWMNQDRLKPQQLSAAVITELKDLVSLRDKLVRDRSGYKARMKEQAATRKYAKSHIQTKIQAQMIKELTANIKEVEAAIKKLIKEDEALLSNCNLLVSIKAVGFVTAIYMLAYTENFRKFLNSRKFSCYAGLAPFEHTSGTSLRGKKRVSHYANKKAKCLLNLAASVAIQHNPEMKAYYIKRVNEGKSKMGTLNIIRHKLIDRMFAVVKRGTPYTEIISIAA

SEQ ID NO: 410547 - protein, 407 aa, unidentified
MDVVHPKCAGLDVHQQTVVACARVVSGASVHHEVRTFGTTTQDLLALSDWLTAHGCTHVAMESSGVYWKPVWHVLGGHFELVLANAMHIRNIPGRKSDVSDATWIADLLAHGLIRGSFVPPEPIQELRDLTRTRKQLVREIAQHTLRVQKTLEHANIKLTACLADILGVSGRAILQALVEGERDPERLADLASERVKASRAELVAALHGRVAPHHRFMLKLHLTQIEALEAAVREVEARLGDVLAPFRAAVDRLITMPGVSETVARVIVAEIGFDMTHFPTAGHLVSWAGLCPRLHESAGKRLSNRTRSSNPWLKTTLVQAAWSAARKKDTYLRAQFLRIKSRRGPKKAVLAVAASMLTAAYHMLKHDVDYRDLGADHFDRRDKAKLAKRLIARLHDLGLTVEVRAA

SEQ ID NO: 410548 - protein, 387 aa, unidentified
MRAVCGLDVHKDSVFLCILCETGEIIEKVFGVLTHQLRDMRRMMQSHGVSEVTMESTAVYWIPVWRILEPHFHLKLVNPYFIKQLPGRKSDVKDAQWIAECTLKDLVRGSFVPPERIQQLRQYDRRIFDLDAEIVRKLAKLDGVMQRCNIRLSNYVSNTDTKSYKDVVRKLCEGTTDPEELIKEIHSRITNRHGRETILAALTGVVSDAEKDTMRQLRDELDLAEKHKQECMDKMMHICKTYYPEELIRLMTIPGIGERAATSLIAEIGVDMTKFQTAAHLASWSGLKPRNDESNKKIKSRRITHGNIFLRKTIIECAWGASRTKDCFFSRFSFHQTQVRKKNKMKVLVAVARKLLIAIWHVLHDETDYKDFSVKNDCETSVCENNG

SEQ ID NO: 410549 - protein, 405 aa, unidentified
MGRVFVGHDWAEAHHDVFVEDAVGRRLVATRLPEGLDGVRRFHELVAEHVEVPGEVLVATETNRGLFVTALVAAGYEVIAVNPLSTSRYRERLSTSGAKSDPGDARVLAELARVDGHNHRRIAGDSDLAEAVKVLARAHQTMIWTRTRHTNQIRSTLREFYPAALEAFDDLASGDALAVLAIAPTPTLGRSLSRSKIASALRRGGRQRRVEERAAEIHTALRPEHLEAPPVIADAMGASVAALIAVTVELVAQIDRLEQELTDRFEQHPDAKIIRSLPGLGTILGARALGEFGDDPNRFADAKSRKNYAATSPITRASGKHRVVLARYARNHRLADVTYRWAFSALSASPGARTFYDHRRAHGDTHNRALRALANRLVGILHGCLTHRTLYDEHLAWNHRTQAAA

SEQ ID NO: 410550 - protein, 336 aa, unidentified
MKHTVIGMDIAKHVFQLHAVNAATGEIERIKLKRNQLLDFFAKREHSLVAMEACGGAHHWARQLQELGHDVKLICARSVRPFVLRNKTDAADARAIWTAAQQPDARFVAIKTEAQQAILALHRLRAQLMKFRIMQTNALRGLLHEFGQTLPEGYQALQDAIPGTLARAAERLPAMLVDSLREQWGRVQSTDADIATLERRLKAALRENQQCQRIAEIPGVGLLTATAAVAAIGNASTFRSGREFAAWLGLVPRQTGTGGKVRQLGLSRRGDTYLRTLLMHGARSVITRGTRSPWLDGLLQRRPFNVVVAAMANKLARTIWAVLYRGTGYHGAIKDA

SEQ ID NO: 410551 - protein, 366 aa, unidentified
MASLHYVGMDIHKKMIAYCVKTKAGRLRGEGVIDATRDSLDKWIAERRAPWVAAMEATLFTGWIYDHLKPHARDIKVAHPLMLKAISASKKKNDRVDAAKIADLLRADLLPECYVQPTEMRNLRRVLRYRNLLVRQATRMKNKTSGLLMEVGAQYNKDKLHSKRYFNDLLTTVEDVPDSVLQMARHSHDFMRLFKDLQNGLIKGLVKDPLLEERIKTLMTINGVGEISALTWALEIGDPSRFRNRRQAISYCGLCGAQDESAGKMKRTPISKQRNKHLQTMLIEISKLAPQWNPRLAQIHAREVERGNRNRATLEVARRLVALLLAIDKSGAAYDSSRNISKQPESNGRKAGGFSPPTPPRPGAPG

SEQ ID NO: 410552 - protein, 308 aa, unidentified
MVAGTLGSLHKAGSKKMADTITVTAGIDTSKDKLDVAVHGTTTCFTVESRCAGWQQQLAAELTKAGVQRAGIEATGGYECGVTRQLQAAGFTMVVLQPLQAKAFARLHLRRAKNDRIDAALIAACAQAVDVPRIKPDARLDALTDHLTFVEQIEEDMARLKTRLEHIQDKRLRRIATTDIARLERRRANELQHIAKVLRSDDDLAKCFDLVLSVPGIGDRTAITLIVRMPELGRISREEAAALAGLAPFDDDSGQHKGERHIAGWSMPVVSSRAPKEWHTQRCASACPDWASQSFCEVDAAFPQCDDK

SEQ ID NO: 410553 - protein, 370 aa, unidentified
MDVHTTNYTLCAVEPILGAEENVLAQIQIEPDYRLVIQFIKRLKERLGVPDQECDILCGYEAGCLGYSLYHQLKDAGIKCVILAPTTMISEKGKRIKTDKRDAHLIAKCLCYGGYHAVHVPTADDNAVKEYIRMRDDHKITLKQKKQQMNALCIRHGCIYEGNNWTQAHLKWMRKLELPELVRETLNEYLTTYDELTAKIERFDKRIQELADQTQYQEKVKKLECLLGIKTHTALSLIVETGDFARFSKGNAYAAYLGLAPGEHSSSDDTNRLGITKAGNSHLRRLLIEASGGICKGVIGQKSKALKARQSGNTAEVIAYADKANVRLRRKYYKLIHHGKKRNVAVAAVARELACFVWGMMTDNIYGKTA

SEQ ID NO: 410554 - protein, 351 aa, unidentified
MLIIGCDFHTRYQQIAMADDETGELLLERRLDHESGEVHAFYRGLQGPVRVGIEATGPIHWFERLLAELGHQLWIGDSAKIRASEVRKQKTDERDARLILDLLLAKRFPKIWVPTPAERDLRQLLWHRHKLVCLRTMLGNQLHFLAMSQGLCRKRKLFTKKGRTELIGLALGPWTRRRREELLKLLDQLDPAIAELDRAVLEEAQRRDDAVLLMTHPGIGPVTSLAFVLAIGPVTRFSRSRKIASYLGLNPSEDSSGQRRRTGAISKQGNTMVRWLLIEAVYPAVRKDLALRQDYQRLKFRRGHAVAKVAIARKLAVRMYWMLRSGAAYAQLVRRQGSPGATLVDASPSLG

SEQ ID NO: 410555 - protein, 394 aa, unidentified
MENDSTLYVGLDVHKDSITVAYALGNDEVELLGKIGTTQADIERLCKRLQSKARRVCIVYEAGPCGYGLYRELVQKAFDCMVCEPSTIPRKPGERVKTDRRDAAKLVRLLRAGDLSAVCVPSVEDEAFRDLARAWVSAKDDLKRARQRLKAFLLSHGVRYAGRADWGPAYRRWVSTYAFASAWQQLAFEEHRRSIEDRLTQCERFEAVLREAVVEWRFYPAVLGLQAMRGVQFTTAVGMLAELGDLSRFVHPRQLMAWLGVIPSERSSGSKRHLGSITKTGNSYARKLLIEAAWSYRHPARVSPEIQRRHEGIPKAIIERILGCPDPVVPTLSQARRTRQECQYRGSCSCPRTGRVHLGCHPAGYVACHPPPGVDTLTWDSRHSAASMIMARVS

SEQ ID NO: 410556 - protein, 334 aa, unidentified
MENIALIGIDLGKNSFHIHCQDRRGKAVYRKKFTRPKLIEFLATCPATTIAMEACGGSHFMARKLEELGHSPKLISPQFVRPFVKSNKNDFVDAEAICEAASRPSMRFVQPRTESQQAMRALHRVRESLVQDKVKTTNQMHAFLLEFGISVPRGAAVISRLSTILEDNSLPLYLSQLLLKLQQHYHYLVEQIKDLESQLKRKLDEDEVGQRLLSIPCVGTLTASTISTEIGDGKQYASSRDFAAATGLVPRQYSTGGRTTLLGISKRGNKKIRTLLVQCARVFIQKLEHQSGKLADWVRDLLCQKSNFVVTCALANKLARIAWALTARQQTYVA

SEQ ID NO: 410557 - protein, 375 aa, unidentified
MPEGLAGISRLHALIAEHAEDPAQVVIGIETDRGLWVDALTAAGYQVFAINPLAVARYRDRHHVSGAKSDASDAKLLADLVRTDRHNHRRIAGDSPDAEAIKVLARAHQNLIWARTRHSNALRSALREYYPAALETFENLADRDALAILGRAPTPADAKRLSVSKIRAALKAAGRQRNLDTRALEIQEKLRTPQLAAPAAVTAAFGASTRAAVGIIAELNRQIADLEAELATHFEAHPDADIYRSLPGLGVILGARVLGEFGDDPNRYTDAKSRRNYAGTSPLTIASGKKRAVLARHVRNRRLYDAVDQWAFCAITHSPGARAYYDQRRAAGDLHHQALRALGNRLVGILHGCLRHQTHYDEHKAWAHRQAAAAA

SEQ ID NO: 410558 - protein, 355 aa, unidentified
MRYFKDIPAFVTGKMVFCGIDMHERHWNLCFLCDGEVVEELRIGGDFTILLFALQNYSSARQIRVVYEAGFSGFWVYRKLRERGYDCMVTPPSLIPQNNSHVKTNKRDARALAHYFAGGLLKAVYVPPVEVEADRGVVRRRRQLSKQLTRAKNHISSFLHLHGLKTPSEIRCKWSKRYVAWLAELTWEQPSDGFTFKNLLTNYQRHRDDLAAVTHQLREMSIWSRYAVHFKRLRTARGVGLITGMTFLLEIFDFGRFRRADEFASYLGLTPAQYSTGDKVRLGHITRQGNAALRGVLVESAWTVIRHDPHLRAKYERLRQRGTNGKKAIVAVAHSLALRLRRCLLDETDYVIGVC

SEQ ID NO: 410559 - protein, 345 aa, unidentified
MEHSAGLDVSVKETSVCIVDETGKIVREVKVASEPDALLAVLTNPAYRFKRIGLEAGPLSQWLFSALAEVGLPVICVETRHMRAALKAQINKTDRNDARGIAQMMRAGLYRPVHVKTLRSQKLRMLLTHRKLLQSKAIAVENDLRGTLRNFGLKVGMVGAAKFEARIRELVETIPDLAILVEPLLIVRRVLREQIAILHRRLLAIVRDDEVCRRLMTVPGVGPVVALTYRATVDVPARFRKSKSVGAVFGLTCSKYQSGEIDRSGRISRCGDEMMRAMLYEAAHIMLVRSTKWSWLKAWAMQVARHRGLKKAIVALARRLAVIMHRIWVDGTEFRWTRQQVAAAA

SEQ ID NO: 410560 - protein, 436 aa, unidentified
MALSAKARSERRKDVNLQQVAPWQQWTHFAGLDWAKDHHDVVVVDRLGQIVLQFRISDDAAGWQQLREKLQDFSTLAVTIETSHGAVVERLLQLRLPVYPVNPKAAKQYRNRKAPSGAKNDFLDAWSLADALRVDGHNWRRLTPEDPLLQELRLLCRDEIHLIEQRTVLVNQLQQALAEYYPAALRAFDDWTMPAAWAFVEQFSTPEALVQAGRRRWEKFLHVHKLYRPQTYEKRLEQFAAATQFCGPKAVANAKSRLAVTLAKQLRVLEGQLKEYRARITELFGQHPDHDLFGSLPGVGGKLAPRLLSECGDDRGRFEDAQSLQCYAGTAPVSYQSGQLHKVHFRRACNKYLRSAVHLWANLSRTKCAWAEAYYRQKRQEGKSHACALRCLGQRWLKILWKMWQSRSRYDEQLHACNQVRHGSWIIALANPAATA

SEQ ID NO: 410561 - protein, 341 aa, unidentified
MEQATTIGLDIAKHVFQLHGADAAGHVLFRKRITRVRLLSFLAAQTRCVVAMEACAGAHYWAREIAKLGHHVRLIAPAYVKPFIKRQKNDAADAEAICEAAQRPSMRFVPVKTEEQQANGIVFRARDLLVRQRTQCVNALRGHLMEYGYVFPKGITHVEALVALVEDLQSSLPDSVRVILKLLVDTFTALEAQIAVLDAEINQRSKSDPTARRLMTIPGVGPIASTAITALVPAAEGFPAGRDFAAWLGLTPLQKSTGGKQKLGAVSKRGERTIRRLLIIGASAVVQQASRRGAPKGSWLAQMLARKPKMLVTVALANKMARVIWALLVKGGTYRAPAVAA

SEQ ID NO: 410562 - protein, 359 aa, unidentified
MKENSREAEWKQRPEQTVGVDLGDRFSRYCVLDQEGEVIEEGRVKTDREAWRQHWEGEPRQRVVMETGTHSPWASRLLQELGHQVIVANARKLRAITENESKNDRRDAKTLAYLGYCQPRLLSPIQHRSVERQQDLNLLRARDTLVRARTMLINCVRGLVKSAGGRLPSCGADYFARCVPPAVPTELVTTIQPLLEQIAGLTLQIRRLDQTIEDLSQRYPEIKLLRTAPGVGPVIAAAYVLTLDRADAAAHSRSVGAFLGLRPRQSQSGDSDPEHNISKTGNLYLRRLLVQAAHHILGRFGPDSALRRWGLKLALGGKRAKKRAVVAVARKLAVILHRMWRTGKSYQPFPEQNMTVGAA

SEQ ID NO: 410563 - protein, 343 aa, unidentified
MEITTIGLDIAKRVFQAHGVDAAGRAVLRRKLGRSEVLDVFRVLPPCLVGIEACGTAHHWAREIRALGHEVRLIPAAYVKPYVKRGKTDAADAEAICEAVRRPTMRFVPIKTPEQQAVLLLHRTRDLLIRQRTMLVNALRGHMAEFGIIARQGAGGVGELLATLRGAEEVLLPAPAKGALLGLAEQIEALEARVDDVEAAILAWHKGNEASRRLATVPGIGPITATAILASVGDVSNFRSPRHLTAWIGLVPKQNSTGGKPRQGGISKAGDRYLRRLLVLGASSVICHTRIQAREGWLADLIRRRPTMVAAVAHANKTARIVWALLTHGGVYNPMAGRRPAAP

SEQ ID NO: 410564 - protein, 344 aa, unidentified
MNINLLGIDIAKNVFQLHGVDHKGNAVLKKRISRDRLANYVANIPQCTIAMESCGGANYWARVFQRAGHNVKLISPQFVKPFVKSNKNDAIDAQAITEAAARPSMNYVPVKQVEQQDIQSLHRIRSRLVKNRTALINEIRGLNLEYGVTIPVGASKVKKRLKQIVSDYENELTPATREFMNHLYDELVEIEDRLKKMDKKIQTICKESETCQRLQKIPGIGALTASILIATISDPTVFKNGRHMSAWLGLVPRQASSGDKQKLLGISKKGDRYLRTLMIHGARAALSFCKNLDNEYGRWITDKKTSMSFNKAAVALANKNARIVWAILKSGSEFDFNSNLKSVA

SEQ ID NO: 410565 - protein, 365 aa, unidentified
MGTVYHVGLDVHKETIEVSVFRNWNQQPEYEKRVRNDHKAIIKQLKKLQKDGHVETCYEAGCMGFTLKRALEESGISCRIVSPGKLPRKPTDRIKTDRRDARNLAKALRAGEAEGIYVPSQEDEATRDYIRARDDVKLELKRAKKQLLKFLLRLGHCYETNRYWTGKHKRWMKSIVFSQPMHTETFETYYARILELEERIVLMGGRIVEIASSDRYKEPVNMLRCFKGIDYLTALAFVCEVGDFRRFPTAESFMAYLGLVPREHSSGEKRRQGGITKSGNGHLRRLLIESSQHYCYPSAPSRRLTLRRVGQKAEIIAYADKAMRRLQKKHYKLVRRGKSRNLAVTAVSRELAGFIWGLMNNKIAV

SEQ ID NO: 410566 - protein, 353 aa, unidentified
MKTYYVGMDVHSATIRIAALNGAGKVVMESTIETGAERVRGFLKQLRGKVYVTFEEGTQANWLHDVVRGLVTEVVVCDPRHNKLLQSGNKNDRVDALKLAELLRNRSLKAVYHGDNGVRTLKELVRNYDCLVGDTTRVMNRLKAIFRGRAIACAGHEIYRQDRRKQWLEKLSESGAKQRADFLYEQLAALKPLRHRAKLVMVKEARRQAAYPWLMSVPQLGAVSVAQLIAVVGTPYRFRSKRQFWTYVGLAVVTCSSADHEVVNGVLRRSTRPQATRGLNRNHNHLLKRVFKNAATSACHSGPFQAGYDARVKRGMAPSLARLTIARQLAATTLTIWKRGEQFSPERMKQQAT

SEQ ID NO: 410567 - protein, 354 aa, unidentified
MKKIFIGIDFSKEKFDATLIQAEGLKECAPSVHEVFDNKTSGYRRLVKWVKAHAEGFAADAWLFCGENTGGYSIGLSNYLYASGYDMWLECAYKIKHSAGIQCVKNDKADSRAIAEYAMRNYDKMILHKPQSASLTCLREIFLYRHSLVRQKVALTVRRDEKRLTQEKSDARAFMSFTSKHLITEVNKAIAKCDQKIKEIIASDDELREIFDIITSMPGIGVQNATCLVVYTDNFQKFDLDSRKIACYYGIAPFGRQSGTSVNSRPQVSPFANRMIKSLLSQAALAAIKFDINVHSYYQRLIERGKHPLLVHNNIKNKMLHILVAMVRDRVKYNPDNVYRTSNEVSLAPQVLNI

SEQ ID NO: 410568 - protein, 357 aa, unidentified
MAEGSWVGLDVHARTTLAGVLGAASGELSLQRVQPRSEETIAWLLSLAQPVRVAYEAGPTGYGLARACARAGIACTVAAPSKIPRAPGDRVKTDRRDAERLARLLRLGELVAVRVPDPVGEAARDLVRAREDARGDLMRARHRLSKLLLRHGLVYEGSAWTRAHDTWLRRQRCAGRVLALAFDESYGAVAQAKGRRDALDQAIVELAGEPPFCEVGGRLCCLRGVSTLSALALSVELGEWERFRAESLGPFLGLVPSEDSSGERRRQGAITKSGNTHARRLLVEAAWHQRRPLRTSAALERRRQGQPAPVRARADESARRLHQRWHALEGRGKRRTIVAVAVARELAGHCWALATMK

SEQ ID NO: 410569 - protein, 362 aa, unidentified
MAKARSWAGLDVHAAKVIAVTVDGESGELRSHRLSGDTAQVVAFCGGLPGPVRVAYEAGPTGFGLARSLAANGIECVVAAPGKIERPASDRVKTDRRDAERLVRLLMIGGLHPVRVPSDAEEALRDLVRAREDVRGDLMRARHRLGKLLLRHDVRYDGAGDNWSPRHRDWLDRIELGDRGAQFTLLDYLGAIDALVIRRDALERTIGELVPASPWAQTVARLRCLRGIDTLSAVGLCAEIGDWERFGRPAQLMSFLGLVPSENSTGEQRRLGAITKTGSRHARRLLVEAAWHYRRPPRRSRELARRQEGQPAHVIALAWKTQQRLHRTWRRLDAERGKRRTIVAVAVARELAGFCWAIATTR

SEQ ID NO: 410570 - protein, 412 aa, unidentified
MKKIKEVSVLISVGVDVSKGKSTVCILKPYGEVLMSPNDYEHTQRDLKKLVDQMDSFEDEIHVTMEATGNYHYPIATYLKKRDYDVRIVNPLEMKRYRCQGIRNPKTDSIDAIMIAQYGIDFWFRSFQEYVASDERMELKTLGMQYFKTMKTRQDRYLVLESVIDRTLPGIGGVLNGYDKSTGKDKKSDFVYDFYHAEKITVYSENRFCDRYESWSKKKGYRYSEKEARQLYSIAKDSIPTLPSSKNTKLMIQDAVKILREVDSALYSILNQMNVIAKKLPEYTTVMEMKGVGISIGPRLIAEIGDPRRFHSAKALIAYAGIDAPPYQSGKFTGTERHMSKRGSRIMRKLGFELMDTINKHQKLYAGDPVCEYFLAKRNEGKKYRVAMFAAYNKFLRIYHSRVSSVLNESVK

SEQ ID NO: 410571 - protein, 419 aa, unidentified
MSFKILKNNCCGLDVHKTWIFACIGITDSRSRTEYKQARFSSFSKGLQELCDWLAKYNCTDVCMESTGKYWIPVFNILEKNNVWVTLSHPKYTKPQKGNKTDRKDARWICDLYMCGMVKPSFIPPADIRELRDLVRYRYKLTCMITGEKNRAQNCLTVSNLKLDEVFSDVFGKSSRSITEQILQHPGEIFDVTPFVDGRCKTPIEEIQAAVDGAVSTEQAVKLKQCLNHIDELEMHKAEIDREIFRLSDKYEEALILIRTVPGFDKNPMTAIQVLSEIGGDMSVFPTAKNLVSWAGCCPHNDQSNHKIKSTRISRAGSYFKPVLVQVANALIKSKKNPEFTTRYRRIKARRGHKKAIIAICRMLLTAIWHILTDLKPYTPEGFLESRPVNESKVLTTSQALNLLKQRGYIIKDDVVPVS

SEQ ID NO: 410572 - protein, 360 aa, unidentified
MLHGVDAAERVVLRKRLRRRQVLELFAQLEPTKVGLEACGAAHYWARELQGLGHEVVLLPPQYVKPYVKRNKNDAADAEAICEAMSRPTMRFVPVKTAEQQAALMLVGTRDALVRRRTQLTNAIRGYAAEFGLIAAKGLDKIEPLLARIAAHAPLPGLAQELFAAHAKEYARLQAQIREIEAKLRAWHKHNELSRRLAEVPGIGPIGATLAVMKVPNPKAFRCGRDFSAWIGLTPKDHSTAGKTRLGVITRAGDEALRSALVAGATAVIQHVKQGKGHPSPWLIELVRRKPAKLAAVALANKNARIAWKLMVSTERYNPAHGRAVAASGGRGPALRGGSAPRPPLAPHDKSREATATTRA

SEQ ID NO: 410573 - protein, 339 aa, unidentified
MHVTTIGLDLAKNVFQAHGIYKDGEVAFNRAIRRAQVLTFFERLEPCLIGIEACGTSHHWARELIKLGHNVKLIPPVYVKPYVKRGKSDAVDAEAICEAVTRPTMRFVEVKTPEQQAILAVHRTRDLIVRQRTQTINMLRAQLAEFGVVIPQGIYHALAFAKGWLNGEQPDLPEVAGDVIFGICDQLLFLHSKILGYSSQMNQIAKSEKRVALLRTIPGVGPITASAIVATVGSGKQFNNGREFAAWLGLTPINKSSGGKERLGHISKMGDQYIRRLLVLGMTSRIRSIRAEPEKFDPWFADILSRKPSKVAAVAMANKTARMILAVLIRNEPYKVRTV

SEQ ID NO: 410574 - protein, 427 aa, unidentified
MKTEDIRLEEFRNLKKEVRGSVGHLLVGIDIAKEKHNAFFGSATGKTFLKRFVFDNNREGFEKLLAETDALKQKYGLSQTVFGLEPTANYHKPLGEYLIYRDHEVVLVAGSAVRKNRELLDGRWDKHDVKDAANVADLIAQGKILYYENPGIEVRELRGLLSLKRKLKKQAQGLHLRIRNNLLAQYFPEMDQYYGTCEKDNLAMVSSCLSPAVIGGMEYNEFFKTVVSRKNGLRQHKHLYRIWQLAKGSIGCEAEEGAACEAGVLVALLKQTRQAIEQVEQEILKLCYTFSEYEFVISIPGFGPDVTAKVLAYIGDQYRFETARQVLKMAGFDLCAARSGKPSEKAVPVISKKGKADLRYALYQAAHVASIRSAHFKQYFAQKIRGREREKGIKAKMKVKLAAKMLVIAWTLMKNKELFNPEQVKID

SEQ ID NO: 410575 - protein, 429 aa, unidentified
MNEVDITRLDQFRQIKKEIRGSRDYLIVGIDVAKHKNYAFYGTATGDTLLKRMIFENSIEGFEKLLVHEDALKVRHGLRKVIYGLEPTANYHKPLGEHLIKCCRNVVLVAGTAVKNNRRMMDGRWDKHDTKDAAVIADLISQSKFLFYEYPSMPLRDLRNLLSLKRRLKKQEHSQKVRIRNHLLAQYFPELDKYYRSWGQEGLAIVRWCLDPSVIAGLEYEEFVHRVAPNGRGGIRQQERLRAVWKKAIDSIGCRAGKSLDIEAKMMVEGLKYIRESIREIEGEIEEICLDSPEYNYVLSIPGFGPDISSKVIGAIGNPLRFNNGRQVLKMAGMDLSANRSGKSSDNATPKLSKIGKADLRYALYQAALITSFKNIHFMRYYTNRIRGREKEKGIKTKMRVKLAAKLLIIAWTLMKKKEPFNPDYLNIE

SEQ ID NO: 410576 - protein, 359 aa, unidentified
MFTERTSVGLDVHARSVVATAIDTKTGELFKQRLVPANEVVIDWLHTLPGPVAVTYEAGPTGFGLARAMATAGIRCEVAAPSKLSRPAGERVKTDARDALQLARLLRVDDITSVRVPTVTQEAARDLVRAREDVRGDLMRARHRVSKLLLRHGHVYYGGQTWSAKHHAWLHRIRFADLGTRCAYEADLEAIDFAVARRDRLDATIAELAADSEFTDLTRRLCCLRGVSTLTGFALAVEIGEWQRFNGNSIGAYLGLVPSEHSSGQSRRQGSITKTGNSHVRRLLIEAAWHHKPRYVVGPVLRARWEQAPEPARARAHIGNQRLHDRWNSYTRRHKKHTVANTAIARELAGWCWSLATLE

SEQ ID NO: 410577 - protein, 391 aa, unidentified
MILVGVDVAKDKHDCYIMTSEGEVLFKSFTIANNMEGFNQLYEKILSVIDNFDNVKIGLEATGHYSYNILGYLLDKGLTPYVINPLHSNLYRKSLSLRKTKTDKVDSRIVASMLMSDVSLKPYSNTLYHNEELKSLTRYRFTKVQERAKLKISISRLVTILFPELEKLVPTLQMNSIYALLYEFPSAHAISKAHLTRLTNLLNTTSKGHYTKDKAVLIREAAKNSIGSNMPAKSLELKHTIKLIKELTSEINEIEEEIKIIMNKINSPILTIPGIGLSTGAQILAEIGDFKNFSSPDKLLAFAGLSPSTYQSGNMYSSNAKMEKRGSKYLRFALFNAAIYVSYWEPTFSQYLKKKRVEGKHYYVAISHVVKKLVRLIFHLEKTNERYSTVV

SEQ ID NO: 410578 - protein, 369 aa, unidentified
MKKNSKNSKENARRKALQARSGQTRLTVGIDLGDEWSQCCFLDDKGEIVEECRVKTTREAVKARFGELKPALIAIEVGAHSRWVSQLLSELGHEVIVANARELRAITGSDRKSDRVDAEKLARYARVDPKILRPLRHRGEPAQVDLLVLRGRAVLVKTRTQIVNSVRGMVKSFGYRMPTCSTEKFAQLKGLVPLLIKESLAPMMEALEQVQKKIEEYDERVKKLATEKYPETKVLRQVWGVGEITTVSFVLTIEDKERFGKSRDVGPYLGLRPRRSQSSESDPELRITKAGDCFLRSLLVECAQKILTEKAPDTALKQFGKRIEARGKKKAKKRAIVAVARKLAVLLHKLWVTGEVYEPFPGARERKAA

SEQ ID NO: 410579 - protein, 366 aa, unidentified
MVYKRLNSTGTLIQRTTTEAPQGHMYYIGLDVHKKTISYCVKDASGQVHQEGKVGATRWELDDWMNTLPQPWTVAMEATIFTGWIYDHLLPHAQQVKVAHPLMLRAIAAAKKKNDRIDAGKIADCLRCDFLPECHMASTAIRDRRRTLRYRHLLVRQMVQMKNRISGLLMETGVSHNKKRLHKVGYFRELLTANEEVQESIRPLLRVSRDTIVRLQKTEYALVSSLQRDPLLAERIKRLRTVPGVGPITALTWALEMGDVSRFPSIREAISYCGLCGDEKSSADKVMRTPLSKQRNKHIQRVLVEAAKLAPRQDHNLALVYEREKQKGNANRATLAVARKMVAYLLAVDRGQRDFVPFPDSQSAAA

SEQ ID NO: 410580 - protein, 410 aa, unidentified
MSESPYAFYVGVDWASETHQFTVLTPERHLEAERRIEHTGRALSEMADWLTALADGEPARIAVAIEVPRGPVVETLLERGFHVFAINPKQLDRFRDRHSPAGAKDDRRDGFVLADSLRTDRPAFRQVHVDDPLLIQLRELSRAEEELQTELRRLSNRLWEQLQRFYPQVLRLSPAVDEPWIWALLQLAPTPVAARALRRATLARLLARHRIRRVTAATVLAELHSPALRVAPGTTEAAREHIALLLPRLQLLHEQRGRCARRIEQLLDALEGSDAEHRDVTVLRSLPGVGRVIAATMLAEAARPLAERDYHAVRTQGGVAPITRQSGKSVLVSMRYACNHRLRNALYHWGRVSAQHDPSTRRHYRALRQRGHGHARAIRGVIDRLLVVLMAMLRTGTTYDPARRRVPAAA

SEQ ID NO: 410581 - protein, 425 aa, unidentified
MKNNFMSTLFVGIDVSSRTNVLCALNFQGDKLLNLKALNNQPGAESILDSILGCLNSNGLEYVVIALESTSFYSTHIANFLSSSEELLPFKPLVYCLNPKSVANYRKSFVDIDKTDPLDAFVIADFARCGRITSEPWRGAQFLALQRLSRHRLHLVECITREKTYMVSNIYLKFSELAVLDKDEKPFSNTYGVTSAAVLTEFLSLDDITYSSIEDLVAFVSAKGKNRFSDPYETARLLQKAARDSYRLDQVLYEPLNTSIASSFNLIKAFDDEIKVVDKAIEKTIKGINPVEYQSLTSIPGIGPVLASGILAEIGTITSFGSHDSLAKYAGLTWRVNQSGDYSSDDTRMTKTGNKYLRYYLIEAANSVINHVPEYRDFYNKKYGEVTTHCHKRALALTSRKLVRLIFGLLTKNQIYSSGKVGEIQ

SEQ ID NO: 410582 - protein, 403 aa, unidentified
MEGPLISLDVSKGKSNYRFFENGTDRKGKKGVIRHDIQGFDSIRDEAEKMEERLRIKPSVIFESTGVYSDVVEKYFTDKGFDVYVISPLLSASMRKEGVRPAKNDSLDTLSIAKVFYSKDDLRKCSENDKKAERLREMSYELDMMNRRIRPMKCQFLRLLDKVWPCLDEVSDYSSRFMLDFIIAFGHPENIKTVKGVLSVIRKSEMGTAGRKDKIAQDLFDYCHTHLSAVSKDSSYVELLKRMAIELKAMAKKKSELIDRMAEEARNKDEFARLLTIPAVAKTTALKIMARVGDISRFRNAEALVAYCGLDPRVYQSGKMTGEHRTITKKGDCILRSTLFLAVKLMVMLYPDTKVARFVAAKAKNGLSYKQAVVAGSAKLARIIYSMLTHHENYVEFNADIVA

SEQ ID NO: 410583 - protein, 413 aa, unidentified
MKRVRDRVGALDVHRDSVTAACRSVDVGTGEIIEDVEQFSTMSGGLVRLGGWLLERHVTTVAMESTGVYWKPVYYALEGMFEELWVVNAQHVKNVPGRKSDIADAVWLADVVAHGMVRASFVPPQPIRELRELTRYRKTQIEARSREIQRLEKVLQDACVKLTSVTSTVWSKSSRAMIEALIAGERDPAVLAELAQSRMRSKIPELTDALAANWRRQHSFVARRIIAHIDFLDTTIAELSSEIAERVTPFDELIERLDEVPGIDRKIAEILIAETGGDMSRFPTPEQLCAWAGVVPGNRESAGKRRPAGTRPGARWLRRALVEAAWAAVRTKDSYFNAHYHRIARHRGKNKAVVAVAHSILNVCWHLMNDPQLRYQDLGADWFQRHQDPKRKADRLVKQLAELGYRATLEPAA

SEQ ID NO: 410584 - protein, 412 aa, unidentified
MEVVYPCCCGLDVHKKSITACVLWAEVKGKSRKQKKRFGTFTHDLLQLADWLAECGVTHVAMESTGVYWKPVWNILAEQFEALLVNAQHIKAVPGRKTDQKDSEWIADLLQHGLLRGSFVPSQPTRELRDLTRYRVSLVQEINRIANRIQKVLEDANIKLASVATDALGASGRAILEAMLAGEQDAGRLAEMAQGKLRNKIPELQLALEGRMTEHHRFLLRQLFEHLRFTESKRSDIEQEIGRRMLPFEDKVTRLCTIPGVDRVTAWGMLAEMGMNMNQFPSSGHLASWACLCPGSFESAGKRLSGKMRKGNVSLRRCLSQAAWAISMMKNNYLSALYRRIAARRGAKRAVMAVAHALLEIAYHMLKRKEDYRELGADHFDRIDVNRIRRSLVRRLERLGHKVTLEPLAQTA

SEQ ID NO: 410585 - protein, 387 aa, unidentified
MAHAPSIPLTAAVDYNTTLILALETSNKNWVMAAHVPGTGMVKAKQVIAPNAAALEVAIEGYRRRAAAGGQTVERVILVYEAGYGGFWLARWLKARGIEVHVVQPSSVPVERKRRRAKSDNIDVELLLRTLLAWLRGEPRVCSMVPIPDEAAEDARRPSRERDELVRERISLTNRIGAVLTTLGIDGFNPLRKDRRERLEMLRTPFGQPLPKHAKAKIVRSLDRLELVMAQITTLENQRDAAVLAQDAPDEAARMVQALVLLRAIGAQSATVLVYEAFVRHFSNGKALGSYAGLTGTPFTSGGAEREQGISKSGNQRLRATMGELAWRWVRYQPDSALSQWFRDRLADAKGRMKKILIVALARKLLIALWRYVTHGVIPEGAVLKPV

SEQ ID NO: 410586 - protein, 325 aa, unidentified
MNEMTSPNFVGIDVSKARLDVAVGEKGAQWSERNDAEGIAHLVKQLTEIHPEMIVIESTGGLERPALVELVEAGLVVAMVNPRRVREFARAIGLSAKTDKLDARLLARFARDVKPARTVLPTADEQQLSALLDRRKQLLDMLTAEQNRLGTTPQALRELILEHITWLKEHIQAIDTDIDDFNRQDPQRQEKQALMQSVKGVGRITVSTLSADLPELGQLSKKRIAALVGVAPFNNDSGRWRGKRRIKGGRASVRQVLYMAAVAAARSNPVIRTFYQSLLERGKEKKVALVACMHKLLTILNAMVRDHQVWHDPLPICASPSLSHA

SEQ ID NO: 410587 - protein, 340 aa, unidentified
MSLVMGMDQHRAQISAEWVDTITGEVSRARVAPADRTGVRAFLAPFTGSGLEVALEATTGWRFLVEELERVGATVRLAEPAEAAALKGKKKRAKTDWADARHLRELLLIGRLPQSWIPPAHILDLRARVRTRHLLSHQRTEWQQRIHAVLYHHGVRQQRDLLTLQRREWLAGLTLPAAAREQLTIALSVIDALDLKLVPFDADLRAYARKQPATRALIDQIYGVGGLTAVTILAELGDARRFANSRDVVRYAGMDITVYQSDAHRAPGHLSRQGPPALRWALYEAAQRARFPNSPDRPYYDQLAARIGGNRACLALARKLLKRSYHILKALGDEALAPVP

SEQ ID NO: 410588 - protein, 412 aa, unidentified
MQIVYQRCAGLDVHKKSVIACLITPTPNGERHKERQTFSTMTPDLLRLRDGLKEQQCSQVAMESTGVFWKPIFNILEGHVEVMVVNAQHIKAVPGRKTDIKDAEWIADLLQHGLLRPSFIPPSWQRIVRELTRSRTSLIEERSRVVARLHKELEDANIKLTSVASDLMGKSAQHMLHALLEGDLTPEAMAEFALGRMYAKREQLVQALTGHLQPHHRFLLAQHLKHISDLQDAIARLSAEIAERLQPYEELLRRLETIPGVKRRLAEIILAEIGPDMQRFPSAQHLASWAGMCPGNHESGGKRLSGKTRKGSQWLRTALVEAAHAASHSKDSSLSAQYHRLAFRRGKKRAAVALAHTLLIIAYHVLARKQEYQELGGTYFDELDREQKEKRLVRQLEKLGFEVALTPVSSQA

SEQ ID NO: 410589 - protein, 417 aa, unidentified
MKCFVGLDVSSTKLDVCIMLSDTTTPFTASLTNDLVGASEIKKQILELNDSYSFERIVIGMEATSLYSFHPAMFFHEDSDLKALKVEVMVEQPNKIKKYREAFEENKNDTLDAFYIADYFRIERFSPAFLKEEKYMALQHLTRTRLQLIEQLTKTKQHFIENIYYKCNTLSTEIKNENLSTNLWSSTIISLMTEDYSLDELATIALEDLAEFLQKLGRGRFKAPEKLAKAIQAAIRGSYRLSKLQQDSVNVILGLLAREIRNLEQMIKDIDKAIEDMVEVIPEYQCLTSVPGVGKVYAAGIIAEIGQIERFKDHPQVAKYAGLNWKQYQSGNTNSQNTELVKRGNRYLRYYLVEAANSVRRHDSEYQTFYMKKYQEVPKHQHKRAIVLTARKFVRLVDALLRNRQLYTPPRRLMEDR

SEQ ID NO: 410590 - protein, 358 aa, unidentified
MINLKYSIGIDVSKKDFHCCLSIINSSQKVTVKSSRKFSNTSVGFRELLAWIKQHKKEDLPLRIVMEATGVYHEQLAWFVHSNGLVSSILLPNKAKKYLQADGLNSKNDSIDARGLAKIGAEKNLEPWIPGSEKLYELRQYTRQHQNLKEAINVIGNQLEALHHGQFQSKEVTKQLNKTIRLLEKQVTEMEKSMENLIRTDRVLNLHYKNITSIKGVSLLSFCVVVAETNGFTLFKSSASLVKYSGYDVIENQSGKHVGKTRISKKGNPRIRRILFMPAFCAVRDDQPQFKNLYERVVERTGFKMKGYVAVQKKLLVMMYHLWKNEQQYNPQFNSEEKIIAPEKSGATHDKIPEGSFH

SEQ ID NO: 410591 - protein, 366 aa, unidentified
MDKLIRIGVDTSKSVFVLHGVDAAEKPALRKKLRRRQVIEFFGKLATTKVGVEACGAAHYWARELQALGHTVVLLPPQYVKPYVKRNKNDAADAEAICEAMSRPTMRFVPVKTAEQQAALMLAGRRDALIRRRTQLTNTIRGYAAEFGLTAAKGLAKIEPLLARIAASATLPELAKELFAALAREYAQLQLQVRRIEAKLMAWHRHNELSRRLAEVPGIGPIGASLLAMKVTDPHAFRSGRDFSAWLGLTPKDHSSAGKTRLGVITRAGDDALRSVLVVGATAVIQQVKRGRGHPWPWLIELLKRKPPKLAAVALANKVARIAWKLMVSGERYNRARILAKLTANEARATAQHGASLREMIAMTNA

SEQ ID NO: 410592 - protein, 310 aa, unidentified
MEPIYVGIDVAKGRLDVHVQPSAEAFAVARDGEGLAALVERLAGLAPALVVLEATGGFEQVVAGALAAAGLPLAVVNPRQIRHFARATGRLAKTDALDAEAIARFAEAIRPEPRPLPDEQARALAELVARRRQIVEMIVAETQRRRQLSQRRVLKALDRHLTALQKDLAAIEQDLDETIRGTPAWRDTEDLLKTVPGIGPTVARTLIAELPELGRLDRRRIAALVGVAPINRDSGTWRGRRRIQGGRARVRAALYMAALSASRANPVIAPFYKQLRRAGKTGKQALVACMRKLLTILNAILRDQRPWQNA

SEQ ID NO: 410593 - protein, 415 aa, unidentified
MISVGIDVSKGKSTVCFLAPYGKLLKKPFDVTHDKEGLSVLVTMLKELDGEIRLVMEATGVYHLPILLYLKEYDFFISVINPYEMKAYCTCGLRRAKTDKQDAIKIADFGINNWYRLKNYEVSDDVYSELKLLVRRYNHYMRMHVESILELTHLLDYTMPGIKKLLQGWNEATNKDKLSDFVETYWHYDNITKFSEEEFVEEYIEWAKEKGYQSSQSKAVKIYAVAKTSIPTVTSNTSSVKMLVQEAVRVLREINKTLKKILTQMQQLAKRLPEYSLVRKMGGVGDVLAVKLIAEIGDVKRFHNGKALIAYAGIDAPPYQSGQFTAKERKISKRGSASLRKIGYEVMRCLKSHAMPEDSAVYEFILKKELEGKSKRAAKIAGLNKFLRIYQLCELPRYLQQQRLSFRPSGCYLHR

SEQ ID NO: 410594 - protein, 371 aa, unidentified
MKQDNTKFIGMDVHKNTISIAIADGPRKGELRSYGTIPNDIKSIDKFIRKQISMGNKLHVVYEAGPTGYGIYRHLVGNGIECIVVAPSMIPKKSGVRIKNDRRDALTLARLHRAGELDAIYVPDPEDEAIRDLLRGRDDARIAVRKAKQRLLSFLLRHGVIYTAKTKWTTAHFNWLSDVKMGHPAQQITLQEYIDSVHESKQRVTRLTQVVTATVKTWRMRPVVLAIQALRGVSELTAAIVVAEVGSLERFSTPTKLMAYLGLVPSEHSTGETIKRGGITKAGNGYARRALVEASWTYRFPARVSRHLLKRSRDLPRNIQNIAWKAQLRLCNRYKRLTAKGKPKQVVTTAIARELIAFIWAISQEVKVSKK

SEQ ID NO: 410595 - protein, 338 aa, unidentified
MPLYGGIDLHANNSVVVLLDEQDQMIYQQRLSNHLPTILDRLAPYHAEIKGVVVESTYNWYWLVDGLMEADYRVHLANPAAMQQYNGLKYTDDYSAAHWLAHLLRLGVLPEGYIYPKAERAVRDVLRKRSHLVRQQTATVLSLQNIIVRNTGVRFSAKQIHALPLEELERLLSEPDQILAVTSSLAVLHCLGQQIKTLEKAVSKRLKHTPAYEQLQTVDGIGTILAQTIVLETGDIGRFPSVGHYASYCRCVGSTKISNGKRKGQGNVKNGHPYLGWAYMEAAQFAIRFSPTVQRFYQRKQAKSHLMIARKAVAHKLARACYYMMRDLVPFDVHKAFG

SEQ ID NO: 410596 - protein, 425 aa, unidentified
MNSPSDQASGGWLENRGFGALDWASQKHSVVVVDPKGKVLEDFEIDHSALGWKKFRERMKPYGSIPFAIETSQGAAVEQLLEAGMQVYPLNPKSAQAYRQRKAPSGVKDDQLDAWSFADALRVDGQNWKPLRPEDFLIKELRLLCRDEVGLIEQRTAFINQLRHALAEYYPTALEAFEDLGAMSAWMFLQRFPTPQLLEKAGKRQWEKFLHSRHLWRNESGPRRMELFAKATEFCGSEPTANAKSMLALSLVKMLFALDNQLAEYRKRIEELFESHPDHDLFGSLPGAGPKLAPRLLGEIGDDRERFEGDAQNLQCLAGTAPVTKRSGKHRECHQRWACNKYLRHAVHLFSEHTIVRCAWAEIYYKAHRAKDHSHARALRCLGQRWLKIIHKMWMDRTPYNAELHHLNQVKHGSWVFQLKTVNCK

SEQ ID NO: 410597 - protein, 497 aa, unidentified
MIVHEAPFPCEPGDAQQAGHRALARCQNGTNQKHLGVAPTPLEKEWRKAQDHRGEAGRQKKHGGVSWPGRIHPSRSARAAAFPGSNAQRYHAGRQGLGQYLGSSKPEGSSPMSQIKYVVAPQDGAVVFVALELSKSAWLLAAQAAPSGKVSSHRLDGGDTDGLLALLRRLQARERAADGEEVQIVLGYEAGYDGFWLQRRLTAEGITCWVMDPGSLQVDRRARRAKTDRLDAAMLLRALMAWYRGDRAACNMVQVPSVEREDARRTHRERQRLIAERVQHVNRVKGLLATQGIYNFQPLRQGRWDRLGELRTGDGRDLPSRLRREIEREFTRLELVLEQIAASEAERDAAVAQPVAEDADVEKVALLSKLGGIGTELATVLVREALYRSFANRKEVAAYAGLTPSHFASGDRQRDQGISKAGNPLLRKSMVELAWPWLRYQPESALAHWFTGRVGEIRGRMRKIAAVALARKLLVALWRYVTTGLLPEGARLKTASV

SEQ ID NO: 410598 - protein, 377 aa, unidentified
MTGGNDDDRPSWIDVDKSSIAVTFIDHTQLLRSLRLPYSSEQLLNYVRKHFPQQRVAFVYEAGPTGFGLYDDLTAAGHPCLVVAPSMVPTAPGQRVKTNRLDGKKLSMGLRGGELRSIHVPSPTYRELRHLVQLRDTHVRQLTATKCRIKALLLYEGIAFPGVGNQWSALVLRELETLACSEAVHFKLELLIGTLHFHFNLAAVVQKRIRRFCQADPELRQSISFLTSIPGIGWIVAAHLVARLGDWREIDSVRSIAGFLGLVSSEHSTGDKENRGPITRAGDSRLRNKLIQSAWITIGKDPELRAFYRRIYQRHPKKVAARKAIVAVARKLTTRIYAVLKEQRPFVLRPDNSTAPLTAEETAALRERLDGAQNEQP

SEQ ID NO: 410599 - protein, 412 aa, unidentified
MNRLIERCAGLDVHQASVTACVRVPGGGGDRHQEIQTFATTTTGLLGLGDWLQSFGVTLVGMESTGIYWRPVFYLLEDHFECWLLNAEHLHNVPGRKTDVADAAWICQLIEHGLIRPSFVPPKPIRELRDLTRYRKALIEERARQVQRVHKVLEDAGIKLSSVASQVLGISGRAMIEALVQGTRDPEVLAELAKGTLRRKIPQLREALQGRFGSHHALLASEMLALIDHIEESIKRLSDQIEEVIAPFAEEVKLLDTIPGVDRRTAEVIIAECGPDMTRFPSASHLASWAGMCPGNNESGGKRRSGKTRKGSKWLRKALVEAAHGAARSKGTYLSAHYARIRGQRGPAKAAVATGHSILVIAYHLLSNNQPYSDLGADYFVQRQTKTAYKNRLVRQLERMGYDVTLEPVQAA

SEQ ID NO: 410600 - protein, 329 aa, unidentified
MLGIDVSKNQLVCTLFDPATKQQLWVCQKPNNSTGVKQLLRRTPPQAAWVLEPTGRYSHTVAQQAVAQGREVLLAQPKRAKHYLNSLQSRAKTDRLDSYGLGLYALNCALPPYPLKSAMAEEIDQLQTARKGIGKAIASLNQRVAELPYAADELGTAVKALEEQRNEMDRRLAQLTRQAKERAMEPDATPYESCWIALPQLRAVPGIGPVVATAVLSCLSTHHFARADQFVAYCGLDINIRQSGRKRGQMGLTKQGSAELRRLFFLAASASLIAKDSPFKAQYERELAKGMSRTAAICAIARKMARLCWSLAMHGTAYDPQRVYQQPKN

SEQ ID NO: 410601 - protein, 376 aa, unidentified
MRTIAIDGLPACLNPDPDSRLTSIVKVVRLSSIPFFPKRLKDKSMESFYFIGVDVSKKKLDFCVMFEGEVVHEEKTANHPSAIMALIHHLEENYGIEGSRMLVCAEHTGQYTFPLACACKALECKLWLQNPAEIKYSSGVQRGKNDKVDAKRIAIYACRFQDKVQYYERPTEDIERLKQLESERTLYVNDLAKYKGQLNDQKDYMPKDLYERKIKRLQALMEDLEEAIQAITEEMDEVINSCPVLSRQKELLMSIDGVGRVVATNMIIVTEAFTRFEDPRKFNCYAGVAPFSYSSGSSQHSKARVSHRADKVMKRLLHLAAVAVTHRVGGELKMYYERKVAEGKNKMSVINALRAKIVARMFAVIKRNEKYKPILS

SEQ ID NO: 410602 - protein, 407 aa, unidentified
MELEALHKRVVGLDVHQAQITACALIEEADGSTRIERRQFGAFQRDRRELADWIASLHPDEVVMESTGIYWKSPYAALEKVGVRAKVVNARHVKNVPGRKTDVADAHWLAMLSRAGLLRGSFIAPAPLRELRLLARQRQKLVGQLASEKNRLHKVLADGGVRLGVVVSDLHGQTARAMVKAIIAGQSPHEILHLAGRRLKASREELFDAIQGELTASHCFVLDELMRHIEEIEARIARFDARLLDGLRSEHHALALLQTVPGIDLIGAAMLLVEISTDMAAFGHPDRLASWVGICPGNNESAGKRKSGRARKGNPYVRRLLCEFAHAASHTQSVFKAKFQALLPRRGYKRSIIALAHKILRTVYFILKRREHYRDSVVDYEALAVQRNAPRWIKALVKHGFLNPASA

SEQ ID NO: 410603 - protein, 380 aa, unidentified
MDVHSKNYTLCAMEPTIGAEDRIFGEVQVAPDYKEVICFIESLKMKLGPDNKYSIECGYEAGCLGYTLYHQLTGAGVKCVILAPTTMLTQQGKRIKTDKRDARLIAQCLCYGGYHPVYIPTGEDDAVKEYLRMRDDHKLALKKLKQQINAFVLRHGQQYSGTKWTIKHVTWLKKLELDPMYRETLDEYLASCEEQEAKIERYDKRIEEIASEARYQENAKKLGCFLGIRTHTALSLIVETGDFKRFAKGNTYAAFLGLAPGERSSSENVNRLGISKAGNTHLRCLLIEAAKGICKGAIGHKSKELRSRQSGQPAEVIAYADKANTRLRSRYYKMIRHGKKKNVAVAAVARELACFIWGMMTGNISIRPTAGTSGPAASQG

SEQ ID NO: 410604 - protein, 353 aa, unidentified
MSYYAGLDVSMKDTSIAIVNTQGKIVFETMCKTDPEVIAKTLNDSKFIFEKIGIESGCISFWLIEELKRLSLKAICIESKQMATIIALKINKTDRNDARLIADAMRCNLYKEVYLKTKKSVDVSLQMGARRTLVDVRTKLKNSTRGFLKAYGIRLGGISHVKFSEGVRRAVKNCEQGVQVAVEGLLNSYEEVCKSIESAEKEIEKLCKTDPVIELFESIPGVGTITALTYKAVIDDPFRFTDPRDVGAYLGLTPNQYSSGDTVKQGRISKCGSGELRTLLVECATVILTRTSGWTKLKAWGLKIMRKSGLKKAAAAVARKLAIIMLRMWQEKKGFIWGEKKEKTQKDIRAVTV

SEQ ID NO: 410605 - protein, 414 aa, unidentified
MRRLLDRCAGIDVGQALLVVCVRVFDGKGTLAQQVRSFGATTPDLMMLRDWLISLGVTHVAMESTGVYWKAPYYMLEDHFEMLLVNAAHLKHVPGRKTDVIDAQWIAEVLSYGLLRPSFVPSPPFRELRDLTRYRKSLIRARTGEVNRLHKVLEDAGVKLATVATDVMGVSGRQMMRALIEGVADPQVLADLAKARLRAKLPELRRALTARFREHHAFLLARMLAHVEALEADIGVLSQRIAELTEPWAAQLAILDSITGVAPRAAEVILAEIGPDMSRFPTAGHLASWAGRCPGQRESAGRRGSATPRKGSPWLADVLTECAWAAVKTKDTYLSAFYRQVMRRQGKQKAIVAVTHKIVVIAWNLLSTATVYQDPGAAVLRKTTDEQVRRRALRQLEALGLQVTIQPQHQGAAA

SEQ ID NO: 410606 - protein, 352 aa, unidentified
MSDFKNLVFVGIDPHKEEHVAVMIDHWGKVFFELTFPNQVSGFETLLEHVDTHTPDGKTTVFGIEDTGGLGRSCAQWLTLRGQLVKGVNPIMSSNKRKRYPHRTKTDKIDAVAVAKVLITDFTQLPEVLVDDYYHGLRQLANRRDQLTRTSTRCKNQLHKLIHDHYPNYKEFFSNPFGVTALGFWNKYPHPSMSKGAGTKRLASSLNKFSRNMGSTKAENILALVDKEQALTIDAKMTMIVIRQIIEQLQQITNHLAELDELIKEALGQSDTQLETMPGVGPVTALNVLSRVGPIGKFSSADKLARHAGIAPVDDSSGPKTRQKRRLCDIIYAMLRDKTPYIEPASRPSSAA

SEQ ID NO: 410607 - protein, 325 aa, unidentified
MQTQTNYTGIDISKSFFDVAVPNEGQYKYYKFSNDEVGFKALLSVISTDCHMVMEASGPYYLKLACFLTDRNIRISVINPLVIRRFSQMRMSRAKTDKKDAKLIAEYGKTEQPVLWQPPQQHVIIMQQMEALLCNLKKEHTGLSNQLSSFESSGMLDKQLKKVIAKELLHKEALIEKLTKQMQEITEIHYAEMLACLKSIPGMGKQTAMTLIMLSGGFDKFDDYRKLSSYIGICPRIFESGTSVKGKARICKMGMSRIRAMLYICSWSASRCNRACRDLYQRLLAKGKAKKLALIAVANKLLKQAFAIAKQQTKYQENYSNYFCF

SEQ ID NO: 410608 - protein, 345 aa, unidentified
MQTTITGVDLAKKEIQVCVCKHNKVLSNQAMTPTQFASWLASSKPMTIVFEACSTSNYWKQMALKYQHDARLISAKLVASVRQNQKTDKNDALAIAQAAQLIDVSFINGKSKEQQELQTLARLRELAVKHKVATENQIKSLLLEFNIRISPRQGGLSGVVQAVLEDAENGFSMVFREALKTAWEQLMQRIDSVKKYDAYLEIAANQHPVCKSLQALEGVGPLNAVNLYIVLGCEEMGQFKKGRDASACIGLTPAQHSSGGKVKLGSVSKYVKNHTIRSYLVCGAMAVVNQTLRRIAKTKKDLWIQQMVARRGKRCTAVALANKTVRTAFAMITKGTEYKAELLAA

SEQ ID NO: 410609 - protein, 405 aa, unidentified
MKVYIGIDWSEKKHDICFMQEAGEVLRVLQIEHSMEGFVKLDAARQELGIGAQECVVGLETAHNLLVDYLWDQGYSQIYVLPPHAVKSAQGRFRQSGAKDDPWDARLIADILRTDQKRYSPWQPDQVLTRQIRAEVRFAGQLSREVVRSSNRLRSILLRYYPAATQTFSSLDGQVSLAFLQAYPTAKQAEALSFDELKAFLRTHHHTQPRSWPRIYARLHSNAPQPNSAVEATFMPLALAQARILEQLVKARSEGLARLEKLYDQHPDQKIYASLPMVGGFLGPALLAKLGDDRERFPTPAVLQAVAGTCPATNRSGKHSHVYFRQACDHEFRHIVQQWARLTLTSSPWAVAYYTTVRPHCHSDSDAIRRLANRWLEILWRLWLDKKPYDEALHLRQHALRSKAR

SEQ ID NO: 410610 - protein, 358 aa, unidentified
MNSCKYVALDVDSANIVAGVFDSKGKSMMECFIKTNSTAVRQFFKLLDGTVHVALEEGTQAGWLYDLIRPLVAEVIVCNPRRNKLLQSGNKSDRIDVKKLAKLLRLGDLHSVYHGEQPIESLKQLVHGHQTLVEDSTRTMNRLRAVFRSRGIKFNSTAYSQDTRQLWIEKLDIQTAQIRVGYLYKELDCLMKLRNEAETTMCRQARTHSAYKLIVSVPGLGPVRTAQIIAVVGSPQRFRTKRQLWPYCGLAVVTRSSADYEWVGDRAMRRNKPTQTRGLNNNFNRTLKAVFTGAALTAIGSNKEFKQCYQRLIAKGIRPEMARLTVARKLVAVTLTLWKKGEKYDPERLNQAAGAGDQ

SEQ ID NO: 410611 - protein, 342 aa, unidentified
MDRFLPVIRIRKVGFTMEYELHFIGIDVAKTKLDVDILRPDGRHLCKKFANTPPGYEDLVRWLRSHEVSHAHVCMESTSIYMEDAAAHLSDAGYTVSIINPSLSAAFARSEGLRNKTDKVDARMLAHFCREKKPPAWEAPHPTERALKALVLRHQSLTEMQTQEKNRQETAPEVQLESIDVLLQCLGAELRRIEKQIKDLTDNDPDMKQRRKLLSSIPGIGEKTAAVLLAYTGLKLRFATARQFAAYAGLTPKQHESGSSVMRTSRMSKAGPVHLRGALYMPAMSALYHTAWGKAFRERLEGNGKRPKVIIGAMMRKLAQVAYGVLKSGKAFDALQHEMPVA

SEQ ID NO: 410612 - protein, 355 aa, unidentified
MQPMKYYIGDDAHKKYSVFSVINERGVVSSSEKVPHDKGLYQKYLKTLPAGSPIAIESVGNWYWMIQAMEEAGHTPILVHPRKAKLMMGMINKTDKLDARGLALLNLNGSLPQVWIPPAELRDQRELSRMRMALVEVRTKFKNRIHATLAKYAITIEEVSDIFGPRGRGLIEAALQELPVETRQSVREQLRLLDQVSGQIEQVEAHIREVVKENPMMQIIKSLPGVGDILAIVIALEIGTVERFSSAEHLASYSGTVPRVNSSGGKTHFGKVRPDVNRYLKWAYIEAANCVALQQKQLAGRHVVTLLQRIQKQKGYPKAAVAVGRHLAEATYCMLKHNVPYREPHFKGTVLSSQG

SEQ ID NO: 410613 - protein, 421 aa, unidentified
MGKLIERCAGIDIGKRFLVCCVMTGAAHEDPRSETRRFDTTVPGLERLRNWLKDEHVTDVVMESTGSYWIPVFNLLEGHVRVVLANPEEVKNRKGHKTDRKDAEHLADLLRHNHIRPSYIPAEPVRQLRDLTRRRVQLTQDATRERNRVQKLLEQVNVKIGSVLTDVFGVSGLQMLLALLEGRTVPEEIAGLARGSAKRKIPQLIEAIEGNRMSDHVRFLIRGCLRHLACLEEEVEELDTEILRRMQLSTFQKAFTLLQTIPGVGQLSAATILAETGPDLDSFPTIEQMASWAGLCPGNRESAGIQKGPQTTHGNPYLCTALVQCAWAATRKRDSVFRSRFQRLAPRRGEKRAIIAVAHHMLIILYCMLKRGVPFLGAEHAPKQRRRERRAHHHLRCLRRLGFSVDIKLSSESTPPDTISR

SEQ ID NO: 410614 - protein, 411 aa, unidentified
MRVHHNVCCGIDVHKKSVTVCLMWGPADKEPQFEIRRFGTMTRDLQKLAEWLKQAGCEAATMESTGSYWKPVWNVLEGQIPKLILANAQHVRALPGEKTDRKDGKRLAELTRHGQIRPSYVPPRAILELRDLTRYRNKLLSAGSSERNRVQKVLEDANIKLGSVLSDMFGASGQKMLQALVKEDTVDTAKVAQLAHWSLKPKIEAIQHALEGKLTDHHRFLIGASLQHMRFIEEQLVRLDKEIQRRLQPYQEEYALLQTIPGIKETGAARILSEIGADMSPFPDGDHLSSWGGACPGNNESAGKKFQSKIRKGNPHLLAALTECAWAATKKKDCHFRNKYYRLKSRRGSQRAIVAIDHAMLKCIYVVLSQRKPYEEPKPTSLTQAQKERKASSLCRQLRALGYDVKIQKAA

SEQ ID NO: 410615 - protein, 341 aa, unidentified
MDKELYFGVDVSKKTLDLAYYDGETIDWKNAHIKVSNDDAGFKKIGSWVAKVGKDFDTFLFCMEYTGLYNQNFRLWLESKEYIYGMVEPRKMHRFEPDLDDDQRSLDRIKTDELDAFRIAIYCEQNHKKILRNPSKLPSSVYFKLKRLLAERKQNTKQSVLYKQQLHNICAYDTDLSVERKKLLLKNMQENQKAIDKEIDSYMNEDTSIRKNYNLLTSIPGIGRIIALETIVLTENFTAISNPRKYACYIGIAPFKKESGTSVRKKTGVSKKGFSEAKADLSIAVLSAIKNNPSIRDYWIHKRKEKCGGIVLNAIKFKLVLRMFAVIKRGTPYVETDAYKN

SEQ ID NO: 410616 - protein, 341 aa, unidentified
MKNLFIGVDFSKEKVDVAIIFADGLTETAARVFNEFKTTVSGYKQLVKWVEQNSYGIDSSLWLFCGENTGDYSKGLCNFLYGKGYDMWLENAKSIKDASGLRRLKSDRADASMIAEYAMRNYDKAIMYEPLSESLAQLRELFLYRQMVVRHRCSFQVRRGEKRLTMEKSPIKTMISQSGRHIVSELNKEVEKIDKRIAELIKSDEELTEVFTIVTSVPGIGTQNAVSLMVYTDNFRRFNYDSRKIACYYGIAPFGKDSGTSVHSDPRVHYMANRQIKAMLTQAALAAVNFNPVMARYYMRLVERGKKKQVALNNVKNKLVHLITAMVRNRQLFSPEYKISA

SEQ ID NO: 410617 - protein, 428 aa, unidentified
MEQIQPIVKAEPEPEFAALVAIDWADQKHYWSLQVVGQKGLQRGTLDNTPEAVEVWIMELHMRFGGRPLAVALEQRRGALAVMLSKYAHVHLYPVHPTTLAKFREAWYPSRSKSDPSDADLLLEILTAHRSRLRRLDPDTVEMRFLQNLVENRRKLVDERTALSNRLTDLLKLYFPQILGWFNDVASAVVGDLLQHWPSLQDLQQVKPAKLEKFLRDHHCSEIPERLTQMRQAIAATHDRALLDSAPYLVAAWVRQMAVLRESIRQLEKRIAERAAQQEDWHIFQSLPGAGAALAPRLMVALGTQRDRYCSAGDLQSFSGIAPVKEASGNTQWVHFRWACPKFLRQTFHEWAACSIAQCEWAKAYYEQQKARGKQHHVAVRALAFKWMRILYRCWKDRQPYREEIYLASLAKRRIAMVAALAQASQMP

SEQ ID NO: 410618 - protein, 461 aa, unidentified
MVAVMEPQEIDDEEHEQVLERVAAVDVAKASGMVCTRVPHQSRPGKRRTRVWPVDATTNAVLELADHLVAEGVEKVTLESTSDYWRIWFYLLESAGLDVQLVRAQDVKQAPGRPKSDKLDAVWLAKLTERGMLRPSFVPPAEIRRLRDYTRLRADLTCERTRHYSRLEKLLEDALIKVSAVASSLAAKSVRDMLEALIGGERDPKILASLARGRMRAKHDRLVQALAGRFDDHHGELARLLLDQIDTLSAQIGRLTTRIEELIAAIPPAQGIDADGTTGPAAGHGKNAPVLPAVDRLDEVTGIGRGGAQAIIAEIGLHMSVFPTAAHLVSWAKISPQTIQSGTRSRAGHTGKGNPYLRGLLGEAAAAAGKTDTFLGERYRRLVKRRGKLKALSRSPAPSWSSSGTCSMTPPPATTTSAPAITPAGWTRTARCATTSASSKPSATPSPSPRQPDHRHIHRPR

SEQ ID NO: 410619 - protein, 357 aa, unidentified
MRIIGCDLHTRQETMAMLDTETGEVVEKTLQHEGEKVREFYSALPRPVQVGIEATGSMLWFLNLMEELGIDSQVGHPAKIRAAEPRKQKHDRRDADLLLKLLMENRFPSIWMPSKELRDLRALLWHRHQWVRTRTRVQNALQAIALTNGLRRGKSLWSQEGQHAIASLPLGPHAAHRRTALQALYRELDADINALDKRVLEQALERPEARRLMAQPGVGSVTALATDVFLGDPVRFENAKALASYVGMIPSEYSSAGRQRLGGLSKQGNPLLRFLWCEAAVHAVRRDPLLQRFYRRKLVHKGMGKARVAVARKLGIRLYIMLRDQIDYEEFCRRGQMRQKNGAARAGIPEVGYGPSL

SEQ ID NO: 410620 - protein, 356 aa, unidentified
MQTQVTKKIDFTGKDLFVGLDVHKKSWSVTIIVDGMEHRTFTQPPDPESLQKYLQRSFPGGNYHSAYEAGYCGYGIHRRLNGLGIKNMVINAADIPSTQKEKLHKRDPVDSRKLARGLETNTLHGIHVLDRDLEELRSLNRTRFYLMRDLRRSKNRIKSFLLYYDIPLPGEFDNNQWTLKFIAWLKQVKLQTPAGQDAFSHLITSYEHHRQQLLILSRIVRLRISQHDKELYDLLKTTSGIGPLTSSALITEIGDISRFSNIDDLGSYVGLVPRVRESGETTHTGGITFRCNNFLRVLLVEASWQAIRHDPALMQYYHHHLVNSKGHKVIIKVARKLLNRIRYVMKNRKPYVTGVA

SEQ ID NO: 410621 - protein, 343 aa, unidentified
MNATTYGLDIAKAVFQMYWVDGQSGEICSRKFRREQLIRFLATRAPGKVALEACGGAHWWARKIQSLGHQVVLLHAKYVRPFVKTNKTDAADAQAIWTAAQQPGMRTVAIKSVDQQAILSLHRIRSGLVATRTRETNQIRGLLAEYGLYFRYGRKALMNELKARMAEIEEVVPQLVWRALLRQLEQLQQVEQGIDEAERENLQWLKSSPQAKTLDDIAGVGPLTATATVAVMGSPKAFRSGRAFAASIGLVPRQSGTGGNVRLGGISKRGDPYLRQLLIHGARMVVTHSKQRPQWVEALLKRRPVNVVVVALANKMARTAWALLAHNRSYEREFVSERPAVAV

SEQ ID NO: 410622 - protein, 376 aa, unidentified
MKNVRFVGLDVHAETIAVAVAELNGEVRSLGVIPNRADSVRRLIGKLGKPEQLRVCYEAGPTGYVLYWQLTQWGVHCEVVAPTLVPVKTGDRVKTDRRDAEKLARCYRAGDLTRVWVPDAAHEALRDLVRARLAAKRDQLRARHRLGKFLLRQGRRGPEGMTAWTGKYLAWVKQQRFEHAAQEATLLDYLHEVEHVAERIVRLERSIDAAVELMPESMRAVIAGLQCLRGVAKVSAVTLASELGGISRFAHARQLMGYAGMVSREHSSGDRIRRGSISKAGNAHLRRIVTEAAWSYRHRPNIGKTLAARQRGTSETVKAIAWRAQHRLHARYRSLLARGKPKQKVVTALGRELLGFIWAIGCELERTQPQEVRRAA

SEQ ID NO: 410623 - protein, 421 aa, unidentified
MAESDDQEEIIAKVAALDIGKAELVCCARLPAPDGRRKRLQEVSTHSTMTASLTELANHLVELGLQRVVMEATSDYWKPVFYLLEAHGLDPWLVNARDVKHLPGRPKTDVIDAVWLCKLAERQMLRPSFVPPLPIRRLRDLTRYRVDLVAARTAEKNRVEKLLEDACIKLSVVASDIFGVSGRAMMAALIAGERDPKVLAQLARKRMRTKIAQLEDAFNGHFDDHHRFLLARMLGRIDSIDADIAAVDEQIEAHLAPFAEATARLDEIPGIGPIAAAAIIAEIGLDMSRFPTAGHLCSWAKFSPGINSSAGKTKGNGSTGHGNRYLARSLGEAAVVAGRTDTFLGERYRRIAKRRGKKRAMVAVGRSILVIVWHLLANDHATFTDLGPDHFTRHLNPDRHKRNHIRQLEALGYTVTLTPAA

SEQ ID NO: 410624 - protein, 456 aa, unidentified
MNKKGYLGIDVSKGYSDFLLLDESKSAIEEGFQLHDNKHGREKLRELIEGWQQQGLEELFCGVESTGGYENNWYSCLKALKKSSVYVCRINPKGVKSVSDASLKRTITDAVSAENIAVYMLSFPEKLDYGIHLEETGTAFKEGRQHLTCIRMHQKQKVQLSNQLEKLLYQYFGEVLVYCRNGIPAWLLTMLSKYPTAAMAIKAGAVKLAMIKSISKAKADAIIGKAKNNVQDVSPQVAHLIQFTAKEILHKEGVVKDEKEYLASLHADTPEVALLKTIPGLGQSSAVTVALEIEDISKFASAKKLGAFFGVHPTFKQSGDEVWGNHMSKKGRGEIRAVLYMASLSAIRYNPILKQVYVNARVKGMKHYPAMGVVMHKFLRIIYGVLKNKTAFNPQVDELNQQKAAGKQQEKEQQDKAEKKINKQKKHRFQEATSDAPISRRKEQKIRKQIASQASS

SEQ ID NO: 410625 - protein, 355 aa, unidentified
MYKINSNFAGQNIYVGMDIHKASWNLGIHLNDMFVKNVHQKPNPHIMSSYLKQHYPGANYKAVYEAGKFGFWIQRQLTALGIECLVVNPADIPKSQKDTLQKTDPRDARNLGMRLQSGVLKSIHIPDEQQEADRVFFRHRKRIWKDLTRCKNRIKGMLAFSGIDIPEQYDNASWSHNFINWLKVLDCRQQSRRSSLDYMISQMEFLRKELLSISNAIRKMMREQRYKTNYYLLRTIPGIGPLTAASLLVEIGDVKRFETFYHLNSFVGLLPMEHSSGQSENKLSLTVRKHRQLRSDLVESAWTARRTDPAMALYFQEQIKRKDSKIVIIKIARKLLNRIRYVLINQTAYEFGIVK

SEQ ID NO: 410626 - protein, 352 aa, unidentified
MIVLGADTHKRSHTIAAVAAATGELVGEQSVEVGAKGFAALLVWARGLEAERVWAIEDCRHVSGSFERFLIGRGERVLRVTTKLMADTRRRARDRGKSDRIDAVAVARAALREGLDALPAAQLEGPELDLRLLVDHRERLIRQRVALNNTLQWHLHDLWPELQLPGSSLFYGTWGPRVARRLARAEQSMRVRVARDELRRIRELSQAIKALEREIAALVARVAPQLLCEPGFGPLTAAKLVGEVAGATRFSSDAKLARAAGVAPIPVSSGKTNRHRLDRGGNRQINATLHRIAVTRLRCHPETQDYIARKRSEGKSTKEAIRCLKRHLARRIWHLLQPPHPDRGTPPSPSIS

SEQ ID NO: 410627 - protein, 329 aa, unidentified
MYYVGIDISKRVVDVCLLADGIKGKRKTKTLPNGPNAVQALAEWLTRQKCELNQAHIIMEATGVYHEHLAYGLHQSGIAVSVINPHRLREFARGMGILTKTDKVDACVLACYGCLRQPEGWTPPSPEIRKLRALLQHRDSLLSDKQRLENRLSTLNATLTTEEVVTSLESMVQHVKGELERIERLIEDHIDKHPGLKNDLKLLKSIDGVGDQIGWNMLATIRGSHFRSAEQVAAYLGVIPVERRSGTSVRGRARLSKIGPPAIRAKLYMGAIAAISHNRHVKAQYERLLLKGKAKMLAIGAAMRKLVHLCYGVLHTQQRYDRDYGVVAS

SEQ ID NO: 410628 - protein, 404 aa, unidentified
MPQPNDLSRSLVALDQDSTIIAVVEMSQSSWLVAGMLPGIERQPRKKLEPSPERLLGLLHRWRDEAVKAGRKITRIALAFEAGRDGFWLARWLEAHGVEAHVIHPSSVAVSREHRRAKTDRLDTELLKRGFLGWLRGERGHCTMARVPTIAEEDAKRPNRERECLVGERTRIVNRMKGTLARLGIRNFKPTLRKAAERLATLHTPEGSVLPPNVSAELQRNMARLGFVVSQIKEIEAARQKRLEQEPATGPHAMVRHLARVVGIGVETADILVNEVLSRPMRDRKAVARYAGLTGSPDESGAKRREQGLAKAGNARVRRSMIQLAWRFLRFQQNSALARWYQARTADSRIGTRKTMIVALARKLIIALWRFVTRARHWRASSYVQRGERAYRNEHTLNTVRRSR

SEQ ID NO: 410629 - protein, 317 aa, unidentified
MAQNVGVVGLDVAKKKVDACIRGLGLRRSAPSTPEGEAELIAWLLRNGIGVAVMEASGGYEQRWAAALRGAGLEVRIVDPKRVRYFAKSAGRLAKNDPIDADTIAWFGEIFPDARSRPHDPEREVLDRMVTARAALLKQLTAMTNQSEHGQPPVVATAHAAIVKTMRAQVAKLDAAIAAAIVADPGSARRAEIITSVPGLGPQSAAGIIAWLPELGRVDDKAAAALVGVAPYDDDTGEHKGQRRIKGGRKKLRTQLYMASVAAATQHNPVLMAYYRRLRAKGKEGKVALVACLRKLIVILNTMLARDQTWNPSRAAA

SEQ ID NO: 410630 - protein, 383 aa, unidentified
MRRIVERVADRYDVVVGVDTHTDTHTAAVVDRLGGVLAQVTVSTDPDGLSRLLAFAVAHTPPQGRRLWAVEGTRSHGQGLCRLLTAADEPVCEAPKPPAAARRRGGKSDQLDAVAAAHTVLALPAERIAVPRSDGPREALRLLLICRRHHTDARTAAVNLVKALILTADDTLREALRGLSTTIQIARLAALELPETTALPCEEHTRRRELVTLARHIHILDATLADNHQRLRALVTELCPPLLDQPGVGPVTAAIALTAWSHPGRVRSEAAYATLAGAAPIPVASGRTDRHRLNRGGDRTLNSALHTIALTRRRIHPETRDYITRRHAEGRTTREITRCLKRYIARQLYRTITTHHQTPRQPHSQIDGERGGVGEGQGVGAPV

SEQ ID NO: 410631 - protein, 325 aa, unidentified
MGLNTEQIQPQLIQFALGFDVSKATITFFDTHSGEICTLENSKVALKAILKPYAGRLDTLAICEATGGYEDNLLGVLEDLAIPAHRADAARVKAFIRACGANAKTDAIDARHIAEYGLSRAQSLPRWRPSQPREAKIKLLVLRRTDLVSMRVQEENRLKAPRNKPIARDIAGHITEIKRRIEAIDKQIETIMSLDKRLKDRKAILQTVPGIGKVIAPVLLALMPELGHIDRKQAASLAGCAPHARDSGARKGRRFTKGGRRQLRPLLFTAAMAASHSKSHLATTYKRLLAAGKSKLTALGAIMRHIIVIANARLKEYHIAQIRLT

SEQ ID NO: 410632 - protein, 342 aa, unidentified
MTTIKYFVGVDIASATFTACVGTTPWRVILKAYTFENTENGYQTFLEWLANQQIGAKESVVCMEATGVYSEGLAYFLFATGYAVAVQSPLEVKRTFKPYGPKTDTVDSLQIAEYACRHIDKLSFWQPRNEILEQVKALLATREQFVSQNVAHKNALQAIQRKPVRTLFAEQAHAQMIEQFKKHIQAIDQEIRRLIESDPTFREMLLLLLSVPGVGLLLASHMILLTQISLDHKELASYLGIAPNEHSSGSSVFKHATSRHFGPAAVRKLLYLASCSVRTHQAQFASYFARKTRQGKPAKLVLNNIANKLIKIICAVLLTKTTFIQNYHSVQPLVFQNTLTGS

SEQ ID NO: 410633 - protein, 342 aa, unidentified
MDHFAGLDVSVKETSVCIVDDTGKIVREVKVASEPEALLAVLKNPAYHFKRIGLEAGPLSQWLYGALAEAELPVVCVETRHMQAVLKAQINKTDRNDARGIAQMMRVGLYRPVHVKTLRSQKLRMLLTHRKLLQSKAIAIENDLRGTLRNFGLKVGMVGKVKFEVRIKELVENLPDLAVLVEPLLVVRRALREQFVILHRRLLALVRDDDVCRRLMTTPGVGPVVALTYRATVDVPARFRKSKSVGAVFGLTCSKYQSGEIDRSGRISRCGDEMMRVMLYEAAQSMLRSKKWSWLKAWAMQVARRRGMKKAIVALARRLAVILHRIWVDGTEFRWTREVAAA

SEQ ID NO: 410634 - protein, 387 aa, unidentified
MDCASTTPAGTAGSILHCALELSKNTWLLGIQFPDRPQPSLYPIRGGNTEDLIAKLTAARDRCAKISGRAPSIVLCYEAGYDAFWLARFLKARGIECLVVDSTSMQVNRRARRSKTDRIDVGKLLRGLIAWLRGDRHVWSVVRIPSVDEEDLRRSHRERDYLVHERTAHINRIKGLLFAQGIRGINVKRQYKTLDVDKLVTGDGHPIPPRLASEIVREIARLALVQEQIAALERERDERPTPCTATEKKRAQLMYLNGIGPAISAVMTREVYYRQFDNRRQVAGFLGLATSPYDSGEVERSQGISRAGRGQVRGTMIQAAWLWIKHQPRSTLTRWFLERTMGQGGRVKRIMIVAVARKLAIALWRFLEHGLVPQGAILSGQMTSMAR

SEQ ID NO: 410635 - protein, 492 aa, unidentified
MSLVSGLDLEGSRTVASSTPVRLSVSLYRRPRAPHPWILFGFGWRTTEVKFKPEVIPDDEHELVIERVCAIDVAKASGKVCVRLPGRSGRRTSKVWDVTATTGAVSELAADLVGERIERVTVESTSDYWRIWFYLLEAAGLEVQLVNARDVRNVPGRPKTDKLDAVWLAKLTEKGLLRPSFVPPAAVRQLRNYTRLRVDLTRERARYWQRMEKLLEDALIKVSSVVSRLDSMSVRDMLEALIAGERDPRRLADLARGKMRPKRAALVEALTGRFDEHHGELARMLLVQIDALGTQIGTLATRIDELLAELTYTVADGTILDGGSAAVATGLDAAERLAEITGIGPVSAQVVLAEIGLDMSRFPTAAHLVSWAKLSPRTIQSGATQRGGKTGKGNPYLKGALGEAAAVAARTDTFLGERYRRVVKRRGKLKALVAVARSILVIVWNLLARPGARYQDLGPDYHVRRVDTQRRVRSHLAQLASLGYRVTVEPAA

SEQ ID NO: 410636 - protein, 393 aa, unidentified
MRFAGIDIASETHVVALVAADGSVELKATPFGEDDLGYQKALALLGTPGEVLIAMEATGHYWKNLFAVLAAAGHAVALLNPLRTHRFAGVDLERTKTDAIDALTIARFAAQKRPAATTVPDALTEELRELVHLRQRLLQDFGDRVRQLHRLVDLGFPEFTRYVRTLDSELASAILRVYPTAAAFRGVSVRRLAALRYDGRHHVGLDLARLLTEAARRSVGQHHSATYRLQIRYACDDLDTLRRRLRDLDRDLDGKLREHAVGRLLTTIDGIGTHTAARVIATVGDPAHFRSGSALAAYVGTIPALKQSGQHQSVRGAVTPIGNAQLRAALWMPTLTAVRCNPWLRAHYQRLLARGKLPKVALVACMHKLLLAIYSVAKHRRPFVPNLTAPATP

SEQ ID NO: 410637 - protein, 325 aa, unidentified
MTTPPTAVPVYVGIDVAKAHLDVYLEGTGQQFRVPNTPEGLTQLLRQLQPLPLACIVVESTGGYERLATTELLQAELPVAVLNPRQVRDFARSRNYLAKTDQIDAKVLAEYARVQQPMLRQKTPENRQLIQDLLARRRQLLGMRTMELQRQQQAHAKLAQKQIAAHLKLLEKQLQQLEQEIDSLFKSDDDLSGQATLLESIPGIGKTSAQLLLVHLAELGHLNRRQIAALVGVAPFNRDSGLWRGKRTIWGGRAQIRSALFMPAMVARTHNPWIKAFADRLQAAGKAHHVIITACIRKLVILANAMLKNRQAWQLPNTLNPSLEA

SEQ ID NO: 410638 - protein, 356 aa, unidentified
MSQKLDTSPAVIGIDIGKNSFHIVGQNQRGAIVLRQKWSRGQVEARLANLPLCRIGMEACVGAHHLSRTLKALGHDARLMPAKYVRPYSKGQKNDYRDAEAIAEAVQRPTMKFVATKTADQLDLQALHRVRERFVGQRTGIINQIRAFLLERGIAVRQGLRFLRAELPGILATRSDALSPRMLRILEDLSADWRRLDARIEGLSSEIEALARQDKGCERLMTVPGIGPIISSAMVAAIGTGDAFSKGRDFGAWLGLVPKQLSTGDRTILGSISKRGNRYLRSLFVQAAWVVLVKIGPKHWDRYGLKSWIEAAGKRLHHNVLAIALANKLARIAWAVLHKGRAFACVKTNEPAYRPA

SEQ ID NO: 410639 - protein, 326 aa, unidentified
MKIIGIDVSKAKLHSSLLVDPNLKKAKAKSSENTLAGFRALFEWACRHGKCEAADLHFVMEATGVYHEALAEFLFEAGCKVSVVNPYRVKKFAESHGFRSKNDRHDGLVLALYGNERNPTAWCPPPPEASHLKALLARLTALETDIRRELNRLEKAQVGRAPLEVMTSLDNSLAFLEEQKSRLQKEIEDHLSRYPKLKEERDLLLTIPGVGDKLAVQFLALFESKQFTRAPEAAAFLGLIPVEHDSGTSVHKRPRLSKAGDGRFRAALFMPTIVATKYNPDVRELYQRLTKAGKTKMAAIGAAMRKLVHIAFGVFKNHTPYQQQIA

SEQ ID NO: 410640 - protein, 305 aa, unidentified
MNETLYLGVDVAKSHLDFDAPVGRIANTPAAIAVVLRQMPAGTHLVCESTGGYEAELLAGTMATALPVSVVPPQRVRHHARSMGRLAKTDRIDAALLSDYGRKHRPPAHRALEPERQHLRQLLRARTQLLELQQLETNWQEHASDLPRLRQQAAQRAKLLARQLAQLEQAIRVLVATSAALAPVQRLQQVQGVGEITAWTAWAEMPELGRLEAGQPAALAGLAPHPHDSGQKHGRRQVQQGRPQLRRVLYMAAISASRHNPVLKHLYRRLLARGKPPKLALVAVARRLIEVLNLLLKNPNFILAD

SEQ ID NO: 410641 - protein, 414 aa, unidentified
MELGYRFVAAMDVHKKMLAVVIRRQSGAHIEYRKQKFGTTRSEIERLSAWLQSEGVGEVVMESTAQYWRPVWYGLEAHFLLHLTHPLKTRAPRGRKWDFRDAQRLADRWCSGDLEESFIPGAEQRSWRWLTRTRVDLKDKMTVVRNQVEGLLEQGGIKLTSVASDVFGVSGWAMLEKIAQGVTDVETLVGEARGVLRRKREQLKEALAGRLEPVYQLLLRQYLDQVRLLRRQVEEINQALAEAMKEQLPALHRLSQMPGVDLYAAQELLSEIGPRAAAFASPARFASWVGVCPGNHESAGICYSHRSAKGNRYLRRLLCQIAWAAIHTKGTFFAGLFHRLKPRIEGKGAAWAVAHRIAKVIWIVLHNEVDYQEHGVAPPNERTLVRKFKRMVKEFGRLGLDVRALLDQQLSTPV

SEQ ID NO: 410642 - protein, 341 aa, unidentified
MKKTLYGGIDLHSNNAMYVITDEQDRPLFQKRLPNELPTVLAALAPYRPRLKTVAIESTYNWYWLVDNLEDNGYPVALANPAKMEQYNGIKEANDLTDAAFLAHLARLNILPTGYIYPAADRPVRDLLRRRMLLVRYRTGLKQSLQNKVMRQTGQAVGWRGVRELDAEGRAELLADSDCLPFVATHQVELIESLNEKIGLFEAKVLARVQLRPTYAWLLTLPGVGVILALTIMLETGDIGRFETAGDFTSYCRCVRARHTSNGKKKGSNNSRNGNAYLSWAFVEAVHHALRCCPAAKRFYDRKVAKRNGALATKALAAKWSKAAYYVMKRQEAFDLTRVFG

SEQ ID NO: 410643 - protein, 406 aa, unidentified
MTPDHEPGQVPEQVYGGVDTHEDTIHVAVIDGEGHDLDDREFPTTPAGYRRALAFIVSYGEPIAVGIEGTSSYGAGLTRVAVEEGFFVVEVVRPERAERRRLGKSDPIDAYQAARAAMGTHRIAPAKDASIEGIRALHNARRSAMKARTAAMRQIYQQLITAPVAIREKYRHLGSDKRVAVLARMHVRRDQAPLERAVLLALKTLARRCVDLQREHDHLGIELDHLVTAANPGLRAVYGVGPDTAAQLLLTAGGNMDRMRTEAAFAALCGASPIQASSGKVTRHRLSRGGDRAANSALYRIALVRMAGDQHTKDYVARQRDAGSSSKEIQRKLKRAIAREIFRYLTTPITVPTIEDLRPLRQLKNITLTTAANHLGVWPTTISELERGIRRNDDLATTYREWLTAA

SEQ ID NO: 410644 - protein, 358 aa, unidentified
MKIIGCDLHARQQTIAMLDSDTGELEEKTLEHQGETVREFYSTLRGPILVGIEATGSMQWFLELMEELGIECRVGHPAKIRKAETRKQKHDRRDARLLLTLLAENRFPTIWMPSSEQRDLRTLLRHRHQWVRLRSRVQHTLQSMALNHGLRRGRSLWSQAGQDELRALPLAPHASERRKALLTLYPHLQGSIEELDKEVCEEVQQHPQARRLLTHPGVGPITALATEVFLGDPLRFIDGRALASYIGMIPSERSSGRRQRLGAMSKQGNTLLRYLWCEAAMHAVERDPELKRFYRRKLVQKGLGKARVAAARKLGIRLWIMMRDQINYEEFCRRGKARQESGSVRAGMPDRNSGPAEQ

SEQ ID NO: 410645 - protein, 340 aa, unidentified
MGEVITVGLDLAKSVFQAHGAGASGEVIFRKKLRRDQVVPFFAKQPRCVVAMEACAGAHYWAREIGALGHQTKLIPPAYVKPFVKRQKNDMADAEAICEAAQRPTMRFVPPKSAEPQAAAVIFRTRDLLVRQRTQLINALRGHLAEFGHTVAKGPAHVSRLVELVRDRSSGLPEEARSVLIVAVETLETLKAQITLLDRQIETRAKASPQARRLMSIPGVGPVLATAVVALAPTASTFRRGRDFAAWVGLVPRQHSSGGKERLGRTTKMGERSLRRLLILGASSVVKAAARSGARDPWLARMLARKPKLLLTVALANKTARIVWALMAHGGTYRAPAAAA

SEQ ID NO: 410646 - protein, 303 aa, unidentified
MSNVLGIDVGKAEIMVALLVDNKCIGKESFENDYKGFKSLSKWLKQKKISALKVCMEATGNYSNNIAEFLYKSGNEVHIVNPVCIKSFAKSRLIRTKTDAVDALIIAQYANITELIPYKPKSATFKELKSLHRCLDDLKGQCVQISNHLEHKEHVPKSVTSTWKKLLKDFKNEIKNIENSLDKLFENNPELKQHRENLQTIPGIGKTTATSILAESPDLSSFKSPRQYAAYAGLVPKHRTSGSSIRGKARLSKLGSSKLRKALYFPAVVAKNHNPILKAFSNKWVFSNISEKRVIANCCIAVF

SEQ ID NO: 410647 - protein, 347 aa, unidentified
MRFYNRNHQHYCGIDLHARNMYTCVLDQEGKVLLHRDLVTDPDVFLKAMAPFRENLAVAVECIFTWYWLADLCAREGIDFVLGHALYMKAIHGGKAKNDRIDALKIATLLRGGMLPQAYVYPPEMRSTRDLLRRRLKLVRQRGHLLVHIQNTHHQYNLPTPKARINYRCNREGIAEKFSDLSVFESISSDIELAGHYDLLIKNLELFLTRKAKVHDPGNFFRLRSIPGVGKILAMTMLYEIHDIARFERVQNFASYARLVKCEKSSSGKRLGTGGAKIGNVHLKWAFSEAAVLFLRANPPAQRYVEKLRKKHGKAKSLSILAHKLGRAVYFMMKNNKPFSIEAFRMA

SEQ ID NO: 410648 - protein, 371 aa, unidentified
MSHVTSIGLDVHARSVSAAAFNLYTGEVVERRFGPEAGPIAEWALSFESPRAVYESGPTGFALCRELRALGVDCVVGAVSKMQRPAADKRVKNDRRDAAFLARLLATNNVVAVPVPDAGVEAARDLSRALDDARENVQRARQRLSKFLLRRGYVFDERDSLGRRRCAWTAAWWSWVAKIKMPEPAAKAALDHYIEDVRHEESSKLKLEKLVAAEAARPRWAAVVAALRRIKGVDTVTAFCLAAEAGSFSRFRSAPAYAAWVGLVPSEHSSGEKVARGGITKTGNSATRRALVEAAWHFASCSPSPKPPKSGSEAVPADIERRCAKCTARLAARHRALREAGKRPCVANVAVARELACWVWEVGCRAEGTLR

SEQ ID NO: 410649 - protein, 326 aa, unidentified
MNSVRMHIGVDVGKNCLDICFPDGKKEHLKNNKPGRARIIHAAKKLDAIVCFEATGIYEEDLANECLAAGVRAARLDAWKTRQYAKSRGRIEKTDRLDCEMIRDFASSLEDGKMPFVKPRSAAHSLIKEYAKIRGNLMKARVVVSSQLEFVRDKSARRNIIAIVERIEREIARLEDECGKSVGEDERMSSLSRRFLEVKGVGPCLVRAIFAECPDIGSFSKKGIAKFCGKAPIASKSCTIEKQSRMRRGRQGLRQAFHMAALSASKHNHVLRETYRRLMSNGKSKMTALGAVGRHLAILLNNIAKYPDFKISHESEAGKRKLHATC

SEQ ID NO: 410650 - protein, 351 aa, unidentified
MLIIGCDFHTRFQQIAMVDTTTGELVKRRLEHGMGEAERFYAALPAPARVGIEATFATQWFEKMLTRYGHELWFGDAAEIRAAMVRKQKTDDRDALHILDLLMQNRFPRIWVPSAAERDVRQLVRHRHKLVRLRTSVMNQLHALAMGQGLCLRKKLWTRVGRQKLESLALDPWASFRRRELLGLLDQLDPSIQQLDRAVINEAESRPAAVCLMQQVGVGPVTALAFVLTIGPVSRFANSKKLVSYLGLNPSEESSGGRQRLGAISKQGNTMMRCLLVEAAQTAARLDPELRRDYQRLKFRRGHSGVAKVAIARKLAVRLYWKLREAAQPNTAAPMQGSPALSVVGESLSSF

SEQ ID NO: 410651 - protein, 373 aa, unidentified
MPKYSTAFGMDVHLRSTTVCALDADTGEAVTRRFPGNPWGEIAGWMDGFPGPSLAAYESGYLGFAPQRELAGLGVECAVAAVSKIPRSAAVSASNNDRNDAARMAKAILAHDISPVWVPSPEVEGIRDLAGAYDGATARLATAKQRLLAFLARRGFVYGGTTPAGNPRKYWTYDFLRWLDKVRPEDDGGVRALAALRNEVEAAAEARADLLSEYRAAVGASPIAAEVAALQSIKGCAFALAAAFSAEVGDFTRFRSGRQVTAYFGLAPSQRSSGDSVRLGGISGAGNALVRKLAVEGSWCYAAARHQPKLMPRDTGVPLEIRMHGRKGSERLLRRREEMLARGMPAAKANAATAAELVRWLWALGMMCREGAE

SEQ ID NO: 410652 - protein, 373 aa, unidentified
MKTNQAVSSSSRNQASLANYVNRVLKLGLDVHYRQVTVAMQEDGGRIKAAGKMSHGVFLNWVQKKLEEGWQISSCYEAGASGYWLHRQLVKMGVKNLVVVPKAMGQGGKKQKTDRRDSGELCDSLDRFLGGQDKALSVVSVPSLEQEEKRALIRYHRQVMADRGRYEARGKGLLCAQGIEVRGRWWQPKGWRELNSDPRLKDWMKEQLEGWRTKILSAQEEQRALRDRIEALAPTSLPKGVGAYSAAVLEYEMKGFGRFKNRRQVASYTGLCPGIHLSDGRGKEGSINRCGNGAVRWTLVEMVWRLMIWQPAYPPVRRLAAGLVKSKRARKRLVVQAARRLAIDLWRLATGQTTPEKLGLVMQCHPQSQVKEL

SEQ ID NO: 410653 - protein, 350 aa, unidentified
MDHHSIIGLDIAKSVFQVHRTDPSGKVLERRTLRRGALLAYFEKLPPSLIGLEACASAHHWARSLAALGHDVRLIAPAYVKPYVRRQKNDAADAQAIAEAVSRAHMNFVPVKSIAQQSALMVHRVRDILIKQRTMLINALRGHLAEFGLVSAKGREGAAALIRLVEAEPAESPLDPVALRALRPVTRRLADLQEEISGLDLQLLEWHRNSKTSRLLASIPGIGVVNATALAASLGDGSAFRSGRQLAAWLGLVPRQNSTGGKARLGRITKQGDPYLRRLLVLGATAAMKPYRGKGAGRVVGPYPWAGDLLERKSYRLTSVALAGKMARIVWAVLNTGRPYRANYKREISV

SEQ ID NO: 410654 - protein, 452 aa, unidentified
MPAKKKNEKRNNSQQKNKKANLKKINYNVSGIDLSSEEMFIAIVDKGVRRFSTFTRGLEEASCYLKLEGIEKIVMEATGIYWIPVYEHFEKEGFDVSLVNGAHAKNVPGRKTDVLDSEWLRELHTYGLLRASFIPEAEIRELRYYVRLRDDHITMGATHINIIQKNLDMMNIKLHKVIDSVMSKSGLLIVRAILDGVRNPEILWELCQEYIKDEKRQQVIDSLKGNYRKEYLFGIGQALQMWEQYQTLQKQCDKEIEKLLKKMTIESDEPQNLNTPKRMKRNKPEIDDFHRLMTKLTGGNDTTAIAGINDYSALKIIAETGLDFSKFKNEKHFTSWLGLAPSAHQSGRKKRRKGRRHCNRAGFIFRQLAVNVGNGKHTALSSFYKRIRSKAGKMIAIKATARKIAVYFFHLMTKGIAFVEEGIKKYEKRYAEQQQKFIQRKAHEMGYILVKV

SEQ ID NO: 410655 - protein, 310 aa, unidentified
MDKFVGIDISKDSLDLCIEPDDEVLHLAYDDTGIDQVVKRLAQVAPTLIVMEATGGLEMRLASELAAKGLPVAVINPRQARDFAKATGQLAKTDLVDAAVLAAFARAIRPAVRPIKDVDTRELDDLVTRRRQLIDMRVQETLRLGTASTLQRKSVTAHIAWLDKRIVKLDDDLSKRLRASDAWRTKDDLLQGIPGVGAITSLTMLAKCPELGQMNRREIAALVGVAPRANDSGKHRGKRFVWGGRADVRAVLYMATVSAIRCNNDIKAFAARLKQAGKPAKVIIVACMRKLLTIMNAMVKNNAQWAPKTA

SEQ ID NO: 410656 - protein, 315 aa, unidentified
MAKQLPLVNVGVDVSKDQLDVYLLERDLLFSIPNDEQPIAALIQRLARYRLERIVIEATGRLEHAFVSAAIAKRLPVVVVAPLKVRRFAQAAGQLAKTDAIDARLIARFAAALKPATRPPIDANSQIIKDLVVRRRQLTSLRTTEKNRRSVMPEALTPSIDRIIESLDREIASLEQLIQNAVEQHVTWRHKRDLLTSMPGIGPSVASTLIGDLPELGSLSRRQIASLTGVAPFNRDSGNFHGKRRIRGGRAHSRTALFLSAMVAIRYNPDIKRFYQRLLQTGKHKKVALTACIRKIVTALNAMLRDNKPWQSSFA

SEQ ID NO: 410657 - protein, 337 aa, unidentified
MCLSVTNFVGTCISKQTIDVAIIVNQRKEHVLHSQFKKSSTGLKDLVGWLHSNSVRLNETTVCCLEHTGLYNRSFLTFLQQHTCVIWVEMAHHIQRSLGLQRGKSDKVDAARIALFAYKNRDDIKQWQPLDADVQHLKDLLAQRERLLQAKVKLAVPVKELEKEGLKGEAKVLMQLQKGAVDGLDKSLIKVEGAIKKLIAANRELQRKVTCITSVTGIGDVIAWHFIVHTNGFKRLSSGKQLACYCGVAPFKHESGTSIKGRNRVSHMANKKLKCLLHMGAMAAITYDEQLRAYYKRKVAEGKNKMSILNAVRNKLVLRIAAVIREDKEYVKVKTAA

SEQ ID NO: 410658 - protein, 352 aa, unidentified
MPRYNIAALDDKDIFVGVDVHLKQWHVTIRTREEELFTGSIPSNWSSLKRLLHHYNPACTKVVYEAGYFGYSLSDSITSWGGQAVVTPPSLLPMEYGNRVKTDKRDSRKLAFLLSRDFLRSNWVPDMEQRGHRQVLRRRCQLLGDRVRLQNRIKSELMFYGIDITGRVGRWSRRWVDELWLIPLGNSYAEASFHRLLETYIYVRNQVAEQTRLLRKLSHHERYQGPYQSLQSIPGIGFITSMTLLLELGDITRFTQANKLAAYVGLTPSQYSSGEHVRMGRITRVGKGYLRGLLVEASWIAIGRDPELQEVYRSILARSGSKRAIVAVARRLLFRCRRVLLDKRPYEIRQVA

SEQ ID NO: 410659 - protein, 365 aa, unidentified
MTMYLGLDVHASATVYVAQDQEGKVLGKGKVSTSREGLKGMLEQVGAPAGSKVALESGSQSFWVSGLLSELGMESYVIEASEVRQKARRPRQKSDRRDAFEICDGFRRGIFVKMVYVPVREAQRLRLVLSRRRHFVRICTSQINAAKSLLRSIGLAELAGSLVTVKAWEELLAKAELGELKQMVSLHYQVWRSARSQAEELKGELDKVLTPFAAISRRLQTVPGVGEITAATFIAVIARPDRFPGSGEVSSYLGLVPSGWDSGESEKHGPITKTGNSELRSLLVECAHHASSPNHPLHPYFARVCAKGGFKKAVVCVAQRLARILWRMWLNQEDFQVEKLNVIKGRRKVSRTYYWRIKEPARAEA

SEQ ID NO: 410660 - protein, 343 aa, unidentified
MEEVSIIGVDLAKNVFQLHGAAADGAVVFRKKLSRLQFARFMTDHPACEVAMEACPSAHHWARELTAHGHRVRLIAPHYVKPFIRRQKNDAADAEAIVEAAMRPTMRFVEPKTEAQQARAVAFRAREQIVKQRTEAINALRAHLYEFGHVAPEGVGYIPRLAKVVDDPGSGLPDLARDICRIVLEQIELLTSRLTAVSAKLAAASRAAAIPRQLQTMPGVGPITALAVETFAPPMDQFRRGRDFAAWLGLVPRQHSSGGKQRLGKTSKMGQRDIRRLLVTGAMAVVRWALRRGAPQNPWLQRMLERKPPMVAAFALANKMARGIWAMLTRGEDYRVPVIASAA

SEQ ID NO: 410661 - protein, 408 aa, unidentified
MRLFAGDDWAEDHHDVEVMDEAGRVLARRRLPEGAAGIAQLHGLLGGLLGEDAEDGEVLVGIETDRGPWVAALVAAGYLVFPVNPLQAARFRQRHGVSGAKSDAGDAHALADMVRTDSHQLRPAAGDSPEAGGIKVLARTHKTMIWERAREVQRLRHQLREYFPAALEAFEDLDAPDTLELLGRAPEPARAARLTRAQVSAALKRAGRRDITGRATAVLAALCSEQLGQPEVLTAAYAATVRSLIAVITVLNEQVKVLQGQVEEHFGRHPDAEVILSQPGLGRVLGARVLAEFGDDPGRYADGKARRNYAATSPITRASGKRKVVAARFVHNDRLVDALNAQAFAALSASPGARAFYDQQRANGHRHNDALRRLANRLVGILHGCLKTRTPYDEDTAWAHRHQTQQAA

SEQ ID NO: 410662 - protein, 355 aa, unidentified
MTASYEYHIGVDYHKSYSHLVVQDSSGKTLRSGRVKNDRQSLGEFLERYRENSHAVVEATRNWMVMYDWLDDICDDVVLAHPLKVKAIADAKIKTDKIDATVLAHLLRADLVPEAWAPGEKARELRVALRERMFYVRLRTMVKNRIVTVFDRYPEQTAQLKKRGDLFGKAGRQQLAALKVSEIDRVQINRGLEFIGDIDGRIKQSEATIRAMTKANGNVKLLKTIPGIGEFFARLIDAEIDDISRFRNPKKLAAYAGLVPSTYSSGGKTFHGKIIKQGNKWLRWAFVEAVTPAIATDAQLRAQYEHLKIRGVNKARVAIARKLLTIAFQILRDQRAYELRGESTTEGASTICRLS

SEQ ID NO: 410663 - protein, 344 aa, unidentified
MTIVEDARAITGGVDTHSEVHVAAALDPVGGLLGTREFPATRAGYAGLLGWLREFGDLAVVGIEGTGSYGAGLARHMAAAGVQVVEVDRAGRQDRRRKGKSDPLDAVSAARAAQSGRASGMPKGRDGAVEAIRALMVAKRSARNERTQAVNQARALILTGPDELRARFAGHCAAALAAGITALRPRPGDAADYSVRIALRELGRRVEFLDAQIERLDDLIVPLVTVRAPGLLSLYGVGPDTAAMLLIAAGDRPERLRSEAAWAHMCAVAPIPASSGKTRRHRLNRGGNREANHALWRIVITRMSAHPATRAYVKRRTAEGLSKKEIIRCLKRYVAREVYPHLRG

SEQ ID NO: 410664 - protein, 726 aa, unidentified
MAKHRIFGYCTPWSVKPGDAMRFMISAEGVTEARATLVRLLHGDENAAGPGFVEEAVPGAMPDRLHVRRQFTQKGSYAQVSGMEVHDVADGSFTLAGFVFPTAPGTRRQTMLGRWDISGSQGWALGINPEGHLEFWVGDGQDVDQVTAEVPLIPRSWYFVAATWDAATKRARLVQLGRVGRYNGKLGLVAPYDYDSIVTSVLNTAPKAAVAEAPFLWAGASDWNDQRGRFVETLYNGKIDRTGLWNRVLSDDEIQAISAGAEPVSQGLVAWWDPTLGYTDTGIGDTIQDVGPHGLHAQGMNRPVRGMTGWNWQGRDDSYRLNPGQYGGVHFHDDAMTDCRWEPTVEWTVLKGLKRWGGCRAPPTASQCAKLVMSKHKTRRETASMEEVTIIGIDLAKNVFQLHGAAADGRPVFRKKLTRLQFQRFMAAQPPRTVAMEACPGSHYWAREMAELGHTVKVISPQYVTPYVKRQKNDAADAEAIAEAATRPHMRFVEPKSAEQQARAVVFRVRQKVIAQRIELVNALRSHLYEFGFIAPVGLQHLPKLIAVLEDESSDLPGPARIACRGILRQIESLGAEIAALDAQIAELSKESRWARLLQTMPGVGPITAMAIEAFAPPMETFRRGRDFAAWLGLVPRQSSSGGKARLGKVSKAGQHDIRRLLVVGAMAAIVGACRRGIPEDTWLGKLMLRKPRILVAIALANKMARRIWAMLTKGESYRDPALAAA

SEQ ID NO: 410665 - protein, 321 aa, unidentified
MTIPILGIDIAKAKFDVALIVNDGYKMKAFSNNDDGFTCLLAWLNKHNVTSLHACMEATSRYGEALALYLYQHGFTVSVVNPAQVKYLAQACLTRNKNDTLDAQTIAQFCQIKKPKAWAPTPVHIAQLQALVQRMNVVIAMQTQEQNRLDTAHAIVKPDIQEALKALDLQLKDLKHRIDQHIKQHPDLQEKSLLLRSIKGIGPATVAAVLAALPAIDNFTHQNQVVAFAGLNPQQKLSGSSVRGKSSLSKTGNTSLRKALFFPAMVALQHNSVFINLKQRLTHNHKSKMCIIGAAMRKLLVIIYGVLKSNQPFNPKLAMPK

SEQ ID NO: 410666 - protein, 392 aa, unidentified
MIYLGIDVSKDKHDCCILSQDGELLTKPFSVPNSRQGYDKLFSLVSSFENNPENVKAGLEATGHYSFAILGYLLEKGFACYVFNPLHTNLYRKAVSLRKTKTDKVDSKTIALMLLSSVGLKPYSKALYHNEQLKSLSRYRFSKVRERANLKQQFARLVNILFPELEKLVPSLHLSSVYALLEQFPGASYIANAHLTKLTNLLSASSRDHYKKEKAIQIRNAAISSVGCVMPAKSLELKHTVALIRVLSEEIEELETEIKKLMDELHSPITSIPGMGYRMAAMILSEIGDFSNFDSPDKILAFAGLSPSTYQSGKLDNAHSHMEKRGSRYLRYALYNATIYVCIWDKTFADYLHKKLAEGKHYYVAISHATKKLVRVIYALQTTGQTYISAVA

SEQ ID NO: 410667 - protein, 337 aa, unidentified
MSEVHILAIDLAKRSFQVCGADRGGAVLFNRTVSRSKLEQSLRGQSPWIVAMEACATSHYWGRMARASGHEVRLIPPIYVKPFVKRQKNDAADAAAIAEAAVRPNMHCVAVKSAEHQARVVAFRAHQCFVGQRTQLINALRGHLAEFGLVVAKGPTNLKSLATMMEDASIEVPEAVRDVAQLFLDQIETITRKIDDLALRLKNATRENEEARRLCTVPGVGPVTAGAVLAFAPDLRAFSTGRNFAAWLGLVPRQHSTGGKTRLGAVSKMGQNDFRRLLIVGAMSRIRWIVRKGLLPDNWLGRILGRKPRMVAAVALANKMARVIWAMMTREQNYRMA

SEQ ID NO: 410668 - protein, 324 aa, unidentified
MSKVIGIDISKQTFDTSFLKKNGKWEHNVYHNNKAGFKKLLKDVDTDSIFVMEASGSYYIELATYLYEKGVKVSVVNPLVIKRYSQMKMIRAKTDKKDAQTIANYAMEQPLKLWKPMEDVLYKMQQIDTLIASYQKQLTMLNNQLEAFTSSGKTEASAKRSIKKMIKNLKTEIEKLEKKNKDLAEKEYAETMELLKSIPGIGTKTAIMLLIITNNFSKFDNYKQLIAYVGFSPRIYQSGTSVNGKGHINKIGNSKARKILYMASWSVKRYNKQAIEMYERLKHKGKPERVIKVAIANKLIKQAFAIVKSGKKYDEDYTSKRINN

SEQ ID NO: 410669 - protein, 349 aa, unidentified
MRFYTTEHRFYCGVDLHARTLAVCILDAQGQVAFQGQLPARPDDFLRAIAPYREGLAVACECMFAWYWLADLCAEQGIPFVLGHALYMKAIHGGKAKNDRIDAAKIARLLRGGTLPQAYVYPAGMRATRDLLRRRTFLVRRRAELLAHLVNTNSQYNLPPLAQKLCYAANRAALDLPARFADPSVRKSVEADLALIDAFDAQVRALELYLTRAAKVDDPRAYQRLRSIPGVGPVLALIFLYEVHDARRFPEVGHFLSYARLVRCAHESAGRKKGSGGHKVGNAHLKWACGEAACLLVRSSEQAKRWLARREKRHGKAKALGALAARLGRAVYHLLRKGEAFDPRRFFAS

SEQ ID NO: 410670 - protein, 341 aa, unidentified
MQITTVGLDIAKNVFQVHGIDAAEKVVVRKQIRRSQVLVFFEVLAPCLIGMEACATAHHWARELTKLGHEVRLMPAKDVKAYVKRNKNDAADAEAICEAVRRPTMRFVPIKSAEQQGRLMQHRARDLLMRQRTQLINALRAHLAELGIAAAQGREGIKELLAIVARDGKTRLPTDAHASLIVLAAQLQAVQTLIGSIEKRIVAQHRSNQASKRLETIPGIGVVGATTITAIVTDPRAFRSGRDFAAWIGLVPRQDSTGGKQKLGPISKQGDQYLRRILVVGAHSVLRRARQQPEKYPWLTQLLARRPFKVVAVALANKMARIAWALLAKGGTYRAPQLAVA

SEQ ID NO: 410671 - protein, 273 aa, unidentified
MNEITTIAIDMAKRVFQVAAESATGEELWNKRLRSREAMHAFVGQLEPPLVVGLEAGLGAQAWARAFAARGLEVRVLPAQRVAEHRSGAKNDRNDARAILRALRDRSIHPVPVKTVEQLTMQALHRVRAGWQRRRTAIGNQIRGLLLEHGLCIAKGATALQRSLEQVLPDASVPIPDRLRDVIAELAGEWQGLAERLQAMDRELEQLAKRDPLARRLDTIPGVGALTATAMVCKGLEPQRFGSARDFAAYFGAVPDQHSSGNRVRLGWHEPTR

SEQ ID NO: 410672 - protein, 346 aa, unidentified
MEHYVGLDVSLKLTAICIVDRTGKIKREGVVPSDPEAIAEFIKSHASHVERIGLETGPTVTWLWTELSKLGLPVICIDARHAKAALKMQINKTDRNDAVGIARIMQCGWYKEVRVKDLDSHAIKALLVSRALLVKIKRDLENQIRGLLKNLGLVIGRAKMNVFSLRAAQLTEDRPELAAVVGPLLKAREAIEQQIDDLDRKVMRLARNNAQVRRFMTVPGVGPITALCYLATIDDPTRFKRSSSVGAYTGLTTRRYASGEIDWTGRISKCGDKMLRSYLYEAANVLLTRVARWSTLKAWGVRLAKRSGLRKAKVAVARKLAVILHRLWIDGTEFNWSSKEATNQPA

SEQ ID NO: 410673 - protein, 377 aa, unidentified
MKKELYLGLDVHKDCILRAVAEEARRGEVRDTGAISNDLHAVEKWIGRLRKVHGKEVILRACYEAGPCGFGLARRLRQLGVECEVVAPSMTPTRTGDRVKTDKRDARKLARLLRAGELTPVYIPEATDEAIRDLCRARTDAVDDRRRSRHRLKGFLLRHGYHYQGKTSWSAAHERYLRELVLPHPAMKVILEEYLSSIKAASERIARCEEAMRDLLEQWRLAPAVRALMAMKGFQTVAAMIVVSELGEVHRFVHPRQVMAYLGLVPTENSSSERRCQGHITKCGNAHARWLLVECAQHYASPPKVSKELSRRQEGQSQEVRAISWRAQNRLHRRYTRLLARRLQRNKAMVAVARELCGFIWELLRTQPCYQAQSRSV

SEQ ID NO: 410674 - protein, 436 aa, unidentified
MRGCRCSMIMGFTKPIEHFNLQRKKVITMNTLYVGIDVSSKSNVVYLMLPNGDKHSNFSVANSHEGSTLLVKKIYSALTSHSLDTVLIGLEATSVYGDNLVYFLREDATLAPFNRKIHVLNPKQVKKFHDTYNDLPKNDYVDSFVIADCLRFGRINKEVYMGDYRYKALQNLTRARFFAVQNLVKEKQRFMNVLFKKYSTMTQEKVFSDAFSTTALAVYDEFESAEALANMDLHELTDFIIEKGKNRFPDPDAVAKAIQKAARSSYRLPKTVNDSVNQVLSISITSMKALESQIKEFDKAIKALMELLPNVLISIPGIGPVYSAGIMAEIGDINRFDNQASLAKYAGLAWKQHQSGGFEAEVTRLIPSGNRFLKYYLCEAAFSLVRCDKKYSDFYHLKYKEVNRCQHKRALALTAHKFVRLVFRLLKDNRLYCPAK

SEQ ID NO: 410675 - protein, 418 aa, unidentified
MTKRKDSTLIQIVHPICCGLDVHKDKISACLITVDDTGAEQHELREFTTFTHDLQKMKKWLIENKCPIIAMESTGVYWHPIYNTVGDAMEVTLVNARHIKNVPGRKTDIADSKWLAGLLRHGLLKGSFIPPEKVREWRELSRLRKTYTESLADYKRRVHKLFITANIKIDSVVSDLFGMTGLNLIDLLCNNSELTMEKVQECTKGRLKKKVPELYSCLHGYFKDHHRFQLVGMMETINMFQKRIEQINIRLESLMCEHKDLLERLDEIPGIDKKSAQSILGEIGITLDDFRSMSAFVSWAGLCPGNNESAGKRKSGRNAVRNHPFKTILVQVAWAAIKKKDSYYKAKYYKLKARRGAKKAIVAIAHRIAKAIYNIVKNGESYKDLGEDYLCKPTKQRVLKHLMKKANELGMKLVPCEN

SEQ ID NO: 410676 - protein, 341 aa, unidentified
MEHCGIDLHLKSSEVCVLDEAGRVSERAHIPTTEKAFRRWFGCREGMRICIEASGLSPWVGRILSELGHEVIVANAQRVRLIAESNLKNDRVDAETLARLVRMDPGLLRPVHHRSEATQRLRGMLRVRRSLVNSRTACLNTVRGLLRSFGYRVPGQRPERLARALTTGKVPDPLCGLVAPLVATALELDEKIQALDQEVIEAGRCFPEVAGFQQVPGVGPLVALSYVLCVEDPGRFASSRDIASFLGLRPRMRESAERSHFGSITRQGDAEMRRLLVQAAHGCLRSRQDTELKRWAEQLAARIGKKKAVVALARKLAVVLHHLWVSGEDYEALRPQIAAAA

SEQ ID NO: 410677 - protein, 381 aa, unidentified
MKKDSIARLQVTKSQIRRMAAKQRLTVGLDLGDRSSRYCILDEAGEKASEDQLPTSKAGLDMLFAKMAPCRIALEVGTHSPWVSRHLAAMGHEVIVANPRKVRLITQSVKKNDRMDAEQLARLARVDPRLLAPIRHRGPEAQADLAVIRGRAELVEGRTKLINAARGLTKPMGERLKSCDADTVKESMADGLSEATQKVIRPLLKSVEVITQQIKVYDQQIQEIEKRYPETKLVKQVHGVGPLVSLAFILTLEDAERFEHSRDVGPYLGLTRKQRESGESAPELGISKAGDELVRRLLVQAAHCILRQDAPDSDLKAWGLTKVGAGAGKKGSKSRKKKAVVAVARKLAVLLHHLWVTGEVYDPQYNRKAVEASKRSKKAAA

SEQ ID NO: 410678 - protein, 344 aa, unidentified
MDHFAGLDVSVKETSVCIVDDTGRIVREVKVESEPEALLPVLRNPAYHLKRIGLEAGPLSQWLFSALAEAGLPVICVETRHMRAVLKAQINKTDRNDARGMAQMMRAGLYRPVHVKTLRSQKHRMLLTHRKLLQSKAIAIDNDLRGTLRNFGLKVGMVGTVKFEARIKELVENLPDLAALVEPLLVVRRVLREQLGILHRRLLAIVRDDEVCRRLMTVPGIGPVVALTYRATVDVPGRFRNSKAVGAVFGLTPSKYQSGEINRTGAISKCGDEMMRVMLYEAAQVMLTRTNKWSWLKAWAMKIAKHRGMKKAIVALARRLAVIMHRIWVDGTEFRWTREEAAAA

SEQ ID NO: 410679 - protein, 385 aa, unidentified
MKKVDYTLYFITNSDGEALFKSFTIPNNRKGFETLFQKVQSVSDDLTKVKVGLEATGHYSYNLLGFLLDKGLPTYVINPLHTNLYRKSLSLRKTKTDKVDAHTIASMIMSDVDLKSYSDTSYHNEELKSLTRYRFDKVQERAKLKTSVSRLICILFPELEKLVPTIHMASVYALLSEFPSAHAVASAHLTRLTNLLSESSHGRYGKDTAVMFREAARNSIGSNMPAKSLELKHTIKLIQELTSEIDEIETEIKSIMDEVNSPILSIPGINYRMGAMIIAEIGDFSRFDSPDKILAYAGMSPSTYQSGQLDNCYSHMEKRGSRYLRYALYNATKYVCHWDESFGTYLAKKRAEGKHYNVALSHATKKLVRTIYAMEKTGQSYSSAS

SEQ ID NO: 410680 - protein, 472 aa, unidentified
MKSKSSRKRNPVDPVAEEIPDAEHELVIERVAAIDVAKASGKVCVRLPGQTGRRFSRVWDVPARTGAVSELAEQLIESGVEKVTVESTSDYWRIWYYLLEAAGLDVQLVNARDVKNVPGRPKTDKLDAVWLAKLTEKGLLRPSFVPPAPIRQLRDYTRLRVDLTRERTRYWQRLEKLLEDALIKISAVASTLDTLSTRDMIEALIAGERDPGRLADLARGKMKAKRSELIAALDGRFDDHHRELARMLLDQIDTLTAQIATLTSRIEQLLAAMPDTRSRGDGGTGGDPDRPSTGHGVEPETAARFTDATLLTPVERLDEITGIGELNAQVVLAEVGLDMTRFPTPAHLVSWAKLCPRTIQSGPVTRGGKTGRGNPYLKGALGEAAAAAARTDTFLGERYRRIVKRRGKLKALVAVARAILVVIWHLLANPEARFRDLGPDYHTQRIHTERKLRNHIAQLTAMGYRVTLEPAA

SEQ ID NO: 410681 - protein, 482 aa, unidentified
MTPRRQKNGRVVASPEPLRVANPHAAGIDVHAVVHWVAVPPNHVAAAKCMDAGAGDAANLPPHVRKFGTCTADLELLADWLHQCGITSVAMESTGVYWIPLFELLERRGFQVYLVDPRQTKHAPGRPKTDVLDCQWIQRLHSYGLLTASFRPEDQVVVLRGYLRQRHMLIRYAGQHVQHMQKALEQMNVKLPEVVSDITGVTGLAIIKAILAGERAPRKLAKLRDERCKRTEVEIARALQGNWREEHLFALKQALELYQDYEHLLRECDVKLEAHLATFADKSGGQKLEPKPRRCGRRHNEAAFAVRSALHRMSGHDLTVLEGIDDNTALVILSEIGMDMSKWPTEKHFTSWLGLCPQHQGSAGKIKSRRVRRGSNLAARAFRLAAQGCHHAKNALGAFYRRIRARCGGIKAVFATARKIAERVYRLLKYGTEYVRQGIEAYEKAYRERLLKGLTYRAKSLGYALIALPEAPPSTEATPATL

SEQ ID NO: 410682 - protein, 470 aa, unidentified
MPETTKPAETAKCKQVRARKQTQPIERVFEPNAAGIDIGAREIYVAVPPDRDPNPVRVFPTFTSDLIEMAQWLKSCGITTVAMESTGVYWIPVYDVIEQHGLRPCLVNPRNMKNVPGKRTDYHECQWIQHLHSMGLLQPAFRPEGDVCAVRSLMRHRQDLVAMTNEHIQHMHKAMTQMNLQIHHVLSDITGQTGLAILDAIVSGERDAAKLAKLRDPRVKASEEVIRKSLEGNWRTEHLFILKQRLDLYRQHLEQISACDQQIEKLIVTFEPRVDPQQKPLPADRKKRQRGRKKKSGGPQFDMRTEAYKLFGVDLTQIPGLMMLVLTLFSELGRDMSRWATAGNFVSWLGLCPDNDISGGRVLWRGVRRTKNRAGALFRLAAHSLHRDPSPMGDYLRRMKAKLGPAAATTATAHKIAIIFYTMVKNQVEYDASLWAKRDAQREQRLEARLKKQAAQRGYKLVPLDEQPAA

SEQ ID NO: 410683 - protein, 386 aa, unidentified
MGQKAFIPQEYEVFAGLDVDKKSIAVTFSNHQQGFVRSLHMPYSVENLLKHVRKHFPDQKVAFVYEAGPTGYGLYDGLAAQGYNCLVAAPSMIPRAPGQRVKTNRLDSRGLSESLRGGQLRSIHVPSPIYRELRHLTQLRDTLVSEVAGMKQRIQSLLLFEGISFPSAPAGSRWSLKVKAQLRKLQCSRSVRFKLDQLLDNVEFSEKQVVKVTKEIRKLCQNDPELAQCIKYMMSVCGIGWIVASQLLARIGDWRELKNVRQLAGFLGVVPTENSTGEKTDRGSITRSGHGRLRSKLIQASWSAIRQDAELREFYGSVCRRHPRHVGPRVAIVAVARKLSARIAAVLMEQRPYVVRQKVHSAPLTQEETSPQGTTRRPREPGEKNS

SEQ ID NO: 410684 - protein, 415 aa, unidentified
MALKIVYKICCGIDVHKTFVVACIASTNDKGVTSYESHRFSTYTSGLKTLLQWLLDRNCKDVCMESTGKYWIPVYNILEPDCSIVLAHPKYVKAIRGKKTDKKDAKWIADLFKHDLVAGSFMPPADIRQLRDLMRYRFKLTCFKSSEKNRLQNCLTVSNIQLGNVVSDTFGKSAQAILDKILEDPADTSFDLEPLVFKSLKKKLPELRDAIDGYITPEQAGKLKVIKAHYENLEARKAELEELILALAAPYQQELAILQTAPGISSDFTAIGIISEIGTNMEAFPSAKHLCSWAGLTPTNNESAGKKKSVRVSKAGCYIKPLLVQCANAVVKSNKHPEIRNLYLRIKKRRGHKKAIIAIARMLLTALYHMLKNGENYNAELYRKSDLLPVDREITVEQALMIARNQGYKIKSATA

SEQ ID NO: 410685 - protein, 343 aa, unidentified
MRYYGTIGGDLADLDKAVKKLKKSHPGSTFHFVYEAGPCGYGIYRYLTKAGHECMVVAPSMIPKRSGNRIKTDRRDSIMLASLHRAGELSPVYVPRSEDEAMRDLVRARQDAVKAGRVAKQQLKGFLLRHGIKFSGLGDWKQKYMNWLAGLKMPNATQQIVLQEYINSVKDCVIRITRFTSQIQEVLPSWELASVVKALQAMRGVSLHVAVTTVAELGDLKRFESPRKLMSYLGLVPSEHSSGGTRRTGSITKAGNGHVRMALVEAAQTYRLPARISKEILPRQEGLPKAVCDIAWKAQIRLCGRFRKMTARGKKHQTVICAIARELCAFMWAIAREVKPLTT

SEQ ID NO: 410686 - protein, 377 aa, unidentified
MTDGSRRVVAGVDAHTDEHHAAVLDESGRLLGTAAFPATRDGYEQLIAWVAEHGVIDRVGVESTGSFAAGLVRAFTERAIVTVEVNQPHAHTRHRRGKSDPIDAELAARAVLSAVASAIPKQTAGIVEAIRQLSVTRDSAVKARSAALNQLENLIITAPDELRAELTRRKTLPGKATLCLKLRPDLRRLREPAQAAKLALRSLARRVRDLDLEIGQLDRQLKQLTRTAAPRTTHLLGVGSVHTSQLLITAGQNIDRLRSEAAFARICAAAPIPASSGRTSRHRLDRGGDRRANKTLHMIAVCRLRHCPRTRAYAARRTAEGLSKRDIIRCLKRYIARELYHSLRADLTSLLPPPTPPRHAITITRGARPTGISRRRH

SEQ ID NO: 410687 - protein, 342 aa, unidentified
MSQNKTNSDNINIIYAGVDVAKLTLELNLGEVNYSLANETKDHRRIMKLLAEAEKAEPGSKVHVIVEATGGYEAKLVRALQEAGRLVSVIQPSRVRHFAYAKNQRAKTDRIDAPILSQFGQAIRPTPTEAPSQAQSRLSELVDRRAQLVQSHSAELNRAGHYIDRFLCRQSRQLLALIDRQIKACDKAIAAQIAADEGMKTRAKRVQEVPGVGPVVAAVLQAAMPELGTLSDTEAAALAGLAPYNYDSGPRQGSRRIWGGRAQVRCALYMAAMSGVRHDPILKHFYLRLRAAGKKPMLALTAAMRKQIVLLNRLLKNPDFKLAARTKTSSASAAQAQHVCTN

SEQ ID NO: 410688 - protein, 344 aa, unidentified
MDISVLGVDLGKNVCSVVGLDASGAVVMRRKVRRETLIALAEKLPPCVVGMEACCGAHHLGRVFVAHGHDVRLMSPEYVRPYIKAQKNDDRDAEGIAEAATRPTMRFVELKSQDQLDMQTLHRSRDRLVGERTALINQLRAILLERGMVAPQGKRKLEQFLAVLMDEQGGAGLSPRMIVLVADARAQWAELDRRISTFDAEFVRWVKENEEVRRLTTIPGVGPIVASALVAAVGRAESFDRGRDLAAWLGLVPRQFTTGGKPKLLGISKRGNKYLRRQLIHGARAALPYVAERDTPLGRWVKGLMSRAHRNVVVVAFANKLARIAWAVLQRGKPFDARAVSVAA

SEQ ID NO: 410689 - protein, 355 aa, unidentified
MNDAKYIGLDVHQATISVAVRDSHGNLVMEAIVETNAETILQFIRGLRGSLSVTFEEGTWAAWLHDLLQPHVPRVVVCDPRKNALLKVGNKNDRIDARKLSELLYLNKLSSVYHGEPGIRTLKELARSYIAMTRDLTRVMSRLKAIYRSWGIPCAGQQVYAPRYRAEWLAKISEAGVRRRAGLYYQQFDALAALRQQARRELLAEARKHPAMELLRQIPTIGLIRAALLIALMQTPNRFRTKRQLWAYCGLALRTYTSGEYRFVGGQLKRSKKVLAVRGLNINHNHDLKNIFKGAATRAASTVGPFQDFYQACVARGVKPHLARLTLARKIAATTLLVWKKGVRFDAEHLKQQAA

SEQ ID NO: 410690 - protein, 431 aa, unidentified
MLRFVGLDVHKKVVQACFIDSKGKLLSQRRFPCFRDDLIRFGRTYLKKTDRVALEATTHCWEVAKVLKPFVARVVVSNPKATKAIAHAKVKTDKVDANILAELLRCDFLPTVWEPDEKTRELRSLTIHRTSMGQQRTAVKNRIHAILHQRLIQIPEGSLFSRENSRWLEDLELDPAGREALLSELRLLGSLSVEVEAADHQVILRAYEDPRIKLLMTAPGIDFGVASAVVAAYGDIHRFKTADQAASYLGLVPSTKQSADKCYHGPITKHGNSQARWMLTQAAQVVSRHPGPLGAFFRNLAARRTWNIAVLATARKLAVIIWHMLKHNEPYRYAEPATVKQKLGRLRARATGQNRKSTPRRSKASSSDTPDQKAPDGYRFASIPSLKEVLEAEGLPPQKPLSAGEQSIIDKLHMMDLVGRISTQQRKLRKA

SEQ ID NO: 410691 - protein, 341 aa, unidentified
MEKATIIGIDLAKRVFQVHAAAKDGRPVLRKKVSRAQLLGFLAKQPRAIVAMEACATAHEWGRAISSLGHDVRLIPPIYVKPFVRRQKNDAADAEAIAEAASRPTMRFVALKTEEQQARSMIFRTRDLLVRQRTQLVNALRGHLAEHGIVAAQGLAKVKVLATAMQDTGSLHPLVRELGQRYLDHIARLDAEIAELDKRLRQPSKDDETAKRLQSMPGMGPITAAAIEAFAPPMATFKRGRDFAAWLGLVPRQHTTGGKPRLGRTSKMGQRDIRRLLIIGAMTVVRWAVRKGAAKGSWLARMLAHKPRLVVAVALANKMARSAWAMLSKSEDYRGSALAPA

SEQ ID NO: 410692 - protein, 393 aa, unidentified
MFYVGLDIAAEKHDCCIMTEERRVLKQFAFRNDAEGFEFLKKTLSKLASTEEIKIGLENTGVYGSNLVQFLRRNGYKTYTFNPLLINKSIQATTLRKTKTDKADAKFLAQYLTWDNSQPDHDVSYHISELKSLSRLRFSLVQQRSKCKTQAKGVLAQVFPELTQVFSDVFGTTARTILSLCPSAQRMAAYPVPQLADLLRTTSRGQLGLEKAELIHSLAVHSVGNSSIALELQLQIYLEQITQLSLHIRRCEAALRTILAQMNSPITTIPGIGTVLGATILGEIGDIFRFSSPAKLLSFAGLEPSITCSGKSVSAPGRMVKHGSRYLRWAFGQAARCIILRDQTFAAYASKKRAEGKHFNVVCSHVAKKLVRLVFALLKNHSSFIPNYSSLAA

SEQ ID NO: 410693 - protein, 397 aa, unidentified
MKEKSMESKLTVGLDAHPDSFTAAIVRGDTVRESSVEKVAGPIDLPQLEKWFEKHVSRDAVVTMEASTNSFTLFERLSGLGYAVLVLDSVRVGRICRNSQITDKISAVRIAKVYLSGLSESVWVPDPVTRLRREVFAAHRRAVTDCTRHNNRIKMLLNEHTIRLKKGQNLTNKVVRSHVFACREWSDSQKIILEELFADYDRARAKRMRFEKQMSREIAGDPAMLQLTRIFGLGKINVYGVFAMIGEIHRFRNPKHLVGYFGLKPRLKQSGNSIWRGGISRTGRRDMRALLVQAGHVVFRYKSTSNPLYTWAWKLGFRKGRKLAVVAVARKITVAIWYLMMGRPFTAKETSVTLCRKLKQLAKDIGLTELRSQGFESYREFIVDRIGLMRDFACGNT

SEQ ID NO: 410694 - protein, 363 aa, unidentified
MRFIGIDLHKQNIVVAVGDSRGSRLVSRTFSTGNVVPVILFFKRQTPFTAVIEASCSYRWLYDLLSPLGEVKIAHPLRLRAIVSGRAKTDKLDSAMLAKLLMAGMIPESYVPPRPYQDLRDITRARARLSRNATKAKNEIHALLARANCRAPYRSPFGPRGRRWLLETNLGPVADRVKSELVRRLEHYESELAVMDAEIKNIAGMFPEIESLQDIHGFGLFSSLLVTGEIGEPWRFPSGEKVAAYAGLTARVNQSGSHNYHGHITRQGSPWLRWILVQAAMHVTRRDVKLRNFYQRVRKRSSAKIARVAVARKLAVISWVRLKIWHRRHRAKMQYCDKATRVTERSGLVLMTGERESSPVCAV

SEQ ID NO: 410695 - protein, 400 aa, unidentified
MQGLLAGAIMSTQKKPFAFSNDEDGFASFKAWMDDIAEKHEMEKVIPGMEPTGHYWLNLGAYLQGQGMRPVHVNPHHVKKSKELDDNNPNKNDRKDPKTIAGLVNEGRFSYPYIPTGIYAEIRNLSNLRIQTQEEITRIKNRIARWFSIYFPEIKDVYRNPDAVSGLMVIKQAPLPCDIKGLGVDGVNKIWRDARLKGAGIKRAKTLVTAAEHSIGNTEAPRSARKEIRNLLNDYEIYKSRMDELMEEIEELLSEIPYIDKLMGICGIGIKTVSCFIAEVGDIERFDNPKQVQKLAGYAIVADSSGKHNGESRISHRGRKRLRYALYEAAISVIGKNKEFKEIHHYYRTREKNPLKKMQSVIAVSCKLIRIFYTILTKGIDYDGQKMLRDIVRPGMQSAA

SEQ ID NO: 410696 - protein, 402 aa, unidentified
MNCVGIDVSKGKSMIAVMRPFGEVVVSPFEVLHTDSELSELARLLKSLDGETRVVMEATGNYHAPVAWLLHDAGLYVSVVNAMLVHDYGNNSLRRAKTDKKDAVKLANYGLDHWLTLPRYVPDEDTRLMLKTCYRQYQQYSKVQTMLKNNLISLLDTTFPDANRLFASPPRADGSEKWVDFVDAFWHCECVCGLSEKTFITRYQKWCRKHGYNFNENKALDIYASACGHFGVMPKTDTTKLLVEQAISQLRATSAALAALKQEMQSLAASLPEYPVVMGMFGVGPSLGPQLMAEIGDVRRFHSKKALVAFAGIDAPPYQSGQMDVRSRSISKRGSASLRRTLFLVMSVILQRAPMDEPVYQFMNKKRSEGKPYRVYMMASANKFLRIYYASVKAYLDSMEYD

SEQ ID NO: 410697 - protein, 423 aa, unidentified
MDIMHERVAGLDVHKATVVACVRFSAGHEPIRECRTFATTTEGLSALLAWLTESQCTHVAMEATGVYWMPVWKILSDGDFELIVANAAHVKNVPGRKTDMNDATWIADLMACGLIKASFVPDEDVQELRSLMRTRKQLVREQTRHVQRIQKTLTEANIKLDSVLSDIMGASGRRIINAMIAGVRNPRKLADLAGKQIKATPKELYDALHGRLTDHHRFLLQLHLGQWDGLDAAIRAIDVEVGSRIAHIDAEVGVGQAPFRDLIGLLCTIPGVSTLSATTVLSEIGRDMTRFPTAGHLVAWAGLCPGQNESAGKRKSSRLRKGSPWLKTMLVQCAWAAKRAKNSYYRAQFFRLQSRRGPQKAICAVAASILTAIYHILKDGTEHRDLGIGYFDRRPPEVKAKRLVAQLAKLGFVVQLQRTAEAA

SEQ ID NO: 410698 - protein, 338 aa, unidentified
MNHYAGIDVSLECSSVCVVDANGKILREAKVASEPEALIAWFRSSGFDLERIGLEAGPLSQWLFAAMREAGLAVELLETRHVRKAFEAMPVKSDRNDARGIAQLMRLGWFRPVHCKSMSAQETRTLLTARKLVQSKLHDVENSLRGILRGFGLKVGKTTELKFAGRIEELVAGHPHLQVIAKALLAVLRTEFEVFEKQVRKLARSDMRTRLLMSTPAVGPIVALTYASAIDDPARFKSSKQAGAHFGLTPKKYQSGETDYTGRISKIGDSSVRTVLYEAAHVMLTKPVKGCSQLKSWAMRIARRAGMSKAKVALARRLAVIMHRMLADATPFNAAAAA

SEQ ID NO: 410699 - protein, 408 aa, unidentified
MVYIGIDIAKRSHVLSAVDDDGKAVIESFKFANTDRGFEKLLERLKKAGVEPGGSLSGMEATGHYWIALFDFMTSHGYDVAVINPIQSDAFRDVWTVRKVKTDAIDAAMIADLVRYKRYEPSALGEEATDELRSLARYRMSLVERSTMLKNRATAVLDRVFPELDGLFSGSFGPTQRALLEHCSTPSQVLSTNVRTLERILREASGGKCGREKAEELKAAARSSVGVGFGSRTLAFEIRLLMEELDFVRGQIDEVDGELARLLDETDGKWLLTVPGIGLVLAATIAGEIGDANRFDDAHQLMAYAGMDPTKSESGETVASDGNMSKRGPAALRWAFMQAADSARKYDPYFGDYYAKKKGEDKKHHYVALSGVARKLMGVCLALMKEQRPYEPAPPKHHQQGHLREAAE

SEQ ID NO: 410700 - protein, 487 aa, unidentified
MIKSVGIDLAGSGGHKVRCLDEAGQMCDGLSFQTTPEGLSKLEERIFSDGSNPVIVFEPTGLSWLMVAIYLKARHPDCHLVRVQARKVVALRRYLHRSSKSDKIDALTLAKMPFIDCEQLEEIYLPPAKIYAIQRLARQRKRLECEIGSRKKRIGSIVDGYLPGMRQAFSNPWSAHARAFLRSCLNPLEVVHSGEKALHAFLTKARRQGKADRVESHLVYLACQDAATLYKLSSPVGTIDEDFFAALQDEISRELRLMEMAEAESESIANRLEQLYHELHPSDNLRTIPGVGEHTAPILLAVVGDPARFRSQSAFANYTGVVPAAKQSADAEAKGLRMTKAGPAIMKWSLYQSGQIGRRFDPQLAWLYYREMVHHGKNHKQAMGAVMSHMGARVLAVLREDKPYELRDIEGKPITSEEARRLILLNYQVPEHIKRERRRRKQVTDSPTKSGRRKREMVAHRTNKAASAPQPVEVYAHLPTASLAESN

SEQ ID NO: 410701 - protein, 323 aa, unidentified
MMGLSNSICVGIDVSKMSLDIASNQTISPFATSNDVDGFDVIIAELKQYSIALVLMEATGGLEAAVACSLQAQGFDVAVINPRQARDFARSMGYLAKTDRIDATMLAQMAEVINRHPERARFIRNLPDAEREVLNAMVVRRRQLITMLTAERNRLHPSHPQSRKSISTIIGVLQDELKRINKSMEVHISTHFKTLAEILGGVKGIGAATIATLLAEVPELGHLSRREISALIGLAPFNRDSGNMRGRRTIFGGRANVRSALYMATVVATGHNPVIKQFYNRLVESGKAKKVALVACMRKLLTILNAMIKKNEPWDSSHHYLSQ

SEQ ID NO: 410702 - protein, 418 aa, unidentified
MNASNSWEEITHYAGFDWAKDHHDVVIVDQRGKIEKDFSFEHTAAGWEQWKNQIAAYPALAVVIETNQGAALGQLLESPVRIYPINPKSAERYRERKIPSGAKTDFLDAWSMADALRVDGHGWKALQPLDPLIQELRLLCRDEVELIGKRTELVNQLQAALYEYYPAALQAFDDWTAPSSWSFVQRFSTPQALQKAGKRQWEKFLHTHRLWRSSTAPKRLETFAQATAFCGNEGVTRAKSRLAVTLADLLHALERQLAQYRKEIERLFEEHPDHDLFGSLPGAGPKLGPRLLSELGSDRSLFESAQSLQCYVGTAPVTFQSGQIRKARVRWMCNKHFRHAIHLWADSSRKFCTWAQVYYQAQKKRGKSHATALRCLGQRWLKILWKMWQTKTSYHSEIHAANQLKHGSWVLSINSEKP

SEQ ID NO: 410703 - protein, 343 aa, unidentified
MDVSKIGLDVAKSVFQVHGIDAEGQVVVRRQLRRRQVLRFFEKLGPCLVGIEACATAHYWGREIAALGHEVRLMPAHYVKAYVKRGKNDAADAEAICEAVQRPTMRFVSLKSPEQQSMLMLHRTRELLVRQRTMLVNAIRGHMAEFGIVARTGLPQIKELLAVIADADDARLPPEARACLEGLARQFLSLNEEICAADKRLHAWHRSSELSRRLAAIPGIGPVTASALVASITDPSVFKSGRELAAWIGLVPRQNSTGGKQRLGKISKQGDQYLRWLLVAGAMAVIRHAKRRGATRQPWLDDLIARRPTKVAAVALANKMARMAWALLSHGGAYRQPVITASL

SEQ ID NO: 410704 - protein, 289 aa, unidentified
MKITTVGIDLAKNVFQVHGIDQHGKVGFRKQLKRAQMAPFFINLPPCLIGIEACGSAHHWARKLQAMGHTVRLMAPQFVKPYVKTNKNDAADAEAICEAVGRPNMRFVPIKNVEQQAVLALHRVRQGFVKARTAQGNQIRGLLAEFGIIIPQGITNIAARVPELIEDASNELPGAFRVLVQRLLDHLKELDRQVDELEAQIQAWHRSSELSLKIAQVPGIGPISASALVASIGDAKNFDGGRQLAAWLGLVPKQHSTGGKSNLLSRGCGRKLGLPGGSHVFLRRSDSSR

SEQ ID NO: 410705 - protein, 312 aa, unidentified
MDAIYVGIDVSKDRLDVALRPGGESFAVARNGAGIDDLIARLKARPPRMVAIDATGGFETVVAAGLAGADLPVVVVNPAQVRAFANALGKRAKTDPIDAMVIAHFAEATKPQLRPLPDATTRLLADLVARRRQIVEMIAAESQRARRVSNLRLKKSIARLHKALEKELSELDDDIGDHVRGSPAWAEKEDLLVSVPGIGPTIARSLIAELPELGTLDRRQIAALAGLAPWTRQSGQWRGKSFIGGGRANVRRVLFMGAMVAARFNPQLKLFRDKLVAAGKPKLVAIIALARKLLTILNAILRDKTPWQHQNA

SEQ ID NO: 410706 - protein, 311 aa, unidentified
MNSEAYIGVDVSKDLLDVKVLPRKQAQQFSNDDPGIKKLITFVKKLDPQLIVFESTGGLEMLAVSSLIENNMPVVVINPRQIRDFAKATGKLAKTDSIDADTIARFARDIRPEVRPMKDEHAQLLSALNARRRQIVDMLVAEKNRLYSAPKPNIKNIQKHIQYLERTLADINKDINKTIKKSPTWRENDRILQSFKGVGPVVSATLLCDLPELGTLNRKKIATLVGVAPLNCDSGRYRGKRRIKGGRANVRRKLYMAAVASIRHNPAIKDFYDKLIDAGKPPKLALTACMRKILTILNAMMKNRTYWITTC

SEQ ID NO: 410707 - protein, 350 aa, unidentified
MEYLGIDWSYRRAAWCSLSDAGVIVGEGAVPADADGLARLVIERGTDVRAVVEMMSGAIWVRDELAAAGWRVQIAHARKVRDVAPLACKTDKVDARVLAELARRDLVPELWIASLDDRALRERLRRRMHLVRMRASAMNRIFGLQTQWGLRISLQRLRAPDAMTLLDQQGVPAVWRRSIAEALDVIELLDARITPIDHELRPLARADTRVVLLDTIPGVGDLLGLTFASEIGDIARFSSPRKLIGYAGLAPKISQSGDRSRTGALSKAGSRTLRWAAVEAAQHAWRPTNPWHPLYADLAKRAGKNPAKAAVARKILIAAWHVLSRQQPFKAAAPRRPDPASASSRCFLAA

SEQ ID NO: 410708 - protein, 375 aa, unidentified
MVTGVGSRHRPRRDRKPAAVSDVKPRMSLELRSLLPYPNSCPGTSPHQQGRDKMPMLSYCGIDVSKDRLDVAVLPDGECFSVRNDAAGWAELVERLCSFSIAAIGIEASGGYERGVMRHLLAAGMPVRQVNPFRLRQFAKASGVLAKNDPIDARMIASFVAIMPTRPAQRHAPALERLTEILAIRRQLSAEKVAAENASRLLENAMLRRLSRRRIARLTADIDSLDKYLLEIVVSDAALGHRYELLTSMPGVGPLLACTLIALLPELGTMSRKQVAALVGVAPYAFESGTLKGKRCIWGGRAPVRHMLYMAAMSASNWNPALRAFHARLKGAGKLPKVAIVAVMRKMIIALNAMVRDDVAWADRHRGRHPMPTAR

SEQ ID NO: 410709 - protein, 386 aa, unidentified
MQTVAALIPAAVDYERTLVLAIEVSNESWVLAAQVPGLPHTKAKRTINPDAESLMTAIAGYRARAAATGHSVERVITVYEAGWSGFWLARWIMRQGMEAYVIQPSSVPVDRRMRRAKSDGIDAELLLRTLLAWLRGEPRVCSMVPIPDEADEDARRCVRERTELISERVGLTNRIGAVLATLGVSDYNPLLRNRHRRLTELRTGLGEPLPRNAQAKIERLLARLELVLAQIAELERERDAVVEAEASDKASKMIQQLTKLRGIGVQSATVLVREAFVCRFANGKTLGSYAGLASSPYSSGGIDREQGIGKAGNRRVRTVMVELAWLWTRYQPGAAQVRWFRERVGSTGRRARKIMVVALARKLLIALWRFVIDGVVPEGAILKPAA

SEQ ID NO: 410710 - protein, 386 aa, unidentified
MLYVGVDISSESFDVCFYLPEKKKMKSMKYKQDREGFGEFLKKLNAYKEEKQVGMEATGSYHSNLYGFLRSKGIDVQLLDPYTLSKFMKAMSRSKTDKKDAKSIAVAMYRIFDLLSISQVPEEEMLAFRDLVRMRSTVVANCSDLQRKLKSKLKIHMPELLKTFRYLSSPVLLHLLSAYPSREEILANEEDAVKLLSSHRNWSEKKAREVIDSLKDSIGKADTFGTYSTITSTFIAEIKLLKDHVEALNEEIKRFLEKFPDNPLRTIPGIAEVTEAEIVSEVGDIDRFSSGKAFVSYIGLDPVIKQSGNMTRGLSISKKGNKHLRRTFYQLARNLITNTEKYKNKYEKMKERGVKKKVALIATARAAAEMVYQLLKNNVPFDLSLS

SEQ ID NO: 410711 - protein, 332 aa, unidentified
MNMHQQGGVANGSVKLNAGIDVSKLHLDVCVGGTQQRVPNDANGWNELTAMLQAAPVDLVVMEATGGYERGLVCALQSVGVCVARINPRQARDFAKSMGVLAKTDQVDARVLRDFADVLARHTDRSKFITSMPDQARDLLAELMTRRRQLVDMRVAEHNRLEHAGARAAKSIASVLKLLDKQIEAIDAHIDDHMDQHFKAQRQLLDSVNGVGPVTILTLTAALPELGQLGRRQIAKLVGVAPLADDSGGRSGKRRTWGGRSEVRSVVYMAAIVAMRHNPVIREFYERLLMAGKPKKVAIVACMRKLLTILNAMLRDQALWNATRHVKPAELD

SEQ ID NO: 410712 - protein, 388 aa, unidentified
MRQVCGLDIHKDSVFVCILNENGVVFQEKFGVLTTELEQMLGIMREHDVSEVCMESTSIYWMPVWRVLEPYFDLKLVNPFFIKQLPGKKSDVKDAEWIATCLHKDLIKGSYVPDDRIQQLRQYDRRIFDLDKEIVYKLTKLDTALQRCNIRISNYVSNTDGKGYKSVVKKLVDGITDPEELIKAIHGRTINRVGRDVILGALTGVISEADCDMIRQLRDEVELAEKHKDECQSKMETLCRQWFPDEYELLQTIPGVKARSATAILAELGNDVSAFPDAAHLTSWCGLKPRNDESAGKIKSRKITHGNKYLRKTLIECSWAARRTQGSFYSRFSYHQTVVRRKNSMKVQVAVARKMLSAIWFILHDHVTYKDYTPSTPEETPSDIVTTE

SEQ ID NO: 410713 - protein, 341 aa, unidentified
MKQYVGLDVSMEETKVCVLDGAGVVVFEGSVASRPAALAKLLNAKAPHAERIALETGSLSSWLWHELKAAGFPVVCLDARHAKAALSMRINKTDRNDARGLAELIRMGWYREAKVKSMESRQIRALLTARSKLVDLRRDLENQMRGLLKSLGLIIGKSGVRVLPNRIAALLRDAPHLRSLINPLMMAHSALAEQIATYDLQVRELAKTDQTIGRLMTVPGVGPVTALAFASTVDDPQRFARATDVGAYLGLTPRRYQSGELDRNGRISKRGDRLTRSYLFEAANVLISVVRRPSPLKSWATKLVKRIGRKKTTVAVARKLAVILHCIWTDGTEFDWGGVAA

SEQ ID NO: 410714 - protein, 346 aa, unidentified
MNRMNYVGLDIHKKSISCCVRRADGTIIQEITITATRQALDEWMQQLPQPWMAGMEATLFTGWIYDHLESCGATVKVAHPAMLQAIAAGKKKNDRVDARKIADLLRCDYFPECHMAPREIRDRRRVLRYRNLLVRQAVQMKNKVSGLLMEAGVPYNQQKVHQKKYFAELLQKQKKEMPPSMPELLRLSRSTVEALTGMQRQLIRALERDALLAARVERLASIPGVGRVVALTWALEMGDIRRFASVKKAVSYCGLCGAEKSSGGKTERTPISKQRNKHLQTILVEAAKLAPRWNAELALVYEREKQKGNRNRATLAVARKLVAYLMAVDREQRPFDTQLRVAGNAA

SEQ ID NO: 410715 - protein, 322 aa, unidentified
MAMLSFCGVDVSKDRLDVLVLPEQQSFSVSNDVAGWAEVVARLRGFAIAAIGLEASGGYERGAMRALLAAGLPACQVNPFKLRQFARASGVLAKNDPLDTRMIASFVATMPTRPAQTRPLAIERLTEMLAVRRQLNAEKVAAENASRLLEDAMLQRLSRRRIARLVADIGSLDAHLVEIVDTDAALAHRYRLLTSMPGVGLVLACTLIALLPELGVMSRKQVAALVGVAPYAFESGKFKGRRCIWGGRAPVREVLYMAAMSAGNWNPVLKQFRKRLQGAGKLPKVIIVAVMRKMITMLNAMVRDDVAWADHLHGRRTVPTAC

SEQ ID NO: 410716 - protein, 338 aa, unidentified
MKVYGGIDLHSDNSVIGLIDEQDKVLYLKRLPNDIGLILKELALFQEELEGLVVESTYNWYWLVDGLQEAGYEVHLANTVALVQYSGLKYTDDNSDALWLAKVYRLGLLPEGYIYPKETRAVRDLLRKRLKLVQQHTANVLSVQNLFARDRGRGIRANELRELRIERVGELIADPYRTLAIQSTLVVMRSQEAMIEMLEKAVKSRMRLSPVFRPLLSVNGIGDILALTIMLETGDIHRFAHVGNYASYCRCVGSERVSNGKKKGKGNTKNGNKYLAWAYIEAANFAVRYCEPVKRFYQRKRARSNTAVAMKTVAHKLARACYYVLRDQVPFDLSKAFA

SEQ ID NO: 410717 - protein, 351 aa, unidentified
MKRINKQIQGEELFVGIDLHKLRWHVTIRTADVEIFSNSIAGSWQELKKVLNRYSGRRIHTVYEAGCFGFSLYDHLTQYGGDCIVTPPSLIPQEHGNRVKTDRLDSRKLARLLAKGLLKRIWVPSTEERFHRQVIRRRRQLVGDRVRTQNRIKSELCFYGIDLPTPHGQWSQVYFANLQRIKFNNRWMQQSFNQLLEQYEFLSAQIDKQTQLLKQLSQLSLYRDRVKILRSIPGIGLLTAMEILLELQDFSRFRRAEQLAAYVGLTPSQYSSADKIRMGRITGAGKNTVRSALVESCWHLIRKDKAMRKKYEQIKARAGGKRAIVAIARKLILCIRRLLLDNRPYLFEPVI

SEQ ID NO: 410718 - protein, 449 aa, unidentified
MREPQEIQDAEYEQILERVCAIDVAKASGKVCTRVPHPSRPGKRRTRVQDVDATTNAILELGGHLAAEGIEKVTLESTSDYWRIWFYLLEAVGLDVQLVNARDVKNAPGRPKTDKLDSVWQAKLTERGMLRPSFVPPAEIRRLRDYTRLRTDLIRERTRHWQRLEKLLEDALVKVSAVASTLDTKSVRDMLEALIAGERDPKVLAGLARGRMKAKHAELIEALTGKFDDHHGELARMLLDQIDHLTGQIGTLTTRIEELIAVIPAAQGVDADGVTGPGAGTGPDAAVASAMTRLDEIPGISVHGAQVILAEIGLDMTRFPTAGHLVSWAKLCPRTIQSGAKNHSGKAGKGNPYLKGVLGEIAAAAARTDTFLGERYRRIVKRRGKLKALVAVARTILVIIWHLLADPAVRYHDLGAGYYASRTDTGRKTRNHVQQLEALGYTVTLAPAA

SEQ ID NO: 410719 - protein, 346 aa, unidentified
MSRLSRFVGLDDHQESIQVCVLDEHGKRLANRRVANHTDDVVSAVLDAVDREEEHLQLNVKVSIEPCSGAAHLADELICQTGWSTTLAHPGIINRMKQNPDKSDKADAFILADLVRPGDLPKVWLAPEEIRQLRSLVRFRASKVKEQTRVKLRLRGLLRELRQRPPEGVNAWTKAWLLWLKNLELDDVRAFLRDEYLAELDQLQRKIREVEKRLRKRVKDDVVVKKLMSMDGIGEITAVTMRAEIACFDRFDNGKQLARYAGVTPRNASSGQKQADAGLVRSGNPGLRIVLIQAAQRLINFNAQWHAFAARMKKKGKPHNVIVAAVANRWLRRLYHQMQPEQLLAV

SEQ ID NO: 410720 - protein, 343 aa, unidentified
MEELKVIGLDLAKNIFQVHGINSRGRKLCGCKLKRGEVLAYFANLPPVLAGMEACGGAHDWARRIGALGHTIKLMAPQHVKPFVQGHKTDARDAAAIAEAAQRESVPSVTVRSLDSQQMQALHRVRELWMKQRIALGNQIRGLLGEFGEAMPLGLKGLKQAVAQWQAQAGNELAVLKQLIEQLMTALREQESRLSEIEGRIREQHRHNAASRLLETIPGIGLLGSTAVVASFGQCETFSSSRKFANCLGLTPREHSSGGKQVLLGISKRGNGYVRKLLIHGARAVLKCRLNRPEHADDWEVKLAKRRGYNIAAVALAAKNARRAWAMLRSGEVFRQDLAPASA

SEQ ID NO: 410721 - protein, 366 aa, unidentified
MKKISTMQAFGNEILQEQKLTIGVDLGDRWSFYCVLDEAGKIILEQKVATTPEAMKQTFGKTPRSLIALETGTHSPWVSRLLTELGHEVIVAHAQKVELITKSNRKDDRHDARTLARLARIDPELLGPIRHRSAKAQIHLTVIRARAELVSARTALVNAARGLVKSYGERLPKCGTQQVSGKLAEGLSAELREVLQPLLREVESLNERIQEYDERMEKIAKAVYPEVALLKQVKGVGTQIALTYVLTIEDPYRFPKSREVGCFLGLRPGRRNSGESEPQKKISKEGDRYLRTMMVQGAHYILGPFGEDSDLRRWGLKLAERGGKNAKKRAVVAVARKLAVLLHRLWVSGEVYEPLRNSQKAMRAVA

SEQ ID NO: 410722 - protein, 320 aa, unidentified
MMYIGIDVSKDSFVAAYPRKSGYTTKTFKNDTKGVRSFITSLPEDCHCVMEATGNYSMLLLYLLQQAGIPTSMENPQKIKHFSRAMMTVTKTDEIDAKLIAMYGEKMTPEPYKIPAESILLLKQKRTVLRQLKKHLVATKNLQQSLAVLPKQDLASKHAVEKTIKFLSRQIAELEDEITNLSNKEYKRQMELLTSIKGIGKTLASALIVATGGFTYFSNAKQISRYLGLCPTYQQSGTSVNVKGHINRNGDTYLRSQLYLVACNCTKYNAACKETYERLRANGKSGKAAVVAVANKLIRQAFAVVTKNQPYVDGFVSSIA

SEQ ID NO: 410723 - protein, 402 aa, unidentified
MANSPTRFFGLDIHKEYFVAVGVNADREVVFGPQRVSNYQLDDWISRVLTLNDAVVLEMTTNTYLFYDTLLPQVHSVIAVHPPSVALVTNAQVKTDKKAALALAELHAAGMLTGVWIPPHKVRDLRALIARREKMVRLSTIAKNRLHSILHRNHVTLPEKPFSPEQRTWWEGLPLSETEQFLVRSDLDTLAFAQKQVAQAEECLQKESAQDERIPLLVQLPGVAMLTAITILAAIGDSARFPTAKNLVGYAGLGTRVHNSGMTHSSGRITKTGRRDLRRAMVNAANHAIEHHPHWKKEFERLEPHLGRSKAVVAIARKLLMAVWHVLNKKAADRFADPRNVACSFFALAYRVGVRNLPEGQSALVFTREQLDRLGIGKDLQEIPWGSIHRKLPPSKLLIEKK

SEQ ID NO: 410724 - protein, 344 aa, unidentified
MKITTVGIDLAKNVFAVHGVNEHGRTVLKKVLKRNHVAEFFANLPACVIGMEACASAHYWARKLQAMGHTVRLIAPQFVKPYVKTNKNDAADAEAICEAVARPNMRFVPVKSIEQQSVLSLHRVRQGFVRARTAQANQIRGLLAEFGIVVPKGIGHLGRQVPELIEDAENELTGSFRLLIQRLMDHLKELDRQVREFEAQIQAWHRSDETSRRLARVPGIGPLTASALVASVGDAKSFRSGRQLAAWLGLVPRQNSSGGKNVLLGISKRGDTYLRTLLIHGARSLLQVAKRKECKSGWLTSLLQRRNANVAAVALANKNARIVWALLVHGREFHPDYHAPAATA

SEQ ID NO: 410725 - protein, 361 aa, unidentified
MKKPAQHLIAEVPRRQAKVEITIGIDLGDVWSHYCTLNQDGEVVDHGRFRTTPKAIEKWFTDVAPARVAMEAGTHSIWISAQLQELGHEVIVANVRELRAISHSDRKSDQVDAEKLARYARLDPNILRPISHRTVEQQQALTLIRARALLVRLRTAAGNAVRGLTKSCGYRMPASATTCFAQRSLAVMPPGLAQALGPVLQQIAEMTVKIKLYDRQIQQLGQTEYPETQALLKVHGVGHLTALTFVLTLGSKERFGRSRDVGCYLGLRPRRSQSGDHDPQLGITHAGNAYLRSLLIECSNHILRPHGRDSALRQWGLRLAARGGKQARSKAVVAVARKLAVLLHHLWSTQAMYMPFYEQAA

SEQ ID NO: 410726 - protein, 474 aa, unidentified
MSKSKQQAAVADKAGPKAVTGKRAGQGRDVAQPVFHPDAAGIDIGAREIYTAVPGDRDPHPVRKCDTFTSDLHQMAEWLVSCGITTVAMESTGVYWIPVYDVLEQHGIQPCLVNPRNMKNVPGKRTDFHECQWIQYLHSMGLLHSAFRPDHEVCAVRSLMRHRNDLVAMASQHVQHLQKALTQMNVQIQHVISDLTGLTGLAILDAIVEGERDPVILAKLRDPRIKADEETVRKSLEGTWRVEHILVLKQRLSLYRSHIEQISECDREIEKLVAAFEPKVDPDDKPLPPDRKEKQRKRKRKSGDPNFDMRTEAYKLFGVDLTQIPGLMMLVLMLFSEVGRDMSRWPTAAHFVSWLGLCPDNDISGGKVLWRGARRTKNRAGTLFRLAAHSLHRDQTPLGDYLRRMKAKLGPAAATTATAHKIAIIVYTMVKNQVEYDASLWAERDAIREKRIEARLQKQAAQRGYKLVPLEAAA

SEQ ID NO: 410727 - protein, 351 aa, unidentified
MTFHFTHAHSRGKNMTEHYVGVDVHKTKSQVAVIDDNGEIEEEVRVKNANLDEIAQKYAGGEAALEATSNYFTIYDTLDEYLDVTLANPLKANWLANQKQKNDRVDAKKLARFLRMDEVPESYVPPEELRKYRALARGRKKLTNKKNDFQNEVHALLDQQGITHTGSLWSDEGREFLAELTLEEPWQFLLDQWLEAIDEFDMKITRSQRKIETIAKELEEMDILTSVPGIAAYSGLMIYGEIGEIDRFDRANELVSYAGLDPVVRESGDSRTEGSISKQCNKYLRWILGQAAKTAVHNCKDPYLSEFYWRLRDGKNKPAKVALVATARKLLVSLYHMLTNEEVYDPPEVSA

SEQ ID NO: 410728 - protein, 410 aa, unidentified
MAYKVAGIDVHKKVLMVVILDVDDPASEPQRRRFGTTTSELQNLSGWMRQQGVGQAVMESTAQYWRPVWYELEPYMKLQLAQAFSNRAPRGRKHDFRDAERLVRRLLAGELTLSFVPEPEQRTWRTMTRARVQLSEDKSRLHSQLECLLEEMRIKLSSVVSDLLGVSGYRMLRALAGGETDARKLAALADDRLQCSEKQLIDALSGRPQPVHLELLALYLVRHQMMVEQIAKLDRLIAEALKPHQEAVTRLALAPGLGVDSAQQIIAEVGVDAGTFPTAGHLSAWVGICPGRNESAEENHSSRSAKGNKYLRRILNQAAHAAVKKKGSHFQAVFRRLLPRLGYKAAIWAVAHRLCRLLWKILHEAVSYVEQGSEPDARTKRRRARNLLRALRKLGYDVNLIPTSTACPAA

SEQ ID NO: 410729 - protein, 406 aa, unidentified
MISVGIDVSKEKSTVCAIKPYGEVLMTPRDFRHTRDELESLTKQLSRFKEEIHIIMEATGNYHLPVYQYLKSKDYLISIINPLEMKRYRCQGIRNPKTDKIDSYIIAQYGIDYWYRFKPNDDMDEKRKELRLLGIQYTQFMKTRVIRCQALCEILDRTMPGIYGLLDDFNRNNGQDKLCDFAEKYYHSDNITKYSEKVFIERYNSWLKKKGYRPNEKEARQLYSIARNAIPTLDSKLPSTKLLVQEAVNVLREVDSSLYDILNQLKTLSKEMPEYNAVLSMKGIGETLAPRFIAEIGDPRRFHSAKALIAYAGIDAPPYQSGQFTGTKRHISKRGSSNLRKLGYELMDSVNKHKSSYTGDPVCEYFMKKRNEGKPYRVAMIAAFNKFLRIYHSKVSAVLNEQKNRK

SEQ ID NO: 410730 - protein, 354 aa, unidentified
MVIIAFDSHKRYTQACVERLDGARICEERIEHQRGRIKEFLSVYEPGTPVAIETIGNWYWLVDEIESAGMEAKLVHARRAKMMIGSVNKTDKLDARGLNLLQRCGTLPTVWIPPGKLRDQRELPRTRMVFARQRTVLKNRIHSVIDKYGLQKQFDGMSDIFGLRGKGILSDVMKLMPVESRFCVEGLLEELVNIEERLRAIEKRMEDVYKENEEIRLLRTMPGVGAILSVVIWQEIGDVSRFANAGRLASYSGTCPRISQSGDKSRMGKLRTDVNQYLKWAFSEAGNSVAVHYKKLPDRYVSWLYSRQRLRRGHAKAVGAVARHLAESAWYVMSKGENYLERRFGNGSMRANLS

SEQ ID NO: 410731 - protein, 373 aa, unidentified
MRTVALDYGNRITLCEVRDGAVVERATVTEFAALTRWLGPQTGRARVAIEACREAWFVVGKLREWGHEPVMVDTTRVRQLGVGHHRRKTDRIDAELLARALEQGHIHEAHVISEARQALRLQLSVRRMLVQQRAHQVTSIRALARVHGHRVRKVHAAYFARALRDTPLDEATRALVEPLVLMVEGLDVQIAFCDRRVQALAAREPVIERLMTTPGVGTIVAAAFVSVVDDAGRFRHAHQLESYLGLVPSEYSSSDRRSLGHITKQGNAYLRTVLVQAAWTVLRQKQEDPLKEWGQALLRRRGARVAVVALARRLAGVLWAIWRDGTVYEARRVGLPSKAGLERAAQSLQFQAARIARASRKRIQSSRRERTAE

SEQ ID NO: 410732 - protein, 352 aa, unidentified
MTVTIVETRAQAGAITGGVDTHADVHVAAALDPVGGLLGVQEFPATPAGYAQLLGWLGGFGTVCLVGIEGTGSYGAGLARHIAAAGVRVVEVDRADRQDRRRQGKSDPLDAVSAARAALSGRAAGAPKGRDGAVEAIRALMVAKRTARAERVQTINQARALVLTGPDDIRARFAGHATEALVAELAALRPRPGSMVRYHTLLSLRELGRRAQFLDQQLGRLDELIAPLVTARAPGLLARYGIGPHTAAMLLIAAGDHPGRLRSEAAWAHLCAAAPIPASSGKVKRHRLNPYGDRQANHALWQIVITRMSSHPPTRAYVARRSKEGLSKKEIIRCLKRYVAREVYPHLRPGVG

SEQ ID NO: 410733 - protein, 419 aa, unidentified
MREPNPMELAAFVGLDWADQRHMLCLQVANSTQTESCPLEQKPDALHDWIAQLRARFPGGKVGIAIEQSRGAVIHALMMYDFLVLYPINPKALARYREAFHVSGSKDDPLDAEMLLDFLRLHHSRLRPWSPDTVETRQLQLLCEYRRKLINSRIRHTNRITSWLKMYFPQALDWTGELDTMQSCDFLEKWPTLACLQQVRPTSLRKFYQQHHCRNLALIEERLTQIRSARALTEDSAIVEALSFAVQAEAAQLRPIIDGIARFDQTIAQLFAAHPEHELFESFPGAGAVYAPRLLTALGTDRHRWDSAADLQCYSGIAPVTKKSGKSCFVHRRLACPNFVRQTFHEFAAQSIRYSTWARAYYDQMRSRGLHHPAATRALAYKWIRIIFRCWSDQKPYDEQVYLQSLRAKHSPLVKEDLE

SEQ ID NO: 410734 - protein, 377 aa, unidentified
MREKLRFLGLDVHAETIAVAVAEPDGEVRSLGTIANREDSIRKLIRKLGSPEQLRACYEAGPTGFVLYWQLTQLGVECAVVAPSLVPKKPGDRVKTDRRDALKLARSHRSGDLTAVWVPDEDSEALRDLVRQREAAKQDQLRARHRLTKLLLRTGQRPPLGLKAWTERYMRWLAQVRYRQVAQEVTRLDCMNEVEHMSARVKRLEEAILEVVKQAPQAMQEVIRGLQTLRGVAHISAVTIASELGNISARFQSARKLMGYCGVFPSEDSSGKRIRRGGITKAGNAHLRRIVVESAWCYRHLPRVGEKLRKRHQGVPAEIIEIAWKAQHRLHKRYRTMMNAGKDQRKVMTAIGRELLGFIWAIGIKAEAAACKQQIAA

SEQ ID NO: 410735 - protein, 356 aa, unidentified
MNKRSKLNFSGQAIYLGLDVHKKSWSVSIFTQHGEYKTFSQPPEAEALIQYLQRHFPGAQYYSVYEAGYCGFWIHDQLRERGIENIVVNPADIPTQDKERRNKRDRIDCRKLARGLRVGDIKGIYTPARWRLEDRSLIRTRLSMGRKQARCKNQIKSMLLFYGVSIPEQREMGHWSRRFIRWIEEIRMERSSGDVALKLHLEELCHLRQIIAKLNRSILVLARAEEYRLWISLLKTIPGISTLTAMIVLTELYEISRFRSLDQLCSYVGLIPDTQSSGEKEHVGGITQRHHSSLRWLLIEASWIAVRKDPVMMEAFNEYCKRMRKTKAIIKIARKLLNRTRYVLKNQAEYVTGVIE

SEQ ID NO: 410736 - protein, 337 aa, unidentified
MTLYCGIDLHANNRVVSVLDDQDQVHYEKRLPNDLALITDVLLPFQKDLLACVVESTYNWYWLVDGLMDAGFDVRLAHTGAIPQYAGIKHSNDQTDARHLAHLLRLGILPEGHILTREQRAVRDLMRRRLLLVRQKALHHLSLQSLLARYTGERLSANQVKALDNAAIASKLDDPIRLGGQITGLARNWLENAIELLEQEVLKHLQQRHDYQLLTSIPGVGKILASTIATETGDISRFPSPGHYASYARCVNSEKSSNGKLKGRGNKKNGNKYLAWAFMEAAHYAAIWSPEIKRFYQKRQARRHILVAKKTVANKLARACYHMLTKQEPFEVKRAFG

SEQ ID NO: 410737 - protein, 368 aa, unidentified
MSETIVAYQSFVGVDLHKCTVTLASVSADGEIRKLTISTKSTGKIDAWLRALPAPVWMAVEAVGFVEWFIDRFRECVARIDIADATELSNRRGKRRKNDPNDAEDIALRLARDECPLGFIADDELMQLRKLGRHWRQLSRLLSRTKHSMKSMLNAANIRGPKFDAAGAHRWFLAHGHLLKPAQHDAFSDFIDILVLVERQRERLQRKIILANRSERFAQITELLKTVPGIADIWGCIIAAEIGPFDRFPNADTLQFWAGMTADLKESAGRTQSGNITKAGSRTLRWALCKAAVTLCRSDAKQEVTRQRVIRQVGGVKAKANVAMGRRLLSILYAMVRDGKPYKNTEPTTHNRAANRAREAIRKRKEAA

SEQ ID NO: 410738 - protein, 340 aa, unidentified
MEKRYIGIDLHRDRFTCCMRLDNGRTYLTDWKLDKLAAFVKKLRPTDEVAVEITGNTRLFHDTVAPHVARVVVVDSNQFRVISRSVKKTDPNDARLLALYLAKDLLPEVRMKNKQQARVASLTQTRDTLVKQRSALKNKVNNLLSARGLNLPKEALSSEKRLAEVLSLPFDELLLVELRVIVDQIRSLNKSIGELDKAIAEASSELEGHTSLTSIKGIGATTSAILLSVIGDVNDFPDEGRLASYFGIVPRVSNSNQTKHSGRIHKRGTKLGRTALVQSALIAANYSPYLKRFYERVKARRGAGKAIIALARKFLGIIYRTLKNKWVFQDFPNFVLAEGA

SEQ ID NO: 410739 - protein, 439 aa, unidentified
MGKEQKTLPLVNLFAAGIDVGASCHYICAADGENVIVRRFGTFTEDLFALAEWLLSLKVKTVAMESTGIYWVNLYEVLESRGITVCLANARYVKNVPGRKSDVSDCQWIWQLHSFGLLSGSFIADEKTRALRTYVRQRENLEQQKAAQLNIMGKALQLLNIKLRQIVSKIEIEVSMNIIRSIVAGCRNGEKLSEFYNPKMKASKEDLAKSLQGNWKPEYLFTLQQALTAYDFFKAQMLQCEHEIEHSLDELNGGDGTKNEKKKGRIRQNDFAFKAEGYLSDLTGVDLCAIDGLDEKTVVTILSETGTDLTKWKTARHFNSWLGLVPRPKISGEKTLGHFKQSVAGRAGRAFRAAAWSLHHSKSQLGAFYRRMAFRKGSFVAIKATAHKLAVIFWNMMTTQMPYRNQTAITYEEKQQKAQIRKLEKQAGKLGYTLQVANG

SEQ ID NO: 410740 - protein, 353 aa, unidentified
MHTHQKSSDAVAVIGVDIGKNTFHLVGLDKRGAIVLRMKVSRSQLERRLANMPRCLVGLEAGSGSHHIARQIQALGHDVRLLPAQYVKPFLKGHKNDYRDAEAIAEAVQRPTMKFVAIKTPEQSDLLSLHRVRSRLVGQRTAVINQIRGFLIERGITVRQGPGPLRKALPEILSSPPEALSPRIVRLIIDLSEDWRRLDERIEAVSTEIESLAENDGSCQRLMTVPGIGPIISSAVVAAIGNGSGFRQGRDFGAWLGLVPRQESTGDRTKLGKISKRGNKYLRTLFVQAAHVVLVRRPAAAMRGLWPWIEQAAKRLAHRNLLAIALANKLARIAWAVLARGRDYQPRIAINAA

SEQ ID NO: 410741 - protein, 358 aa, unidentified
MTQVVVDSTQVIIGIDTHKDNHVAFAINSLGIRLADCTVPATLAGYQQLLGWASALGQMAVFGVEGTGSYGSGLTRFLRSQGLKVIEVSRPSRRDHRRSQGKNDVLDAEQAARQVLSGEATAIPKSTDGVVEMIRVIKVARDSAVKAQTQVLVSLKAIIVTADADLRALLESLSTPQLVATCAKLEADQLDSPTTVMRYALAAMANRWLQLHKEIEAHTQHLTTLTREAAPELVQAYGIGPDSAAEILITFGDNGHRVHSEAAFAKMCGVCPIPASSGKTQRYRLNRGGNRQANAALFRVVIVRMRWHEATKAYVARRTAQGLSKREIIRCLKRYLAREIYQIIRKTFPTAKAEVINP

SEQ ID NO: 410742 - protein, 336 aa, unidentified
MEEKRFYAGLDMGTKWIYGTIITGDRELHIVKEAKFPCNAEALEKFLGWIPKNNLSAVIEACGIWMDIYDHLQTMCSEVKVASPLQTKWIGNSRKKTDKIDSLKLATLLKGGLIIESYVPDKDTRLFRRKISHRQGFVAMKTVTKNQIHAVLRQDNIAKPEAVRKDIFTQKGVKWLKTLGRDEIDNYLALIPALDKAIGNATASVAINKFQREIDLLKTMPGIGDLTAATIMSDIGDIKRFKNPKALCSHSGLVPSVYQSGDIDRKGRITKEGSAVLRGALGEAAWAAVRQDCRFRRFFLRLVENGKSTQTAITAVRRKMLYIMWFMLTKNQQYVD

SEQ ID NO: 410743 - protein, 448 aa, unidentified
MKKQNNNSVSQLKMINPDAAGIDIGSTFHYVCVPEDRDQSHIQKFSCFTEDLNEIANWLEKCKVKTVAMESTSVYWIPVFQILESRGFEVKLVNARYVKNVPGRKTDVQDCQWLQRLHSYGLLHGSFRPEDQICILRGYIRQRENLTRSGATHIHRMQKSLTQMNIQLHKVISDITGSTGIKIIKAILTGERDTKKLAELKDVQIKNDVAIIAKALEGDYREEHLFVLQQELESYEFYQQKIRECDIKIESCYEKFTKKDNNLPLDKIKNKSRRNHPAFNLRQELYDITGTDFTKIPGLDVLTIQTIISEVGLNMEKWQTEKHFTSWLGLCPANKITGEKIFSTKTRKVINRASTAFRIAAFATGKSKSALGGYYRRIRNRIGSPKAITATARKLLACLFYRLLKYGQSYVEQGLDYYEKIYTTKVVKNLEKKAKEFGFVLVKVDNTA

SEQ ID NO: 410744 - protein, 323 aa, unidentified
MQGQKSPERSAQPGVYVGVDVCKDWLDVYLHPIGQKLRVSNAPEGLRALKRRLADLPVELIVMEATGKFHRQAHRTLHAAGLAVAVVNPLRARLFAEAVGQLAKTDRLDARMLALMGQTLEPSALAPAPEALEALQELARARAAAKAEETALSNRRGASRTAFLKAELGRRLKVLAAHIERLDAEIERRIGADAALKRRYDIVLTIPGVGPVAAVALVIGLPELGACSGKAASLLAGLAPLACDSGDKAGERHIRGGRAFVRTGLYFAAVAAARFNPQLRDDYKRLRDAGKKAKVAIAAIMRKLVVLANVLIKEDRPWRPIHA

SEQ ID NO: 410745 - protein, 341 aa, unidentified
MKLTTIGIDLAKTVLQVHGANDKGKMVLKKQLKRNQVLPFFANLTPCLVGVEACGSAHYWARKLQALGHTVKMMAPQYVKAFVKRNKNDAADAEAICDAVVRPNIPAVPIKNIEQQAILSVHRARQGFVKARTAQANQIRGLLAEYGIAIPKGIAHIAKRVPEILENGANELPGSFRLLIQRLVDHLKELDRQEAELELEIKRWHRENDDSRKLADIPGVGPMTASAVVATVGDAKNFKNGRQMSAWLGIVPRQHSTGGKQTLLGISKRGDTYLRTLLIHGARAVIRVAENKPDADPWIKKLLARRNKNIAAVALANKNARTIWALLAHGRAYEPNHRMAA

SEQ ID NO: 410746 - protein, 327 aa, unidentified
MSTQNYAGIDIAKRHFVIGIHGRDKTKTETNNPKGFTHTIDYLHKHNVGLVVMESTGGLEIPLAKTLHRAGFQVVIANPRCTKNYANGFSLAKTDHLDAKMLADYAQALEIKGLVANMLYIPPSEAEEKLEALVKRRSQLVDIRAAEKNRLEQIHESQQQSVKDLIAHLDKLIAELDKDIDSNSDAFGGKGQVLTAIKGIGSTTSATLLSMLPELGTVPHKRIAMLAGVVPPPNQSGDTDKKTGCIGGRMAVRNILYMAALTASRFEPTIKAFYERLRAKGKPFKVAINACMHKLLRILNARMRDYLVSLQTKSERQSEQQPAPQCA

SEQ ID NO: 410747 - protein, 413 aa, unidentified
MDVIVERCAGLDVGKDEVVACVRTPGGSDGRRHREVRTYRTFTAQLEALADWLGAENVTEVVMEATGQYWKPVWYVLEARGGYELKLVNARHVKIVPGRKTDVADATWLAELLEHGLLRSSFVPPPAVRELRDLTRYRKRLVQAHASECQRVQKTLEDAGIKLGSVASDVLGVSGRAMLRALVAGEKDPEVLADLARGQLRKKIPLLREALYGRFSAHHAVLVRLALDHLEQLESSVAVLDAEVDKVMAPFAEARDHLDSITGVGKRAAECIVAEIGADMSRFPTAAHLASWAGMCPGNNITGGKRRSGSTNKGDRWLSEVLNECAWAAAHSRGTYLAAQFWRLARRIGKKKAAVAVGHSILVIAWYLLSEARDYDDLGQDWFSRRTDPDRRKDNLVKQLQSLGYAVTLRPVA

SEQ ID NO: 410748 - protein, 378 aa, unidentified
MPPENTIRIAIELSASSWLIAARLPGVDKSRLYRIEGGDTAALLALIGGLRSRAATKLRQTMDVVCCFEAGRDGFWLHRWLTAHGVVAYVLEPTSILVNRRARRAKTDRLDAEGMLRVLTAWQAGDKQVCSMVRVPTSEEEDAKRPHREREHLVRERQRIENRMEALLFTQGIRGRPSLRSWERDMDQLRTGDGRAVPPLLQAELNRLRRHLVLIRDLIREVEAERTEAQVAALDDAMTGKVMALQRIRGIGANFAAVLVREVFYRSFANRRQLGSYVGIAPMPYQSGGMDRDRSISRAGNPRARTTLIQLAWLWLRYQPDSALTKWFRERVGVLQGRTRRIAIVAMARKLLIALWRYVETGVMLDGVQLSPAAEAAI

SEQ ID NO: 410749 - protein, 368 aa, unidentified
MMLTATALDKQDVQVTLGVDTHADIHVAAALDQLGRLLGTHAAPTTPAGYAALVGWAEQFGTVVQVGIEGTGSYGAGLARWLRARGQVVVEVERPKRQPRRRRGKSDPIDAEAAARAVQAGTATGQPKDGDGPIEMIRTLQAVRRSALKARTQTANQLHALVITAPDALRSALRRQPLPRLVATAAAFRPSMPLTTPTAATKLALKSLAVRYQQLCAEIETLEAQLDRLVAQAAPELLAVKGVSTVTAACLLVTAGDNPERLRSEAAFAHLCGVAPIPASSGKTTRHRLNRGGDREANKALYLLAVRRMGWDPATRAYVARRTTEGLSKLEIIRCLKRYLARELFPLLATNPTLAPLPPTTACLPAPL

SEQ ID NO: 410750 - protein, 350 aa, unidentified
MLIIGCDLHTRYQQIAVLDGETGEVIERRLEHENGEAAAFYAGLSPGARVGIEATTPAHWFERMLTEFRHELWVGDAAQIRAMSVRRQKHDPRDARHLMDLLALGRFPRIWTPPPRERDLRQLLAHRDRLVRMRTAVKNQLHALAMSQGVCRRHKLWSARGQLELQRLRLLPWASRRRQDLRQLLMTLETTIGELDQAVAQEAGARNEVKLLMTHPGIGPVVGLAFVLTVGPVERFARSKQVVSYFGLNPREHSSGSRQRLGRISKQGNPMMRWLLVEAAQTAARFDPELHRRYHRLKFRRGSSLAKVAIARQLAVRLYWMLRQQKDYAQLVRMQGSPGSGVVDSVPSTN

SEQ ID NO: 410751 - protein, 370 aa, unidentified
MGSLLQRSLPTATLVVAIDPGKARNRVWLSTDAAGLVVEPLSVPVLRSGLDELDALVRRHSPDGGPIFAVEATGALHRAWVAELNRRFPQAVRVFAPSETAAARAQLGSRRFKTDDRDCAALTYLARQGHGRSVPADDHEALLAAVRHRRGLVAERKAAQQRLHDQVNALCPGLSAPTGQGRSLDLAGVTGQAFLQCLIDFGGRPVGARSLRARAPGRLSAANAEFWAARWKDCLPPPAHVAAGVDRLARSVRRWRNLNDDITAVETDLETLLAGTDGQILTSLPGVKTVRAASFAAFSLPVTRFPDAEHLYSATGLAPASYQSSSIDRPGRISRQGLPEHRDALMNMAWGLAQHCRHSPTERSSSAPVG

SEQ ID NO: 410752 - protein, 300 aa, unidentified
MTIMVDTQRALTGGVDTHADVHVAAVIDPDGGLLGVKSFATNLAGYKLLSGWMGTFGEIGLVGVEGTGSYGAGLARHLHREGLVVVEVDRPNLQERARQGKSDSLDAIEAARAALPGRAFGVAKTRDGNVEAIRALMVVRRSARESRTKAMNQIRQLVDTAPDELRERFVGVPSWRIAEGVAILRVHADPVRMATKCALGMLGRRAVALGEEGKRLDVLIARLVDKVAPELVELVGLGPDTAALLLIAADDNPSRLRSEATWAKLCGVAPLEASSGKVTRHRLNRGGDRQANSALWRIVF

SEQ ID NO: 410753 - protein, 411 aa, unidentified
MDRLTPLHKRVAGIDVHRMLHVVTVLIEGDDGTIIKHQREFGGFKRDMKAMAFWLLELQVSLVVMESTGIYWKSAHAHIEQAGILAMVVNAHFIKYVPGRKTDMGDSEWLAVLARFGLVRGSFIPPKDLRELRLISRYRRKLSQMLSSETNRMHKILDDGGIKLGAVVSDIKGVSARAMVSGLVAGKPISELLGMARGSLKNKREDLAASLEGDMSPRHLFILTELHESVTILEQKLARLDAYLIEAMRPYQWAFELLQTIPGIDATSSAMILIEIGDDMSRFGDADRLASWAALCPGNNESAGKRKSGKTRKGNAIIRYILCECANAARNTKSSLAAKYRSLMVRKSHKKSIVAIAHKIIRIIYFMLSRHEPYRDPGVDYEAMSAQKNAPRWIKALKKIGKLPTAKPALA

SEQ ID NO: 410754 - protein, 341 aa, unidentified
MYYIGLDVHKKTISYCVKDVSGHVQQRGTMAATRTELDNWMKTLPQPWIVAMEASIFTGWVYDHLLPHAAQVKVAHPLMLRAIAVAKKKNDRIDASKIADCLRCDFLPECHMACTAIRDRRRTLRYRHLLVRQMVQMKNRVSGLLLETGVSHNKERLHQVKYFQELLTDKEVTESIRPLLRLSHEAIRRLDKTETALIRSLERDPVLAERIKNLKTIPGIGVITALTWALEMDDVSRFRSVKQAISYCGLCGDERSSADKALRTPISKQRNKHIQSILVEAAKFAPQQNHELAPVYEKEKQKGNSNRATLAVARKLVAYLLAVDRERRPFKPAEQFGSAVA

SEQ ID NO: 410755 - protein, 423 aa, unidentified
MDLVVTRAGSLDVHKEQVTACVRTPAGSGAERRELVREFKATVRGLLALRDWLAEHHVTHVAMEATGVYWRPVWHILDGEFELLLCNAAHVKNVPGRKTDVADAVWLCRLLEYGLLRSSFVPPFAVRELRDLTRRRRTLVRERAQEANRVHKTLQDTGIKLDGVASDMLGVSGRSMLDALIAGQQDPKVLAQLAKGRLRVKIPALEEALEGRFTASHRLLIGGILRHIDFLEAEIVTLGEAIQAHLEADRELEGNARPFELAVRIACSMDGIQQRTAEMLIGEFGTDMSRFPSDAHFASWGAQCPGNHQSAGKRRSGRTRKGPRWLDGTLHDAAMGAIRVKDGHFARKYRRIKARSGHKIAIGAIKHAILIALYHMLKNGEMYRPPTPNPHAETKRRERTTQRLTAQLERLGHHVTLTAGAPG

SEQ ID NO: 410756 - protein, 387 aa, unidentified
MYYIGIDISKFKHDCAVIDDSGEIVTPSWSFTNDAEGFSQLKLLLNSLDTETRIGLESTGHYGMNLKLFLESNNFSFMEFNPLLINRFVKSKSLRKTKSDSIDCMMIAHYLMTVEYKPYPSSFYHTEKLKSLTRFRDSLIRLRSRQLVELTNILDKVFPEFKPFFGSRFSVTALYILSNYSSPEKIANMNSKSYEALRKLSRGRFSTVDFAKLKQLAKNTIGTTEDYLLLQMQIVLDIYRQLDSKVDETEVSIKECVSDMNPPMLSVPGIGIESAAVILAEYGDFSKFKNATQMLSFAGLEPGYFQSGTSETTGKMVKHGSSYLRYALMNCAQTVVNYEPTFAMFYSKKRAECKPHRVALSHVVKKLLRVIYTLQTKNIAYDADFVR

SEQ ID NO: 410757 - protein, 322 aa, unidentified
MAQIVTVAGIDVSKGWLDVALWPDDTIARHVDREAPDWADKLATWLTEHQVGRVGLEASGGYEIEVMDALQARGFVVIRFNAWRIRRFAQADGQMAKSDRADAAVIAHATAVLRVKHANVRPITLGPLVELLNYRRRLCDWEVDCTNQLEHLQDKELRRQTQRRKASLTRARTAIDLKMAALIATCPAWRDLAARLRSVPGVGPVLATTLIALLPELGAVSHKAIAALVGVAPFDDSSGNWCGRRHIMGGRTMVRHVLYMASLSAMRYNPVLAAFTKALAGKPPKVIIVACMRKLLTILNAIARDKTEWQAAATCPQSRSAG

SEQ ID NO: 410758 - protein, 473 aa, unidentified
MSRVVRGKCDVPLLSLEGLVSQDNEEDVVSKSRALSRGDKRRNARLARLRELVPVGYAVLGIDLADVKQVVVLTDLDSRVLARQRVSAKAWDLGPVLRWARRVAVQHGFAGVTVGCEPTGHRWRVLEQLAAQHDMPFVCVNPMLVGRARETEDYTRDKSDDKDAMVIARLVAQLNCYIPERADQIWARLRQLGARRERLITESTACVHQLRDLLECAWPGVLEAAAKPFESSNWCAALAVVLDRCAGHPERLARGGLARFEAAVVRELSRWGGCRRRRAIIEAVYVALVDPTGVWTQRHGALERARWVLADWRAAKARLAEVETCMVEVLDELNLTELVTTIPGISAVGAAAMLAETGDPTRFDSPRALVKHAGLCPRENASGTFRGRCQISRRGRPRLRLAAWRAVWGALPHNPVMAARYRYLTTRQHNRLTDGQARAAIAAALLRWLHVITTKGVPFDTRLAGAEVMPIAA

SEQ ID NO: 410759 - protein, 453 aa, unidentified
MKIPQSTIRLLTGRLVKILLNREVSTMKSNTQNKKIEAITEKTLVIGIDVGSETHYARAFDYRGIEFSKKPFKFSNNEAGFEMFKAWILDIKEKHEKDKVVPGMEPTGHYWFNLGKFLQDNEMKPVLVNPHHVKKSKELDDNNPTKNDRKDPKVIAGLVKEGRYMIPYLPDGIYADLRTASNMRFQIQSELTRVQNRISRWFNIYFPEYKTVYGKPDAISGIMILKKAPLPEDILTLGVEGVNQIWRDAKIRAVGKKRAQTLVEAAGHSVGTKEGTTAARIEIRMLLEDYESRNNRLQEVMLLIEELVKQIPMAEKLMEIKGVGIKTVSGFLAEVGDITRFSSPKELQKLAGLALIENSSGKHKGQTTISRRGRKRLRYLLFEVAMSLVGKNSEFGALRHYYTTRKVNPLKKMQSLMAVAAKLIRVFYAMMTKGVEYDPSKMLGDIKRPVAYM

SEQ ID NO: 410760 - protein, 441 aa, unidentified
MAMRVRNELTIQHPNAAGIDIGSSSHFVAVPADRSESAVREFGCYTQDLYEMAAWLLSCGITIVALESTGVYWIPVYEVLEAYGIEVMLVNARNVKHVSGRKSDVLDCQWLQQLMSFGLLSAAFRPPANVCALRAISRQRDTLLQEQARCVQRMQKSLTQMNLQLTNTITDITGQTGLAIIRAIVAGERNPQELAKLRNYRIHASEAEIAKSLEGTWKEEHIFCLAQALSLYDTYRTLIAEADAKLDALITPLRRQGVKAAEGKAKRGGKNAPGFDVRNALREWAGVDLTQIGGIDVCTALKVLVELGPDLSTFKTAKRFCSWLGLCPGTRISGGKRLSGASKRIPNRVARALKLAAQGLHHSQCALGAYYRRLAARLGKGKAITATAHKLARLIYAMLTQGSEYVEQSQAQYEAKFQERTLKYLQQKAKTLGFDLVPQAV

SEQ ID NO: 410761 - protein, 341 aa, unidentified
MGQASTIGLDIAKRVFQAHGADERGRVVFRKRITRTALLRFFAAQPPCTVAMEACAGAHYWARELGKLGHTVRLIPPAYVKPYVKRQKNDMADAEAICEAAQRPSMRFVPVKSEAQQANGVVFRARDLLVRQRTQCINALRGHLSEYGYVFPQGITQADTLISCVEDPDTSLPENARAVLTVLVGTYTALEAQVRALDAEIAKRAKADPVARRLMTVPGIGPIAAAAITALVPAPEGFRTGRDFAAWLGLTPLQKSSGGKQKLGAVSKRGERTIRRLLILGASAVVRWASQRGGPEGSWLARMLARKPKMLVTVALANKTARIAWALLVKGGVYRAPVTAA

SEQ ID NO: 410762 - protein, 412 aa, unidentified
MLKIVYPVCCGMDVHKSFVVACIAATNDQGVTTYRSKRFSTFTGDLHRLAAWLRAHSCTDVCMESTGKYWIPVYNILESSSKITLAHPKYVKAIRGKKTDKKDAKWIADIFKHGLVSGSFIPPADIRQLRDLMRYRSKLTGFSSGEKNRAQNCLTVSNIKLDDVFSDVFGKTASAITTQLLESNAPFDVSPFLSKKLKASAEEIQAAVDGSICTHQAGKLRVIRSHMENLAACKKSLESLIFGLAEKHLPTLDLILTVPGIHVFAAVGILSEIGADMSVFPSSKHLCSWAGLTPQNNESAGKKKTTRISRAGAHIKPLLVQCALAAIRKKSNPEIRSRYLNLKKRRGHKKAIIAIARMLLTAIYNMIKRNEKYNAALYRKADVPPRNREVSVNEAIYILQRQGYLVTAPQSA

SEQ ID NO: 410763 - protein, 366 aa, unidentified
MDTIYIGVDFHARQQTICYLKTETGELVFHELKHQDKQQVRAFYAQFVGQVIVGLEASGYSPWFERMLEELGCQVWLGHATEIRRRARWRQKNDRRDAELILDLMLHNEFPRLHRPAVQSREVLRMLRYRQKLIKMRTMSKNSLQAIALQAGLAKGSRLFTKAGQQELGTAEMSPVLHWQREHWLQLMEPLNQQLLETMVWFKSQSKDDDRITRLRTHPGIGLLTSLCIVHTLQPVSRFRNTRKVAAYAGFDPIERSSAERKCFLGISKAGSRLLRYLLVEAAQTAVRKDEDLKRFYQRLAARRGRPKAKVAAARKLLIRAYIMMRDEIDYAEFRHRAVAARLARRSQGPANVPEVLIGQPASPEQ

SEQ ID NO: 410764 - protein, 367 aa, unidentified
MKKVSTVAAKPGKKISQQKLTVGLDLGDRNSWYCVLDESGQIQLEQRVRTTAKALQEVFGAMPHSRVALEIGTHSPWISRLLVELGHEVIVANARKVRLIGESRRKDDRLDAQTLARLARIDPELLYPVKHRSAQAQADLMMIRARAGLVRARTGLVNTARGLAKSYGERLRGCNVRNMNPEKAESLSPELQAALQPLLAAIESVSERIAEYNERIEKLAQESYPQVALLKQIKGVGTLIALTFLLTLEDPHRFRKSRDVGCYLGLQPGRRNSGQSEPQLHISKEGDPYLRTLLVQGAQHILGPFGVDCDLRRWGLKLAERGGRNGKKRAIVATARKLAVLLHHLWVSGEVYEPLHNSSRTTVAAAA

SEQ ID NO: 410765 - protein, 376 aa, unidentified
MTMMHQRQIRYIGLDVHKATISAAIAEESGAPTSYGRIPNDPAAVRTLMTRLGGPQVELRVAYEAGPTGYALHRQLTSMAISCMVVAPSLIPKQPGNKVKTDRRDALKLARLLRSGDLTPVWVPDEAHEALRNLVRARADAKADQLRAKHRLSKFLLRQGCWPPVGVRNWSKRYVTWLHQLEFEHLPDRVVCADYLTEVTAAGERIKRLEVALYECAQSSRQVALIRALQAFRGIAFLSAVTLVAEAGDLRRFRTAPQFMAYAGMVPSESSSGGKQQRGSITKTGNSLLRHVLGEAAHHARHAPRVTSTVKQRQTDLPADIVALAWRAQVRLHTRYRHLSGRIGALKALTAIARELAGFVWAAGQALQEEEVPTAA

SEQ ID NO: 410766 - protein, 355 aa, unidentified
MGVKYVGVDVHGQTCVFHVLDDKGTDVLGGAVVPTRKEPLLEFVKHLGGTVHLALEEGTQAQWFRALVRPFVEKVVVCNARKNTRGRTLRNKTDRKDARSLARLLYQGELSPVYHGDEDLEEFRNLVKTYQVLLADTTRAKNRIKAVYRARGIPTDGNGAYGRSTRQQYLEKATSSAVRSRLEAFHVQMDIGTALVQQARSNMLLEARKYCAYRTLMTVPGIGRIGAAVLVATIGTPRRFPTKQAFWAYCGLAVIHRESGEHVIGPDGIRRRSGPTRTYGLNRNRNGSLKGVFKVAAIAARKDPEVEEYYQGLLARGLRPEVARVQLARKLATVALTIWKKGCRYEKGRLKQQNA

SEQ ID NO: 410767 - protein, 355 aa, unidentified
MDQVSTIGLDIAKNVFQAHGIDETGEVVVRRQLRRRQVLAFFGRLSPCLIGMEACATSHHWARELAKLGHEVRLMPPRYVKPYVKRNKNDAADAEAICEAVTRPTMRFVPIKTPEQQSVLMLHRTRQLFVRQRTTLINAIRAHLAEFGIVAGVGRNGVEALLALIAKGEDERLPSEARECLMALAAQLELVKRQILGADRRVLAWHRSSQISKRLEAIPGVGPLIATALVASIRDPGAFRSGRNLSAWIGLVPKQNSTGGKERLGSISKAGNRYLRPPLVVGALSVIRRAKQLGYTRHPWLVKLMQRRSVKIAAIALANSERMSATGPSECASARIAWAMMARNESYRTPLPAPA

SEQ ID NO: 410768 - protein, 347 aa, unidentified
MDHIIIGVDTHKSNHIAVAINAQGARLGVVTIPTNRQGYRDLEIWAAKFGRIKAFGIEGTVSYGAALSRDLLVKGHTVLDVMRPNRQLRYLHGKSDSLDAESAARSVLNGQASALAKTQTGSSEMIRHIKIVRDSAVKVRSQAMITLKTMIINAPAELRDTLDQIKGPISLIRHIAALRPGDIASPTASAKWAMRALARRWLALHEEIQAHEVELERMAREKAPELMKSHGISTQTVAEMLILVGDNPERIKSEAALAKLCGVCPIPASSGKTNRMRLNRGGNRQANAALYRVAIVRMRDDEKTKTYVTRRTAEGKTRREIVRCLKRYIVREIYRHLCVPPTAASST

SEQ ID NO: 410769 - protein, 330 aa, unidentified
MKNYPIIYGVDISKNTLDICCLATESPEHKTFFHIGNDLKSIPKFLAKVLPADAVFCMEDTGVYTYRLCTCLETSGIAYSVVPAIQIKRSKGLKRGKTDKTDAADIAHYALIHQREMTPTHLADEDLQQLKLLMSERNKLLKALKIFKASEESFACLPKAVCKVSKRQNHCTVRYLTKQLKAIEKEMASLIDHNETMQHQNELLQSIPGVGTQTATMLICYTRCFKSFDNWRQLACYAGLAPFEYQSGTSVRGRTKVSNFAQKQLKSVIHMAALTAKQWDTELKQYFERKVGEGKNKMLVMNAIRCKLIARAFAVIKRDSPYINTKKYAA

SEQ ID NO: 410770 - protein, 259 aa, unidentified
MFQLGIDVSKNTLDLCLLREGVKGRVKTRRIKNDVNAASTVITWLGKQQCAPADVHIIMEATGIYHESLAYGLYRAGAKVSLANPHRSREFARGMDILTKNDQVDAYMLACYGALKVPEPWVPPPESVRYLCALLRRRDALVTDRSREKNRLEKCRATDIPPAIDESIENVLRNLSAEIEHLDELILTHLDQHPELKTDFDLLTSIKSVGFQLGLNMLVILRSHHFDTAEQVAAFLGVVPVERSSGTSVRNVSVAFRPY

SEQ ID NO: 410771 - protein, 343 aa, unidentified
MPAVTTIGLDIAKSVFQVHGVDAYGNMVVRRQLKRRYVLPFFKKLPPCLVGIEACATSHHWSRELRALGHTVRLMPPAYVKPYLKRQKNDAADAEAICEAVVRPNMRFVETKTPEQQSCLMLHRTRHLFIRQQTAVINAIRAHLAEFGVVAPVGRNGVEELLDVIADPNDDRVPEVARECLAALGRQLRMLKAQVLEFDRHIMAWHRSNETSKRLDAIPGVGPALATALVASIANPRAFRSGRDFSAWVGLVPKQNSSGGKEKLGSITKRGDRYLRSLFTAGALAVIRYAKIHGTKHRPWLTQLLARRPTKVAAIALANKIARMAWAMMAKGERYKEPAALAA

SEQ ID NO: 410772 - protein, 423 aa, unidentified
MDVVGIDWAWDFHICYSIEKDKVWRIKDNEVGYKELLNEVSREAVFVIEESFNRISDFLLSEGREVYLLPPKRSKEARGYHSNGIKTDSLDARSIALTYSEHPEYCIRARNNEEGRSFREQLRAYRYYKDEASRLKNKLHNELHDHFPEFVEEMGNWTKNKGKILLLSITNELKNLSIEEIHSHFKENQIAFTNSLREKVKALKKREWHITKYTLMMVANAARHLLEVERGKQEMKKEMERNLKESKYRVILSLPGVGVVTGVALVAAFLNHEFKNYRNFQKYCGTVPVIIQGGNYHKCVMRKHCDRNLKGVLHMMALSAVNEGSWMRGYYARKIKEGKSFGHALRALANTLVKIAFAMLKGLKAYDEELFLSSRGNKSPQSNYTTKTSTQGTERRTDERFSLLDSAAQTNCHLGTDSGRLSP

SEQ ID NO: 410773 - protein, 415 aa, unidentified
MSIKEKGVVGVVRYIGMDVHREFAQLAVVEDGLVRDEGRIAVTPEALREWAADLRSDDQVALEATGNSDAIANLLTPIVRRVVVSNPSKTRAIAEAKVKTDKVDARILAQLLAADFLPPVWLPDDRTRALRRQVTRRAHLVRQRTRIKNQVHAILARNLAPTPPMSDLFGRTGRHWLSTQPLPADERSSVQALLRQLDFHGAELAVVDKELAVEALSDPVVARLMTIPGVDAIAGIAVVAAVGDFRRFPDADRLVAYVGLNPKVRQSGNSAPVHGRISKAGRAQVRGVLVEAAWSASRAPGPLRAFFQRIKARRGFQTAVVATARKLTVLAWHLVTKDQDYAFARPSLVSHKRRKLELAAGAPSRRGNYRIPGAAYNDKQRRNEEKQIAEQAERAYQVFVAHWQATKPTGRRTPV

SEQ ID NO: 410774 - protein, 357 aa, unidentified
MESQEVKYVGVDCGKKSIEVVRINSENSLERRQFSTTESGINNLLQWLTLNDIVGLEAGSQSFRIAKSILNKGVQVIVLNPGNLATIYQSLKKTDKEDSLKIARLIQRHPIEELPTVPIPNDEEEDNRRLCSEHENWTKQLTQGKNRLHSLFTQAGLTHITKKHLRTKVSRESLCLTSDRYKKKRKRILKVLDLVEQNLKLHRKRNSRSSQKKQKTYVQTIMSMPGIGMITSLAIMSYMGDCKRFSSAKQAAYYAGLVPRVDISGDTVRYGRIINRGCHSIRRVIVQAAWSLVRCQHGGKVKEFYQRLYLKKGAKKSIIATSRKMIEVLYAMIRTGKLFDSMPENILNRKLTQYGLM

SEQ ID NO: 410775 - protein, 419 aa, unidentified
MDALNTTYFTAYIGIDWADSKHDVCIQSVHDKTQEFDVIPHQVEKIDEWVENLCKRFGSPMAVAVELSKGPIVYALQKHNCFVIFPINPSTLARYREAFTPSRAKDDPTDAQIAVELILRHPERFQPLRPQSVRMRTLATLVEQRRELVGDKIRITNRLRAALKQYYPQMLEWFDHIDTPLFCDFLTRWPTLLQAKRARVNTLKTFFNEHNMRFEQVLERRLTAIKAASSLTLDEAVIVPYRMQALVFVEQLRIVLDAIKQFDVEIEATANQHDDYRLFSALPGAGPTLAPRLLVAFGEQRERYKNAADMQKYSGVAPVTERSGKKHWVHWRWQCPTFLRQTFVEWASQTINKSYWAGVYYRQQRAKGCTYQAAVRALAFKWIRILYRCWQTRTPYDEMVYLKALARRGSPLLVDTQMT

SEQ ID NO: 410776 - protein, 387 aa, unidentified
MAQVNDLSRSLTAFDPISTLVVVVEMSKASWLVSGAVPGVERQPLKKLEPDAIALLRLIERWRNEAVRAGRPISRIALAYEAGRDGFWLARWLIARGIEAHVIHSASVAVSRERKRAKTDRLDAAMLMRVFLGWLRGERGHCGMVAIPTMEEEDARRPSRERECLVNERSRITNRMKSALARLGVRGFKPHLRKAPERLAGLRTAEGTSLPTNIIEEFRRDMARLALVRDQIRSIEKTRAERLERAPDTGPHAMVRLLARVIGIGIETADMLVREILSRRLRDRRAVARYAGLTGSPDESGLKRREKGLAKAGNARVRRGLIQLAWRFLVFQKDSALARWYRTRTEGPSGARKTTMIVALARKLLIALWRLVTTGEIPDGVALRPAP

SEQ ID NO: 410777 - protein, 333 aa, unidentified
MNEITSVAIDLAKGVFQLHGTDGQGRVRLQRQVRRAQLLSVLARLPRCEVTMEACAGAHYWARQLRLLGHEPRLIPAQHVKAFARRQKNDRNDAEAIACAARQRGIPQVAVKSEEQQAVLAVHRVRTRLLRERIALTNQLHGLLGEFGCVLPRGLKRLREELLCVLDAGTLPALLQSTLRDQLEHLGQLEQRLQTLTRQLDELARHSEPCQRLMRHRGVGPLIATAFAAEIADPGVFRNGRQVAAWLGLVPRQHSSGARVRLLGITKRGDPYLRQLLIHGARGALRHAARHSDALSRWVLNVQQRRGANRASVALANKTARHLWATLRYSTAS

SEQ ID NO: 410778 - protein, 445 aa, unidentified
MSEPSTTIPSEPEWAALAAIDWADQKNFWRLLPAGSRQSEAGALDNTPEAVEVWAANLQQRFGGRRIAVILEQSRGALVYMLTKYPHLVLFPVHPTTAARYRETFAPSGAKSDPSDTDSLLDLLLRHRERLRPLQPDTAETRLLHFLVEERRQTVDERTRESLRLTDCLKLYFPQVLQWFDDVASPLVGDLLERWPTLEELQRAHPGTLRRFLQEHNCRSQEKNAERIAAMQQAVAATQDQAVREACLLITRSLVAMLATLRAQIAMFDRRIAELVADHPDGALFRSPPGAGAALVPRLIVAFGTQRERYQSAYEMQCYSGIAPVTEASGKSQWVHIRLACPKFLRQTFHEFAASSIQQSEWARAFYEHQRNEKQKSHHAAVRSLAFKWVRIIYRCWKDGKPYDEEIYLQSLRRRGSLLGEVLGLTTGVGWKSIAGFQKLSENNT

SEQ ID NO: 410779 - protein, 354 aa, unidentified
MKTSSTDTIGLDLGDRYSQVCVLNCEGRVTKSVKIRTNGAGIRRFFGKRASTRVVIEVGSQSPWVSQMLTGLGHETLVANPRRVKLISAGHRKSDQLDAELLARLGRVDPQLLAPITHRSEKSRRHLTVIRGRDELVATRTSLVNHVRGLLKSFGNRLPSCNTPAFPKRARAHVAEFKPSLVATLEPTLLVLETLNQQIKELERQITELARNAYPETQQLECVDGIGTLTALTFILTLEDKNRFVRSRDVGAYVGLCPKRSQSGDKDPELRISKRGDKHVRQLLVIAAQRTLGPFGKDSDLRSWGLELAARGKKNAKKKAVVAVARRLAVLLHRLWVTGEEYQPIGYSCRARAA

SEQ ID NO: 410780 - protein, 486 aa, unidentified
MSIINANNNTKQLLRGISANLLIVVDCAKKEHRANFFDCSTGRFIYKNALKVRNDLDGFKFLVEKTQKILQQKKFKDSKVEVYLEDPCTYSQGLIYYLQKQKYLVRYVNALNASNYRDNTRASNDVLDLDGIARTALMNQFYDLAIQSDLYRRLKECTRERQRLIKDQTRHKNVIHTFIDLFFPDFLNCKKSGVTAFSKGCIELTLHKEFSSRLFFKSTPNKVINIIKKTGISEPEKVYLKLKELASKCVDLAKDEPDVFLFRLRRLQEQARFYQARQKCIELEEQQMAQLLQYSPLALCLSITGAGLISIATIAAELGDPRNWRTIDQTASYGGVIPRQKQSGGSESAPHVLSVPKDANKHLKNALMTIVGSTKKYPHPAQKHTGKTHPLKQHFDKVEMRGGASFMSTAKKLIRLIYAMVRDENIYMADIKKMTEEHHLIWIEEGTQKLLEKWSKYGIVPTEENYLGKWIQQKEKITQLIKEDLK

SEQ ID NO: 410781 - protein, 400 aa, unidentified
MGIARAEKPRIETLPAKRFHTWGNSGLEPNLGSGNQLSSIDEAQRGLCNHGGTAMEHYVGLDVSLKLTAICIVDRTGKIVREGVVTSDPETIVAFIKSHAPHVARVGLETGATSTWLWTELNKMGLPVICIDARHAKAVLKMQINKSDRNDAVGIARIMQCGWYKEVRVKDLDSHATKALLVSRALLVKIKRDIENQIRGLLKNLGLVIGRAKMNVFAARAAELAEARPELAAAVEPLLKAREAVGRQIADLDRKVMRLARNDAQVRRFMTAPGVGPITALCFLATIDDPTRFKRSRSVGAYVGLTTRRYASGEIDWTGRISKCGDAMLRSYLYEAANVLLTRVAKWSTLKAWGIRLAKRSGLRKAKVAVARKLAVILHRMWIEGTEFKWSSKEAANQPA

SEQ ID NO: 410782 - protein, 389 aa, unidentified
MKIFVGIDIAKLNHFAAAISSDGEILLEPFKFTNDADGFQLLVSKLESFDKNSIIIGLESTAHYGDNLVRYLVTEFYQVCVLNPIKTCQMRKNNVRKTKTDKVDTFVIAKTLMMQDDLRFITFFDLDMMDLKALGRFRQKTIKQRTRLKIQLTTYVDQVFPEIQYFFKSGLHQHAVYALLKEAPSPKEIASMHMTHLANLLKVNSHGHFTKEQAKELRVLAQKSVGANDSAISIQITQTIQQIELLDSQLDKIEAEMTDIMKFNDSVIMTIPGIGYINGGMILGEIGDIHRFSNPNKLLAFAGLDPSVYQSGNFQAKTTRMSKRGSRVLRYALVNAAWNVVRNNATFKAYYDAKRAEGRSHYNALGHCAGKLVRVIWKMLTDEVEFNLE

SEQ ID NO: 410783 - protein, 321 aa, unidentified
MAKRITICAGIDTGKRKLDVAIDGTSSQLQVENTAEGHKMLLEWLRRHKVKRIGIEASGGYEQAVVIELRRKRFVVVVFQPAQVRAYAKFHLQRAKNDRIDAALIGACTAAVKKIHPAPDPRLQPFAEHLTLIEQVGEDIKLYKNRLETCRDPRIQKLWKEEIARLAKRARVELKALVAAIREHRDLAQRLDLIYSVSGAGMPTAVEILVRMPEIGQLSREQAAALAGLAPYDDDSGEQVGARHIDGGRKRLRRALYTAALPASFRWNPQLIALYQRLKAAGKEHKRCLIACARKLLIFVNTIVARGTPWQDQPPPAAATG

SEQ ID NO: 410784 - protein, 391 aa, unidentified
MICVGIDIAKDKHDCCILDSDGMVRADCFTIPNNMDGFKQLLQTIRNCTKKSDKIKVGLEATGHYSYNILGFLLDNGLPTYVINPLHTNLYRKSLSLRKTKTDRVDARTIATMLLSDVDLKSYTDIAYHNEELKSLTRYRFEKVRERAKLKQSVSRLVTILFPELEKLVPSLPAASVSALISEYPGAKQISEVHLTKLTNLLVTASKGHYGKEKATLIRETARASIGSVMPAKSLELKHTIKLIQELTSEINEIEDSIQKIIDELNPPILSIPGMGVNSAAVILAEIGDFSNFSSPDKILAYAGCSPSTYQSGKLTNCYAHMEKRGSRYLRYALYNATKYVCHWNPVFAEYLAKKRAEGKHYNVALSHSMKKLVRLIYALQKSGKTYLAAA

SEQ ID NO: 410785 - protein, 338 aa, unidentified
MIVIGVDVHKQSLTAVAVDEAGRMLDEQTVAVADGALVAWASTLCGERLWALEDCRQLTRTLERELLSVGEELVRVPPKLMAPERRAGRARGKSDPIDALAVARAALREPSLSRPREDEQPFRDLKLLVDHRDDLVDERRRAQQRLRWHLHQLDPAFAVPAKSLDRPTHLDRVRRWLARRPPEVQVRVARDLVVRCRSLTRAIVELDRELQQCTAQLAPALLELPGCGAITAAKLLAEIGPIGRFDTDAQLARHGGVAPLEASSGRVQRHRLDRGGNRQLNCALYRIAITQGRYYPEARAYLERKQAEGKSRREAIRCLKRQLARVVFNTLKASPALT

SEQ ID NO: 410786 - protein, 386 aa, unidentified
MHDGTNLPVPERTGIPGDCATLFVSLELSRSTWVATSLAPGSKKMSKHTLAGGNGRELLDLLARLKTRAEQRIAAPVKVVTIHEVGLDGFWIHRLLDANGVESHVVDPASIAVPRRHRRAKTDAIDGETLLRTLMAWQRGEPRVCAMTVPPSPSEEDRRRISRERATLLRERIRHTNRIRGLLFGQGIANYNPLNKNRRECLEELRTGDGRSMPARLKAEILREIDRLELVLRQISEVEAERDAMLRPAEASSPAALLMRLKGIGAEFATVLYLEGLFRHFENRRQLAAYAGLAPSPWKSGSIDHEQGISKAGNPRLRTTMIELAWMWVRYQPDSALSCWFRQRVGSERGRTRRISIVALARKLLIALSRYVTHGEIPAGAVMKPV

SEQ ID NO: 410787 - protein, 335 aa, unidentified
MQIKHFIGIDVSKDTLDLSVVVNGKVLTHYCIGNNSKEIKSTVNKIMKSLGGSFEDTIFCMEHTGLYNRPIVKWLHNNQGKMWLESGAHIRKSLGLVRGKNDKIDSSRIAMFAYTNQHKIKLWTLPRQVIEKIAALLSQRARLVKVRKQLTTANKEQKKFLEKDVMHSLNVYTDRTVSVIDKQIEAIESEISALIKEDEKLNRMYQIITSINGIGFVTASYILVTTNEFININDPKKFACYSGVVPFGHTSGTSIRGKNRVSHIANKTIKALLHLSALSTLNTPGEIQDYYNRKIAEGKNKMSIINAIRNKLILRIFACIKQNREYEKKYCYKFA

SEQ ID NO: 410788 - protein, 419 aa, unidentified
MSFKILKNNCCGLDVHKTWIFACIGITDSNKRTVYKQARFSSFTKGLQELCHWLAKYDCTDVCMESTGKYWIPVFNILEKNNIWVTLSHPKYTKPQKGNKTDRKDAKWICDLYMCGMVKPSFIPPADIRELRDLVRYRFKLTCMITGEKNRAHNCLTVSNLKLDDVFSDIFGRSSRSITEQILQHPGETFDVAPFVHGRCKTPIEEIQAAVDGAVSKEQAVKLRQCLNHIDELEMHKSEIEREIFRLSDKYEDILTFIRTVPGFDKNPMTAIQVLSEIGGDMSVFPTAKNLVSWAGCCPHNDQSNHKIKSTRISRAGSYFKPVLVQVANALIKSKKHPEFSTRYRRIKARRGHKKAIIAICRMILTAIWHILTDLKPYTAKGFLEPRPVSKEKVLTASQALNLLKQRGYVIKDEPIFIS

SEQ ID NO: 410789 - protein, 451 aa, unidentified
MSSRSSRRKRKSAAMERINVDAAGIDVGASSHFVAVPEDRDSQPVREFLAYTTDLYRLADWLAACGIRTVAMESTGVYWIPLFQILEERGFEVCLVDARRVRNVTGRKTDVSDCQWLQQLHTYGLLAAAFRPDDETCVLRAYMRQRDSLVIQAGQHIQHMQKALELMNVKLTEVLSDVTGTTGMAIIEDILAGKRDPDELAKHRHPRCKHDQVTIARALTGHYRTEHIFALRHAVALYRQCQTLIGECDAELERFLEQHGPTDDDSTPPPSERANRPAKNGLGFDAHGHLYRLAGVDLTQIPGLSTASVLTLLAETGLDMSRWRSSKAFASWLGLSPNNRVSGGKVLASRTKACVNRAARVFRMAAYGLHHAKSALGAYYRRMRMRLGAPKAITATAHKLARLFYSMLRTKKSFADIGQDAYDKAYQARRIKGLQRTARQLGFQLVPCAPD

SEQ ID NO: 410790 - protein, 430 aa, unidentified
MKSNTQNAKIEAITEKTLVLGIDVESETHYARAFDYRGIEYSKKPFKFSNTEAGFVTFKEWILDLKERHEKDKVVPGMEPTGHYWFNLGKFLHDNEMKPVLVNPHHVKKSKELDDNNPTKNDRKDPKVIAGLVREGRYMIPYLPDGVYADLRTASNIRFQLQAELTRIQNRISRWFNIYFPEYKTVYGKPDAKSGILILKTAPLPEDILTLGVDGVNQIWRDAKLRAVGKARAKTLVEAAEHSVGNKEGAVSARMEIRMLLEDYESRNIRLQEVMALIEELVDQIPMAEKLLEIKGVGIRTVSGFLAEVGDISRFNNPKELQKLAGLALVENSSGKHKGETTISRRGRKRLRYLLFEVAMSLVSKNQEFRELHNYYTTRRLNPLKKMQSLMAIAAKLIRVFYAMLAKGVDYDPKKMVSDIKRPAVYLQVA

SEQ ID NO: 410791 - protein, 347 aa, unidentified
MRFYTTQHPFYCGIDLHARTMYVCILNQAGETLVHRNMTATPEALLKAIAPYREQIVLAAECMFTWYWLADLCAEHGIPFILGHALSMKAMHGGKAKNDKIDAHKIAVLLRGGMLPQAYVYPAEMRATRDLLRRRMHLARKRGELLAHVQNTNSQYNLPAIGKKIAYKANRDGVAERFADPAVQKSIEVDLALIGYYDALLRDVELSIVKTAKHHDANTLYLLQTVPGIGKILSLVLLYEMHDIERFPRGQDFASYCRLVKCARESAGKRSGTSGNKIGNAHLKWAFSEAAVLFLRDNPAAQKFLARLEHKHSKGKALTILAHKLARAIYYMLKRQTAFDLDTFLRG

SEQ ID NO: 410792 - protein, 399 aa, unidentified
MFCGWDWGSTLHGVCLLDEDGATIKTWMVRHTEEDLSALFTEFAQLGEPGLMPVAIERGEGLVVGLIARAGHPVLMVEPTAFKAARPRWGAAGAKSDAADAFMLADYARTDGHRLRRVEPLAQATRELAALVRARTSLVEARTAASNQLWAVLAEHWPGAALVFQKLTSQIALAFLADYPTPQAAALLGEGRMRQFCRRHSYRGGKSPAELMSRLRAAPASANPIAEKVLEAIVRSQVAQIGLLNVEIRGLERKTADALAAHPKTALLKTLPRVATVSLAALIAEIGPLLERCENPEQVAAMCGAAPVTRASGKSRTVGFRYTANKPARVAITSFADNSRHSSAWAGDCYRRARARGARHPHAVRILARGWVRVIWACWTTDTPYDPARHRGEQRLAAA

SEQ ID NO: 410793 - protein, 332 aa, unidentified
MNYELFVGIDISKLTIDVVAFTRKSFTEASHHVFKNSYDGFGEMLEWLAVYGYAFEEVLFCCEHTGLYICPITSFMDANGLSLWVENGLHIKRSIGLKRGKSDKADALAIAHYAFSNEHKARPYRFPSATTSKLKHLLTHREQLVRHQTSLKCTCSELKGFDGENATYCIADSQEILAIYAERIKKVDAELAAVIEADQDLNTKFNLVKSVHGIGKQTAFFILIHTEAFSAFSCYRKFASYCGIAPFPYSSGTSIRGKNRVSSLANKKLKALLTMCALNTIKKDNEFKRYYDRKKAEGKNSMCVLNVIKNKLLSRAFAAVKRGTPYISNLAA

SEQ ID NO: 410794 - protein, 388 aa, unidentified
MFAGIDVASERHMLARLDAQGVPLGKPVPIIEDRDGYDTLLHLLGPPPVLVAMEATGHYWKNLYAVLAATGHHVALLNPLKTRRFQDSGLERTKTDAIDAAGIARFAFEKRPEATQLHDAAAEALRELVRHRDRIRQDFDDRVRQLHRLVDLGFPEFTRHVRGMDSMLATALLSECPTAHDFARATPKRLAKLRYDGRHLVGAERATQLIEAAKRSVGQHHGPAYRLQARHICQDLDMWRRRLGDIERDIDGLLESNEVGQLLLSIDGLGPQTAARIIAAVGDPARFKSAAAFAAYVGVVPGLRQSGKNGSRRAACAPMGNARLRRALWMPVVGAVRRNAWLKPFYDSLIARGKPPKLALVAAMRKLLHAAYSVTKNRKPFTIKLAET

SEQ ID NO: 410795 - protein, 344 aa, unidentified
MSYFVGLDISLDKTSICIVDNNGNICVEGKAETDPNAIATFLQKNDLPLTLIGLEAGNLSSWLYIGLAECNLPVVCLETRHAKAALNAQNVKTDRNDVRGLAQIVRTGWFKEVHIKSIASQKLRVLLNSRKLLLNKRLEIDGQIRGTLEVFGLKVGKVTVSNYEIRIHELIGGDTELEAYIYPLLAVRQSLLEQCLKLEKMVLEYVKHDQVCRRLMTIPGVGVLTALAFKTTIDNPRRFRKSKDVGAALGLTPRKYASGEIDYNGHITKCGDVMVRSHLYEAANVLLCRSKKQTPLRAWGMRLARRSSWKNACVAVARKLAVLMHRMWLDGTEYKVEQKASNAA

SEQ ID NO: 410796 - protein, 485 aa, unidentified
MTKRKMSTFERLEGGRMNRKQRRELGRQVAMADPGLTLVNVNAGGVDVGNESHYVAVPPDRDPQPVREFGCWTAALQQMAEWLKSCRIDTVAMQATGVYWIALYDVLEQQGIRVVLVNAQHTKNVPGRKTDVQECQWLMKLHTYGLLRDSFRLAQQMEGVRTIWRLRDRHVKEAGRAVQHMQKGLTKMNIQLANVLSDINGLSGQQIIAAILKGERDPWKLADMKNYRVRASREEVARSLEGNWREDVLFELRQAVDSYQFAHQQMQECDKKLENYLANLPARMLDIPTQPENELTATPEKKAKKARKPTGNQPHLDLETELKRICGVDLTSIDGIDVMTALTIVSEIGTDMSGFQDEYHFTSWLGLTPAQNISGGKIIGPGKRKVKNRVATALRTAATTLLKSDSDLGARYRNLRRNLPSFAVAVKAMGRYLAVLIYRLLTHGQAWVDRGAIRYKRRRTEQELASLNFKARAHGFILTPMAEAS

SEQ ID NO: 410797 - protein, 404 aa, unidentified
MEHVIIGVDPHKLSATIEVVDHHERRLGSGRFTTDQAGYTAMRTYAKSWPERVWAVEGANGAGRPLAQRLLEAGEHVVDVPAKLAARVRLFDTGHNRKTDALDAHSIAIVAVRTEGLRVLKVDGQLEALRMLSDRREALSRRRVQTVNRLHALLGELLPGRAKKDITPLRAKALLASVRPRDIAGKTRRRIAAEELAELVAVDAKITKATAELKAIVLARGSHLMNIHGVGPVVAARALADVGDVARFADRNRFASWTGTAPLDASSGEQNRHRLSRAGNRRMNHMIHIAAVTQLRLNTDGRAYYRRKRAEGKKPLEALRCLKRRISDTLYRQLIADHQRAAGGQEAGAGPGGHCGASQESSAAGSHPLTGTSDQPLPGPATPTLQPAPTTRKTHRGGTLVATG

SEQ ID NO: 410798 - protein, 460 aa, unidentified
MMNRNRSKSRVARTMPMVNPNAAAIDVGATMHMAAVGADRAPEPVRSFGTFTADLHRLVDWFKECGVETVVMESTSVYWIPIFELLDARGFNVFLVNARDAKHVPGRKTDVSDAQWLQRLHSFGLLRASFRPKGQIAELRSYVRQRERLLEYAASHIQHMQKALTEMNVQLHHVVADITGATGLRIIRAILAGERDPEVLASLRDSRCQASAETIAKALTGNYRSEHLFALEQALALYDAYHEKASACDVRIEAVLKGLSIHRGLGHGAVPPPRRRHRTDQANALAFDVRAALFALLGRDITVINGLGAYLSLKLIAECGDDLSSWPSAKHFTSWLGLAPSNKVSGGKLLSSRTRRSCGRAAALLRLAAVTVGRTDTALGAFYRRLSSRIGKAKAVTATARKVAVLFYNAVRHGMEYLDPGASSYETRYRTRVVNNLHRRAKAFGFVLQPMEPKAGAAVS

SEQ ID NO: 410799 - protein, 325 aa, unidentified
MSGAALAGAVVGIDIAKDSVHVAVRPGGQQWPAATTAVGLRQLAERLVAVAPRLIVLEATGGYEQPVVAALTAAGLPVSVVEPARVRHFARATGLLAKTDRLDAQVLARFAEQLEPAVRPLPDAVQRELALLVQRRRQLLEMLAAEEQRLEQQARFPRSPITGSLVAHVAYLRQQVADTDQALTAHLAAHPRWDATHALVRSVPGVGPVTAATLLAEVPELGRLSRQQIAALVGVAPLARDSGRWRGQRPIGGGRAAVRQVLYMATLTAVRCGGSPLRAFYQHLRARGKVFKVALVACMRRLLVILNAMVRDGQPWNPALCAVKT

SEQ ID NO: 410800 - protein, 342 aa, unidentified
MNHYAGIDVSLECSSVCVVDPSGKILREARVASEPEALVDWFRSQGMSFERIGLEAGPLSQWLFAAMKAAGLAVELLETRHVRDAFKAMPVKSDRNDARGIAQLMRLGWFRPVHCKSLEAQEVRAMLTARKLVQSKLRDVENSLRGILRGFGLKVGKTTERGFAGRITELVSGHPGLEVIAQALLAVRAVLRQEFAAFEKQARRMAQTNPRTRLLMSTPAVGPIVALTYASAIDDPCRFKSSKQAGAHYGLTPKKHQSGETDYTGRISKIGDSSVRTALYEAAHIMLTKPLKGCSQLKSWAMRIARRAGMSKAKVALARRLAVIMHRMLADATPFNAAAAAA

SEQ ID NO: 410801 - protein, 351 aa, unidentified
MKDYTQKTVYIGIDVHKKTYAVTAICEDEIVKKDTLEAYPENLVSYIKKYFKGAKINTAYEAGFSGFHLHRYMTVRGINNIVVHPAAIKISANDRVKTDKRDSLKIAKQLSKGELKGISVPSEKREQFRALTRTRDKLLDTRKRVGNQLKSLLFTQGLIDPKDDMKVSKSWIKKIQGIPLDEEIKYCVESFIELWLKLDKKLKEILLKLETQAKEDKIDIIYRSVPGVGALSARILSNELEDMSQFRNIKGLFSYTGLTPSEYSSGEHKWLGNISRQGKSSLRMILVQIAWRSIKIDKHLLEVFERISKKAGKKRAIVAVARKIIGCIRACFMTGELWCANASETNEPLPA

SEQ ID NO: 410802 - protein, 394 aa, unidentified
MSAGVAVECEVVGTSPAQTRRVTFGVNTMVAYRAPARVPSEREEVPVSIVGGLDIHRQQLTYDYLDVDTGQLWRGQIAPADREHLAAWLARFAPADGPVELAMEACTGWRYVAEELARAGVVAHLAEPAETAVLRGPKRRAKTDKADARLLRELLGARRLPECWIPPAHVLECRALLGLFHGLRTEHTAWVQRVHAVCFHQGTPALGVGALSTAEGLARLEELCQRQLSPAGRLQVQTALAMLAALDAQLDVVRRQLLVCSRRLVGARVLHQRLYGVGPVTALALCSWLAGGGRFRSARKAVRLVGLDVTVYASAGKRSPGRLSRQGPPVLRWLVYEAGMTHARKLAPDHDYYATVADRIDGKRAALSQARKLVRRAVHILDELGDQALVWTQP

SEQ ID NO: 410803 - protein, 458 aa, unidentified
MVQTKRPRSRRDMPAVHPDAAAIDVGATMHVVAVPPDRDPEPVRTFGTFTADLHRLADWLRACRIKTVVMESTGVYWIPIFEILEQKGFDVQLVNARDAKHVPGRKTDVSDAEWLQRLHEHGLLRGSFQPKGEVKALRSYLRQRERLLDSAATYIQHMQKALTQMNVQLHHVVSDITGVTGMRIVRAIVAGERDAATLAAFRDSRCKEPVETIREALIGNYREEHVFALTQALELYDIHQKKVAECDKRIETVLEQLKATRPTPAKPLPAPRHKTKQSNAPNFAARDALYAVLGIDLTQIHGLGPYLALKLVGECGTDLSAWPSAKHFTSWLSLAPRNKISGGKILSSATRRSNNRAASLLRLAAVTVGRTETALGAFFRRLSARIGKAKAITATARKIAVLFYNALRHGMKYTDPGAAYYEERYRQRVLSNLQRRAKAFGYVLQAAAPQAPQAVGVS

SEQ ID NO: 410804 - protein, 316 aa, unidentified
MTTTPVFVGIDVSKDRLDVALRPTSDRWALAHDAPGVATLVARLQGLAPTLIVLEATGGLAVPLTGALAAAGLPVVVVNPRQVRDFAKATGKLAKTDALDAAVLAQFAEAVRPALRPLPDAATQALSALLARRRQLIEMLTAEKNRLGSALPPVHKGIRAHIRWLDRRLADLDADLAQAIRESPVWREKDDLLQSVPGVGPVLARTLLASLPELGTLTRQQIAALVGVAPLNRDSGAWRGKRRVWGGRAPVRAALYMSALVATRYNPVLRAFYQRLCAAGKAKKVALTACMRKLLTILNAMLKSRTRWHDHFALSA

SEQ ID NO: 410805 - protein, 387 aa, unidentified
MPQLNDLSRSLVALDQDSTIIAVVELSQSSWLVAGVLPGIERQPQKKLEPSAERLLGLLHRWRDEAVRAGKKITRIALAFEAGRDGFWLARWLNARGVEAHVIHPSSVAVSREHRRAKTDRLDTEMLKRGFLGWLRGERGHCTMARVPTMAEEDAKRPNREREGLVGERTRIVNRIRATLARMGIRNFKPTLRKAAERLATVRTPEGMPLPPNTLAELQRDMARLGFVVSQIREIEQARQKRLEQETETGPHAMVRQVARVIGIGIETADMLVHEVLSRPMRDRKAVARYAGLTGSPDESGARRREQGLARAGNARVRRGMIQLAWRFLRFQNQSALAQWYRARTADSRPGTRKTMIVALARKLLIALWRFVTTGETLDGVILRPAG

SEQ ID NO: 410806 - protein, 312 aa, unidentified
MTEHCYCGIDVAKERLDVQVLPHRQRFSVDNNATGWAELVERLRALPVAAVGIEPSGGYERGIIRTLLAAGLSVRRINPSKLRQFARARGILAKNDRLDAQLIAEYVSIMPTRVVQRAAASERLAEVVTMRRQLCDEHVTIENQAAHVEDAILRRLNKRRLARLKADIHLLDKRMAEIVAADAILAQRYELLTSMRGVGPTLAFTLIALLPELGQMSRKQIAALVGLAPYDFDSGKLKGHRCIYGGRMPVRNILYMAALSAARYNPVLKIFHNRLAATNKKPKVIIVAVMRKMITTLNAMVRDNAAWQPRTA

SEQ ID NO: 410807 - protein, 361 aa, unidentified
MSSIVYGALDVHNESFQAELIKPDTGEFISEKLPNDRQRLLRSAQRWSKLGELRLCYEAGSAGYVIQRWLTEAGFHCEVIAPSLVPKAPGDRTKTDKRDARNLAMLYRAGLLHVVHVPTPEEETVRAVVRVHDQLTKDMTRVENRITRYLGTLGHFYPERRKWTQKHRAWLRALPLDPLQELIVQTHLEELDTLVARRQVIDRKIEEIASTEPYRENVGRLMCLKGIKVISAMGLLVTTGDAHRFAGAPQLMSYYGLVPREDSSGDTRRTGRITKAGSSHARGILGEASWNQTRKPGNCKRLKKHWQTQPEAVVRIAKKAERRLHDKFWKIALRKDRRTAVTAVAREMAGFVWAILTVEVA

SEQ ID NO: 410808 - protein, 345 aa, unidentified
MDVSIIGLDLAKHVFQVHGVDAEGRVVVRKALRRSQVLPYFAKLPPCLIGIEACGTSHHWARELLALGHEVRLMPPAYVKPYVKRGKTDAADAAAICEAVTRPTMRFVPVKSREQQAALSMHRARALLVKQRTQLVNMIRGLFAEFGVDIPQGLERALTMARQIAEGEDAPDLPANATRMIAILSRQALDTHGRLREIDRDLAVLSRSDETARRLATIPGIGPIGATAFAVAVTDPGQFRSGRQFAAWLGLTPLQHSSGGKERLGRISKMGDKYLRRLLVIGATALVRQFRSRPEKATPHFVALLARKPVRVATVAMANKMARIVWALMTRGETYRAAHVPVLAT

SEQ ID NO: 410809 - protein, 411 aa, unidentified
MVKENFIYVGIDLHKETHTAVMIDCYNQKLGEITFPNRPADFPKLVTKVKKCNTDAKEVVYGLENAYGYGRPLAVWLIDKGYFVKDVNTAISHRQAKHRGAMYRKSDSDDAGAIALATLNMLDKLPDAYPNDAYWSLGQLVHRRDNIMKQRTRLVNQLHEQLCIAYPSYKQFFNDISRPTALYFWEHYPSRKYLKGKSVEDLRAELVPVSHNKCSTKTCEKILDAVASDKVKNNAYQDARDMVTLSIVSDLQHYDSQLTEVDKMLEQMYKMLGCTLTTIPGVNVITAVKILAEIGDIKRFANANKLAQFAGIAPLHLSSSGKGKDVATKQGNRRLQVTIYFLAIQMVQLSSKGTPRNPVVRAYYEKRKAEGKTSQQALICISRRLISIIYGMLKNGTEYRMLVVENAGEKL

SEQ ID NO: 410810 - protein, 443 aa, unidentified
MPQPILAVGVDPAKRLHRAVAVLFPDEVVLDVELPNAFDAVANLDLRLCELANQHGADLVYGLEDHRRYGRLFCQVLTERGRDVRVVNPLWTNRQRAFYGQDKDDAIDGRSIAAVVLRRHHQLPLASDFGEVAQAIREAERSLQDLSKVGTQLVNRLHLQLSDTYTAAYEEYFGKLKSPLALRFFRRFPLPQDLVGHNVEMLASLLLDLAGGKGLIAMRSKAQAILETSGAMRASPRTLALELKAELIRQLCDELLANHDRIIRLERMLREQLLPATKQTITTITGISTILAATIIGETGSISRFRSPAAFAVYNGTAPARNSTGGRDRHKARRDCNHRLKRAFYLAARAAVLHDPIAKAYHQSCKSRGLSYVEALKRVARRMSDVVYALLKSGKAYDRSIIEHAIERRLEQAAHAARSHAKQSLVHSRPRKSNSPLSQRQVM

SEQ ID NO: 410811 - protein, 350 aa, unidentified
MIIIGADYHPSFQQIAFVDTDTGELQERRLLHREEAEKFYRDRAAQGMKVRVGMEASGHARWFERLLAELNFELWIGDAAEIRTKRVRKQKTDRQDAQLILRLMLEDRFPQIWVPSWENRDLRQLLWHRHRMVQARTRIMNQLQAVALNEGLRCKKRLWREVGRKQLESFLLAPWASRRRRDLLELLDRLNPTITDLTQTIEQEVEKCPEAQRLMTHPGVGPLTALAFVLIIGRADRFQCGKQIGCYLGLVPLEESSGERRRLGHITKQGNSLLRFLLVEAAQVTVRSIPEWRSKYFHLAMRRGRKIAKVAMARRLAVCLYWMWRQGWDYEQLKKFGPHAGQPEHRDGVQ

SEQ ID NO: 410812 - protein, 422 aa, unidentified
MSYCPVAGIDVSKRFSDMCILSPDNKIFAQEKIYHDETSINRANALLQKAERLFFRKPVIVMESTSHYHLILFQFFSEHGYDVIVVNPLQSNSMKDFSIRKRKTDRVDAFKLAMMYRTKTLRPSQIPQTATRALRQLCRHRAELLNDVSSYKNRLTALLDQTFPGYDKVFSDVGGVTSCAVLVRFPTPTILLVEEESELVEVIASASKSGYSFAKKKAGLLISAAQKAQAWGIHSCADETLIVCTIQMLRTLSENVLQIETAIDNLLAQIKEMRNNVSLLQSIPGIGSHSAALLLGEIGDISLFKKPKQLAAYFGLDPTERQSGSFRGTKNKLSKRGSPYARAALHMGVVNSICKRGKDSAANPVLLSYYEKKCKNKPAKVAQAASMHKLVFIVFAVLRDQKPFELKTPEQHAVEQGFVKAA

SEQ ID NO: 410813 - protein, 352 aa, unidentified
MAYEYHIGVDYHKAYSHIVVQDGSGKTVRSGRVRNDRRSVAGFLHRYSDNAHAVIEATRNWTVMFDWLDELVDEVVLAHPLKVKAIAEAKIKTDKIDATILSHLLRADLVPAAHVPGHQARQVRLALRERMFYIRPRTMVKNRIVTAFDRYPEQTAAMKRCSDLFGAAGRKQLAALQLSEIDRIQTDRSLAFIDDIERRIKQCETTIKALSKSNANVNRLKTIPGIGEFFARLIDAEIDDIGRFRSAKKLAAYAGIVPSTYSSGGKTYHGRIIKQGNKWLRWAFIEAVTPAVAHDPVLKEQYEHLKTKGSNRAKVAVARRLLTIAFQVLRDSRPYERRAVCPESGSKQSRLS

SEQ ID NO: 410814 - protein, 337 aa, unidentified
MNIVFLGIDLAKNVFQICGLNQAGKPVYTKRTGRKELLQTLANIPACLIGIEASTGAFYWQREFEKLGHNVKVISPQYVKPFVRGQKNDGNDAQAIAVALMQPTMQFVPPKSPEQQDIQALHRARQRIVNHRTATVCQIRGLLLDRGITIGAAVSRVRRAVPLILEDAENGLSVRMRRMIAELYDLFNDLGRRLHFFDKEIETVFRQSEACQRIAKVKGIGPKTATAVAAAGKGTEFKNGRHFAAWLGLVPRQHSSGDRQVLMNMTKKGDKHLRTLFIHGARAVVRVATNNNDSHMNQWVNQLKERHGFNKTTVAVANKNARIIWSMLRNETEYQVV

SEQ ID NO: 410815 - protein, 412 aa, unidentified
MTATNQFAAHVGLDWADKKHDVCVQFKNGERVFHVIEHTAEALDVWLTELHQKVKGRIAIALELKKGPVVYALQKYPFITVFPVHALSLARYRQAFSPSGAKDDPQDAELALELMLRYPQKIKAIEPDNADIRLLQQLVEQRRQLVEDKRRFVNRLINTLKQYYPQPLEWFSHRGSLLLCELLIRWPSLQQLKRARHDTIRNFLNAKGGRAMALTEQRVVSIDNAIPLTTDPSVIEANALMATALATQIKVVSEIIKTYDERIETLFDTLPDSGLFKSLPGMGPCMGPRMLAALGDNRDRFNSAEEIQNYAGIAPVTERSGQKSWVHWRWLCAKFVRQTFVEWAAKTVNSSYWARLYYQGLREKGKSHQSAIRALAFKWIRIIYRCWKTRTQYDEAKYLLALEARRSPLLKP

SEQ ID NO: 410816 - protein, 342 aa, unidentified
MTYYAGIDVSLEYSSVCVVDGAGKIMREQKIASEPEALIAWFRGLGFELERIGLEAGPLSQWLYAAMRASGLAVELLETRHVRDAFKAMPVKSDRNDARGIAQLMRLGWFRPVHCKSMAAQEMRALLTARKLVQSKLLDVQMSLRGLLRGFGLKVGATTPSRFAGRIRDLVEGNATLEVVAAALLAVHETLRRELAGFEKRVRSIARSDGRVRLLMSTPGVGAIVALTYVAAIDDPARFKSSKGVGAHFGLTPKKYQSGETDITGRISKIGDEGVRTALYEAGHIILTQPLKGCTALKSWAMRLAKRAGMKKAKVALARKLAVIMHRMLVDGTMFASAAVAA

SEQ ID NO: 410817 - protein, 413 aa, unidentified
MDVLHPRCCGLDVHKSSISACILLREAGRVQKHQRRFGAMTQDLRELAEWLRQFGVTQVAMESSGVYWKPVWNILERQFTIVLANAQHIKNVPGRKTDQKDAEWIAQLLQYGLLRASYIPCEIIRDLRDLTRMRTSLSQEASRISSRIQKVLEDANVKLASVATNALGKSGRAMLEDIIAGEDDPEHLASLALGHLRVKIPQLRLALEGKIRSHHRFLLRRLLDQIQFVEHEIALLDERLEDIGRQRPDLAQAVARWDTIPGIDRVAAWALLAEIGDNMAQFPTAEHLASWAALCPGNHESAGKRLRGTTRQGSPWLCRMACQCAWAAARTKNTYLSSQFRRLAARRGKKRAIIAVAHTIIVIGYHLQKNQSNYEDLGGNYFDRIHSDGLKRYLVKRLQQLGHKVTLEPMEAA

SEQ ID NO: 410818 - protein, 322 aa, unidentified
MTEEEVCVGVDVARSTLDVAVSDSGETRQFANDDEGISQAARYIDSLKPARVIIEATGSLEMPLAAALQADNLPVVVINPRQVRDFARATGILAKTDSIDARLLALFGVRIKPEIRLLPDRKAREMRNLLTRRRQLIEMLTAEHNRLSQADHGIRPDILTHIKWLEKALSDINDDLDRRIQSSPSWHEKDNLLKSMPGIGKVVSSTLLIELPELGKLNRRKIAALVGVAPLNRDSGTMRGRRTVWGGRAKLRAILYMAALVASWHNPIIAAFYQRLLDAGKAKKVALVACRRKLITILNAMMRTMTVWKSKNTLHPVPVEVL

SEQ ID NO: 410819 - protein, 369 aa, unidentified
MNTTTFVGLDVHARSIKAVALDAMTGEVRSATFAYDAAAVAEWAGSLDPAAKCVYESGVTGFDLQKKLTALGVDCVVGAVSKMIKPSADRKRKNDRNDAEFLARMLSVGNVVEVCVPDDECEAARDLVRALDDAREDLKRCKQRLSKFLMRHGYAFSETTPTGRRKGNWTAAHWAWIRSIEFPEKADDEVLAYYIDAVRQAMENKKRLEKLVEAEASKPRWKKRVDSLRCLKGVDAMTAADIVFEAGEFSRFKSARSFAAWLGLTPSEHSSGEKVAQGGITKAGNKHLRRVLVEAAWHYISASPHPKDLAKGQAPDPAARRHAAKGIRRLVKRREEMLGRGVHKNKANVATARELACWCWAVGRMVENG

SEQ ID NO: 410820 - protein, 309 aa, unidentified
MKEQVVYLGVDVAKAYLDAAIGKHKRRLANDGTGHRQLINWIQQIEAQVQVICEPSGGYERMLIQALVGAQVKVSLVQANRVRQFARAAGILAKTDSIDAEVLCAFGEAMRPQTLSASKLAQEQLRELESQRRHLSRLLVMEQNRGARLGDSSVRRLNRSLNKQIQKQIERIDLLINQHIAGSQELSTKAHKLTAICGVGPRTAALLLAQMPELGQLNRREVAALVGVAPFNRDSGKWRGKRTIFGGRRHVRHGLYMAALVTARHNPILRAFYRRLRAAGKPAKRALTATMRKLLIVLNSALKPDPIYA

SEQ ID NO: 410821 - protein, 404 aa, unidentified
MIFAGVDWAEAHHDVCVMGQDGRVLEQRRVSHSVAGIGELHGLIAAHAEDGEPVAVGIEVDRGLVVTALLAAGYQVYAVNPLASSRYRDRHSVSGAKSDRADAKVLADLVRTDRHNHRQAAGDSDLAEAVKVLARVHQTAIWSRQRQVNALRSALREYYPAALAAFGTDLAAGDAVAVLSIAPAPDAGRALSRSKIATALRRGGRQRSIGQRADEIAAALRAEHLHAPPAVTAAYGAAARSAIRLISAHTAEIAELEQALSEHFEQHPDAKIVRSLPGLGTVLGARVLGEFGDDRTRFASPKSRKNYAGTSPVTRASGRSRIVLARHARNRRLADALEQWAFCSLTTSPGARAYYDQLRLRGKTHHQALRQLANRWVGILHACLQIGQLYDETAAWGHLQATAA

SEQ ID NO: 410822 - protein, 361 aa, unidentified
MSQAKTWVGLDVHVSGTVAAVLDRDSGELRRQRLSGRASEVCAFVAGLPGPVRATYEAGPTGFALARLLEAGGVDCLVCAPGLIPRGASDRVKTDQRDAERLVRLLVAGELHRVAVPTLQAESLRDLVRAREDLRGDLMSARHRVAKLLLRHDVRFEGKERNWTQPHLRWLSTVRFHQPGTQAAFDDYRGAVDALLIRRGELERQIAEQLPLSPWAQTAKRLMCLRGIDVLTAAGLCAEVGDFTRFRHPEQLMSFLGVVPSEHSSGTRRRQGAITKSGSQHARRLLVEAAWHYRQPPRISEPLRRRQAGADPKLVALSWKTQRRLHHVWSHMEQRGKRRTIIAVAAARELAGFCWAVATAD

SEQ ID NO: 410823 - protein, 341 aa, unidentified
MEQATTIGLDIAKHVFQLHGADAAGHVLFRKRITRVKLLGFLAAQTRCVVAMEACAGAHYWAREIAKLGHHVRLIAPAYVKPFIKRQKNDAADAEAICEAAQRPSMRFVPVKTEEQQANGIVFRARDLLVRQRTQCVNALRGHLMEYGYVFPKGITHVETLIALVDDLQSSLPDSVRVILKLLIDTFTALEAQIAVLDAEINQRSKSDPTARRLMTIPGVGPIASTAITALVPAAEGFPAGRDFAAWLGLTPLQKSTGGKQKLGAVSKRGERTIRRLLIIGASAVVRQASRRGAPKGSWLAQMLARKPKMLVTVALANKMARIIWALLVKGGTYRTPAAAA

SEQ ID NO: 410824 - protein, 375 aa, unidentified
MQKKVRFLGLDVHAETIAVAVAEQDGEVRSFGVIANRAESVRKLVRKLGPAEQLRACYEAGATGYVLYWQLTELGVACAVVAPTLVPTKAGDRVKTDRRDAVKLARCHRAGDLTGVWVPDASAEGLRDLVRTREAAKQDQLRARHRLSKFLLRTGRRPPFAGKAWTLPYMAWVRQLCYEQAAQEWTRLDLLHEVEHMSERVKRLEEAIREAVKLAPAAMQEVIRGLQALRGVAEISAVTVVAELGQISRFENARQLMGYSGAVPSEESSGKRQQRGSITKTGNAHLRRIVIEAAWSYRLKPAIGPVLRKRQEGVPDQIKEIAWKAQLRLHKRYARLAAAGKDQRKIVTAVGRELLGFIWAIGRRAEAAIPQQRAA

SEQ ID NO: 410825 - protein, 386 aa, unidentified
MRSETFIPREYDIFAGLDVDKRSISVTFADHQGLLKSLRMPYSVEHLVNHVRKHFADQKVAFAYEAGPTGYGLHDGLVGQAYRCLIAAPSMIPKAAGQRVKTNRLDSRMMAQNLRGGQLKSIRIPTGVYRELRHLTQLRDTFVSDMVGMKQRIKSLLLFEGIEFPPAPAGSQWSFMIKAKLRKLPCSSTVRFKLDELLDSLEFNEKRVVKTTREIRRLCKQDPELSGCMKYLMTISGIGWIVASQLLARIGDWRELRNIRELAGFLGLVPTEHSTGERTDRGSITQTGDPRLRSKLIQAAWSAIRQDAELREFFRSVCRRHPRNIASRVAIVAVARKLSVRISVVLMKQRSYEVREKVKSAPLNQEETVPQGTTRREPEPGETDNS

SEQ ID NO: 410826 - protein, 359 aa, unidentified
MNEITTVGVDLAKEVIAVCAADRSGKSVFTRVFCRDAFAAWAVQLPPCVFGLEACGAAHHWARWLASHGHTPHLMAAEFVKPFRKSRATKNDRNDAEAVLTAVRQPNMRFVTVKSVEQQACLSWHRMRQGFSEERTALINRLRGLLGEFGIWRSRSAEVLTRALPALERDEALPLLVRRLLGEARPHLVRLDEAIIACEVEIKSHIKTNAAARRISAITGVGPLTAAAVLATVTDARDFKNGRQFAAWQGLVPCQDSSGGKTRLGHITKRGDTYLRGLLTQGARSALQAALTKEPLRRSHLQAWIVQLHARVGYHKTLVAIANKHARMIWAILAKGEDYDPDAWRRWSRPTPATRGVTP

SEQ ID NO: 410827 - protein, 333 aa, unidentified
MDSETGEFQERRLKHPEEAEKFYRTLWEQGVKVRVGMEASGHARWFERLLEELSFELWTGDAAKIRAKRVRKKKTDREDARHILELLLENRFPKIWVATWQNRDLRQLLWHRHRMVQTRTRIMNQLQAVAINEGVRYKKRLWREAGRKQLESLPLAPWASRRRKDLLEVLDRINPTIAELTRSIEEEAEKCPPARRLMTHPGVGALTAVAFVLIIGEAHRFDCGKQIAAYLGLVPEEDSSGERRRLGHISKQGNSLLRFLLVEAAQATARCDQRWRNQFFHLAQRRGRKIAKVAMARRLAVRLYWMWRREWNYEQLQSFGSHVGQPGHPHGVQ

SEQ ID NO: 410828 - protein, 350 aa, unidentified
MKSQSSAITIGLDLGDRKHAVCVLDAKGEIIKQESITNSRGSLAALSRRYPGAVIVLEVGMHSPWTSRFLKALGHRVLVANPRKVRAIYQNIRKSDRRDAEMLARIARTDEKLLYPVEHVGEEMQRDLLQIKLRDNLVRQRVDIISSVRFTLKSLGITLPSPNSETFARHARNTLRKEHSDMLSLIEPSLRVLDAMTEQIRMLEKSIAELAAEKYPESEFLSQVGGVGQLTALTFILTIGDPTRFQRKRDVAAFLGLVPKRDQSGETDKQLRISKAGNTYLRKLLVGSAQYILGPFGPDSALRSKGLKLAEKGGPRAKRKAVVAVARNLAVLLLTLWHDEALYEADRSAA

SEQ ID NO: 410829 - protein, 412 aa, unidentified
MEVLYSRCCGLDVHKSSITACVLIAQSGKPLKHIRRFGCTTRELRELVVWLQEFGVEQVAMESTGVYWKPVWNVLESHFQIVLANAQHIKAVPGGKTDTKDCQWIAELLQHGLLRGSFIPPLVIRDLRDLTRARTSLSQEHSRIASRIQKVLEDANLKLASVASNTLGKSGRAILAAIIGGEQSCERLADLALGHLRAKIPQLQAALEGRVRDHHRFLLQSLLRQLYFIETEIEALDARLDQLGQQHLDLAEALNRWVTVPGVDRVAAWSFIAEMGTDCNQFPSAAHLASWAGVCPGNNESAGKRISSKIRKGSPWLRRMACQSAWAAARTKNTYLSAQFKKLAARRGRKCAIIAVAHSILVIGYHLQRTRCAYTDLGGNYFDRLHAEGLKRYLVKRLESLGHSVTLQPRIA

SEQ ID NO: 410830 - protein, 345 aa, unidentified
MPIVGGLDIHRKQITFDYLDTATGEVERGQIAPADRGQVRAWLARFAGRGEVAFALEGCTGWRYIAEELAAAGLEAHLGEPADTAALRGRKRHAKTDKTDARHLRTLLGEGRLPECWIPPEHILEYRALLETYHDLRAEHTAWVQRIHAVFFHQGAPRLGEGALRTEQGLAGLRAAAAAHLSPAGQLQVATALDMLAAVEARMGPLRRQLLGAARHLAGAKVLAARLYGAGPITALALTCWLGGAGRFSSSRKAVRFTGLDITVWSSDRKGPPGRLSRQGPPVLRWAVYEAGKTHGRTPAPDHGYYAAVKDRKNGKQAALSEARKIVRQACHILTELGDDALTIA

SEQ ID NO: 410831 - protein, 369 aa, unidentified
MKKNSKNNKEKTRQRALQAKSRKMKLTVGIDLGDEWSHCCFLGEEGEIVEECRVKTTREAVKSRFGELKLAVIALEVGTHSRWVSQMLSEFGHEVIVANARELRAITGSDRKSDRVDAEKLARYARVDRRILRPIKHRGEEAQVDLVVIRARAVLVKTRTQLVNSVRGVVKSFGYRMPNCSTERFVKLNNEVPEKLREHLAGLMEVLEHVQKQIEEYDQRVEKLAKEKYPETTVLRQIWGVGEITSVSYVLTIEDKGRFEKSRDVGPYLGLRPRRSQSSESDPELRITKAGDCFLRSLLVECAQRILSKKGPDTALKQFGLRIEARGKKKAKKRAIVAVARKLAVLLHKLWVTGEVYEPFPETTVRKAA

SEQ ID NO: 410832 - protein, 347 aa, unidentified
MLADEVDFVIGVDTHRDFHTVAALQAGSGGLVAQAVLRASAGGYVEALDFAAKYAPGPRAWAIEGTGSYGAGLARLLAQRGERVLEVGRPRREGRSRAKSDAIDAVQAGRTLLGRSKLAQPRAGGRREALRALVRTRQGALTAKRAGLCQLRALVVCLPEPLRGELRGLTRARLLGRCARLRPERSRDVEVRGSLLALRSLARRVQALSEEERALAREIETLVRKLAPTLLAEPGVGPITAAQLLVSWSHKGRFRSEAAFARLAASAPIEASSGEVVRHRLDPSGDRQLNRALHTIVVARRKTHADTIAYVQRRRSEGKSVREAIRCLKRYLARHLFRLLEASATMA

SEQ ID NO: 410833 - protein, 425 aa, unidentified
MATKVREVAYVGLEAVLAYCCGLDVHKKRITACLLVGPVDQPPKELLSTFTTTTKGLTALRDWLASYDCTHVAMESTGIFWRPVFNILEGSVTILLANARHMKQLPGRKTDINDSQWIARLLRWGLLKPSLIPPKPIRELREMCRYRKKMTQGITAEKNRVHKTLEDANIKIASVATEIFGVSGLAMIDALIAGNLTPQETAELARGRMRSKIPELAEALVGKVEEHHRLLLRKHLEHMAYLQQSIAEMNRLIEEKIQPYQPQVELLRTIPGIDTISAQQAFVEMGGDINLFPSEDHFASWIGICPGNNESAGKQRRAKALKGNRWFCSLLVQSAYAVGRTKKTYAGAFYHRIARRRGNERAAVATGHYLSKCIYHVLVDEKPYRDLGADYLNHRNDDSLRKQLLRRLERLGYQVELTPQTTTVS

SEQ ID NO: 410834 - protein, 377 aa, unidentified
MHSENIAAYVGLDVHKETLAVAIAAPERLGEVRYYGTINNEAQAVRRLFQKLQGLYGNILSCYEAGPCGFGLYHQLTAMNIKCQVIAPSRIPKSPTDRIKNDHRDAISLARLLRAGELTPVWIPDLTHEAMRDLIRARAAAKRDSRVARQRILSMLLRTDKHYAGKHWTGKHRTWLANQSFSQPSQQIAFQHYCQSLEQIEDRILQLDQEISRLLPEWSLCNLVCQLQALKGVAQLIAITLVAELGDFSRFSNPKQLMAFLGLVPGEYSSGNSIRPRGITKVGNSELRRLLYEAAWSYRTPAKVGAWLIYYRPDSVTQYSKDIAWKAQQRLCSRYRSLTAKGKKSQVAITAVARELTGFMWDIALAAQSSFSQQKQN

SEQ ID NO: 410835 - protein, 358 aa, unidentified
MQAKGTTIDFKGQNVYAGIDIHLKSWKVTIMLGDREHKTFSQDPNAETLWNYLRKNFPGANYHSAYEAGFCGFNAHRELVNFGVSNLVVNPSDIPTTDKEKKQKEDQRDSRKIARSLKNGELQGIYIPSKAFEELRGLVRYRKTLVKEISRTKNRIKSLLYFSGITIPVALGSASRHWSGKFTQWLKSVEMATPYGNLVLAETLDSAEYMRKKLLQINKELRKISCDSEHAPKLKLLQSIPGIALITSITLLSEMEDIMRFSNLNQLCSFVGLVPTTKSSGDKEKTGKITPRSNRFLRSIIIESAWIASCKDPSLMYSFNQLCKRMQPHDAIIRIAKKLLNRIRFVIKNETEYVHSLL

SEQ ID NO: 410836 - protein, 358 aa, unidentified
MRIIGCDLHARQQTIAMLDTDTGELEEKTLEHQGETVREFYSALRGPILVGIEATGSMQWFLELMEELGIECRVGHPAKIRKAETRKQKHDRQDARLLLTLLVENRFPTIWMPSSEQRDLRTLLRHRHQWVRLRSQVQHTLQSMALNQGLRRGRSLWSQAGQDELRALPLAPHASERRAALLSLYPRLQGSIEELDKEVREEVQQHPQARRLLTHPGVGPITALATEVFLGDPLRFSDGKVLASYIGMIPSEHSSGRRQRLGAMSKQGNALLRYLWCEAAMHAVGRDPELKRFYRRKLVQKGLGKARVAAARKLGIRLWIMMRDKIDYQEFCRRGKARQESGSVRAGMPDRNSGPAQQ

SEQ ID NO: 410837 - protein, 428 aa, unidentified
MKSNTQNAKIKSITEKTLIVGIDVGSETHFARAFDWRNYEYSKKPLEFSNTEAGFMTLKAWMADFAEKYGKNVVIPGMEPTGHYWFNLGAYLQDNGMKPVHVNPHHVKKSKELDDNNPNKNDRKDPKTIAALVNEGRFSYPYIPTGIYAEIRSLSNLRLQTQEEITRIKNRIARWFSIYFPEIKDVYRNPDSVSGLMILKEAPLPQDIVKLGVDGINKIWRDAKLRAAGLKRAKTLVTAAEHSIGSQEAPDSARIELKNLLNDYEIYKNREEDLMSLTEEKLSEIPHIDKLLEIKGVGLKTVSGFVAEVGDITRFDNPKQLQKLAGYAIVECSSGKHKGESHISYRGRKRLRYVLYEAAISLIARNEEFKEVHRYYRTRKENPLKKMQSVIAVACKVLRIFYTILTKGVTYDGAKMMQDIKRPQMLAA

SEQ ID NO: 410838 - protein, 366 aa, unidentified
MLVRGTKDKEPAMAEALKSSIAVVGIDIGKNSFHVVGLDKLGAIVLRQKWSRGQVEARFANMPPCLIGMEACVGAHHLSRGLQRLGHDARLMPARYVRPYSKGQKNDFRDAEAIAEAVQRPTMKFVATKTADQLDLQGLHRVRERLVSQRTGIINQIRAFLLERGVAVRQGLRFLRNELPSILGAPSDALSPLMVRVLEDLAGDWRRLDERVEGLSKEIEAIARRDAGCDRLISVPGIGPIISSAIVAAIGAGDVFAKGRDFAAWLGLVPRQISTGDRTILGKISKRGNRYLRVLFVQAAWVVLIKPKSWERHGLKSWIEAARKRLHHNVLAIALANKLARIAWSVLAHGRSFEASKLAATVTQPA

SEQ ID NO: 410839 - protein, 405 aa, unidentified
MGAEQVAHGWAGIDVGKGHHWVCLIDEAGSTLWSSKVVNDEAAILDAIAEVLARAQQVSWAVDITGTSSALLLALLSAHGQAATYVPGRTVNQMSTAYAGEAKTDARDAYVIAETVRLRGDLTPVDVPATLVAELRLLVTHRTDLVADRVRMINRLRDVLSGYFPSLEREFDYATSRGAVVLLTGYQTPAAIRARGRARLTTWLRARKVRSAEQIATAAVKAANAQHTTVPGQDVAASIVAEIATALLELDQRIRVLDARIGDTFHAHPQAQIIESMPGIGTILGAELIAAAGDLSRYVDAGHLASAAGLVPVPRDSGRRTGNLHRPLRYSRKLRRVFYLSAQTSMMREGPNRDFYLKKRGQGHGHVQALIALARRRVDVLWALLRDNRVFELTPPTREKLPQTV

SEQ ID NO: 410840 - protein, 354 aa, unidentified
MIEKLSSVIAVIGIDIGKNSFHVVGLDGRGAIVLRQKWSRGQVETRLSNMPACLIGMEACVGAHHLSRRLKLLGHDARLMPAKYVRPYSKGQKNDFRDAEAIAEAVQRPTMKFVATKTADQLDLQALHRVRERLVSQRTGIINQIRAFLLERGIAVRQGIRFLRAGLPGILATPPDVLSPRMARVIEELADDWRRLDERIEGLSSEIEALARQDSGCERLMSVPGIGPTISSAMVAAIGTGEAFSKGRDFAAWLGLVPRQISTGDRTILGKISKRGNRYLRVLFVQAAWVVLIKPKSWERYGLKAWIEAARKRLHRNVLAIALANKLARIAWGVLAWGRNFEVRKIDGATIRPV

SEQ ID NO: 410841 - protein, 360 aa, unidentified
MQSKVNEKLFEGQSIYVGIDCHKKNWTVTILGEHYEHKTMSQNPDPDALAAYLRRNFPGADYKAVYEAGFNGFYSCRKLRELGIDCNVVHAADVPTGYKEKIQKLDPVDSRKLARSLRSKEFKPIHIPESSLEADRALVRQRFRVMKDVTRTKSRIKSLLFQFNINIPDRFTSGQTRSWSNVYMNWLKELQLEYEILRQTLDNYIRIGESQRKELLLVNKQVRILSQTDAYKGNYNLLITLPGIGFLTAMTFLAQIGDIRRFKQLDNLCDYIGLVPMMKGSGPNLYTGKLINRGRKELKIMIIEAAWDAIRMDPALMASFNNLIIRMNKNKAIIRIARKLVSRMRHVLLSQEPYRVGITE

SEQ ID NO: 410842 - protein, 389 aa, unidentified
MEASIVNNPPPAAPHDDAVRCVLAIELSKKSWIVAVNTPLSEKISRYTLEACDWRELLKLCERIRTRIARELKKDVELVSCYEAGYDGFWLHRLLEAHGIRNYVIDPASLQVDRRARRAKTDRVDVERLLRSLMAYLRGEPKVWSVVCVPSVAEEDDRRLHRERGRLINERIQHVNRIKGLLAIHGIYDYPPLRHDRMQQLERLRTADGRTLSPRLKAEILRELQRLELVIGMIKTIEAERDAIASAKIEMEHSSAKRIQDLAKIKCIGPEFATTLVGEVFYRFFDNRKQLASYVGLTPAHFQSGETCRDQGISKAGNAKARRVMIELAWLWLRHQPASPLSVWFHDRVGKLKGRIRRITIVAVARKLLIALWRYLETGLAPEGAILKV

SEQ ID NO: 410843 - protein, 370 aa, unidentified
MLDTTTFIGLDVHARSIKAVSLDVMTGEVRAATFGYDAGAVAEWVRSVDPRARCVYESGVTGFDLQKRLSGLGVDCVVGAVSKMIKPSADRRRKNDRNDAEFLARMLSVGNVVEVWVPDDECEAARDLTRALEDARDDLSRSKQRLSKFLLRHGLVFDERTPTGRRKGNWTRAHWSWIESIRFAERADNDVLAYYVDAVRRAAEEKARLEGLVEAEARKPRWRKRVDSLRCLKGVDTASAADLVFEAGEFSRFRNARSFAAWVGLTPSEHSSGESDRRGAITKAGNKHLRKTLVEAAWHYLTCSGRPKGLAKGQAPDRGARRHAAKGVRRLVERRESLLARGVHGNKANVATARELACWVWAVGLMAEEA

SEQ ID NO: 410844 - protein, 407 aa, unidentified
MEVVHPTCAGLDVHQHTVVACARVGAGSAVTRDVRTFGTTTQELWALSDWLTAHGCTHVAMESTGVYWKPVWHVLEGSVELVLANAMHIRNIPGRKSDVNDATWIADLLAHGLLRGSFVPPAPIQELRDLTRTRKQLVREITQHTLRIQKTLETANLKLTGVLTDILGVSGRAILQALVAGETNPDRLAELARGRLKASRADLVAALHGRVTAHHRFLLQLHLAQIDALDGAVRAVEARLGDALAPFRAAVDRLITMPGVSETVARVLVAEIGVDMTRFPTAGHLVSWAGLCPRLDESAGKRHSTRTRPSNPWLKTTLVQAAWAAARKHDSYLRAQFLRLKSRRGPKKAIIAVAASMLTAAYYMLRDGVDYRDLGAAHFDRRDKAKLATRLLARLHDLGFNVELRAA

SEQ ID NO: 410845 - protein, 375 aa, unidentified
MSKIRFIGLDVHADTIEASVAEPDGEVRPLGIIPNRLESVRKLVTKLGPVKEIKACYEAGPTGYVLYWQLTQLGVACEVIAPSLVPVKAGDRVKTDRRDAAKLARSYRAGDLTPVWVPDAAHEALRDLVRAREDARQDQHRARQRLGKFLLRHGQRPPADVKKNWTQKYMTWIKEKVHFDQPAQEATLLDYVHEVEHMAERIERLEKAIGEAIEKAPAEMRAVVEALQALRGVAKTTAVTIVAELGSLSRFAKPRQLMGYSGLVSSEFSTGNRIQRGRITKTGNAHLRHVIGEAAWAYQHRPWVGGALLKRQQGLDQEIKDIAWKAQWRLHTRYKKLSARGKNKNQVVTAIGRELLGFIWAIAVRTEARYAGRTA

SEQ ID NO: 410846 - protein, 379 aa, unidentified
MTETTRTAECNAAPAPLMMALELGSTKWTLGVTTGPGQRPRVRTIPAGDLLTLEKEILVAKARFGLPLDAAVWSCYEAGRDGFWLHRWLIAHGGQNVVVDSSSIEVNRRARRAKTDRLDVGKLLALLLRWCGGERTVWSVVHAPSPEAEAQRQLTREIATVREDRKRVRNRIQALLATQGIRLELGARFVEHLATAQTGDGRGLPAAYRLRLEREWAHLEAITARMTAVTAARDAAIAGGTDRVATVARQLCTVRGVAETSAAVFSAELFGTRTFRNGRQLGAVLGLVPVPYRSDQRVQDQGISRAGRADLRRIALQLAWCWVRWQPDSSLTQWFQRRFVAAGGRSKRIGIVAVARKLAIALWRYVEHGGVPEGARLKA

SEQ ID NO: 410847 - protein, 417 aa, unidentified
MASVVEIVYPTCCGIDVHKNFLVACIAKTDERGNTKHTLRRFSTNTGDLRKLADWLMLYDCKDVCMESTGKYWIPVFNILEQTCNVVLTHPKYVKAIKGKKTDKKDAKWIAELFKCDLVRSSFIPPFDIRQLRDLCRYHAKLTYMVSSEKNRSQNCLTTCNFKLDAVFSDVFGKSASRILDTLIAQGNSDFDIAPLLHKRCKATVEEVRAALDGEFSYAQAEKLKLIKSHMQSLENLKIDLENLIYQLAEQFQPEITLLLTVPGISSPLTAIRIIAEIGNDMSVFETAKKLCSWAGVTPQNNESAGKKKTTRISRAGAYLKPLLVQIALAASSSAKNPEIRDKYLALKKRRGHKKAVIAISRRLLTAIWHMLSKRESYNAELYHKADKPPKNRVLTPEQALALLRRNGYQISEPLPA

SEQ ID NO: 410848 - protein, 330 aa, unidentified
MYQLGIDVSKKTLDVCLMREGVRGRLKTKKVKNDFKAVHIITEWLEHHNCSLSDAHIIMEATGVYHELLATGLHLAGVKVSLANPHRTREFARGMDILTKTDKVDAWMLACYGALKQPEAWTPPSEEIRHLSALLKRRDLLVSDATREKNRLEKYRATHTPEAIIISAESMLTRLNDELAKIELMLKQHIEKHIVLKEDYELLTSIKSVGPQLGLNMLVILRSHDFRTAEQVAAFLGVAPVEKRSGTSVRGRSRMSKIGPPEIRAKLYLAALCGLRFNIAMKSMYERLCLNGKAKMVAIGALMRKLIHWCFGVLKSRQPFDTNYINMGRM

SEQ ID NO: 410849 - protein, 343 aa, unidentified
MVVIGIDPHKRTHTAVAVDEVGRKLGQVTVASTPEGWLRLWAWAGGFGPDRRWAVEDGRGVAGRLVRTLIGHGASVVWVPPKLMAQSRASARTRGKSDSIDALAIARAALREPDLPAAHLDEVAADLRLLTDRREQLVKWRTQTINQLRWHLHDLDPGAGRLNSARQLDRLTAGLEALPASVRRDLALELVGEIRRLREQIRRLDKQLGELVVPLAPTLLAIVGVNVVTAAKIIGEVAGISRFRSAAAFAMHAGAAPIPVWSSNRPQVRLNRGGNRQLNACLHRIVIAQLSHKPEARAWRERWTQRRPNATGKAALRALKRHLADVVYHALLTDHRRQLPATA

SEQ ID NO: 410850 - protein, 468 aa, unidentified
MQQPVEMQVDEHEPLVERVAAIDVAKASGMVCTRMPHETVPGKRVTKVWQVKATTRALVELANHLRRQGIQRVVLESTSDYWRPFYYLLEAAGLTVWLVNAAQAKNVPGRPKTDKIDAVWLAKLAERSMVSPSLVPTEPMRQVRDLARTRFDLVEDRARVKQRIEKLLEDALIKISSVLTDIHGVSGRAMIEALIAGRRSPKALAELARGRARARSAALEEALDGRFTDHHARLARLLLGQLDELTARIEEVTALLEAAITALTPPQADTDTPTGDGGDGDDDGDGDRDGDSGGAPAQPAPGRYARAVERLCAIPGAGPDTVRAVIGEIGLDMSVFGTHQRLCSWAKVAPRTVQSGRKNGRARTGRGNPYLKAALAQMAMGAAKTDTFLGERYRRLIKRMPKAKALVALQRSILVIIFHLLADPTAEFTDLGSDFYQRRIDRARRTTHLLRQLHALGYQVQLTETEAA

SEQ ID NO: 410851 - protein, 354 aa, unidentified
MKRTTKYVGLDVHQAMTVATVRSEGGRVIARSVVETSDESIREFFNAMAGSVHVVFEEGTQAQWLYDLLSPRVDRVIVCDRRGEKRSGNKGDQVDADELSEQLRCGGLRAVYHGAGGRSDLKELTRAYRNLVEDGTRVMLRLKALFRARAIRTTGGGVYQPKGRAAWIAQLPEHGARLRAETLYAQLDVLRTQRKKTKAAMVAEAKRDPAFGVLETIPYFGPVRIALLLATIGTPWRFRTKRNLWAYAGLAVVTRSSADYELFDGRPRRRRRPPLTRGLNRNHNRVLKNVFKGAANVAIARPGPFQEFYHGMLERGMREELARVTLARKLAALTLRLLKTGEVFDPTQLSRPQI

SEQ ID NO: 410852 - protein, 340 aa, unidentified
MEKASMIGLDIAKNVFEVHGRSASGVVVLRRSLRRGQVEKVFAELPKAVIGLEACGSAHHWARVLGKLGHQTRLMPAAYVKPYVKRNKSDAIDAAACCEAVGRPDMRFVPVKTVEQQAALSLHRSRDLLVSQRTQLGNAFRALLSEFGIVAGKGTAGLARLVDGLHAGALDLPADAVASARALADQHAALEAAADTLERRITAQAKADERARLLQTAPGVGPLSAHATLATMPDPSLFKSGRDFAAWLGLTPRLRGTGGKTRTGRITKQGNQPLRRLLVLGATAWLRQVRARPEKASPWLRGMMARRPSKVVAVAQAARTARILWAMLTHNQPYRAPAIG

SEQ ID NO: 410853 - protein, 322 aa, unidentified
MDRLLIGADIAKDTFEVAAYGPSGEATWGEFCNTPAGFAQLADRLAQARISWDAAWAPVLLVLEPTGGYELALAAFGHQQGWQVSRPNPKRVRDWAKSQGRRAKTDRLDARVLARYGASQPPARWRPLPVELSELDSLLGRQDELQQMLQAERNRQAALARQPASARLVVESLAAMITTLEGGLAEIAQAIKTHIRTHARLKAKLGQLRTVPGIGPKNGPYILLLLSRWEHLTDGKGEAKGLVAYTGLDPQTYESGTSVHRNASISRMGQGPTRRRLYMGALGGVRGNNPLREFYQRLAGRGKAKKAGPHSVRAQCPGPGLG

SEQ ID NO: 410854 - protein, 412 aa, unidentified
MLFVGNDWAEGHHDVELVDEGGRRLARARLPEGLDGLSRLHALIAEHRPGEWADLPAEEAAERVVIGIETDRGPWVQALLAAGYVVFAINPMQVARYRERHSTSGAKSDAGDAHVLAEIVRLDRDHHRPVARDSPDAEAVKLVARTHQSMIWDRTRQVLRLRGALREYFPAALQAFDDLSAADTLELLGRAPDPDRTARLSRAQLAAALRRAKRRNVEARAGQLQAVLRAPALRQPAAVQKAYAAVVVGQIRLIAALNAEIDALEEVVAEHFGRHRDAEIYLSQPGLGPVLGARVLAEFGDDPDRFADAKSRKNYAGTSPITRASGTRRIVLARYARNRRLADALHQWAFCSLKGSPGARAYYQTLRSRGTGHQAALRQLSNRLVGILHGCLKTGTVYNEHIAWSHHTQTAA

SEQ ID NO: 410855 - protein, 320 aa, unidentified
MRNAVGLDISKLTFDATAIVGNAEYSAKFDNDSKGLDQFSDRLKSLGCQNLHICMEATGNYYEEVADYFAQYYSVYVVNPLKISKYAESRFKRTKTDKQDAKLIAQYCRSAKESELVKRQKPTDEQYRLLRMTAAYAQIKSECAAMKNRHHAAKDEEAAKAYAQIIKAMNEQLEVLKEKIKEQTEKPNCKEGVKRLETIPAIGRMTAAVLFHHLTSSKFETSNKFAAFAGLSPQQKESGTSVRGKGKLTKFGNRKLRAVLFMPAMVAYRIRAFPDFIKRLEEKKKPKKVIIAALMRKLAVIAYHVHKKGGDYDPSRYKSA

SEQ ID NO: 410856 - protein, 310 aa, unidentified
MERLFVGIDVSKDRLDVHVRPRDESFTIATDEAGIAALLTRLAGLQPTLVVLEATGGYEAAVAAAIAHAGVPVAVVNPRQIRDFARATGQLAKTDTLDARVIARFAETVQPPVRGLATDQAQALAELVARRRQLVDMLAAEMNRQRQARHREIQQRITAHVTWLTRAIEEVDDDITRLIRSSPVWRETENLLTSVPGIGDVTAHALIADLPELGHLDRRRIAALVGIAPLNRDSGLWRGRRMIGGGRPTVRRALFMATMVAIRYNPPIAAFYRRLTTAGRPKKVAIIAAMRKLVTILNAMLRDQRPWQTA

SEQ ID NO: 410857 - protein, 325 aa, unidentified
MRKVGQTGVRRSDVPCVVGIDVAKAQLDIALRPAGERWAVPHDASGVATLGDRVQPLHPTLMVLEATGGLERAATSALAAAGLPVVVVHPRQARACDRATGPWATTEALEARALAHCADVIRPLPRPLPDAQTQELRALLGRRQPLIVLRTAEQHRLAGTSARLTQALAAHMTWLKADIATLDDDLETRLRASPLWRENDDVLQSAKGIGPVCAPTLLLELPELGTLTRQHIAALVGVAPLHGDSGTLRGRRTMWGGRAPVRTVLSMGTLVATRFTPQITVFYERLVAAGKGKKVALTACLHKFLTILNAMLKHRTPWKPQEVQN

SEQ ID NO: 410858 - protein, 348 aa, unidentified
MNTPAVVVFARTVTRTGARALCSLLQDRETPMTTPGIYIGIDVAKAELVVATTTAVICRVANDGRGHAELVRKLREMTVAAAVLESTGCYGHAAVAALLEAGVAVAVVQPGRVRHFARSLGIHAKTDPIDARVIAQFAEATKPRLFTPSTDEVIQLRALVDRRDQIIELRKQEENHLEARPVELIAKDLRGSIKRLKKAEKAYTKKITDHIAKHDRLARLSKALQEESGVGIQTAATLLAHLPELGTLNRQQVAALGGLAPYDHASGTSDGKRAIYGGRKRLRRALYLAALTAGRCGTWLKDAYVKLRQRGKPAKVAIIACARKMLVRLNTVAAKALNELAQKQATTT

SEQ ID NO: 410859 - protein, 412 aa, unidentified
MLFVGDDWAEDHHDVEVVDDSGQVLARRRLPEGLEGVARLHALIGEHVPREWADLEPDAAAAMVKVGIETDRGAWVAALVAAGYEVFAINPLSVTRYRQRHSTSGAKSDAADAHLLAEIVRLDRANHRPVAGDSHDGEAIKLTARSHQSLIWDRTRHLLRLRSALREYFPAALEAFPDLDAPDALELLQRAPDPDRAARLSRARITAALRRARRRDVEAKAARLQDIFGAEQLRQPAAIQAAYAAIVTSQAAVIEALNQQINQMGAVVAAHFGRHPDAEIYASQPGLGTILAARVLGEFGDDPHRYLDAKARKNYAGTAPITRACRTKKIVLARYARNRRLGDALQQWAFCALRGSPGAKAYYKQLRDRRIGHQAALRQVANRLVGILHGCLKTHTVYNEHTAWAHHNTVAA

SEQ ID NO: 410860 - protein, 345 aa, unidentified
MANMYYIGLDVHKKKISYCVKDVSGRIHLEGAVAATRTDLDLWMKALPQPWTAAMEATIFTGWIYDYLLPHAAALKVAHPLMLRAIAAAKKKNDRIDASKIADCLRCDFLPECYMASTEIRERRRTLRYRNLLVRQAVQLKNKIAVLLMEAGVSYNKQKLHKVGYFRELLKTHPDINDSLRSLLQLCRETLVRLQKIESALIRSLERDRLLAERVDRLMTIPAVGPITALTWALEVGDVKRFSSIKKAISYCGLCSAEKSSADVIKRSPLSKQRNKHLQCTLIEAAKLAPRNSPGLALIYDQERRKGNANRATLAVARKLVAYLVAIDRSQKDFLVIGEQNRTAA

SEQ ID NO: 410861 - protein, 394 aa, unidentified
MKLVGIDVGKNSHHFCVMNKETGEFNVTPSSFSNNKEGFDFLINSLKTYSKKSILIGMEDTGHYHVALLKFLLSNGYPVALINPKTTDLTRKMEGGITKNDKLDTITICDVLDTPERKKQYRITKVDRFDLYEQRQLTRHHHNLKEELNVYCNRLQKSIDLVFPEFNTLFSSKYSIVYMNLLKTFGSAEAIASTDIRTIRKCFEIKGRGNRISLTPEKLKECAKNSIGISSEVETIQIRHLVSQITLIKEQIAEIDKKIEESSITNNSPILSIPGISHFSGTSILAELGDIGNYSKPSQIIKFAGVAPYHYESSQYNAQHTGITKKGSKYLRKTLYQIILTVINNNPVFKKYYLLKISQGKGHRCAQGHCIRKLLRIIYHLLETGQSFDPALLR

SEQ ID NO: 410862 - protein, 293 aa, unidentified
MLSIGIDVSKGKSTVCGMKPGGEIVYAPFEVQHTREGMSELVSLLHNSGEEVRVVLESTGSYHCPVVAALLENGIFVSIVNSLRMKRFCSQSIRKVKADRIDAMQIALYGLAYWQELQPTRLPEYSLVREIPCIHASGMTLAPRLIAEIGDVRRFHSKRDLIAYAGIDAPPYQSGKFCANNRHISKRGNRYLRKTGYEVMQSYVMHKPANDPIFMFIEKKRGEGKCGKLAMAVSGKSLLVRCFRTFFRCHGVDPSLPSTNTPTSSPRPKAAKYPDNCSGVILGRENKNAHWSE

SEQ ID NO: 410863 - protein, 350 aa, unidentified
MPSSVIVGVDTHKDVHVAVAIDTLGRRLAQLEISTTAAGYQQLHRWATDLGPNQAFGIEGTGSYGAGLARHLRLAHVDVIEVNRPDRATRHRLGKSDPIDAEAAARAVLARTATATPKHGDDNVEMIRILKLTRDSAVKSQTQASNQLQAVLVTAPTELREALQSLPRISLLERCAAFRPGDLTTPLAAAKHALRLLARRALALREEAKDLRVELDRLTTLTSPALVAMTGIGPDSAAALLISAGDNPQRLRSEAAFAALCGTNPIPASSGKTTRYRLNRGGDRQANAALHRAVVTRMHWHQPTRTYVQRRTAEGKNKAEIMRCLKRYLARQVYRSLITNTQPNSLQVEA

SEQ ID NO: 410864 - protein, 345 aa, unidentified
MNKSTPASTATVFCGIDVSAGSLAVALIEPNHSVCQREFANSASGHKALLGWLGKYHTLVRVSLEATGIYSLDLALALDAQVSVEVAVLNPKLVNRFAQTLRRSKTDAADALVLAEYSQRMPFTAWQRPGVNHLRLRTLGRYIESLVVEQASLKNRLRTAESTATTPRAVLLDLKQAQAALQRRLAKMRREAMKLVQAEDAQRERFALLVSIPGIAEISALQILSELVLLPPGMTVRQWVAYSGLDPMHQVSGSSLHKPSRISRAGNRHLRRALYMPTLSAVRYDPHLRAFYQALRERHKTGLQALMAVARKLLHAIYGIFKSGRPYDGRRLFPQIQLAVELIAG

SEQ ID NO: 410865 - protein, 342 aa, unidentified
MLLIGCDYHPSVQQIAMLDTETGDYSEHRLKHSDGEAEKFYRDLKLHTPKIRVGLEATGHRRWFERLLMELDCELWVGDAARIATMRVRKQKTDRQDAQLLLKLMMEDRFPRVWISSLEDRDLQQLLWHRHRTVQMRTRILNQLQSIAMNEGIQRRGGLRSVQGRKRLEQIPLGPWGTRRRSDLLVLLDQMNERVNELTAAVQQKAERRPEAQLLMAHPGVGPVTALAFVLIIGYPERFPCGKQIGSYVGLIPAESSSGVHRRLGHISKQGNVLLRSLLVEAAQAAARFDPEWHKEFSHLAMRRERKIAKVAMARKLAVSLYWMWRRQRSSQMASKVGSYAG

SEQ ID NO: 410866 - protein, 360 aa, unidentified
MSNILNPNAAGIDIASKEHFVAVPQDCCQESVRCFESFTKDLHQIASWLKQCRIETIAMESTGIYWYHLYTVLQDYGFEVFLVNAYHVKNVPGRKSDVSDARWLQQLHCFGLLNGCFQPDNLTRTLRNYVRQRKHIIKQMGRETQRMQKSLEQMNIKLNNVLRDINGKTGKTIIEKILQGERNAEELVKYRESGIKASRETFIKSLEGNWREEQLFNLQQAYDHYHFLQSQLEQCDKKSEKIVIQMADSSIPKKKIPKVRRQKNQPFFEVEQHLYNALGVDVTAIFGVKVITALTVFSETGSNLKEKFPTPKQFLSWLNVVPDNKISGGKIISSKVKRKKIMPVKHLEMLQVHCGGLKIL

SEQ ID NO: 410867 - protein, 401 aa, unidentified
MTAVRSRAWIGVDIGKTHHWVCAVDETGKKLLSLKVLNDEAQIIEVITSITDLADGRVWAIDILGTPSALLVALLANAGEQVRYASGRVVAAMSTAYTGEGKTDAKDAYVIAETARIRTDLAVIDADTDLVRALGVLTGHRADLVADRVRMINRLRDLLTSVFPALEREFDFASCKGALVLLSGYATPESIRRMGEARLSRWLRQRRVRGYADVAARAVAAAHTQHTVLAGQDVAASIVAELAGAVLAQHERLKLLDQQIQDVFAQHPQAEVIESIPGFGPVLGASLLVAAGDLAAFPTAGHLAAAAGLVPVPNDSGRRAGNLHKPRRYSRPLRHALYLSAQSSMMRAGPNRDYYLKKRDQGRTHSQAIIALARRRIDVLWALLRDNRTWTAAPPPRAQAA

SEQ ID NO: 410868 - protein, 348 aa, unidentified
MRFYTKTHKHYCGIDLHARKMYICILDAEGKIVVHRNINCNPAEFLKTIAPYRENLVVGVECMFSWYWLYDLCLKEKIEFTLGHALYMKAIHGGKAKTDKIDSHKIAVLLRGGTFPIAYCYPAEMRATRDLMRRRNYLVRTRAELMAHIQNTITQYNLPAINFTLAYESNRNLVLELFSDPEARKIVQLDIAMIDSYDDVIKKLELDIEKTANKHDKHSLLLLRSIQGVGPILSLVLLYEINDINRFETVQQFASYCRLVKCSHESAGKKKGTGGGKIGNAHLKWAFSEAAILFMRYNSAAKTLVENLAKIHGKGKAISILSHKLARAIYYMLKNNQPFERDKFFATA

SEQ ID NO: 410869 - protein, 421 aa, unidentified
MEEVTEEPVELVARVAALDVGKKELTACVRVPHEAKPGRRRQEVCAFATTTRSLLELRDWLVGQQVSLCVMEATSAYWKPPFYLLEDAIECWVVNARDVKNVPGRPKTDRLDAVWLAKLAERGMLRPSFVPPVWQRELRDLCCYRRTLVQERTREKQRAEKLLEDTQVKLSAVISDIFGKSGRDMLEALIAGRRDPAVLAELARGSMRGKKSVLQEALTGNFRDHHGYLLRMMLDRVDALTAQIEALTARIDEVIAPFAPQVAQLDEIPGIGRTAATEIIAEIGVDMSRFPSAGHLVSWAKFAPQARQSAGKNKPGSTGKGNPWIGGTLGEAAMGAARTKTFLSSRYHRLARRRGKQRALVAVGNSILTIAYHLLSDPTARFTDLGPDWHDRLAPLRRKRQLIAELERLSGQKVTLHQATA

SEQ ID NO: 410870 - protein, 410 aa, unidentified
MRYYLGVDWADQTHAVWVVDESGMKITARAVPHTAEGLNEWGRELDEWRAQGIDLWAAIERPDGRVVDSLLDHGVVVYPVNPKALDRARDRFRQSGAKSDPFDARVLADFLRTDHGHLHALQPSSEAAQELKLLTEDCQRLIRQQTRLVNQLTATLKAYYPRALEVAELTSALAREFLPAYPTPAALTTLTERQWQRWARAHRLTEARTGELWAVLRQPQLPVPAHVVRAKARLMQTLMEQLLPVVAAVAQYRKAIDDFFASMPAAQWARTLPIGKHGITAPTLWARLGDAPGRWESFRHLQAHAGAVPVTKRSGKQQRVVQFRFACDKALRYVVDQVAFLSLLSSAWARAYYEQQRARGHSHRQALRALGAKWLKIIFVMWERHVPYDEQYHLATMTRQQLRPRQKQIA

SEQ ID NO: 410871 - protein, 384 aa, unidentified
MTEQSAAATTFDHNSTLVLALELSGKGWQVGAVLPGVARRPRRSVAPRDVAGLLAQIERWKAEAQRAGRTVLRTVLAYEAGRDGFWIARCLLAHGIEVQIMHPASIPVERRGRRVKTDRIDLDMLLRTLLAWLRGEPRVCSMVRIPSETEEDMRRPERERERLVSERIALENRIENLLCLHGIAGFKPRLKKAAERLDGLRSFAGAPLPPMLLEELNRLMTRHRLLSEQLREIEAAREQAALAAEPDCAVQQIQMLARLVGLGLATASGLTREVFCRSFADRRAIAGFVGLTGTPFNSGGSEREQGISKAGNPRVRRILLQLAWRWLRFQPDSALSCWFVERTGGAKGRIRKIMVVALARKLLVALWRYVETGEVPAGARLATA

SEQ ID NO: 410872 - protein, 366 aa, unidentified
MKKDSTVTAGRKQIFKQPKLTIGLDLGDRTSHYCILDEAGNVILERNLPTTPKGIQQVFSKIPRSRIALETGTHSPWVSRQLSQMGHEVIVAHARNVRLIGESSRKDDQLDARTLARLARIDPGLLGPVRHRSAQAQIHLTVIRARAALVSTRTALVNAARGLTKSYGERLKKCGTEQMNRDSSQGLSQELRDALDPLLREIESLNERIGEYDRRIEQIAKEVHPEVALLKQVKGVGTLIALTYVLTLDDPYRFRRSRDAGCYLGLRPGRRNSGASEPQLHISKEGDRYLRTLMVQGAHYILGPFGQDSDLRRWGLKLAERGGKNAKKRAVVAVARKLAVLLHKLWVSGEVYEPLRNNHQAVSAVA

SEQ ID NO: 410873 - protein, 400 aa, unidentified
MDKDRIVAGLDVHKDTIYLCVMDNTEAVIFAKVCGTLTPDLELMCSEMVSHGVTEAAMESTSTYWVPVWNALCESMSLKLVNPYFIKQLPGRKSDVKDAQWIAECLLKNLIRGSFVPDKTVQDMRKYNRRIFDLNEDLTYNSNKQDAALQRCGFRLSNYVSRVNGKSYQKCVRAIITGITDPEELVKLIHGKTLRKYGRNIIKDAVTGDFHQADICLLKQYAELIGVIERQIEECRNALIAMCQEHFPKQFKRLQSIPGVKERAASAIIAETGADMKPFEKATNLVGWCGLKPRNDISNNKVKSNRTTHGNRFLRQILIKISWVASRTRNCFFSNFSYVQCTQRHKNKMKIQVAIARKLLVAVWHMLTKDEDFIDVYLKRLEKQAEWQNDIQALESLLVG

SEQ ID NO: 410874 - protein, 342 aa, unidentified
MTMIGIDPHKATHTAVAVDDEGNVVGEFTLEASDNQAERLTGWADRFKKREWAVESANGLGYLIGRQLVAAGETVFDVPAVLAARVRVLGSGKSQKNDPNDARSVAIAALRSDRLAVVKSDDHVTVLRLLVKRHRDIAQLRNKHSSRLHALLLEVAPGGIGTKISVTNASELLDSIDVDGEATRYRILIAREAVDDIHRLDATLKASKKRIAVAVQASGTSLTDIVGVGPIGAATIIGYTKDVTRFPTKGHYASYNATAPTEVSSGGHTRHRLNLRGNRILNHAIHIAAITQLRHDTNGRVYFDKKIAEGKSPKEAIRALKRRISDAVYRHLRHDAQRTTAS

SEQ ID NO: 410875 - protein, 444 aa, unidentified
MVFFGMILIREVADAPVIMGISKPAGLKSPRGEVKTMNPLFVGIDVSSRNNVVYLMKPDGSKHSSFSVQNNLGGAKLLSEKIVSALHSMQLIDVVIGLEATSIYGDSLVYALREDGSLGRFRRKIHVLNPKQVKKFKEAYPDLPKNDFVDAFVIADHLRFGRIAKEVYMDDYRYQALRTLTRARFDVIQNLTREKQRFANYLFLKCSGMAQDKDIQNTSATTIALMEHFETVDDLANADLDELTAFIAETGRGRFANPNAVAKVIQTAARGSYRLPKTVNDTVNQAISVSIASMRALKEQVKVLDKAIEQQFEIIPNTLISIPGIGKVYSAGIIAEIGDIHRFDSQASVAKFAGLVWLKNQSGEFEAEHSQMIKSGNRYLRYYLLEAANSVRRCDSEFRRYYDLKFKEVNKYQHKRALALTARKLIRLVFRLLKDNRLYIPPEG

SEQ ID NO: 410876 - protein, 445 aa, unidentified
MLRIVYKRVAGLDVHKKTVVATRMRVTEDDRIEWETKTFGTTTPDLLELLDWLYEWDLTHVAMESTGDYWKPVFNVLEDTFEIWLVNAQHVKHVSGRKTDVKDSEWLAELMLHGLLKPSFIPSKPQRALREMTRYRTTLVQERTRIVNRVQKLLEGANIKLASVATDIMGVSGRAMLAEIAAGQTDTELMADLARGRMRNKIPELEKALTGLVQEHHRFVLAEQLDHIDYLDEKIETISAEIGKQLESMSWPDEPLQPGVSEGAEEGTGAADESELPLTWDAAVALLDTIPGIDRRIAEVILAEMGLDMSQFPTADHLASWAGLAPGNHQSGGKRYSGRTTKGNKALSSIMVQAAWGASRTKDTFLKSRYHRLAARRGKKRAIVAVAHSMLVSVWHMLTYQQPYQELGGDYFDERKKESKVNYLVRRLEKLTGGAVSIELQPVAA

SEQ ID NO: 410877 - protein, 325 aa, unidentified
METKKLCCGIDVSHTKLDVCYQNNLGELFHLQVGNNNNGFAKILEHTGIDYHFVMEATGVYYIRLAFYLHQQGCKLSVVNALSIKRYIQMQLERNKSDKKDAGWICRYAIEQRPSYWEMPDSAYFESKQLYNTIREYAEQVKRFNNQLHSLKLLPVPSKDTIRSLEKIKLQLEKEIDSLEQKLEALLQKWQPAQLKSVSSIKGIGKRATAMLIVFTQGFKNTHSHRQLISFAGLSPTEYSSGSSIQGKPRIYKRGGKNLRDVLYMCSMNAIKTNTACKILYDRLRTNGKTGKQALIAVCNKLLKQVFAVVKNKSLYQPNYCSAKP

SEQ ID NO: 410878 - protein, 344 aa, unidentified
MSIKVVGIDIAKNLFQVCVLSADGQILSNRKVKRDKLLDTVRQFPEQTAIAMESCATSHHWGRIFQELGHRVALIPAQHVKPFVGRQKNDANDARAICEAFSRPDIHFVPVKSVEQQDLKAIRSVRKRLVENRTALANQIRGLAAEYGVVFPLSIKSLRSHLPLAIEDAENQLSHVMRSLLQTLYCNFINISDEIDKVTQSITRLSQQHPRYEAVKNIPGFGPILTAAIISEVGSGKQFQNGRQFSAWCGLVPKQNSSGGKSSLGALSKSGNRDLRALLIHGARAVVRCRTNSMDPMGVWLRSLIARRGKAKAIVALANKLGRVVWRVLSTDCEYDINRAFKPL

SEQ ID NO: 410879 - protein, 344 aa, unidentified
MSTITVVGVDLAKRSFHVYGVDEGGKKVVSRSLSREKFLDFFVNLPSCLVGMEACATSGYWQRKIEECGHTVKRIHPRYVIPYLIGDKNDANDARAICEAVQRPGMRFVPNKSQEQVDIQASYRIRKGFVEDRTRAVNQARALLAENGIVLKQGIANILSQLPDIIMEESNNLSDMVRLLLNRLYEHINSLEAQIAEQESMLRTVIRNSEPARRLLKIPGIGPIGATILFVMLGTVGDFANGRAFAAYLGLVPREHSAGGKHRVLGISKKGDSYTRTVLIHGARAVLSSLQRGGKPFGEGSLHNWLSELIARRGKNKAIIALANKIARIAYGLIKTSTEYAIAI

SEQ ID NO: 410880 - protein, 322 aa, unidentified
MSQPNPLCVGIDVSKATLDIAASSDVAQFTVSNDSDGFNAIITGLRRHSVALVLMEATGGLEVAVACSLQAEGFEVAVVNPRQARDFARAMGYLAKTDRIDARVLTQMAEVINRHPERKRFIRALPDAERQALAAMVVRRRQLIAMLVAERNRLHPSHPQNKKSINTIIKALEDELVRLEKEMDSHIRNHFKEIAERLSSIKGVGTMTVSAMLAEIPELGTLSRREISALIGVAPVNRDSGTMRGRRTIFGGRAGVRSALYMAALVATRFNPVIKTFYVRLLAAGKAKKVALVACMRKLLTILNAMLRKNEEWDESYHHVAP

SEQ ID NO: 410881 - protein, 412 aa, unidentified
MQVIIERCCGLDVHQETIVACLLIGSPGVQPVKEVRTFRTVTRDLEALRDWLWAAGVTHVGMESTGVYWRPVYAVLEGHFELIVGNARHIRNVPGRKTDVKDSEWIADLVRHGLIAKSFVPPQPLREMRELLRYRRKLVESQAAERNRLLKLLETANIKLASVMSDVFGVSGRAMLRALIEGKASAEAMAALAKGQLRRKCADLILALDGRIEEHHRFLLAMQLRRLEAIEADIAALDLRIGQRLEPYRTQHALLVQIPGVDWLVAAVLIAEVGVDMSVFLSVYHLAAWAGVCPGNHESAGRQKSGRARKGNIHLRTILVGAAISAARTKGSYLKDKFHRLKARRGALRAALAIAHKILVSAYHMLAKNLAYRDLGEAYLDQIGQTRTVANLKRRLERLGYHVTLQPTPHTA

SEQ ID NO: 410882 - protein, 377 aa, unidentified
MERLKFVGLDVHAETIAVAVAEQGGEVRALGIIPNREESIRKLVKKLGPVEQLRFCYEAGPTGYALYWQLTRMGAKCEVVAPTLVPVKAGDRVKTDRRDALKLARNYRAGELTPVWVPDAAHEALRDLVRAREAAKKDELRARHRLNKFLLRHGRRPPMGVKAWTMKYLEWIKREVHFEQMAQEATLLDYLHEVDHAGARIMRLDGAIEEAVKCVPPKMRAVIEALQALRGIARVASVTIVAELGELSRFARAKQLMGYGGIVASEHSSGECTRRGGITKTGNAHLRRVVVEAAWTYRHRPAVGTSLRKRQEKVSEEVKEIAWKAQQRLHQRYRKLLAKGKNKGIVVTAVGRELLGFIWAIGIKVEAAQKESLQQAA

SEQ ID NO: 410883 - protein, 339 aa, unidentified
MKVTTFGLDLAKHVFQLHWVEPETGEVRRKALKRDQMMKFFAQRAPAVVAMEACGSAHYWARKLIGLGHEVRLIAAQFVRPYVKRNKTDAADAQAIWEAVQRPEMRFVAVKDEHQQAVLTLHRMREQLVKMRTMQVNQLRGLLYEFGANLPKGRQQGMAQVGAQLAQLEDTLPAMVIDALRGQLQRVQALSRDIEDIECKLALWKKEDAAAKRLIAIPGVGLLTATAAVATIGDAKVFKNGRQFAAFLGLVPRQAGTGGKVRLFGISKRGDTYLRKLLIHGARSVITHQKARAPWLEQLLARRPFNAAVVALANKMARTIWALLAHDRTYQNGVTAQAA

SEQ ID NO: 410884 - protein, 402 aa, unidentified
MAYDFVIGVDVGKYFHHACVLDFQGRQVLSERINQHEGSLRKLFGKFLADDASVLVIVDQPNNIGRLTVAVAQDMGADVRYLPGLAMRQLSRIHVGNSKTDVRDAYVIAHAGLKLPDALRSVDRVEEVFIQLKVLNGIDEDLARAYTRLINQMRSALVGTYPAFEHVLRGQVIHRKWILHLLAKYGGPTKIRRVGRARLAAFARSHRARNPEPVIDAMLAAIHGQTVSIAGAEYAELGVAMSAKDALAKLEHRKEIEAQVLKLIQDIPHTEILLSMPGIGPRSAAQILMTVGDMSDFPDAAHLASYAGLSPRTNQSGTSIMSNSPNRAGNKKLKNALWQSSFASIRFHERSRQFYERKRKEGKRHNAAVVALARRRLNVLFAMMRSGELYRDISTVQEATAA

SEQ ID NO: 410885 - protein, 417 aa, unidentified
MGARIVARRRKKVKQRLKELFAGIDWASKTHAVCVVDDTGGIRARFEVPNTGKTFAGLVRRLCKLGVMGVAIERPDGPLIEAMLDAGLTVYVIPPRQVKALRGRYSSTGAKSDLGDAFLLADVLRTDHRRLVPMTTDSAETKVLRALTRTRKDLVEARVALVNQLRAQLELCFPGAVGLFAKLESDVSIAFLRRYPTNKSVLHLGEARLDAFLRRISYCGRVPVGVLLERLRTAPAAGITEVESDGRAACVKALLDAIEVCNRRAKDLEAEIIERLEFHRDAAIFTSLPRAGRGVRAASLLAEIGDVRAKFPDEESLACLAGVAPVTKASGKARSVGFRWACDKKLRNALIDFADDSRHNSPWAADVYRRAVERGKRHPHAVRILARAWSRVIWKMWQTNEPYDVNRHGGAVMLIFA

SEQ ID NO: 410886 - protein, 335 aa, unidentified
MEFEFFIGIDVSKNELDFAVRMGKQLLFHREISNEPAAINAFLKELSKLPVFNLSKAVFCMEHTGIYNNHLLVCLHKKKANICLEAATHIKKSLGNIRGKNDKVDSIRIAEYAYDKREKLRMWGPKREIVQQLSHFAATRSRLIKVKKILKTPLKEAGPFVKKSITKQNLKVCNGTLNAIEADLKKVEKEIDKIISSDPELKRIFSLVTSVCSIGAVIATQVLISTNEFIDIADAKQFACMGGMAPFTEESGKFKGKGRISHMANKKIKTLFHMAALVAIQYDPELKLFFERKVNQDKKNKMSVLNAVRNKLILRIFACVNQNRKYEKNYARLVA

SEQ ID NO: 410887 - protein, 380 aa, unidentified
MYCGIDVSKNKSNICIMDKEKKVVKEFSIEHSREGFQKLEKELTPETVIGMEVTGNYSKTLFDYLRQRKYRVTYVDNFKMNTFAQLHSPRVKNDKTDAHLITMYVASPDELTRVEVPEMNELKDLANLYDKTSRQLSRHKCMVKNQINIIFPELESVMSNNSNMGICYMLLKFPTPKEIAEATDEEIRDALRENLKRAGKFDIEYARKIKALAKQSIGVKDYPVLCFKQTVKTMLFYTIQAKAIKESIEEALKKTKYGRLMEDFGYNVVSLATIIGIVGDIRRFSNHKKFASYCGFGIREKRSGSSINKSTHITKKGNSRLRQTFHMMALIHIAYKTEFSKYYFRLKERGKHPKKCLVVTARKLAVKAYYDLLKCHNQKV

SEQ ID NO: 410888 - protein, 414 aa, unidentified
MFEVINKSCGLDIHKRFFIATILCRSGKKHQQRFERDNDGILAFKKWVIFEQCDVVACESTSDFWVPIYDSLIKHLPVIVGNARDMKAFTHKKTDKVDSEFIAQLALNNMVQASRVFPKDHREFRSYIRLRYTLIQKRTDLKNEAHSILATEMFNMKDVLTDIFGKNGRAILSGISSGKTVDQIIESLSPNVRKKSAQIREILDREISQGAAIRLQICLKLIEHLDHEIKALEKEIFNYAYRNHNREMEILMSVPGIGEISAATLVAEIGNFKDFSSGNKLASWLGIVPNVYQSADKFYNGRITKRGSKVARWILTQIAQAAARKKNSRLKEFFNRKKKSIGHAKAIIALARKITTIIWHLITNDEMYEDETGYEKGEIQRRKIVETEIFSVDERIKIISGIIAIMGKEEGEGT

SEQ ID NO: 410889 - protein, 341 aa, unidentified
MQNDTRIAVDLAKSVFEIAVSDRPGRVSRRERLPRSQFVDFFAQQPAATVVMEACGSAHYWGRRIEQLGHQVLLLPPHHVRPYVRRNKTDRADAKGILEASRNEEIHPVPVKTVAQQVLTTLHRLRSGWMSERTARINTLRGLLRELGVFIPQGARQIVPSVWALIEDADADVPDALRPFFAELCREIREIEARIHQVEQQLAAISRQLPVIAQLLSIPGVGLLTATALVAFIGDIRRFPSARHLASYLGLTPREYSSGLKRRLGRICKRGAGYLRTLLIHGARSVLLHARNNQPDRLRRWANDLAKTHVHNKAAVAVANKIARIVWAVWTRSQPYQPVAA

SEQ ID NO: 410890 - protein, 418 aa, unidentified
MANVMIGVDPHKGSHTAVAIGAGEEPLGELRVDACPSQAEQLRAWAVAWPQRAWAIEGAAGLGNLLAQQLVAAGERVLDVPPKLAARVRLLQAGDTNKNDPNDAYSVAVAALRSKLARPVLADGHAVVLKVWAKRHRDLARLRNQACCRLHAVLCDLVPGGVRREISAGRAARLLEQVRPADAVTTARCELAGEFLADIRRLDAQLRECHNKLAAAVRASGTSLTGLFGVGPVIAGTVIGDVRHVFRFPRRDHFASWNGTAPVEVSSGDRRKVYRLSLRGNRRVNHAIHMAAISQIRHKHSDGRAFYEKKLAEGKTHKEALRALKRRISDAIYAALAADARRAASACSKSPGGQPGDHSASRAAGSHPAHRHFGQATPGPAPTIRPGANSSRAPTQPNRARRRAAHSPASSKKPPATT

SEQ ID NO: 410891 - protein, 344 aa, unidentified
MPSILGGLDIHRKQLTFDYLDTVTGEVACGQVAPADREHFRSWLARFEDPGEVAFAAEACTGWRYVSEELRRAGIEAHLAEPADTAAARGRKKRAKTDRADARLQRELLAQGRLPECWIPPSHVLECRALLETYHDLRAEHTAWVQRAHAVLFHQGAPAFHDLSRADAPAQLAELARGHLSAAGQVQVGVYLRMLAALEAELDATRRRLLAAARQMRGAKVLAEAIYGVGPVTALALTCWLAGAGRFTSARKAVRFTGLDITVHSSDSKRSPGHLSRQGPPVLRWALYEAGKTHARSVAPDHGYYAAVKARKDGKRAALSEARKIVRRACHILTELGDDALATV

SEQ ID NO: 410892 - protein, 343 aa, unidentified
MDLGDRWSFYCVLDEAGKILLEQKVATTPEAMKQTFGKIPRSLIAMETGTHSPWVSRLLTELGHELLVAHAQKVELITKSNRKDDRHDARTLARLARIDPELLGPVRHRSAKAQIHLTVIRARAELVSARTALVNAARGLVKSYGQRLPKRGTYQVSRELAAALSTELRDVLEPLLKEIESLNERIKEYDERMEKIAKEVYPEVSLLQQVKGVGTQIALTYVLTIEDPHRFLKSREVGCFLGLKPGRRNSGESEPQKGISKEGDRYLRTMMVQGAHYILGPFGEDSDLRRWGLKLAERGGKNAKKRAVVAVARKLAVLLHRLWVSGEVYEPLRNSQKAMRAVA

SEQ ID NO: 410893 - protein, 404 aa, unidentified
MWYAGIDWADDHHDAVVLDDSGRVVTTLRVSHTPAGLAQLTSALEQICGPEAKEQMACIVETNRGLLIAALLEAGFAVYPVNPKTVDRRRNAAGVKTDQIDAYLLAKTGRSDLADLRRLRPDSPLVQELKALSRDQDSLIVMQTRLLNQVTACLKAYYPVALELFSKLHQPSTLAFLHAYPTPQEARAASVEAIAVVLKQAGHTRALSAAATIHQHLHQPHLLADAVTTRTKARLLLALLAQLQPLMEQIAAYDAEIERLFLSHADSALFASLPRAGRRLAPRLLAEIGDERTRYADAAGLQALAGTAPVCFESGNYAKAHRRYACLKPLRNAMQQFAWQSTLQEGWALAYYQRKRMEGKSHSVALRTLANVWLRIIYAMWRDRAPYVSATFEAAQQQKLRKAA

SEQ ID NO: 410894 - protein, 374 aa, unidentified
MSVAENITFVGLDAHAKNINVAVILPGSGEIDHEWQITHEARSLRRLANKLLKMAPGAVHTVYEAGPCGYALKRNLDKLGLCCEVVAPSLIPVKPGERVKTDRRDAQKLASLFKAELLTIVHPPNETEEALRDLMRAREDAKKDLLSARHRLSKMLLRYGLRFMETRNWTLKHKAWLKRLRFDERHAQQVLDNYLLSIEQIEERLKMLEAQIEEAATDEAHAKQVGWLRCLRGIDTITAMTILAELHDFRRFTHPRHLMAYLGLVPSEHSSGSHTKRGGITKAGNSHVRRVLVEAAWNYRHRPAVSAVLRKRRAGQPPAVIAISDRAQQRLHKRYYHLKEGYRKPHNVVTVAIARELVGFIWAVLHHEDATQSV

SEQ ID NO: 410895 - protein, 373 aa, unidentified
MYEITRGAIVRVGADLAKRVIQVHAVDAAGRRIVSRALKREQFMAWCAQLPAGCLVAMEACSSAHHWARKLRLLGLDARLIAANFVSPYRMEGKSGKNDMTDAAAICEAASRPSMRFVPVKTCEQQGVMSLHRVREGLKEERTSCINQIRGVLAEFGLVFAQSPKVLRAVLADVIEDASNELSALARRALQRAFDHWRELDEHMRWCDNQVGQHVRSSPAARRAAKIIGIGELGASALTAGVGDFHQFKGGHQLSAWLGLVPSQNSSGGKTTLGRITKRGDDYLRTLLIQGAKSAVMSAGKRDDPISRWLVQLTARVGWQKACVAMANKNARILWAVMTRDAGFDARYVSDKPQAKRSAEERFVTPTATMCPA

SEQ ID NO: 410896 - protein, 315 aa, unidentified
MTDGSVFIGIDVAKAHLDVAVRPDGDTWQAANDASGIAALVAHLDQLRPTLVVLEATGGYERAVAAALSAGGLPVAVVNPRQIRDFAKATGKLAKTDTLDAHVLAHFAAAVRPTPRPLPDADTQMLAAILGRRRQVVAMLTAEQNRLHTAPTTIRERIGAHIVWLKEDLKEIDTALAQSIADDPTWRERDALLRSVPGVGPVLATTLLAELPQLGTLTRHQVAALAGVAPLNRDSGTRRGIRTVWGGRARIRGALYMAALVATRYNPVIRAFSARLCAAGKPKKVALTACMRKLLTILNALLAHHTPWQSSASTT

SEQ ID NO: 410897 - protein, 470 aa, unidentified
MPDVEIGLDWDEAGGQFAVVGERGVVLHNRKYPATPTGAEEVLALFREYADPDGTLPWLVMEGTRRPFVRVLQDAGVPAIACNPNAFGKRNQGRNDSKTDAKDAVKLVTESRLAPERFREQPEPSDDAWAITLFTRRAKNSVLKVTTLAGEARSLLAEFFPAALTAYSPLDLGQKPEACAVLTAFPTPTRAAAATLAEIEQAIRSTGKVRWVKPMAAKTHAAFQQERLQYAPGLEADYGEVLVGLLRELKAAMDNRVLLDEAVRVRVERHFVWDLLSPAPGAGMSVISRVLAEMGDDPARFEDKGGLAAFAGVAPKMHQSGEFTGTPGRRSVKGNRLHQAYWDWASSAMLWSPGAMEYYWAHRARGDKHPTAIRKVGRRLANGTWHCLRTGEVWNEATLWPGAPTLAEAKGNAQPIRDLVAARRKEAAKANSKTDLRISKRRKAELAAKTAKPLRAPVTHLPSLRPPVLR

SEQ ID NO: 410898 - protein, 380 aa, unidentified
MASIGDDVRSNTTVYAAIELSKKSWVVAIAHPDRDRPSIHRIAGGNVADLIGRLRKAAGKNQRIVVCYEAGYDGFWLARSLANIGIDCRVLDPASIQVNRRARRVKTDRIDSLALLRAVIAVDRGERHVCAVVRVPTVEEEDARRSHRERQRLIRERTGHINRIKGLLFAQGIRGIEPKRRRTRIDFGQVTTAEGRPLGERLRRELEREYQRLELIESQLRIVEKERDTVDAQDPAVERKRELLCALHGVGGASAAILVREVFARPFASRRHLGSYLGLTPSAYDSGSTTRCQGISKAGNSWARRVLIEVAWLWRKYQPASPLSEWYARKTADQSPRIRRIMLIALARKLAISLWRYVETGLVPDGAVLAKKAPHQTAAT

SEQ ID NO: 410899 - protein, 336 aa, unidentified
MQYVGMDVHWRQTTICILDENGRRVKTFNVRGPWQKVLEEMGRIEGLWQVCFEASCGYGWLYERLKRMAQKVVVAHPGQLRLIFRSKRKSDRVDAEKLAKLLYLDEVPPVYVPSVQVRSWRAIIEHRQKLLQERVRTKNQLRALLRTHAIVAPRGLWTQKGMAWINAQELPTSMDRLQRDILMERLGSLRGLIERVEAALGEIAQSQAGVNLLMEIPGVGIRTAEAVMAYVDDPHRFRSIKSIGSYFGLVPCQDQSAGKNRLGHLTRQGPATVRKLLTEASWQAIRRSKKIRAHFERIRQGNPERKRIALVATAHYLLRVMLAMLRTGEVWRAEAA

SEQ ID NO: 410900 - protein, 342 aa, unidentified
MDHFAGLDVSVKETSICIVDETGKIVREVKVASEPEALLAVLSNAAYHFKRIGLEAGPLSQWLFSALAEAELPVVCVETRHMQAVLKAQINKTDRNDARGIAQMMRVGLYRPVHVKTLRSQKLRMLLTHRKLLQSKAIAIENDLRGTLRNFGLKVGIVGKVKFEARIKQLVENLPDLAALVEPLLIVRRVLREQIIILHRRLLAIVRDDEVCRRLMTTPGVGPVVALTYRATVDVPARFRKSKAVGAVFGLTCSKYQSGEIDRNGRISRCGDEMMRVMLYEAAQSMLRSKKWSWLKAWAMQIARRRGMKKAIVALARRLAVIMHRMWVDGTEFRWTREAATA

SEQ ID NO: 410901 - protein, 341 aa, unidentified
MFAIGIDTHKATLAACALDDLGQPLAERTFDNDPAGHRALLAWADELLPDARIGLEGSAGFGAAAARYLVVAGREVCEVPPQLSHRERQRTRRAGKSDPGDALAIARVTAREAALPPVRLADATHEIGLLVEAREDLVAEATRVRNRLHADLVVIVPGYGATAANLVALRHRRTVGRRLRSLPGVQAELARDRLARLGRLVAESQLLETRLAGLVGEHPLRGLPGAGVLVTAKLIGEAGDLGRFRSADAFAMLAGVAPIPASSGQTQRMRLNRGGNRQLNRAIHTIALVQAWHHPPAKAYIARKRAEGKTWREALRALKRHLARVVFRLLVGPTEIAQQAA

SEQ ID NO: 410902 - protein, 337 aa, unidentified
MNYAGIDPHPNNSSVGIYDRADELAIKRRRRNDLRKILSWLEPYWIELVAVVVESTYNWYWLVDGLMDHGYRVHLANPSAIKTYEGLKHTDDKWDSFWLAHLLRLGILPQGYIYPKEQRPIRDLLRRRQLCVRHRTSHILSLQSMITRNRGLNFDGCQIQRFRDDFIQKMFDCAHLVFTAQKQLATIRFLHRQIKEIEAVVRPQIQLKPEFEKLVTIPGIGDILGLTIMSEVGDIKRFAKVGHYSSYCRCVSSKRLSNGKKKGENNKKNGNRYLGWAYVEAANFCKRNCAGARRFYQRKLAKTNKIVAIKALSNKLAKASYYIIRDQVPFDANKLFG

SEQ ID NO: 410903 - protein, 412 aa, unidentified
MESDVFWVGIDWATEAHEVCVLRSDGSVLKQTSVKHDGAALRALCDELVKLAGGDSSRVSVAIEVPRGAVVETLVERGFAVFSINPKQLDRFRDRHNVAGAKDDRRDAFVLGDSLRTDTSRYRRIRLDDPVVIKIREHSRIHDDLAEERNALGNRLRDQLLRYFPQVLELGDVYRNKWLWALLERASTPAEAAKLREVTIRLLLKSHRIRSVDSVRVLETLRREPVTVAPGVVEAASAHVALLLTRLRVVDEQDAAVSRRLRELLEALATADAGKAEHRDAAILHSLPGVGTIVCATMLAEAAQILAERDYKMLRALCGTAPVTKQSGKSKSVTMRYACNSRLRHAAHHWARSAVQNDPRSRAHYDALRQRGKSQGHSYRAVADGLLKLLVGALRCGRLFDAERWRPVPAAA

SEQ ID NO: 410904 - protein, 351 aa, unidentified
MKYYTTTTEFNCGIDLHAREMYMCLVDSKGDKLVHTNIVGNDFAYFLKKIAPYRHSLTVVSECTFNWFWLADACFDANIQFVLGHALYMKHIHGGKNKNDRIDSEKLAHLLRSNLIPQSYVYPAERRPIRALLRQRMSYVHQRASLMTHISMNQTAEGLKPAAKGGTDRDVWMERILSQYENPLHRLGASSEMDVIRTYDTQIEKLGDEIIRQAKKHEGRDYQILQTVTGIGPILALTILFEVDTIERFPTVKNFLSYSRLVKGSVASAGKIKGLCGGKMGNAYLRWAFGEAAVLCKRYHPLLTPYAERLASKRGKFKGNAILAAKLARAVYFMLKKGTSFDAEKLVATSF

SEQ ID NO: 410905 - protein, 351 aa, unidentified
MRYIGVDVGKKRCQACIMDEQGVVLDEFPFENNRVGIGRLLERVPDRTCKAVLESTGNLWLSIYEALEGHGVEVKLANPYRTKAIASARNKTDKLSARILVHLLRADLIAECYVAPPETRRVNALLRQRASLVRMRTMVKNRVHSLLDRYGYRPRWRDAFGVAGMRWLKGLEMDPVDRCILDTHLRHMECLNGEVGVLDSRIASHAMESEDALLLMTMTGIDYYGAMLIAGEIGEIQRFPSPKRFVSWIGLCPSLHQSGSSTHLGRMKKDSNRRVRWMLVQAARSASRTDPRMRQLYERIASRQGDAKAVIRVANKMATIIWHMLTKRQPYKQMKEELYRSKLKRMARIAG

SEQ ID NO: 410906 - protein, 351 aa, unidentified
MVDVSSEAKSSATGVTDPYRRTEHCDKIHEYRCDKEVGVIGIDVSKDHLITSRGRVRKYENSKKGYEEILKMKPCVIVLEPTGVYAIKPSQYFKERGVRVLQVSPNVLSREKEFRGKKTDFYDAEKLENMVDKAKEYDYNPLKELVTLYLFLKDIETKYKNRLKRALFLVSDNDKVSKNRLEKLAKGDFTQEELYQLGYTPLVLEEIKILAKNLLETQERLKEVRRMIEGQVPQDHVLLTIPGVGRLAAGIVGDVKRFPKPESFVAYCGLDPVVERSGKAVISRGISKRGNKYLRSLFYFLAMRSYSRNPTLLKFYETHKDRLKGRKLYVALARKLARVVWSVWYRPYEPK

SEQ ID NO: 410907 - protein, 423 aa, unidentified
MNTSTLCVGADVHLKEITLRAVDKLTSDEIIAPFNVANNLPGAQSAASRLAEVATRLGYTHIEIGCEATGMLWIPFHRFLSTCQLLAPFSLQQVCFNPKLVADFKDALVLRGPKDDERDAFDVAARVQIGHWPDSYVPDDFWQGLRRLTRYRFRLSRNLSQEKMRFQSYAFLKCSDWKRVKAFSDIFGATSAALLTEFTAAELREMTQDQLADLIARRGRDHFYDPDATARTVRQALRTSYPIDSQMDEMITATLATGWEHIRAIKRLMKRLDQQIARCIEPIPNPIITIKGLGPVITAGLLAEIVDISRFPEHKHLAQYFGISWTKRFSAGSATQDSRMTKVGNPYGRYYFVIGADKLRMFNLEYKAYYRRKYNEVSKHQHKRALVLTARKLVRLVHTLLTKNIPYVRPRTTVDLEEADLLQ

SEQ ID NO: 410908 - protein, 412 aa, unidentified
MIEVTFPNSSGLDVHKKSVTACVMVAKRGGGVRPETRTFKTTTVELQALAAWLHEHEIEQVVMESTGVYWKPIFNILSPDFDVWLVNARHVSQVPGRKTDVSDAEWLTSLMRHGLVSKCFIPDVEQRDLRDLTRYRTRLLDERASAANRLHKVLEDANIKITSVLTDVQGVSARLMLEAIIQGRTDVEQLAELAKGRLRNKIPDLVEALFGQVRSHHRFMLQETLNHIDELNARIASLDQRIQELVAPDEAIITRLMAIPGVGRRIAEILLAEIGHDVEHFPSAKHLASWACLCPGNNISANKRRSGKTRKGQKWLDAALVEAAWAASHTKDTYLSAQFHRLRAHRGAKRAAVAVAHSIITIVYHLLKDPQATYQELGGDFFIKRNKVQQQRWAVRTLETLGFQVPLAPMTA

SEQ ID NO: 410909 - protein, 405 aa, unidentified
MLVGIDWADAEHTYCLMDDTGATLATGTIDHTAEGLERFMTLVRARAQDPQDILVALETSQGPLVGALLDQQFTVYAINPKAVDRHRDRFGVAGAKSDLRDAWVLANLLRTDRMLYRPLLPDSEVAQELRALTRDRAELVQTRTMLSNQLTSCLKAYFPEFLTLFADPDRPVALALLQAFPTREALQAVSPTRLEAFLRRRHCPHSHDRAVEIHTQMQARGFHIAPPLVRAKARLAGTLVSQLQTLAEHLEAYDREIQRVLRLHPDGELYHSLPGAGDFLAARMVGELGDNRDRYRDASSAQCEAGTAPVTRKSATVRTVHVRRACSHPLRSTMWQFAFASKRHCEWAQAYYLRARKRGKKHAEAVRMLGNVWLRIIIAMRRNRRPYDEALFLSRSSHPSLALCP

SEQ ID NO: 410910 - protein, 315 aa, unidentified
MQKLLNIGVDVAKDAVVVGCDEQGSAVRSIPNQRTALTAWLASLPGPSRIGMEATGCYHELLADLAYQRGHTVFVLNPKDTRHYAQAVGLRAKTDRVDALLIARLIAHEHARLHPYLPATPEQRQLGRLLRRRAQLVKLKGALKQSMKGVIGLARDTSALVARMDALIAKLEQRMDGLIASMPGTQEDRRRLETIDGVGVVVSIALIEPLTRLPFRSADAFVAFTGLDPRPRDSGHKIGKRRLSKRGPAELRRLLFNAAMAAARTCVWKPIYEHYRARGLPTTAALVVIARKIARIAWSIHRYHTSFDPQRLKAP

SEQ ID NO: 410911 - protein, 332 aa, unidentified
METETGECGERRLQHREEAEKFYRDLAVQGVKVRVGMEASGHARWFERLLAELNFELWIGDAAEIRTKRVRKQKTDRQDAQLILRLMLKDDFPQIWVPSWENRDLRQLLWHRHRMVQARPRIMNQLQAVALNEGLRCKKRLWREAGREQLEAFPLAPWASRRRRDLLELLDRLSPTIAELTQTIEQEAEKCPEARRLRTHPGGGSLTALAFVLIIGRAERFQCGKQIASYLGLVPSEDSSGDRRRLGHISKQGNALLRFLLVEAAQVTVRSLPEWRSKYFHLAMRRGRKIAKVAMARKLAIQLFWMMRKGWDYEQVKRFGPHAGQPENRRAV

SEQ ID NO: 410912 - protein, 434 aa, unidentified
MEEVTDEPLYRDRVCGIDIGKAQLYATIRVPSDGNPARRASETRSFATTKRGVLALADWLRAWQVPAAVMEATSDYWKGPFYRLEAEGFECVLADAKQVKNLPGRPKRDPSDSSWLAQCFERGAIRPCFVADPEFRVIRLHTRYRRDLIEERTREKNRAEKLLESAAIKLSSVVTDLHGVTGRDIMGHLIAGHRDPRMLAQLARGRARRKISELEQALEGAEFFTDCHAGLLTTMLARIDQIDAEITRLSEVIEQLLAPWEEQLQQAESQPGWARRSAEDVLAETGPDMSKFATGGHLSSWAGKTPLDHQSGKRQGRSRHKKGNKYVAAATGETAISAGKTDTREGARYRKLARSRGKAKACVALGNTQLKVYHKLLSNPGMRYHDLGPDYYQRRAQSRRKIAYHVRELEELGLEVTLCRPGPAQDDPEPTQAP

SEQ ID NO: 410913 - protein, 341 aa, unidentified
MERSIGVDLHKSCFTVCYLEQNGKHHLAEFKVTPKEIEAFKKTLSRKDKIAVESTGNTAYFVREIEAGVKEVKIINPTQFKIISHSVKKTDEHDAVTIARYLSKDLIPEVRMRSREESRLASLINTRDKFVKLRTILKNKVHNILNENGVVSTTEMFSSEKGLNKVLNLNLDSAYMFELKIIVEQIRSLNKVVDEINQELTERGKKVNGHKNLTSIKGIGDLSATILLNTIGDVKDFPDDKKLAAYFGIVPRVSVSNQTSHYGRITKMGNKIARTTLVQSTLIAIRYNHYLRNFYFKLKAKKGSGKAIIATARKLLTIIYRTLKYNWVFEDFSQFKLAVNH

SEQ ID NO: 410914 - protein, 347 aa, unidentified
MLIIGCDFHPGFQQVAIFDNRTGEIQEKRLQHRAEAEQFYGALAGQEVRVGMEACGHYPWFERLLEELGIELWLGDAARVRASVVRKQKTDRRDAEHLLDLLRQDRFPRIWVPSLEVRDVRQLLVHRHKQVQARTRTKNQLQAMALSCGVQKKRKLWTAAGRTELEQLPLLRYAAERRKRLLEALDGLEAEIGELERRVAEEAGQRPEAVRLMTHPGVGPVTALAMVLTLGPAERFGSGKQVGSYFGLIPSEESSGGRQRLGKISKQGSSFLRFLLVEAGQTAARYDPQLKRFSRRLAVRKNRSVAKVAVARKLATRLYLMLREDWTYAQLCQAVMQVSPSHSVAGE

SEQ ID NO: 410915 - protein, 370 aa, unidentified
MKTKTKTPSVVLTSPATLVSSGCTVGLDLGDRSHHVCVLDAAGQVVREGALVNTRPALARLLAEFPRATVAVEAGTHSPWISRYLTELGATVLVANPRKLHAISRNERKSDRRDAQMLARLARVDPALLHPIQHGSAQAQHDLLGLKLRDALVRTRVNLINAVRFTLKSLGHCVRNPASESFHKTALADVPADCRSVVQPLLTVLAQVTEQIKGLERDLVQRSKKDYPATQRLQQIAGVGPLTALCFVLKIGDPQRFGRGRDVGAYLGLCPRRDQSGGTDKQLRISKCGDGLLRRLLVSAAHYILGPFGPACALREHGQRLTGAGSAREKKRAVVAVARKLAVLLLSLWKHGADYEPRVAAPPALVLTPA

SEQ ID NO: 410916 - protein, 341 aa, unidentified
MKKFIRIGVDLAKNYFQVHALESENGPAVTRKLKRSKMHEFFSQIEPCLIGMEACGSAHYWARELKAMGHEVLLMPPAYTKPYVKRGKNDAVDADAICEAMSRPGMRFVPIKSAEQQATLMLHKTRELLIKQRTMSVNALRSHLSEFGIVAAKGIGRVDELLDLAESDATLPTAARAGVKVLAQALEGLDKAIDDLEDEITSADAQNEMVRLLDKVPGIGKLIASVIAASVPDPSVFKSGRDFAAWLGLTPRQNSSGGKQTLGGITKQGNRYIRKMLVLGATSLLNVLGKRKGALRDWIVGLLAKKPARLVTVALANKLARILWAMMKTGECFRTEMFAKA

SEQ ID NO: 410917 - protein, 401 aa, unidentified
MPELWAGTDAGKAEHHCTVIDTDGAKVLSRRVPNSESDLLQLLGDVLELADDGPVTWAVDLNAGGAALWIALLIGHGQNLLYIPGRTVHHASGAYRGDGKTDAKDAFVIADQARMRRDLQPLQEWGEVAVDLKILTARRMDLSADRTRAINRLRAQLLEYFPALERAFDYSTSKAALVLLTGYQTPAALRRIGRARLATWLKNRKVYNPAKIADLALAAAEAQYTVVPGEKTAARMVHTLAREVMALDEEITQTNALIEGRFREHPDAEVITSMPGIGTLLGAEFIAATGGDMTAFGSPDRLAGVAGLAPVPRDSGKISGNLRRPRRYSRRLLRMFYMSAQVAAVHCPVSKAFYQRKRAEGKSHKQAVLALARRRLNVLWALIRDHRPFEATTPRVAAAAA

SEQ ID NO: 410918 - protein, 350 aa, unidentified
MEEISEEPAELVERVAALDIGKAMLVACVRVPHETKPGRRRQEIRTFATTTRSLLGLADWLDSLGVTRVVMEATSTYWKPPFYLLEESCECWLVNAREVKHVPGRPKTDTQDAVWLAKLAERGMLRPSFVPPPWQRELRDLTRYRRTLIHERTREKQRVEKLLEDTQIKLSAVVSDMFGVSGRQMLEALIAGQRDPKVLAQLAQGRMRSKLGVLEEALTGHFRAHHGYLLRMMLDRIDALGAQADQLTGRIEELLAPFAYQVEQLDEIPGVGRIGAQELIAELGVEMGRFPSAGHLWSWARVRPTTNASAGKTKSSSTGKGNPWIGATIGRRRWEPPRPRPSSAPATGGS

SEQ ID NO: 410919 - protein, 371 aa, unidentified
MGKSSKTLFVGLDVHKDTIAVAYAVEDRGTEVVSLGMIGTRQYDIDKLIRKLEAKGAALIFAYEAGPCGYWLYRYLTRRGLSCAVVAPSLIPRKPGDRVKTDRRDAITLARLLRSGDLSSIYVPTVDDEAIRDLSRAREDAVRDLKRHKVRLKAFLLRQDIRYEGRANWNAAHLRWLARVVCPTPAQQIVFQEYVHAVSEQTERLGRLETELQTAVTTWRLSPVVEAVQALRGLNLTGAVTLIAEVGDLTRFETPRKLMSYLGLTPSEYSSGDHRHQGGITKAGNGHARRALVEGAWAYRYPAKVSRHLQLRLEKVPTEAGAIAWKAQLRLCKRYRLLSARGKHVNQVVVAIAREMAAFAWAIARTVPIAS

SEQ ID NO: 410920 - protein, 342 aa, unidentified
MYYIGLDVHKKTISYCVKDASGQIHQKGKVGATRWELDIWMRALPQPWTVAMEATIFTGWIYDHLKPHAAEVKVAHPLMLRAIAASKKKNDRIDAGKLADCLRCDFLPECYMASTEIRERRRTLRYRNLLVRQAVQLKNRVSTLLMETGVTYNKQQLHRAGYFHELLASKDAIDKSIRPLLRLSRDSITRLQSIESGLIRSLQRDPLLADRVRRLQTIPCVGRITALTWALEMGDASRFRSIRQAISYCGLCGDEQKSAEKVVRAPLSKQRNKHIQHVLVEAAKLAPRYDPDLALLYAREKQKGNANRATLAVARKLLAYLLAVDREKRDFVPVREFSSTAA

SEQ ID NO: 410921 - protein, 459 aa, unidentified
MAQRVDPTKRRAEGTPIEPLSIKHPNAAGIDIGGKSHYVAVPPDRVGKGESAVREFGPHTEDLVAIADWLCACRIDTVALESTGVYWIALYELLQARGFDVWLVDAKSVRHVKARKSDVLDCQWLQQLHSFGLLCKAHRPDEQVCALREMSRLRDITIDERARHTQRMQKALTQMNVQLTNVITDITGETGMKIIRAIVLGERDRMVLAQMRNYRIHASTEQIAKALEGRWSREHLFSLDHELKAYDFASGQIARLDAEIKVLLDAMRVFDKTPAANANKGRRKNTLAFDGRQALMNWCGVDLTEVPGIDVGTAMKILSELGCSLNRFDTVKHFCSWLGLCPGTRISGNKRLSGASKRIPNRVARALKLAAMGLSRSRCAMGAYYRRLTLRMGSPKAITAVAHKLARIVYAMLSGQADYVKEDQVRHDARYRERAIKALQKRAQELGLTISPQAVPAHA

SEQ ID NO: 410922 - protein, 342 aa, unidentified
MDTIGIDLHKRESQLCIGQGDGQIVEQRILTSRDRFTAVLGARPPARILLEASTESEWVAQHLEALGHEVIVADPNYAPMYATRSRRVKTDKRDARTLMEACRQGTYRRAHRLSPARRHLRAELAVRDTLVRTRTRYATLAKALVRRDGLRVASAGAERLERHLAALPLSPALTEELQPLRTLLDPLNTAIAEADARLEAREAQDPIVALLMTAPGIGAVTAAAIVATLDEISRFGSAHQCEAYLGLVPSERSSGEQRHVGPITKAGNSRARWLLVEAAWRILRSKQADTLALRTWAGAIATRRGNRIAIVALARRLAGILYAMWRDGVPYDPSKIRLPARR

SEQ ID NO: 410923 - protein, 412 aa, unidentified
MNVYCGIDWAEDHHDIALVNRDGQLLARRRISDDAAGLAGLLALLAEHGDTPGDLIPVAIETPRGLLVACLRATGRQVYPVNPMAVARYRDRHSVAGRKSDHGDAVVLAGVLRTDLHAHRPLPADTELAQAIAVLARAQQDAVWDRTTAHNKLRSHLREYYPAFLTAYATAKGGILRPDARAVLAAAPTPADAAKLTLTQLRAVLKKAGRSRGIDTEATRLREAFRAPQMRQLPLVEQAMGRQTLALLGQLNAACAAADDLERAAVESFNLHPDAGIITSFPGLGALTGARVLAEIGDDRSRFQDAKGLKAYAGAAPITRASGKTKSVTYRRVKNNRLNAVGYLWAFSALTASPGARAHYDRRRDTGDRHAAAQRNLFGRLLGCLHRCLITGQHYDEATAFPAATKQSRRAA

SEQ ID NO: 410924 - protein, 312 aa, unidentified
MTSEKYVGIDVSKRWLEVQVHGEAEGRKFGNDPDGIRSLVEQMKALQPEVIVFEATGGYERRASKALREAGLAAAVVNPTRVRRFAEALGILAKTDKIDAKVIAHFASVVRPAPNGQQSDLEEQLAACVERRRQLLVELTAEKNRLSTCPACVREDIEEHIAWLEEHIDSLEAEIQICIMQKPEWQARAEIIDSVPGVGPVTAATLIAELPELGQLNRQKIAALAGLAPFNKDSGPKKGKRKIFGGRSGIRRPLFMAALSATKHNPVIRTFYESLLKRGKEKKVALTACMRKLLVIINAMVRKGEAWRMSPA

SEQ ID NO: 410925 - protein, 385 aa, unidentified
MDQTSSSAISTNTLHCALELSRNSWLLAIQFRDREQPSLYPIEGGNTEKLMAKLTAARDCWAKVSGSPPAITLCYEVGYDAFWLARFLMGRGIECLVIDPGSLQVNRRGRRVKTDRVDVKMLLRTLIAWCRGERHVWSLVRIPSIDEEDLRRSHRERGRLVRERTAHINRIKGLLFGQGIRGINVKSQYKTLAVDNLVTGDGHRLPPRLACEIAREIQRLAMVQEQIAKIERERDTAPTPCEATERKRHLLLQLKSIGPAISALLSREVYYRQFANRRQVGSFLGITPSPYNSGAEERCQGISRAGSGHVRAIMIETAWLWIRHQPKSALTRWFVERTAGQSTRVRKIMIVAVARKLAIALWRYVEHGMVPQGAILNPPTTGNAR

SEQ ID NO: 410926 - protein, 416 aa, unidentified
MKIVRPICCGMDVHKNIIVATIGITNKKTRITEYIQETFSTLNPDLLNLKQWLINHKCFDACMESTGKYWIPIFNILEDEINIYLTHPKYVKAIKGKKTDKKDSKWICDLFKHDLIKFSFIPPKEIRALREISRYRYKLVGMRSSERNRYQNCMTVSNIGIGSVFSDPFGKSAQAIMKEVLESDIIEDEKILKCIHGSCKNKDKILDSIKHCNIETDQRFKMNESMTHMEELQVHIDNCEIEMMKRAAPMFDQFMHITQLPGISTLSAILIISEIGVDMKQFESDKQLTCWAGLAPANNESANKKKSVRISKAGQYLKPLLVQCALGAIKDKEGYFGIKYSRIKKRRGHKKAIIAIARMMLVSIYHMILTGETFNPSDYESFKNPKPPIKQQVLTEESAIEFLKKSGFDVSKLTKP

SEQ ID NO: 410927 - protein, 346 aa, unidentified
MLYAGLDLSRKRLDFHLLDGDGATVEVGASPPDADGLRRLSERVAHRGAPIRAAIESMNGARFVHDRLELHGWQVEIADAQKVKGLAPLACKTDRIDAWVLAELARRDLVPAIWLPDPQVRAERERARWRLHLVRHRSSLKQRVHAVLLTHGKPCPVADLFGVRGRQLLARLGLPEPWQGTIEASLRLIDELEREISECERELRRLGADHRYVPLLCTVPGISWVLAYTIAAEIGDIERFASPRKLAGYSGLCPRVYQSGERDLRGPLSKQGPRYLRWALVEAATHACTAPVYRDRYQQTKARIGKQRGAKVAQIDLARRLSEAIWHMLRRGEAFAPKGATDPLAA

SEQ ID NO: 410928 - protein, 407 aa, unidentified
MEVVYRCCCGIDVHKKMIAACLNKGGKQELREFGTTTGEIKVLANWLLESDCEMVAMESTGVFWKPLYNLFELMGLDAIIVNASHMKALPGRKTDIKDAEWIADLLRHGLLKASYIPDREQRELREIARYRKSLIEERAREINRLQKILEGANIKLDSVVSDINGKSARKLLAKIVANENPDPDEVAELIHSSMHSKLDQIMQSIEGITTQLQRRLIAQIVDHIDDMTKRIADMDEMIKGYMEQYETAIKAVDELPGIARRSAEVIISEIGTDMSRFPSAAHLCSWAGVCPGNHKSAGKRSHGKTTQGNKTLKSILTQCAKASKNCKDSYFSAQYQRIAARRGKNRATIAVAHSMLIAIYHVLKNEVAFKDLGSDYYDNFNRDHKIKGYLKRLEALGWSPDSAPVPA

SEQ ID NO: 410929 - protein, 320 aa, unidentified
MSDCLVIGLDVDSKDLVPAVVDCKAGDRIPNTKAGIAKWLKTLPPRCRIGMEATGKHHELVARMAGQAGHVVYVINPRLIKSYAKATGARGKTDAMDAQVIARYVKKESDRLREYVPRSDEQQQMHDLLRKRKTLVETRARLEQSFEVTKSAPGELAGILQAMASTLSELESQLQQLGRDGEHGALYKRLLTIPGIGPAVAAHLVYYMTRWPLANANAWIACTGLDPRPNESGGRTGRRRLSKQGAPVLRQMLYMAAMGLKRCRGGQPLYDDLSGRGHSSTAVFNILARKLARIAWGVFKSGKDFDPAMLKVGQARFLQA

SEQ ID NO: 410930 - protein, 361 aa, unidentified
MEDAIHWVGLDVHAAQTTVAVIDKASGELHRAKLRGSPSMVLDFIAGYEGRVIAVYEAGPTGMTLARQACALGIDMRVCAPGLIPRKPSDRMKTDARDAEHLARQLAAGGLSFVRVPTVEEESLRDLVRAREDVREDLSRARHRLSKFLLRRDLRYAAGGTWTQKHLHWIAQQTFDDLCARVTCAEYLNAVRVLMARRDLLEKTLDEVLPTTPYADTIYRLRTFRGIDTLTAFGLCAEIGDFARFAKPGQLTAYLGIVPAEYTTDSKRRLGSITKAGSSHARRLLVEAAWHYRRPPRVGETLERRQRGVDPRVVAIAWRCQQRLYDRHRKLRDERRKPAGVVNIACARELACFVWEAATID

SEQ ID NO: 410931 - protein, 343 aa, unidentified
MAIVAGFDVHRQQITFDALDTETGELSRGRIESSRPAVAAWLERFPGQQVEVALEAATGWLFVCEALAAAGAVPHLAEPAETSARRSSKRRAKTDRADARHLRELLAEGRLPEAWRPPAHVCAWRSRTRLRKTLVEERTRWLQRIRATLFHHGVPAADVPKRLLGREGRSFLERLELPPEARERIGVALALIDALDSQLAPLERELRRLARCQRGCQALLAEHGLGELTALTLLCELGDVSRLSSSRKAVRAAGLDVGVHRSDRRSRVGKLTKQGSAHARWALYEAAQSACRRTSPHYGSYLALKGRGLSHTRASLTLARKLARRSYHRLRALGPAALEPVGD

SEQ ID NO: 410932 - protein, 420 aa, unidentified
MKAWNQFTHFAGFDWAQAHHDVLILEASGKTVAEFRFEHTAEGWADFRQHIAAFPDLALAVETKSGAAIEKLLELQCCVFPVHPQSAKAYRQRKVPSGNKTDRVDAWSLADALRMDGAHWQQLAALTPLIKELRSLCRDEVALIRDRTALITQMRQALHEYYPAALEAFDDWTLPFTWAFVVAFPTPEALVQAGKRQWEKFLHLHKLARPGTYQRRLEIFARANQFAGSTPTANAKSRLAVARAQQLQLLEKQLTEYREAIQRLFAQHPDAALFASLPGAGEKIAPRLLAEVGEDRALFPNAQALQCLAGTAPVSFQSGQIHCVHLRHQCNKFLRYTVHLWANLSREACPWAATYYDALRAKGKSHACALRALGQRWLKILWKMWQTHAAYDADLHGRNQLKHGSWVLQLVPKPTVVAPS

SEQ ID NO: 410933 - protein, 355 aa, unidentified
MNQEKYIGMDVHDASISAAVMNAQGKLLMECVLETKAATILEFIQGLRGTRALTFEEGTLAAWLHDLLKPHVSRLVVCDPRKNARMRDGNQNDRADARNLAELLRTNQVKAVYHGKHGTRALRELGRSYLALTKDSTRVMNRIKSVYRSWAIPCAGTSVYSRRRRAEWLAKLVEPGVRIRAEHLYQQLDSLEPVRQAARRELLRESRKHAAVKLLRQIPSIGPIRSALLVALLQTPHRFRTKRQLWAYGGFAVQTYDSGVYRMVRGKLQRNRERITVRGLNHNHNHDLKNLLKGAAISAIERPGPLQDFYAALVEKGMRTSMARLTLARKIAAITLTMWKKGVSFDPKQLQRQAA

SEQ ID NO: 410934 - protein, 301 aa, unidentified
MSFAHAAGGGPTETEVCAHEGPDRSRSPQKASVAVAAVDEATGELLERASFPQDRAGLSALERWAKQFPERRRAMENARGLGRHLAGRLAASGESVVDVPPKLSARVRVLSSGNARKNDGLDALATALAASRNERLAAMDPEAEKEVLRLLSERREDLVAERTRALNRLHGLLRDLLPGGVAGKLSAYRAARILRGIRARGRASDRLRRRLASEVLRDVRTLDRKIADLNARVEAEVEASGSTLTEIFGVGPILAATILGTVGDVARFPTKAHFASYCGTAPVEASSGKVVRPQALAGRES

SEQ ID NO: 410935 - protein, 406 aa, unidentified
MDLVYSHVCGLDVHKKNVVACIITPEGKEIRTFSTMTDDLIALKEFIKSKGCSVVAMESTGSYWKPIYNLLELENIKILLVNAKHIKNVPGRKTDVKDAEWIASLLQHGLLQGSFVPDREQRELRELVRYRKSLIEEKSRELNRIQKVLEGANIKLSSVVSDINGASSRSILEAIINGEENPETLAELSQGKLKNKMDELKRALKGLINHHQRMLLEIQLRHIDYLDEEIAKLDEEIKNRMLPFEKDLALLDTIPGVGRRTAEQIIAEIGTNMEQFPSAAHLCSWAGLCPGHNESAGKQKSARTRKGNQKLRSSLIEAARAASRAKDTYLSSQYHRIAARRGANRAAVAVAHSILIIVYHILKRKQPYIELGPTYYEEKKRNMIIRQSLKKLESLGLKVTVESVVS

SEQ ID NO: 410936 - protein, 335 aa, unidentified
MNYKLFAGIDISKLKTDVVFFLAEDPDECFHGTFANSDAGYTEMITWIHHLTKLSISDMFFCAEDTGIYALPACTFFSDQGGNLWVENALRLKRSLGLKRGKSDKADAAAIAEYGFIHRRKAFLFSMPSKTISKIKYLLSCRRQLVKQQTALKNVCGELEEFDRESAKFTLQIRKALINEYDNKISLLEEKLLCYVKEDALLEKQYRLVNSVYCIGPQTAMFIVVLTQGFSLFDNPRKFACYCGLAPFGKKSGTTLNTKPKVSHLANKRIKTLLTMCALNTIKKDNEFKRYYDRKIKEGKHHSSILNVLRNKLVSRAFSAVANDRPYVKDYQLVA

SEQ ID NO: 410937 - protein, 319 aa, unidentified
MTFLQKAPQIVVGFDVSQDTLTVFEARSSSPCPKPCVIDNTAVAIRRFLKSLDRIDLAICEPTGGHEHVLLAELMAAGIACHRVDALKVKAFIRSFGTLAKTDALDAEALARYGQERWARLALFLPKQADQKMLTDLVSRREDLIAMKVAEHNRSKAPTGKIIKASCSIMLRAIKHQIEAIEAEIKALIDRTPQFRAAFLEMQRLPGIGAITATALLAHMPELGSLQRRQAASLAGVAPHANDSGLFKGHRTMRGGRSDVRRLLYFAALAASHAKGPLCEVYQRLVQNGKKRIVAIGALMRKIIVILNARLRDLNAQQS

SEQ ID NO: 410938 - protein, 343 aa, unidentified
MQDTIYDHYIAIDWSINNMAIARMTKKSNKITAVDVPSDIEDLQAYLKNLRGTKILAIEETTTSQWLYAELKDYADKIFICDPNRNKLLNEGPKTDKIDASKLVQLLKAGLMKEVYHSTDKFLYLRRVVSGYEDLVKSGVRIKNQRYALLRACGKRGKEKIGSAIDLQGEQFVLDCLDRQIEGYEKEKECYENEFEGLARKNPEIKHQKSLPGIGTINAVKIVARVVTPHRFTDKGHYLSYTGLIKLEKTSGGRSYGKRSPRYSRQLKSVYKSGVLAAIGGNNPINDYYEHLIQEKGYPEHNARHKACRRLAILSLGVFKSCKKYQPYRSNYVKGGKENTSGL

SEQ ID NO: 410939 - protein, 465 aa, unidentified
MLLLRVERLAETCASARWTVRDIQWEVAPRAPVQGRWDSRPAGAEVGVPVTEDRWFLGVDWGSEQHQFCVIDAAGHIVGARAVAHRATDVHAALQWVQARTGAPPSRIAVGVETPHGALVDTFLEQGFEVFAVNPKQLDRFRDRFTAGGAKDDRRDAQVVADALRTDRRAFRQVRSDEPRVIALRELCHLVEELREEETRVANRLRDQLYRVNAPWLTLSPAADDLWLWTLLAHAPHPEAWPRLSRGRVTSVLREQRIRRLTVDDVVRTLRAPMLTVAPGVADAVAIRTAALIPQLLLVHRQRLDAERRIERLLERLADEPAAGEPREHRDVEILRSLPGAGRMVIATMLTEASALLAGREYGTLRTYAGVAPVTKRSGKRTLIVHMRYACKPRLRNALFHWSRVSLQHDGAARAYYDALRARGHGHARALRSVGDRWIRILIAMLKARTVYDPQRVTPPSIASC

SEQ ID NO: 410940 - protein, 385 aa, unidentified
MRTANKRGPGPSHLLLTPDCAGNVVGIDPHKRTLTATVVDPRGGVIASEHFRVSGDGHRALEAWARQFGQIARWGIEGSASWGRHTAVYLIGRGYDVRDVCANRTPRRDRARQRGKSDTLDSERIAREVLAHSLLPKAFKRAGQNQGPDELHQLLGLWHNRRRSILNSRQRLVNEAEYLLCELPLELGEQLPDTKAVKPRLAALTRRNRRRRHDAPTTLRLQLLDGYHEQIRALDHEEKQVIAHLDELVRRSGSTLGELCGLSTRSVAELLVEVGDVRRFTEGGFARFNATAPLPASTAEGPGEPVRHRYNPGGNRRVNAVLHRMTVTQLAREPRAQRIYANARASGHTKKEARRVLKRHLSSVVYRRMIRDLQAQLPDQSFLAA

SEQ ID NO: 410941 - protein, 324 aa, unidentified
MSDAIVGIDVSKKTLDAYCAKDQMQQGRTFANSPDGWKLVRTWLKAMGSKQAHVCMEATGRHSLGVALALHEAGHVVSVVNPAQIRDFARTKLGRNKTDKVDAALIREYAELFKPEPWTPPSPAMRRLCELQTMRAGIIRSRAEWKNRIGSGLGDITATKLAAATIDHFTTQLEAIDRVISETVDQDAELHGRRDLLVSVIGVGDTLAALLMAKMPEPGVLRRSGEIVAYAGLNPSHHRSGTSIDRPTRISKIGNAELRSALYMPALSAMRFNPAVAVLVARLKSAGRLKPKQIVVAAMRKLLVLCFGVLKTGKRFDPAIAMSA

SEQ ID NO: 410942 - protein, 372 aa, unidentified
MKKRSSSRQNSKPAMKAKRAQQSVTIGMDLGDKTSRYCLLSDEGEILREGQVATTKAGMTGTFGRIGRARIAIEVGTHSPWVSRLLRSFGHELIVANPRQVKLITESSRKDDRLDAQTLARLARIDPQLLRPIQHRSEKAQTALMVIRVRAALIAVRTSLVNTARGLAKALGERLPKCDADQMGVLRAESLPPKLRQVLEPLLKEVESITEKIKDSDREIEQIARKDYPETALLQQVGGVGPLIALSFVLTVEDKGRFQKSRDIGCYVGLRPRRSDSGQSQPQLRISKEGDPYLRTMLVQGAHYIISRRGPDTDLKRWGLHLAESGGKRGKKKAVVAVARKLGILLHRLWITGEVYEPLRNQNLRTGRKKAA

SEQ ID NO: 410943 - protein, 430 aa, unidentified
MKSNTQNAKIEAITEKTLVLGIDVGSEMHYARAFDYRGIEYSKKPFKFSNTEAGFVTFKEWILDLKERHEKDKVIPGMEPTGHYWFNLGKFLQDNEMKPVLVNPHHVKKTKELDDNNPTKNDRKDPKVIAGLVREGRYMIPYLPDGVYADLRTASNIRFQLQAELTRIQNRISRWFNIYFPEYKTVYGKPDAKSGMLILKAAPLPEDILTLGIDGVNQIWRDAKLRAVGKARAKTLIEAAEHSVGSKEGAVSEKMEIRILLEDYESRNTRLQEVMVLIEELVRKIPMAEKLLEIKGVGIRTVSGFLAEVGDISRFNNPKELQKLAGLALVENSSGKHKGETTISRRGRKRLRYLLFEVAMSLVSKNQEFRGLHNYYTTRRLNPLKKMQSLMAIAAKLIRVFYAMLTKGVDYDPKKMVSDIKRPAVYLQAA

SEQ ID NO: 410944 - protein, 343 aa, unidentified
MTTYYIGADVHSNSTEMAIEKGKKIVASYIVPTTIQALSNILDSLQGKKQLAIEEGPMAGWLYRNLNKKVDKLIVCDPRRNKLIDCDGDKDDKIDASKLALLLRGGYLREVYHSEDDDRAELKNWVSLNNDRVRDAVRHINKIRARCRMHGVRIRRFVLRNPSHRSKWLSEIKHPALAKQLKMLWVGYDAIAEQTRMAKQQLIQLSKRYDIIRFWRKLPGIGLIRAVTLFAYLDTPWRFKKKNKLWKYCGVGLQRTTSGTDKKGRPKPARLQLPWAVNRTLKNVALGAATSVINQTDNLFRSYYERMLSDGIIPGNARHAVARKILTVMWGMWKTNSRFDEDL

SEQ ID NO: 410945 - protein, 375 aa, unidentified
MKNYIMVGCDLHEKNLNLRAAKNLEEPERLSFKNTPHGRNSMIKKLKERAGKAKIVFAYEAGPHGFGLYDYLTEQGIECHVLAPTKIPRSVRQKRAKNDDSDAMNILRVLRAHLLAGNDLPSVWVPDKETRDDREIVRARLDIGDKIVAQKNEIHALLKRNDIKKPKVVGGNWTRRHRAWLAGLIGPGGKLGWGAGKRLESMLRQLKALEEEAAELDKLVKALCETVPYCGPARELMKEAGVGLLVAMVYLTEMGDLSRFDNRRQVGSYLGLAPSSSESGESGERKGHITHQGSHRVRKVLCQAVWARVRYDGKEKKVYERIVARNPKHKKIAVVAAMRRLDITLWRIGREAQKRTGFREKQTRKAKGRRPARCA

SEQ ID NO: 410946 - protein, 412 aa, unidentified
MQDILTCAMGLDVHRDIIVACLVKGAVDAEPEAETRTFSTLIPEMQKLRDWVIESECRNIAMESTGIYWQPIYEMLESCFDGEISILVVNARHMKNVPGRKTDMKDAQWIATLLRAGLLKGSFIPDKAFRELRHLTRYRKSVVHDITAQKNRIDKFLQSSGFRFTAFLSDTFGASGRNIIRHLIEHGSIDREALDKCLKTKTRNRIDEILVALNGSLSEHQRRFLNMVFRHLEDLEAHKHTVEDEITEEVLKHTDALNLLCSIPGIDVTAAAAIIAEIGTDMSSFPDSQHICSWAGLSPGNNESAGKRKSVHINKGNPYLKSMLCEVAWIMASHRKLYLSGWYWKVKQRKGAKRATIALARKILSIIYTMLKTGTPYNEECFEQRRLRCERKRASRLVNELQKLGYVVVAPD

SEQ ID NO: 410947 - protein, 322 aa, unidentified
MTQIICGVDISSASLQASIGRCGAASAFANNPEGIALLLAFCRAHQVELVALEATGGYERQAFALLSEHGLPVAVLNPRAVRQFAQSMGRLEKTDPIDAGMIAWFAEVKRAKPTCLSGPGQRQLRGLVTRLRQLTCIRTAQLNQQRLIADPRLQSSFDELLALLARQIDDLARDIAALIAGDPLWVELDRAFRSIKGVADRTVARLMAEMPEIGTLSHKAVSKLAGLAPLAQDSGRHQGKRAVRGGRAPLREILFVVASVVGRYEQDFIAFRQRLQAAGKPPKVIRIALAHKLLVRLNAKAREVRTQLAASSQLLPQQQPGL

SEQ ID NO: 410948 - protein, 355 aa, unidentified
MNSVRYVGLDVHRDTISVAVVDESGRLMMQSVLATRAAAILDFIHGVRGTLHVTLEEGTHSAWLYDLLVRRVAKLVVCNPRKNALLKSGSKSDAIDARKLADLLRADMLSAVYHGERSGLEVQHLARSYTLLTEDTTRVMGRLKAVFRGQAVACAGKKLYGKRHREDYLAQLGAGGLRRRAECLYQELDALQPLRRQAKRELIAECRKHAAAQWLQSVPFLGPIRAALLIGRVQTPHRFRGKRQFWTYCGLALETRDSGEYRVVNGQVERKHKPALIRGLNWNHNHEMKNLFKGAATTASIREGVFREFYLGLLAKGMRPEMARLTLARKIAAIALKIWKKGEAFDAKHLKLQAA

SEQ ID NO: 410949 - protein, 386 aa, unidentified
MQTPNELSQSRIVLKQDSTLIAVIEMSLSSWLVAGIVPGVERQPLKKLAVDESALLKVLNRWREEAEKAGRKIERIAVAFEAGRDGFWLARWLRARGIEAHIIHASSVAVSREHRRAKTDRLDTNLLKRAFLGWLRGERDHCKMVAIPTIEDEDAKRPNRERENLIEEQTRIVNRMKAALSRLGIRGFNPKLKKAAERLEDLRTPEDEPIPPNTLAELRRDMERRRLVSDQIRQIEDARLERIEHAPSDGPHAMVRLLARVIGVGIETADMLVQEVLSRNMRDRRAVARYAGLTGSPDESGTKRREKGLARSGNARVRRGMIQLAWRFLMFQKDSALAQWFRARTENARGTRKIMIVALARKLLIALWRLVREGLVPDGIVLRPAQ

SEQ ID NO: 410950 - protein, 344 aa, unidentified
MQIARIGLDLAKYVFEIHGVDARGKTIVRKTLRRHAVSTFFANLPPCLVGMEASNGAHFWAKALSELGHDVRLISPQFVTPYVKSNKNDRNDAEAICEAVGRPNMRFVPIKSAEQLAVQAVHRIRSRLVADRVRLVNQVRGLLAEHGIVVAKDIANLRRALARIVGDNEDRTLNPLVRGLMAELREELTELDTRIAGYDRKIRELYRNSQICQRLGKVEGIGPVTATALVAAVGDRRSFKNGRQFAAWLGLVPKQRSSGGRARLSGISKRGDRYLRTLLIHGARAALGRVRDKQDPRSLWLGKMRQRRHPNIVAVALANKNARIAWSLLTSDSVYDADLSVRAA

SEQ ID NO: 410951 - protein, 344 aa, unidentified
MNISMIGLDTAKSVFQVHAVDQSGKVAMKRKLQRGELIPFFEKHEACTVVLEACGAAHHWARVLTGLGHDVKLIAPEAVRPFVKKGRKNDAADAAAICEAASRPSVKFVSAKSLEQQSVLTLHSARCLLVKQQTMLANALRGLATEFGLTVPKGIGKLEELAALVNADEAFPETARHVLTGLFDHCRATAASIETVEAEIVVQARQDETARRLATIPGIGPITASLIAATVGDIGMFKSARHFAAWLGLVPRQYSTGGRNRLGRITKTGNREIRRLLVLGATSMVYRAPQWKSAAGLWTRAVLERRPVRLVTVALANKMARIAWALMTRKEVYHAKGRAAAAAA

SEQ ID NO: 410952 - protein, 345 aa, unidentified
MKITTIGIDLAKSVFAVHGVNEHGREVLKKVLKRDQVAKFFANLQPCLIGMEACGSAHHWARKLQGFGHDVRLIAPQFVKPYVKTNKNDAADAEAICEAVARPNMRFVPVKNVEQQAVLAQHRVRQGFIKARTAQANQIRGLLAEFGLIIPQGIANIAKRVPELLEDATNELPGSFRLLVQRLMEHLKELDRQAGEIEAQIVTWHRDNELSRKLAEVPGIGPITASALVATVSDAKNFDNARQLAAWIGLVPRQNSSGGKNVLLGISKRGDTYLRTLLIHGARSVICAFQRKKDKTNGWLAALLARRNPNVAAVALANKNARIVWALLAHDREFRPGYTSAQASA

SEQ ID NO: 410953 - protein, 342 aa, unidentified
MKFYCGIDLSARDCHVCVIDEQLKIVIEQKLRNELSKICQLLEPYKGKLKIVVESTFNWYWLIDGLQAEGFDVVLAHTLGLYLITGAKVKTDRRDAYSLAKLLLVGAVPAAYIYPVETRPVRDLLRRRLHLVQVRAGEYGSLRRLLLRQGILSSKQQEIKTATETELEQWFEHPLVRLHASQELQRIELYSQQIAELEKTILMLAKTEPSYELLLQLPGVGQTIALTILYEVGELTRFANVKVFSSYCRVVPGIAQSGNVTGRGRASKQGNHYLKAAFSQAAVHAVRCYPKVRRYYERQLKRHQGRGRQMICYNIIAHKLAQAAFHILKEQTEYREELLFGR

SEQ ID NO: 410954 - protein, 479 aa, unidentified
MTPSKDAFPEPCPPVPTVPEPLVLRPSSSLPLYNPHAAGIDIGEAEHWVAVPPDRSPEPVRRFGTFTVDLDVLADWLLDCGVTTVAMESTGVYWIPLFELLEARGVQVFLIDPRQAKRAPGRPKTDRLDCQWLQRLHAYGLLAAAFRPADQVCVLRSYLRHRQMLLTYGAHHIQHRHKALQQMHLKLSQVVSDLTGVTGMAILRAIIAGERDPLTLAQLRNPHCQHREDEIAKALQGTWRAEHLFALQQAIALYHFSHQQLTVCDQQLHAHLGTFADTSDGQPLPPKPRRHKKANEPRFDARTPLYRLAGVDLTTIEGIEEGTALVILSEIGTDMSRWPSVKHFCSWLGLSPQHKISGGKVLSRHVRPGAHRVAVALRLAARTVQQARTALGAFYRRMRSRLGAPKAITATAHKLARLVYSLLKHGSAYVKQGLEAYESQYRERTVKAVARQAKALGYTLVALAVPATPGNDAVAPATP

SEQ ID NO: 410955 - protein, 482 aa, unidentified
MKKRNVFQNQSQEILSLFEMAKDRSKVMCIPIDYAKKDHLAMLCDGNGRIIRKPFSVKNSLEGKNYLIDQVKKSCHHHGISLQHIVFGGEDCGSYTDNFISTLRSENWLVAGVNAHDAKTQRENVQASTDRLDLLGICKMILSCRGNCSPAQSGDYLNLRTLVRQRRKMVNITTGVKNRIHTFVDQIFPGFLNEKNSGILAFSQCSLLLMEDRFSVHQILRRRRSTLTKLLIRCAIHKPDNCAKKLQQYAAQVLKPPENHLATLQISLKQQVKLLNCLQESTEQLEKEVAESLAQTQGAFLTSIRGIGIILAAGVCGEIGNPNKQKSLSNLVSYSGIIPRVKQTGGIQGKPQTKKVGKRCNRILKDYVVQSASHIGLHGPEDLMLDYKRRDTQEQHADFGMGRRFLRMAMGLMRTSQTYLPKSLRGKKSSMKGRGLYYLMTWPKLRGKWRDVNALDIAFDKDMPLGQWRNMIQELYGIELKL

SEQ ID NO: 410956 - protein, 438 aa, unidentified
MRAKCNDDLSTVNFSTIGLDVHKNRLVACAVHVQHDAKGREVHEKEYFESTGTYSGRQRLTEWCSSQNADLILMESTGIFWKAPFRDLEKADLHPVLINPRIFNRGSDKRKTDKSDATWLANLARLGLYRASFIPEEPYRSLRLVQSQIKSLVAERQRLKNRLVKVLDDSGFRFTVAFADIGGASSQSLIAGILEDAPREELALMIDPLCKKSIEEILDAVSGELSQINKDIVQSILRLIETHTKEIETLEQTVIRELKKCEKVKQNIRLMTTIPGVSEKSAQLLMSMIGPDFVENFSSPHAFARWLGVCPGNNESAGQIKSGRTPHGQRLIKKVLTECAQAACHTKGSHLAVLFGGWKHKGFCKAVMAVAHKLALLIHWVVVNQKPYIDKEFDYTGVFKQDGQRRPRWIRALRRYGLMTLADVEKEKSARGWIIAKA

SEQ ID NO: 410957 - protein, 509 aa, unidentified
MSNREEKRCRFRNEQKELHLLVNARRQAEHQACVVGLSPERILYIPLDIGKNVNWSRADTASGRMVMAPQEFSTTQEGYLLWRQQLRNNLNSGQFDLVILGNEPTGIYHEAWTRQILTDFAAELSRETGPRLRYRLLNPYQVKLERTKLVLRSRKSDQIDLLAMTNLLRQGQGNPAVLPNAEVAALNQSVALSYQALRKLKACRIDLCREFDRIWPGAIVNVERFRRAHPDMPVPTPIVQTKPLERITVRLLLEHASSPYEVRQLGIEGIIALFHQHDVSCGLRTAQRIVDCANQALPAPRALVEVYQQGLRQLCQDEQHWLARQAQHEAQLTRLVQETPARFLLSIKGISPTFAAYYLSLVGAPSFFDWADQVWAYIGFDPIQSQSGDSNPTQRLCISRRGDPFYRNVLTWMACLVAGHHPAFGLTFIQAEQRGLGLWGAAIHTAHKLNRTCFRLLLDQRPYNDTTHPDDFARWRTFWLAHRQHRKSPKTTLAPAAWRPTPVVTEPSI

SEQ ID NO: 410958 - protein, 350 aa, unidentified
MVMIGTDSHKRTHTVVAVDDVGRRLGVKTVGTNSEGHLDLVRWSAQFDEITFALEDCRHLTRRLEADLLAAGRRVVRVPTKLMAGARRAAREPGKSDPIDAEAVALAALRHPDLPVAELDGPTREVKLLSDHRHDLVVQRTRIASQIRWYLHELDPDLEVPSRGLRRHCVVAELAVELDRFDGLVARLTRNLLARCDELNHQINALETELRGLVRAIAPTLLAIPGCGVLTAAVIIGETAGVHRFRGKDAYARFTGTAPVPVWSGASAGKVRLNRGGNRAVNCALHMIAVTQARGIGPGQAYLAKQQARGKDKTAALRLLRHRLSDTVFTALRADQQHQTQATPPVAIAA

SEQ ID NO: 410959 - protein, 338 aa, unidentified
MEEVAVVGLDLAKNVFQVHGVTAAGAVAFRRQLRRGQLLAFFKALPACVVGIEACASAHHWARELIALGHEVRLMPPAYVKAYVKRGKTDAADAEAIAEAVTRPTMRFVAVKTKAQQAVLMLHKTRDLLVRQRTMLINALRGHLGEFGVVTPQGSAGVEAALRALQEEGWLPELAHAALRSLACQLDALGEEIQSLERRILSWHRSDETSRRLATIPGIGPITASAMAASAPDPALFRSGRQFAAWLGLTPRAQSSGGKERQVGISKMGDSYLRRLLVIGATAVLRMARQRGTGGAWVRGLLERKKPKTAAVALANKTARIAWAVMVRQEVYAPPAAA

SEQ ID NO: 410960 - protein, 359 aa, unidentified
MREKISEKSFEGQSIYVGIDVHLKSWKVSVMTENLTYKTFSSPAEAEKLGNYLRRHFPGATFHSAYEAGFSGFWLHRELMKLGIKSIVVNPGDIPTTDKERKQKEDVRDSHKIAQTLRAGQLKGIFVPSEKVEQDRLLLRTRETIVKELRRSKHRIKSLLYFQGIRYPERFYANSTHWSRVFIKWLESLTFEHESGKGALNAHLEMAKHQRGLLLKVTRQIRELSKGQDYKPTVELLTSIPGIGMLTALILLTELETIERFESFDRLCSFIGLVPSTNSSGDNEVDTGITPRRNSRLRAALVESAWIAIRHDPALLVAYQKLCQRMPGNRAIIRIAKKILSRIVYVLRSKQKYERGIVK

SEQ ID NO: 410961 - protein, 330 aa, unidentified
MQGKVMSEHSASDEVGVGIDVCKEWLDVHILPAGTVLRFSNTKKGHKQLLFALKPLVVRIVVVEATGKYHRGVHRFLHDAGLSIAAVNPLRARLFAESLGALAKTDSVDARMLATFGLMAQLAATPPLPETIENLSEIVRNREAAIAAGTALENQLATAAVAGVKHQIERQIKSAKAAAGALEALAVRTIEADPGLARRFAILLSIPGVGAVTACGLIANMPELGSLNAKQAGLLAGLAPLACDSGKRNGPRRIRGGRQAVRNGVYMAALSAARFNPHLKRFYERLIAAGKVKKLALTAVMRKLIVLANDLIKEDRLWSPEKPTAEPLHA

SEQ ID NO: 410962 - protein, 346 aa, unidentified
MDFDPKEADVKFCGIDLHSNNSVVIVSDEEDRIVFNKRLPNDLGRIRAALEPHRKELAGVVIESTYNWYWLVDGLMDAGYWVHLAHPAAIKKYEGLKHSGDFADAAYLAQLLRLGLLAEGYIYPRAERGARDLARKRMQLVRYRTAQILAIEGILMRQTGARMKGEAVKRLTTEQVDAFAFAPDVALAVEANRAVSQALGQQIEALERRLKERVSLRPEYRLLKTVPGMGQTRATTIMLETGAIGRFAQVGNFSSYGRCVDSLRESNGKKKGEGNTRNGNKYLAWAFVEAANFALRYCPQAKSFYERKKSKTNRVLAIKALAHKLARACYHMLRDQKPFDVRLCFG

SEQ ID NO: 410963 - protein, 442 aa, unidentified
MSESLTVASELEWAAFAAIDWADQKNFWRLVPAGSQRQEQGELENTPEAVEVWAATLQQRFGGRPIAVCLEQSRGALVYMLAKYVHLVLFPVHPTTAARYRETFCTSGAKADPSDTTSLLDLLLRHRERLRQLRTDTTETRLLQFLVEARRRMVDEKTRQSNRLTDCLKLYFPQILHWFGDVASPLVGDLLQRWPSLEELQRAHPGTLHKFFHQHNCRGEERIQERLQAIYQATPATQDAAVREAGAMIARGLVALLATLRSQIVVFEQRIEELVRSHPDGVLFASLPGAGAALVPRLIVAFGTHRDRYQSAYQLQCYCGIAPVKEASGKTEWIHFRFTCPKFLRQTFHEFATHSIGQSEWAKAYYEHLRNDQKKSHHAAVRALAYKWIRIIYRCWKDGKSYDEEVYLRSLRRRGSLFAGALGLATGAAWKTVAGFQKFSAE

SEQ ID NO: 410964 - protein, 407 aa, unidentified
MKATYFLGLDVAKHKVRAALRGPGGGFLCEQDLPVNAVGRRELLALLEQHLPEPGQVLALLEATGVLHLHWAAALTRAGYSVVVLNPLMARRLYTVKNSIRDNKTDPVDARGLCAIGALHGAELLEKYRFLLRPPQLALQRLQSVRKALRNALTNLKKTYGSLLDLSFPELHGLMEIDGVGLRALLAQAPTPRAIARKRRASLAKDWRLRPKAAQLRALAADSIADPELAAANAPALQALLQSLTALEGQLRALDQQIDQLALQSSDPKRQALLQTIPGFGPVVAASVLAHLPEELLHAGNRRTAATRLQAFMGNDPRLQQSGQWTGQIKMSKRGVELLRTAFFQAAFSASQHDPELKAFYQRKRTEGKKHEVALSHLMRILTRRLVAVLRSEQPYRPKEVFLKNAA

SEQ ID NO: 410965 - protein, 458 aa, unidentified
MVSTQSVSGKTARKPQGPLERLNARAAGIDIGAHEHYVAIPADLDEQPVRTFGCFTPDLHEMARWLKERGIETVAMESTGVYWIPVYRVLEEHGLDVRLVHARHVRCVPGRKTDVLDCQWLQELHSFGLLSSCFVVPGELDALRTLWRHRESLVASAGQQIQLMHKALEQMNMHLHKVLSDLSGVTGMAIIRAIVAGERDALALARFRHGGCKSSEETIIKALSGNWRPEHLFTLGQALALFDIYQDKIRECDQQIEETMAAFPTRGEPDKIRRAPATTRRKNQPHFDLRSELCRMTGVDLTAIDGIEALTAQTVITECGIDLSAFPTEKHFASWLCLCPNNRKTGGKVKGRSTRRGQNRAATSLRLAAQSLHHSKSALGAYFRRMKARRGAPKAITATAHRLACLVYRMLRYGAEYVDEGCQHYEEQHRERELLMLTRRAKSLGYNLVSTTDGAIVS

SEQ ID NO: 410966 - protein, 348 aa, unidentified
MAYFVGLDVSVKETSVCVVDEAGKVILEQKVLTEPDTIIALLTSLGATYGRIGIEAGPLSQWLVNALTAAELPVICVETRHMKALLTAQQINKTDRNDARGIAQMMRVGLFKPVHVKTLVAQEQRMLLTSRKLLQRKLLDVESDLRGTLRNFGLKVGVVGGSRYEARVRELVEGFPRLAVIVEPLLIVRRVMRQQFAVLHKMLLDTVRDDPVCRRLMTAPGVGAVVALTYRATVDQPQRFAHSRAVGAHVGLTPKRYQSGEIDYDGGVSKCGDALLRTMLYEAAHSLLIQSRKWSWLKAWGVRVAQRRGMRRAIVAVARRLAVVLHRMWVDGSEFRWSKDSTAVPAVA

SEQ ID NO: 410967 - protein, 362 aa, unidentified
MLVFAENTFEGGDLIMRFYTKQHRYYCGIDLHARSMYVCILDPQGEIVLHRNMPCAPELFLKAVAPYREDMAVGVECIFTWYWLADLCAKHNIPFVLGHALYMKAIHGGKAKNDKIDAHKIAVLLRGGMLPMAYVYPPEMRASRDLLRRRMYLMRKRSELLAHVQNTNSQYNLPEIGKKIAYKANRQGVAERFSDPSVQRSIEVDLKLMDHYDQLLTDLELYIMRTAKQHDAHALYRLRSVPGIGKILALVILYEIHDINRFPTVQDFVSYARLVKCAKESAGKRHGTSGKKIGNVHLKWAFSEASVLFLRANPKGQRFVEKLSSKHGKAKALSILAHKLGRAVYYMLSRKQAFDMNKFFNS

SEQ ID NO: 410968 - protein, 340 aa, unidentified
MENVTTIGLDLAKNVFQVHGVDAEGTAVIRQRLTRGRMLKFFARLPPCLIGIEACATSHYWARELVALGHDVKLMPAQYVKPYVKRGKNDAADAEAICEAVTRPTMRFVGIKSPEQQSAMMLHRVRLILNRQRTQLSNAMRAHLAEFGIAAPIGRNGIEQLLDVIADPTDERVPVDARFCLEMLAAQLRIVKEQILENDRRILASARKTELGRRLMEIPGVGPLLASAIVATVPDPAIFRSGRNLAAWIGLVPRQNSSGGKERLGGITKAGHQYLRQMLIVGAMAVVRYAERNGAKRPWLVQLLARRKAKVAAVALANKNARMIWAMMASGERYREPLAV

SEQ ID NO: 410969 - protein, 364 aa, unidentified
MTHNHTQIESAQVGIYGGVDTHLDFHVAAAVNALGALLGTAVFATTVQGYAELLAWLRAWGPLAQVGVEGTGSYGAGLARHLHRHDVEVLEINRPDRASRRRRGKTDAYDAEAAARTALAGHARAAKINTGAVESLRMLKLQRDSAVKQRTAALNQMHQLRVTAPQELREQLTGLTKHTLATHCVRFRVTRDTNRLTDPVQAAKKALHGLARRVLALTAEITELDADIAALTKAIAPATSAAAGVGAQTVAQLLIAIGEQPERFHSEAGFAALCGTSPIPASSGKTQRHRLNRGGNRQANSALHMATLNRLCHHPPTRAYIAARTTDAKSDPHLRRKLKRYLARELFTLLRQDLRALNTPDIAA

SEQ ID NO: 410970 - protein, 335 aa, unidentified
MTKVMGPVFVGIDVSARTLVVALERDHQPGRQRREFLNTAVGHEGLIQWLSKSATAVQVCIEATGLYSLDLALALHRAEGIEVMVANPRAIADFAKALLQRSKTDQLDAEVMLEFARRMPFVAWQPPSSPQLDLRALMRRITGLKLVSQQEKNRLHSVSQSAEITPLVRKDIQSHLVQLERHIEKLEHQAETIVQADRELARQFCHLVSVRGIARVSALHLLAELVVLAPDMTARQWVAHAGLDPRHHESGTSVHKPTRISRAGNRYLRSALFMPALVATQHDPNIRAFYQKLGDRGKTKMQAIVAVMRKLLHALHGMLRTDSDFVGEKFFVIPS

SEQ ID NO: 410971 - protein, 311 aa, unidentified
MDKTIEFSQVVDRCCGLDVHKKVIVATVEGTGIARETREFESTTRSLTELKEWLLELGVTHVAMESTGVYWKPVINILESGGFTLLVVNAQHIKYVPGHKTDKKDSSWICKLLRAGLLKGSFIPDRAQRDLRDLTRYRRKKVQEVTAEKNRMLKVLEDANLKLSSVFSNVSGVTCTKVIDAILDGKTDPDHLTSLCTHGRLQSSKEQIRDAVEGRFTEHHRFMLKAIRRSIAGLEEEIAELEAEIDRRCEPVQEEIERLCTIPGIDQTGAKELIAEIGVNMEVFPTAANLASWSGVSPGNNESAGKKKART

SEQ ID NO: 410972 - protein, 344 aa, unidentified
MGEVITIGLDISKSVFQVHGVDGVGAVVIRKRVSRAKMLEFFAGLPRCLIGIEACPAAHHWARELQAIGHTVKLMPPSYVKAYLKRSKNDANDAAAICEAVTRPSMRFVAVKTKEQQAALMLHRARQLLVRQRTMLSNAIRGHLSELGIVSAKGRNGADELLEIIGNDADSRIPLAARSVLKVLAAQYSAIGAEIASISKSILAWHRSCEPSRRLEEIPGIGPIVATALVAEISDWKAFSSGRGLAAWIGLVPKQHTTGGKDKLGSITKQGNRYLRWLLVAGAMAVIRYAQKHGTKKHPWLGRLMARRPTKVAAVALANKIARMAWAIMVRGERYKEPALLLAA

SEQ ID NO: 410973 - protein, 335 aa, unidentified
MEFDFFIGIDVSKNELDFAVQQGKCFLFHREIANEPGAIKMFVKELSKLPGFSLSGAIFCMEHTGIYNNHLLSCLHQKKTNICLESAIHIKKSLGNIRGKNDKIDAIRIAGYAYEKRDKLRLWAPKRDVIQQLAHLAATRTRLIEARKMLKTPLKEHDIFSPKKITRQNASLCNGTFKAIDTDLKKTEKAIDQLIASDPELKRLFSLTTSVTGIGKVTAAQIIITSNEFKSIDDPKQYASYSGVAPFIEESGIFKGKGRVSPMANKKVKTLLHMSALVAIQCNAELKMYYQRRINQDKKNKMSVINAVRNKLILRVFACVNQNRPYEINYQKAFV

SEQ ID NO: 410974 - protein, 397 aa, unidentified
MDPTYAVFCGIDVGKGEHHAVGLDPAGTRLFDKALPNDEAKLRTVFDRLAEHGPVLVIVDQPNTIGALPVTVARACGHAVAYLPGLTMRRVADLYPGQAKTDARDAFIIADTARTMPHTLRRIDVGDEALAELGVLVGFDDDLAGEATRISNRIRGLLTGIHPALERVLGPRIAHPAVLEILSRCGGPVGIRKAGKRRLTTLATTHAPRMGARLAEEILTALDAQSVTVPGSNAAEIVLPKLADSLKEVLQQRKSIAEDVERMLDDHPLSQVLMSMPGVGVRTAARILLEVGDGSAFASAAHLAAYAGIAPVTHRSGSSIRGEHPARSGNRKLKRVLFLSAFAALHDPTSRAYYDRKRAEGKKHNAALICLARRRCDVLYAMLKNKTFYRTPAAAPA

SEQ ID NO: 410975 - protein, 575 aa, unidentified
MNTIGVGIDTARYGHRVTFLDESRQPAAPSLTIQETQQGYGCLADTLCQLQRKFPQATLRVRIDAAGHYAANLESFLRKLPLRLQISLGQPKQNKDYQQVHFPKRKSDDTDSQAVARYAVVEAPPATAACSPEILALREVTSWLQSQATDCTRAINQLHNLLARVFPELATITKNIAGMGILHLLSKYPTPDTIARARIESLKRIPHVKPELAERLQQAALVSVASLRGEVAAQLVQHHVQQLKLRLQAKRKLERLLQATFAKIPSSACRQVATITGIGPATAAALVAKIVDIDRFATPDKLVGYFGCFPEERSSGVDKTGRLLSSKSTRMSAKGNDLVRHYVWMAAKCSSLHYPAIRALYRRQRAAGKRGDVALGHCVRKLLHLVYAVWKTDRPFDPQHYAWEAGTSAESPAPQKVAESPKAEPAAEPEVTSATGITVVAETPADKSIRLPTKDRAPANPCRTSVPSQSVDYRYLRQQLSIAAVLKLLNYPQPLIGTGTQVRGPCPLHDDKRRRSTFSVDLEKGVFQCFARQCAAHGNALDLWAKVTGLPIHRAALDLADKLHLQLQRNREENP

SEQ ID NO: 410976 - protein, 403 aa, unidentified
MDTQIVFGVDVSKHKSNIAIVINGKVVDEFKITHTRDGFKRLDDALNHFKNPQVIFESSGVYSRTLRAFLQRNNWSYTEINPLAAKKDMDSFRHNKNDQLDAVALAQAMNQHHYAPTFQEQQIYSELRDMERSYQEFNEDIVRAKNRLHQKLQITFPEIEKFMSTTDSALYWHVVQQFSHPDLVLELTIADLSASLLNATPKNMSVLRATALAERLRNLALNSAPAVRKDAYAVTAVKQLAQEVERISEHKAEIIQQMETLAKSLPEFEILQSIPGFGVKTTVCVIAELGDIRRFHSANAINAYIGIDLIQYQSGDFEMAQHIRKRGNAYARKILFKTILNMISTSKYHPSNVSVAYEQKKQSSSAIRTKKIAIAAMSRLIRTIYHLIKYNELYDSKMFLAEL

SEQ ID NO: 410977 - protein, 379 aa, unidentified
MGAAGIALLHGLVGQYLGEGDDAAAVVVGIETARGPWVTALIAAGYLVFPVNPLQASRYRERHGVSRAKSDAGDAHMLADMVRTDSHQLRPAAGDSPEAEAVKVLARTHKTLIWERTRAVLRLRHQLREYFPAALEAFEDLDAPDTLELLAKAPEPARAARLTRAQVSAALKRARRRDIPGKATAILAALRSEQLGQPEILTAAYAATVRALLAVITTLNEQVKTLQGQVEEHFGRHPDAEIILSQPGMGAVLGARVLAEFGDDPHRYRDGKARRNFAGTSPVTRASGKKKVVAARFIRNDRLVDALRLQAFSALKASPGARAFYDQLRARGIDHNDALRRLANRLVGILHGCLATRTLYDEATAWDHRGNLPQSPAAA

SEQ ID NO: 410978 - protein, 403 aa, unidentified
MTKYHVGIDVGKYNHHVSIRDIERDTYCKTFSITNNHDGFAELISSLKRLSHDRREFLIGIEACPYGINLSYFLMGTGFSLVEVNPFRVGQFRKAQGKKAKTDTIDARSIAGILSLGDHKALSMPDPILDNLKELTRFRTDLVDEKATMMIHLRESLGILFPEFDKVFRQLDSSASLAVLTAFPSPECLIRAGEDEVTKILSLASPHRMGRGMAGRIIEGAKDTVGVAQKQPAIGIKISILAKKIASLQATIRELDKQITVVYNSLPNKLQGFPCGKATSLAAIISEIGDIHRFATLKKFLSHLGWCPQSFQTGGYHMEHPRMSHAGNKHVRRLIWMLSIHAIKNVPRYRLYFTTRVKEGKAKMHILIAIGRKLLSVLYTMLKKGTSYDPNWEEVGHLAAAGH

SEQ ID NO: 410979 - protein, 333 aa, unidentified
MVEGTEGSHHKEGSTKMTDITTIAAGIDVAKAKLDVAIDGCNQRFEVVNAPAGFRDLAGLLRRHKVSRIGIEATGGYERDVVTHLRQHGFAVVVLQPIQVRAFAQFVLCRAKSDRIDAGLIAACAAYRGTLREAPDPRLPPLADLLTFIEQIEEDIACNKVRLEHARNPDQRRFLAADVKRLAKRRTKMLAKLATTLRAADDLARRLDLVVTIEGIGERTALALIIRMPELGRLTREEAACLAGVAPFVHDSGERKGERHIAGGRARLRKSVYAAALPAAFFHNHQLGALYRRLTAAGKPHKLALIACARKLIIYANTVLARGTPWVETNATP

SEQ ID NO: 410980 - protein, 338 aa, unidentified
MRKFIGIDLHSNNSVVVVTDDDDRVVYQKRLPNSLEAIEAALAPHREETVGVVIESTYNWYWLVDGLMDRGYRVHLANPTAIKKYEGLKYSGDFADAAYLAQLLRLGLLPEGYIYPREQRAARDLARKRMQLVRQCTAQILSIEGILMRQTGARKSCAAIKRLNAEQVEAFAFAPDVALAVQANRAVSAVLQQQIAVLEARLKERVSLRAEYRLLRTVPGIGEILATTIMLEAGPVSRFAAVGNFASYCRCVDTVRESNGKKKGEGNGKNGNKYLAWAFVEAANFALRYCPQAKSFYERKKRKTNGIVAIKATAHKLARACYHMLREQKPFDVQRCFV

SEQ ID NO: 410981 - protein, 360 aa, unidentified
MFCERTSVGLDVHARSVVAAAIDGRSGEVFRARLTPSHADVIEWVGKLPGPCAVVYEAGPTGFGLARALSAAGLRCQVAASSKLLRPAGDRVKTDARDALNLARLLRLDEVVPVRIPSAAEEAARDLVRIREAARADLMRARHRLSKLLLRHGIVYYDGKAWTERHDRWLHHQRFDAAPTQSAFEDVYEAVVLATARRARLDEKITALAADSEFSPLTRRLACLRGISTLTGFALAVEIGDWDRFTGASIGAYLGLVPSEYSSGTSRTQGAITKTGNTHVRRLLVEAAWHHRSTYRPGPVLRHRWDQAPAAARARAHAGNQRLHARWVGLNLRRKPAVIANVAVARELAGWCWSLAVLPD

SEQ ID NO: 410982 - protein, 358 aa, unidentified
MAKSKQTAQIVGGVDTHKDLHVAAVVDDNDQVLGTQSFATTRQGYKLMLTWMRSFGDLQRIGVECTGSYGAGLLRYMQTAGVDVLEVTAPDKLDRRRRGKNDDFDAQSAAHAAFATRRTVTPRSRDGMVESLRVLKVCRKTAVQARRIALQIIQTTIVCAPDRLRDLLRNMTRMKLIRTLAAWRPDLTGYRDVEEAYKIGLKSLARRYLELHDEIADLDDMIVAIVTDLAPELIARNGVGLNSAAQLLLTAGDNPERLRSEASFAALCGVSPVPASSGKTTRHRLNRGGDRAANSALHIIAIGRLRLDPKTQEYVARRIAEGHSKLEAIRCVKRYIAREVFNIIARRHKQINQAQIAA

SEQ ID NO: 410983 - protein, 387 aa, unidentified
MEVLYQSCAGIDVHQANIVVCILHGPLTSTRPKREMATFDTTTKGLRACHDFLSQFHVEAVGMESTGVYWRPVWHALCDDFELILAQPAHMKAIPGQKTDKKDAHWIAKLTRIGLLPRSFVPDETIQELRELTRQRKHYVESRNRETNRIHKFLQSGGIKLTTYIEDIMGLSGRNLLQLLVDGTPITPRIVHQSVYTSLKKKVPQLLEALDGYFSDHHRFMLKQSLEIYDFYQKQIELLEERITVYLSQYENHVETLDSIPGIDVITASVIISEVGVDMSQFPTFGHLASWAGLCPGNNESAGKKRSTKIRHGNSYLKKCLCQAAFAARNQKGSTLADRFYQIQSRRGSQKATIALAHQLLKIAYILLKEQMTYPEFLAQKRLLGTS

SEQ ID NO: 410984 - protein, 348 aa, unidentified
MTASYIGIDLHRTVIQICVLDERGERIGEERVRYESLEEGLKAVAFVRRFAPDCRIAVEALGLNRWFVNACRQAGFDVLVCDPRKLGLKALGKKTDRRDAREIARRLWLGDLDRMARTYYPNDAEYGRRKLLRVRHRLVQMRQQTVNQLRGLLNAYQIPAPRGVLYTRPSRKRLAAATLPVPELQQAFEALLAVLESLQGQIDALNRRVRRLPREEAEVAALATELPGIGAQSAATLLSELGDPKRFAGPRAVAAYAGLVPRVSQSADKAHHGRLTKQGNPELRWILSQWAVRLMKDDPLVHAWAQRLRRRVHKNKARMALARRLLVGLWVMLTRGEAFDLRRCLGQA

SEQ ID NO: 410985 - protein, 311 aa, unidentified
MQNFYFIGIDVSKKKLDICVMSNSKVLKEEQVSNHPQAIATVIAGIKEELSMSNDSLIICAEHTGQYTYPLICACKSVGSKLWLENASQIKYCSGVTRGKNDKVDARRIAVYAMRFFDKAKPYQRPTEELMRLKQLEAERSLYLTDLAKYKAQLSDQEGFMEDKIFKRKAKRLKEMIKSLEKTLKEIAQEMADVIYSSEELSRQMRLLKSVEGVGPVVAMNMIIATEAFTRFDNPRQFNCYVGVAPFAYTSGSSQHSRNRVSQRAVKYIKCLLHMAAVAIAHKKTGDLKTYFERKVAEGKNKMTVLIYKIP

SEQ ID NO: 410986 - protein, 338 aa, unidentified
MKLYGAIDLHSTNNVTVVINEHDQVVCQKRLPNDLSMIAQQLSSYRRSLEGIVVESTYNWYWLVDGLMEKGYRLHLANTAAIQQYNGLKYTDDHSDARWLAHLLRLGVLPEGYIYPKEERAVRDLLRKRGQLVHQRTANLLSIQSLISRTTGNSISAKYIKALNIDRVDGVLPNPDLVLALKANLAVMNSADAQIEILEKSVRDRVKLRPQFKFLKTVPGIGPILALTIMLETGEIERFASVGNYASYCRCVGSQKISNGKRKGSGNTKNGNKYLAWAFVEAANFAIRFNSRIKSFYQKKKSKSHAIVAIKAVAHKLCRACYYIIKDQVAFDITKAFA

SEQ ID NO: 410987 - protein, 351 aa, unidentified
MKTVHTKRTGQAGRPSVGADRCVARVVPSLLPKSSNSCQGYPSPHLSQGRASLEQIKSIKEDCLLEAPLIFVGIDVSKAQLDVAIRPSAQSLSVTNDRAGIKSLIKHLKKLRPQLVVLEATGGLERQVLSALIAGEIPVVMANPRHIRDFAKSIGQLAKTDRIDASVIAHYAEAVRPKPRPLPDEASLELRALSARRRQVVDMIVAEKNRLATASKVVKKRITAHIAYLEQELNDADQDLDRFIEKNAAWKQNQQILCSTPSIGPVSSPTLLVELPELGALDRKKISALVGVAPFPRDSATLKGRRTIWGGRASRYVARCSWPQWWPLVLIRSSVTSTSGSKLKGNPPKFV

SEQ ID NO: 410988 - protein, 354 aa, unidentified
MSQNPITAIATVGIDIGKNSFHIVGLDSRGAIVLRQKWSRGQVEARFANMPPCLIGMEACVGAHHLSRKLKALGHDARLMPAKYVRPYSKGQKNDFRDAEAIAEAVQRPTMKFVATKTADQLDLQALHRVRERLVSQRTGIINQIRAFLLERGIAVRQGQRFLRAELPRILATPPDVLSPRMVRLIEDLAGDWRRLDERVESLSGEIEAVARQDADCERLMSVPGVGPIISSAMVAAIGRGDVFSKGRDFGAWLGLVPKQTSTGDRTILGKISKRGNRYLRVLFVQAAWVVLIKPKSWERHGLKPWIEAAKKRLHPNVLAIALANKLARIAWGVLAHGRNFEARTNTNPTAQAA

SEQ ID NO: 410989 - protein, 312 aa, unidentified
MNKIICGVDVSKAWLDAHVEPGGAEGRIGNDAAGIAAQAALCRSGGVELVVMEASGRYERLAFLLLWQQDQPCAIVNARNVRRFAEAMGFLEKTDRIDAAMIARFGAVKPVQPTPVPRAAQMRLRALVARLSQVTGDLTVNKQRRSAAVDAESLASLDEVIALLKHQQRRLAGEIATLIGDDPLWACLDRAFRSLKGVAGRTVARLMAELPEIGMLSNKAIAKLVGLAPIANDSGRRTGKRPVRGGRAGPRSILYLVAQIVAKYDTRLAAFQQRLLTAAKPRMVIRIALARKLLVILNAKARDARAQFANQT

SEQ ID NO: 410990 - protein, 409 aa, unidentified
MKSVYKIAGIDVHKKMLAVVVSDVSEPGEHRFEKRKFGTGSEQLRQLADWLLKQDVREAVMESTAQYWRPVWQQLEGVCQLHLAQAHSNRAPKGRKRDFADAERLVRRYVAGELILSFVPDAQQRLWRTMTRTRQQLTRDRIRLRNQMEGFLEDSRIKLSGQVSDLFGMSGTRMLRALAQGASDPAKIAALAVPGLHASPEQLADALQAATTLSPLRRQILRLFLDRLELIDQQREELAQSVAESLREHQQAVTRLAQTAGLGVDSAQQIIAEVGPQAATFDSAGQLASWVGCCPGREESAAVSHSDRSPKGNRQMRRILNQAANAAIKAKGSIFQDLYRRLVPRLGHQKAIWAVAHKLCRVVWKILHDGVTYQERGQRPDPQTIKRWVEKLVRHLRGLGYQVQLSPVA

SEQ ID NO: 410991 - protein, 409 aa, unidentified
MERLIERCCGLDVHKKTVVACVRVPGAEGEREQHVRTFGTTTAELLALRDWLAAHGVTHVAMESTGVYWKPVFYVLEEAFTCVLANAVHIAKVPGRKTDILDCIWIAELLEHGLVRGSFVPPTPIRELRDLTRYRKALIQERTREVNRLHKVLEDAGIKLASVVTDVLGVSGRAMLEALLQGTTDPEVLSELAKGALRKKIPALRDALLGRFRAHHGFLLTHILAHVEYLEEAIEAVSAQIGTAIAPYAEELKRLDEIPGVNRRTAEVLIAEGGVDMSAFPSARHFASWAALCPGNYESAGKHRSGRIRRGNRWLRAALIEAALGATRKKDGAFPAMYRRIMRHRGHKKAIVAVAHAILVTSYHLLARKTTYKDLGTEYFDFRHREKARRMAIRALERQGYRVTLEPAA

SEQ ID NO: 410992 - protein, 345 aa, unidentified
MEPMYYIGLDVHKRKISYCVKDSGGKVYAEGSLPATRMDLDLWMKTLPQPWSAAMEATMFTGWIYDHLKPHAAALKVAHPLMLRAIALAKKKNDRMDANKICDCLRCDFLPECYMAPAAIRERRRTLRYRNLLVRQMVQMKIKISSLLMEAGVSYNQQRLHKAGYFRELLATNPDIDEGLVPLLRLCRETVVRLQRTESALVRSLERDSLLMGRVERLMTIPAVGPITALTWALEVGDVQRFSSIKKAISYCGLCGAEKSSANTVQRTPLSKQRNKHLQTTLIEAAKMAPRNSSELAMLYDTEKQKGNANRATLAVARKLVAYLMAVDRRQRAFQVLETSSGIAA

SEQ ID NO: 410993 - protein, 411 aa, unidentified
MHNRQNYLYVGVDLHKEHHTAVIINCWQEKLGEIQFDNKPSAFSKFLLEVETYVSDGLSVVFGLEDVGGYGRALAKYLVDHEQVVKEVNPALSFLERKSHVTTQKSDSWDAECVARILVNKFNQLPDAKPNDLLWSIQQLVSRRNALVKAQSALKNQLHIQLNHHYPSYKKFFSELDGKTALAFWEQYPSPSCLEGTNIKQLTAFLLDVSNNTCSVKKASDILKLVKEDGHTMKEYQETRDFLVRSIVRDIEFKKKEMKYIERELKQLVKLLDYQLETMPGIELVTASALIAEIGDVRRFPNANKLARFAGIAPVYFGSGGKGKTHKSKQGNRALHALFYNLAVQQVQVAKDSKMPRNPVFHAYYQKKLKEGKTKGQALVCIMRRLVNIVYGMMKYKTAYELPVVEEKEVV

SEQ ID NO: 410994 - protein, 315 aa, unidentified
MQQKRELFVGIDVSKRQLDVALGAGGELWREANEPVAHAALSARLGSLQPALIVVEATGGYETALVAELAGAGLPVAVVNPRQVREFARAAGQLAKTDALDARVLALFGERMRPQLRRLSNEQERELKALVARRRQLVEMLVAEQNRLATTPQLLHHALRSHIDFLRKELRRSNRELDQFLRGSPLWQEKQALLRSVPGVGPVLCATLLGAVPELGSLSRRAIAKLVGVAPLDRQSGRWQGRSMIGGGRATVRAALYMGALTAVRRNLTLRDFYDRLCKLGKPKKVALTAVMRKLLTILNAMLKQRTAWRPACVA

SEQ ID NO: 410995 - protein, 391 aa, unidentified
MIYVGIDVAKDKHDCFITDSDGEILFPVFTIENNRDGFDDLFAKILSISSDFSNIKVGLEATGHYSYNLLGYLLDKGLHTFVINPLHTNLYRKSLSLRKTKTDKVDARTIAMMLMSDVNLKSYSDISYHNEELKSLTRYRFDKVQERARLKQSVSRLVTILFPELEKLVPTLHIASVYALLSELPSTGKIASCHLTHLTKLLENASKGRYSKEKAIEIREAARVSIGSNMPAKSLELKHTLHLISELDSEISEIESEIKQIMDQISSPILTIPGISYRMGAMILAEIGDFSRFDSPDKILAYAGASPSTYQSGQLESSYSHMEKRGSRYLRFALINAAKYVCHWDETFGAYLQKKISEGKHYNVAITHATKKLVRLIYAMEKSGKPYIKTA

SEQ ID NO: 410996 - protein, 362 aa, unidentified
MGTSSKVSRFGVDVHGKFSVATARDASGQVLSRHRLDHTDREALRQTLRQWPSGAPVILEASFGWGWMCDELMAAGLQPHLASSVKVAAWRKARGLAKSNRIDADLLAELWDQQPRWWEVWLAPQEVRDQRELLRHRMGLGATQTQVKNRIHALLHRHGIVHGYSDLFGVSGRRFLSLLVEDHQRLRETARRTLKDMLILLDALRRLIARATRQFRAVIRRSEGAQRLTTLPGVSTVLAYTLMAEIGQIERFANARKLVRYSLLAPMADDSGETREGKPIGRCLSRAGRATLQWAWIEAAHGAIRKDAHLRELFNRRTDNGKQDRNRGYIMIANRLCRIAYAMLKHKTDYQMTPPPRRGSQG

SEQ ID NO: 410997 - protein, 299 aa, unidentified
MEQITRAVVRGQAVRVGVDLAKRVLQVHAVDAAGQVLATRALARDKFIAWCAQLPAGCIVAMETSSSSHHWARKLIALGLDARIIAAQLVSPYRRQGASGKNDANDAAAVCEAASRPQMHFVPVKSIEQQSILCVHRLREGFKADRVACINRIRGLLAEFGLVFAQGPTALEAVLIGTLEDASNEMNTLARLCVQQAQTQWRELDAHIAWCDERIAAHANDNADVKKAATLMGIGPVGASAAVATVGDFKQFSHAAQFGAWIGLTPRQHSSGGKNNLGGITKRGDNYLRSLLIQGAKSA

SEQ ID NO: 410998 - protein, 412 aa, unidentified
MTAIDQFAAHVGLDWADRKHDVCVQFKNGERTFHVIKHTPEALDTWLNELHQKVKGRIAIALELKKGPVVYALQKYPFVTVFPVHALSLARYRQTFWPSGAKDDPQDAELALDLMLRYPQKIKAIEPDNADIRLLLQLVEQRRLLVEDKRRFVNRLINTLKQYYPQPLEWFSHRGSLLLCELIIRWPSLQKLKRARRDTVRHFLNAKGGRATALTEQRVASINNAIPLTADPSVIEANALMATALATQIKVVSEIIKTYDERIETLFDPLPDAELFKSLPGMGPCMGPRMLAALGDNRDRFNSAEEIQNYVGIAPVTERSGQKSWVHWRWQCARFVRQTFIEWAAKTVNSSYWAKLYYQGMREKGKSHQSAIRALAFKWIRIIYRCWKTRTRYDEAKYLLALEARKSPLLMP

SEQ ID NO: 410999 - protein, 423 aa, unidentified
MEAMHERVAGLDVHKDNVVACVRTMSGDKTTRECQTFDTTTDELLALLEWLKRCRCELVVMEATGVFWMPVWKILSDGAFTLVVANAAHIKAVPGRKTDMNDATWLADLAAFGLIKASFVPDEEQHELRALMRTRKQLVREQTRHVQRIQKTLTEANIRLDSVISDIMGRNGRRMIEAMIAGMRDPRKLAALADQRLKATPKQLYDALHGRLTEHHRFLLQLHLGQWDTLDATIRNVDREVATRVSCMDTEVMADKAKFSELIDQLVTIPGVSRLSALTILSEIGSDMSRFQTAGHLVAWAGMCPGQNESAGKRKRTRLRKGAPWLKTMLVQCAWAAKRKKDSYYKAQFFRLQSKRGPQKAICAVAASLLTAIYHMLKDGTLHQDLGAGHFDQRAPHLKVKRLVNQITKLGFEVTLQPITKAA

SEQ ID NO: 411000 - protein, 343 aa, unidentified
MNEIKVLGIDLGKDVCSVVGFDGAGKVLLRRRMRRDSILKLASGMPACVMAMEACCGAHHLGRLLREQGHDVRLMSPEYVRPYVKAQKNDDRDAEAIAEAATRPTMRFVDLKSDEQLDMQSLHRARDRLVGERTTLINQLRAILLERGIVMAKGRRKLELRLDQLFSGEVTISRRIRLLVEDMRAQWRALDERIGAFDAEFVAIAREDAATKLLSTIPGVGPLNATAFVASVGRAETFGRGRDLAAWLGLVPRQMTTGGKPRLLGISKRGNGYLRRMLIHGARAALPSLAKGRTLLGEWLRGLLARTHMNTAVVALAAKMARIIWAVSRSGRPFAMEAMAWAG

SEQ ID NO: 411001 - protein, 392 aa, unidentified
MFYVGIDIAKRKHEAVVTDDKGDIVVKAFSFTNDLTGYNYLLGKIKLVTTSKEQLILGMESTSHYWLTLYTRLIKDGYNVHIFNPIQSDALRGMYIRQSKTDARDSFIIAEVIRFGKYSESNVPQEKLFALRELTRNRYFMVDSVSDLKRKTTALIDQVFPEYEKLFSNNFGVSSMALLLKYPTPEKLKTASLQSLAKLLSKASNGYFGLGKAKEVKETAKNTFGVIDNCGIYASLISTYIKQILFIQDQVKEIDSQIAAIMSELDSKITTINGIGQALGAVIISEIGDISRFRNSDKLAAYAGVDPTVKQSGDYCAVRNHMSKRGSPYLRRAIWQASVIAVGCDPMFKAYYDKKAAEGKRYMNIIGHCTRKMISVIFAVLRDDKEYIPMAA

SEQ ID NO: 411002 - protein, 384 aa, unidentified
MSFARTDAPVTDEYATVLVGFELSKATWKVGVIMPGSKKLSRYSISGGNTEALRSLFSKVRTKAERGGKPVRIMACYEAGYDGHWLHRWLIGEGVISHEIDPSSIEVSRRARRAKTDRLDLEKMIRAFAAYLRGELRACSVVRVPTVEDEDRKRRTRERERLGKERTAHTNRIKGLLHGQGVRDAMPLKPGFIASLDKVRTGDGRPLPPQLKEEIIREHERLSLILKQQAALEAKSKAERLAAEPDTAQAKMLHLANLKGIGPVGAQLLVNEVFYRSFDNRRQVGSYFGLTGTPFDSGESRREQGISKAGNRRARELAVELAWLWLRHQPDSELARWFRERVGDIKGRMRRITIVALARKLMVALWRYLQTGVVPTGAALRPSC

SEQ ID NO: 411003 - protein, 365 aa, unidentified
MNCVGIDVSKGKSMIAVMRPFGEVVVSPFEVRHTANELSELAGLLKSLDGETRVVMESTGNYHAPVAWLLHDAGLYVSVVNAMLVHDYGNNSLRRAKTDKKDAVKLANYGLDHWLTLPRYIPEEDTRLMLKICYRQYQQYSKVQTMLKNNLISLLDTTFPDANRLFTSPPRADGSEKWVDFVATFWHCECVCGRSEKAFTTQYQKWCRKHGYNFSEDKALDIYASACRHFGVIPKTDTAKLLVEQAISQLQTTSSALAALKQEMQSLAASLPEYPVVMGMFGVGPTLGPQLLAEIGDVRRFHSKKALVAFAGIDAPPYQSGQIDVRSRSISKRGSAFLRRTLFLVMSVILQHAPMNEPVYQFMNK

SEQ ID NO: 411004 - protein, 319 aa, unidentified
MRRVIGIDIHRTFGEVVIWENGLTRHEGRVEMTRTALEGFGRQLKKTDEVVIEATGNCMAVSRVLSPHVKRVVIANPLQVKAIAHAHVKTDKVDAATLASLHAAGYLPEIWTPDAATERMRRLVARRYQVVRHRTRIKNEVHAILHAHLIPKCPHADLFNKRGRDWLTRQPVPEDERAAIARHVRELDRLGEDLAVLDRDIAQDAIDDEAIKRLLTITGVNLTVAAGLMAAIGSIDRFNSPQKLESYFGLNPRVRQSGLGPAHHGRISKAGRCWSRRPEQRRKHPDHCGLSSSASERAADIRSPQSLSHESSRPCAGTC

SEQ ID NO: 411005 - protein, 343 aa, unidentified
MKLSRVGVDLAKNVFQLHGVDRHGKVVWRRRLTRKQWLSALMAQADPGCEIGMEACGGAHHWARELQSRGYTVKLIPPQFVKPYVKSNKNDANDAEAICEAMSRPNMRFVAVKSIAQQDIQATHRIRAELMGQRKAKANQIRGLVAEYGLIAPLTMRALRSAIPHWLEDAENGLTDYFRSLLNGLWSDLVLLDDRVLEMDREIERLANSNEVTRRLQQLRGVGPMVATALVATVGTAEQYPKGRQMAAALGLTPRQNSSGGKQRLLGISKRGDAYMRTLLIHGARAVVSQAKHREDRLSRWVTDIATRRHPNVAAVALANKTARMAWAMLRHGTDYDPDFVMS

SEQ ID NO: 411006 - protein, 407 aa, unidentified
MRPIYERCCGLDVHKKTVVACRRTPEGSQTRSFGTMTDELVRLREWLLEAGVTHVAMESTGVYWKPVFNLLEDQGMELLVVNARHVKAVPGRKTDIKDAEWLAELLQHGLLKASFIPDRESRERRELVRYRRSLVEQRAHLVQRIQKLLEGANIKLGDVASDVMGVSGRAMLEALAEGVDDPAAVAGMAKTALRNKIPELERALTGSVRHHQRFLLRSQFRLLESIEAEIASLDEEVAERMRPFQVALDRLDEIPGIGRRAAEQILVETGTDMSRFTTSAHFASWARVCPGNNESAGKRQYASIGGGNRWLRNALLEAAWTVSHSRKQTFFTARYRRIAARRGSKRAAIAIAHSLLVAVYHVLKDGVVFQDLGPNHFERRNSDAIARRSLRRLELLGYKVSIDSRPA

SEQ ID NO: 411007 - protein, 412 aa, unidentified
MEGETVIAGVDTHKDVHVLCLLDGLGRKIWSGSFRADPEGYDRLAEAIGDPGSCLVVGVEGTASYGAGLTRRLAELGYNVVEVLRPKRDKARPGEGKSDPLDAERAARKAASGRGCSVPKSQDGWVEAVRQLYVARRLAVATSTSCVACAKSMLTTAPGALRERFRGCERPKDLMPLLARRRKAASALEESVLASLRSVATVWKEARSQVESCDARIRALLEANAPALLGVEGCGTTTAAALVVAAGDNPGRLKGEAAFSMLCGVSPIPASSGKTERHRLNRGGNRQANWALYEIAIKRMAYDERTKRYVAKRTSEGKSRREAIRCLKRYIAREVYRVLMDPNPDGAAPEGPELAKMRKAMRVTQKQAAAGLGMSAASLGHLEHGRRRSTKLERRYYELLCELKGALPQTAY

SEQ ID NO: 411008 - protein, 341 aa, unidentified
MKNKSFIGIDISKNVIDASIFCEGTPIKDFPHAVFNNSHKGFGEMCTWLKKNHVVLSNSLFGMEFTGSYSMELEKFLNARKYQFCMLSTHVVKHHPMGPKDKSDKIDSAKIADFLYRYDGTECVKPYEMPDKTMQRLKELMNERKFLVEQRTSFMNRRQLCNTKENAQLYDGYIKKFSRDIESIELEVQKLLETDDSLFTTYKNLLTIPGIGFVNAMNVIVITRNFTAFDTARQYASYIGVAPHFHTSGTSVRWRPRPSARCDGQAKADLSMATTVAVQYDAELQSFYNRKLGGKQDSDTKRKALNAVKFKLVLRMFAIGKQNRKWEPLDSKSSKEKLAIS

SEQ ID NO: 411009 - protein, 324 aa, unidentified
MIDGILGIDVCKNTLDVSISSYTKVRTKSVANSPDGWRHLLDWLIAQKIQRVHACLESTGRYSLGIACALYEADHVVSIINPAQIRDFVRTKLGRNKTDGVDASHIREYCELFKPSPWAPPSEAHRRLGELQTIRSGIIAGLTEWKNRKNSGIVDAEAQALADATISHFTSQLGAVDKAIALTIDNDCDLQSKRDLLLSISGVGETLAGVVLAELPGPDVLRSSAEVVAYAGLNPRKHQSGTSIDRATRISKIGNAVLRAALYMPALSAMRYNSAIVALVTRLKSRGRLKPKQIVVAAMRKLLVLCFGVLKTGRPFDAAIAMGG

SEQ ID NO: 411010 - protein, 361 aa, unidentified
MESTKYIDRTKYIGMDVHKETVSIAVMNSTGKLVMESIIETKTATILQFIQGLRGDLQVTFEEGTWAAWLYDLLKPHVTKIVVCDPRRNALLKEGNKSDKVDARKLAELLRAGLLRPVYHGENGLRTLKELSRSYLTISKDLTRVMNRLKALYRGWGISCEGATVYAPRHRSEWLGKITEAGVRRRAEFFYQQLDALQALRQQVRRDLLAESRNHGARKLLRQIPSIGPIRAALLMALIQTPHRFRTKRQLWAYSGLAIETHDSAQYRYVAGQLQRSKKPQQLRGLNRNHNHDLKAIFKGAATKASSGAGPFHDFYEALLTKGMRPSMARLTLARKIAAITLIVWKKGAHFDAEQLKPQAA

SEQ ID NO: 411011 - protein, 320 aa, unidentified
MPQQGRIVGLDIAKQKVDACIRSLRLRLSQPSTAAGQAAMIAWLHAHQVTTAVVEASGGYERGWAAALRAAGIAVRVLDPKRVRHFAKSAGRLAKNDPIDAEMIAWFGETFADAPSQSHDPDREELDGLLMARALLVKIATQIGNHGEHAPPPAVAEAFAAVAASLAGQWARLEAAIAAKLASTQRFADQAEIIQSIPGLARQAAAGVIAWLPELSRIGHKPAAALVGAAPYDDDSGRRQGERHIKGGRAEIRELLYIVTLGCVTRHNPVLKAYYQRLRARGKAFKVALIACLRKLVVILGAMLRRGEKWDVSRYAAAAV

SEQ ID NO: 411012 - protein, 374 aa, unidentified
MHDTIEGFADLTAIIQKVKEKSGCDTVPVVFEATGVYHRCLQKYLDDHKMPYYIISPLLSAAYRNTDLHSNKTDDLDCAHIAKAYYSDEKLLPFHRQEDLFTRLQKMNRYYEVELNHLRMRKVSFRSCLDIIYPRMDKCFKGHASLYDPVPMEVLKQYPHPSLLLRHREETIVKVIVKKTNHKARFVTEVVHKMYECAQHCYSGCDVSEIEVIKFPDMIKELQKQMNYCDSILKEMVEEARNVPYFKSVRSIVGIGDNLAARLIAELGDMSRFTSRRAITAYAGLNPKIRQSGDVDGTHLRISKKGNRHLRCLLYLGVSCNYRLKKNDPIYEFNKKKRQQSQSPLKSKAANIAAAHKLLVVIYALSKSGELYRS

SEQ ID NO: 411013 - protein, 379 aa, unidentified
MTSLGIDCGQLRHRFCLLEESGRVLVEGAFVEDRSGLAAFRAQVSAHPAPGVVVMEASGACWQNLQAELTSWGWSVCAVDPQRAAQFARLHHPRHKTDKADARSLAQLGLTAPAGSFAAGAPSTWAQGLARAIDQRAGLLNQLHSLLLVANPALLACRWNLGTPRSLAVLRAYPTTRELRRARALAQVRFGVRHRVGEKAATALRQAAREALCGALNEAHAEQVSFLVEQIAAWDREIARLQQALRARLPEAQRLASITGVGERTALLVYACVPFAQLASPKQAAAYVGLHPHLFQSGAHQWSRLSKRGDRVARTALYRVALPAVQTNPRLRAFYQRLLEMGKAKKQALCAVAHKIVRICFALVKYQSTYSLNYQPVRA

SEQ ID NO: 411014 - protein, 333 aa, unidentified
MQNFYFIGIDVSKKKLDICVMSNSKVLKEEQVSNHPQAIATVIAGIKEELSMSNDNLIICAEHTGQYTYPLICACKSVGSKLWLENASQIKYCSGVTRGKNDKVDARRIAVYAMRFFDKAKPYQRPAEELMRLKQLEAERSLYLTDMAKYKAQLSDQEGFMEDKIFKRKAKRLKEMIKSLEKTLKEIAQEMADVIDSSEGLSRQMRLLKSVEGVGPVVAMNMIIATEAFTRFDNPRQFNCYVGVAPFAYTSGSSQHSRNRVSQRAVKYIKCLLHMAAVAIAHKKTGDLKTYFERKVAEGKNKMTVLNAVRAKLVARMFAVIRNNRVYQPILSV

SEQ ID NO: 411015 - protein, 337 aa, unidentified
MKRFIGVDLHRKNFTVCVRSEKTETVEEWSIKNLQLFAKTLKKEDSIAVEATGNTAYFVEEVEKRAGRVVVVNPYQFKVISQSVKKTDQNDAKVIALFLEKDMLPEVRMKRDEQAKLSSVAQTRDKLVKLRTILKNKINNIFARNALVLRKESLSSEKGLREVEKANFGIVTNTEIKVIVEQIRSLNKSIAELEQIMIDSSKTMDGHKNLTSIKGIGDKGAAVMLSSIGNIHDFSDSGKLASYFGITPRVQNSGDTVHHGRITKKGNKLARTTLVQCSLIAKRYNPYLENFFQRIKSRRGTPKAIIALARKFLDIIYKTLKNNWVFEDFPTFILVTS

SEQ ID NO: 411016 - protein, 317 aa, unidentified
MASAIGIGIDVSKSKLDLAVKLSDSSYQESSFNNDLKGIRALCGYLKRQEAAFAAPLIIESTGDYHLQSALMIKQRKFNVKLLNPIVTKKYQKSSVRNAKTDKIDARRLSDIAVLEQNVPDFSDNLAQIRARKLVSLAAHLEKTRQQLLLSLKRFEETAKVLGLKHSLSHAHRALSEIDEQLEITKQSITELMPERCGRLADDTPGLSREKLAVIHALIGDKTFANADQITAFFGLDVAVRQSGNWKGKSKLSKRGNAYGRKILYQIAWGLKTHNQIFKTYYDERRKNKKHYTTILISLARKFLRFYFAYYCKSTVQ

SEQ ID NO: 411017 - protein, 460 aa, unidentified
MNNFYLGCDVSKGYADFVIINEDKQTSLDSFQLDDTSTGHQMLCGILSEFADKHQGSTIYAAVESTGGYENNWYKTLFNLQNRLNIFVARVNPFGTNHNSRASMNRIITDKTAAENIAQYLINQKKKIIYMKNDKFSSLRKQWTFVKMLTKQKTQLYNQLGSIVYIANPEVLVYCKDGYPNWLLRVLLDYPTAKQLSKAKIAKLTSIPYLKGQKAVSLIDNAKTSVASSVDDVTANLVTSLVKQIISLDKLIDKQSKFIADNCQMPEIEILKSFTGIGDYSAVGLLIEIVSTEKFESTKKLASFFGIHPTYKQSGDGTWGMHMSKQGRKQVRCILYMVTKTAIVHNPLIKEIYARNLAKGMNKTAAIGVCMHKILRIVFGMLKNNEKFNPEKDRANSEKMLKDIKPTKVLSNKLRRYQKLDLAAPISNRQTKKRKEQEKSQNEITSLTTGSIPHSSELLT

SEQ ID NO: 411018 - protein, 337 aa, unidentified
MRIIRIGLDTSKHVFQVHGVDENEQPVLRRQLRRSEVEKFFAKLAPSRIGLEACGASHYWARILRSLGHAAVLLPPQYVKPYVKRGKNDRIDAAAICEAMSRPGMRFVPVKTAERQAALMVLRVRDLLIKQRTMLSNAIRGHAAEFGLVAAKGPVKISELLQRAHAEEAGVPALAREMLSLLANQLDALEARLKALETQLVAWHRQDPVSQCLATQPGIGPIGAVSFALKVTDPQGFRSARHFAAWLGLTPKEHSTGGRRRPGRISRQGDETLRRLLVLGATARIRFAKAGRASPWLMNLLARRPKKLAAVALANKMARILWAMMVSGETYRHPQQA

SEQ ID NO: 411019 - protein, 358 aa, unidentified
MLYLGIDVHRKQLTVSVRNEAGEVVVRRQVSTEWPRAFFTEVAERVKPDGGYVAILEVCGFHDWVLKMLTEYGCRETAVVQPTGRTKKKTDRRDAQALSETLWVNRQRLAAGQPIHGLRRIQPSSSVDAENRQLTALRARMKQVRTRTLNKVHHTLLKHNLHQECPTKGLATKLARAWLTGLKLPELDRLEMDLLLAQWTLWDRQLATVEDQIARRQAKSPTAVLIASVPGAGAFGSLALAARMDNIGRFPRPGSLANYWGLVPSVRNSGETTDRLGSITKEGSRLARFILAQMVLHVLRRDPTMKQWYQRIKRRRGSKIARVAVMRRLATILWHMVKHHEPYQVGGLPRRHLSAAAG

SEQ ID NO: 411020 - protein, 350 aa, unidentified
MPRKFDTAVVTIGIDPGKNILHLVGLDARGEIVLREKVVRARIVSRLANMPPCLIGIEAGMGTHYVTRELLALDHDVRQVPPVYAKPFRQTHKNDFRDAHAVAEAVQRPTTRCVPPKTDEQLDLQALHRVRYRLVGQRTAIINQIRCFLVEHGITVRQRLHWLRHALPDILAQRTDVLSPRMVRILEDLAQDWRRLDDRIEAVTDEIDVLSKNTEPCRHLMTIPGIGPIISSAIVAAIADGAAFTRGRDFAAWLGLVPKQISTGDRTILGRITKRGNRYLRMLFLQAARVVLLRPRNWMQHSFGPWLAAAAQRLHHNVLATALANKLARIAWSVLVEHRVYETRLSTAAV

SEQ ID NO: 411021 - protein, 356 aa, unidentified
MQQQCTQQDVTGQDVYVGMDVSNKSWKVAIYLGTELHKRFSQDPNPRQLMHYLQKNFPGARYHVVYEAGYSGFWIHDDLEALGADCTVVNPADVPTSDKERRHKNDRIDAGKLGRGLATKSLKAIYVPERSWTEDRLLVRTRIRFVRKQTRVKCQIKAVLAFYGYQVPEDMPEKYWSRRYIRWIESLKMVRSSGDYALKALLAELHFLRQMILDLTRRIRTLSREERYRVLAMHLLTIPGISLMTTMVLLTEIMTIKRFKNSDQLASFVGLVPGEHSTGDKERTTGIVPRGNKMLRYMVIECAWIAQREEPVLLEAFIQLTKRMPKTDAIIRIARKLVNRIWFVMQHEQPYVIGVV

SEQ ID NO: 411022 - protein, 460 aa, unidentified
MNHKQRREVMRKIQSEDLSLEVVHPDAAGIDIGNESHYVAVPPTRDSQTVRRFGCTTAELKAMADWLKQCKIRTIALQSTGVYWVSVYDILEEAGFEVYLVNARETKNLPGRKTDVQESQWLMKLHTYGLLRNSFRPSQEIRTMRTYWRQRHDLVRTAGRHIQRMQKALTQMNIQLANVLSDVSGMTGQAIVKAILAGERDAYELAALRNWRVKASEEEIALSLEGNWQEEQLFVLQQEQDGYEFCLKQMAECDQRLQQYLQQQQDRSQGASLPEEKRKERLRKKKKGNTPQFDLRPELFRMSGTDLTQIDGIDVTTAMTILSEAGWDMSKWRTEHHFVSWLRLCPDNRISGGKIIGKGRLPTNNRVTNALRMAASTLRLSNTYLGAQFRRLRTKLGPPVAIKAMAAKLARLIYRMLRYGMPFIDRGADFYETQHRKLQINYLKRKAANLGFQIIEAPAA

SEQ ID NO: 411023 - protein, 349 aa, unidentified
MTTVPSRPVAVIGGVDTHADIHVAAACDRLGKVLGTKSFVTTPAGYRDLLSFLAGFGQLQAVGVEGTGSYGSGLARHLAQGQVRVFEVSRPNRQVRRAHGKSDVIDAIAAARAVISDQATVIPKSHDGTVEGLRALQIVHRSAHKARTQTLNQLHALIVTAPDPIRGQLRGLGRAQMLTTCQSYRPGDRDDLACVVKLALRELATRVADLDDQIKRVETRRGRLIRTHAPQLLAIFGVGPDTAATLLVSAGDNPDRLNSEASFAALLGASPIRASSGKTKRKRLNRGGDRQGNSALWHIVITRMATQPATKAYVERRTTEGLSTSEIIRCLKRYVAREVFNALPQELRT

SEQ ID NO: 411024 - protein, 500 aa, unidentified
MDTPAQGLALGVKACDFVAALGDENRGVARRRRHTLVRVSPFRCMARGLRVPLDCCCEHVGLYPGRRPSERHPARRPGGPVAQVGEELIGMEVLYDRVAGLDIGKASVTVSVRTPGTRRGRHQETRTFKTTTGSLAVMRDWLVEQGVTIAAMESTSTYWKPPFYCLEEVMEVWLLNAAHMKAVPGRKTDVRDAEWIAQLLEHGLLTPSFVPPPEIRRLRMMTRYRDQLQGDRTREIVRLELMLEDASIKLSTVASSLKTVSARAMIGAMVEGETDARVVAEMAKGRMRRKIPDLAQALEGHFDVHHAQLAKSILDRLDRVERSMAELNQVIEVACGPWAHQIELLQTIPGVGPKVAQVIIAETGGDMSKFPTAAHLASWAGLAPAIYESAGKRTPAGRRRGNKWLSAMLVEAAGSVGRMHGKNYLAVQHARLTRRRGMSRAQVAVAHSILTTAYYMLTRDEPYRDLGPEWMAKRNEEAHTRRLVSQLEKLGHTVVINPAV

SEQ ID NO: 411025 - protein, 421 aa, unidentified
MRGVRSSKVKAVKKDTLMVTVDVGMTSNMGYCSTVDGRDIKPFKFGNTREGLDKLWSLVLANKKRFRCNEVIVGYESTGPYAEPFVHSLRSKPVTIVQVNPMHTKRVKEINNNSPLKTDEKDPRVIADILRLGHALSVVVPEGDAAYLRRLNNARERHIRERTALLNQLQQLVFIMFPEFKMVIKDIKIKTARWILRNYTTPDKIGGLDKDRLGEEMRKRSRGKFGIQDADLLISLARDTIGVKEGVAGIAMDIQHILVQLDAADGFIEEIESEMEVTLTRIPYSARILSMKGLGTVTVAGLIGEVGDFTKFRTQSEIMKLAGLNLYEISSGKRKWQRRISKRGRSLLRKILYYAAISTIRKNGIMHSYYMRLTGRGTKRTSALIVIAKKLLRIIHAIVRDDRDYVKDYGSPKRMVIQKAA

SEQ ID NO: 411026 - protein, 322 aa, unidentified
MQDGIVFTGVDVGKAELVVARQPSDRQQPNGQKLRLPNTDSAILKWLRTLPPGSHIAMESTGRYHQRLALLAYQAGMKVYVLNARDVHFYAKALGMRGKTDPSDALVIARYVAEHHEKLRPWGPGTPEQRRLIEMLRRRAAIERHLSAIDDSLEDVVDLARQKASMARYAAKLLATIDAKIQALIASDADLFERQQRLQTIAGIGPQISAVLAAVLSRNEFANVGAVIAYSGLDPRPNDSGNKRGRRVLSKRGPAALRKMLWLAAFSASRSKAFKGVYQSIKNRGFSGTEALVILARKLLRVAWAVWRTGTPFEPAKVQPAA

SEQ ID NO: 411027 - protein, 341 aa, unidentified
MAFFKSLKTKLMKKASRIIGADLSKRKIDLHDHQSGTHVCIDNSNTGFRQLLKWFKRLDINVSEVMIVMEHTGLYSYCFEQLLHQEAISFCKLPALVIKRSQGFVRGKTDKVDAKRIAKYGFDHQEELKAEEVPSAALLQLQHLYSTRESLVKTKSAMLNGIKELQNIGMKSSNPALKAQLSLLKTCEQQIASIEKEIDLLIEKNEDLQTNHTLLLSIKGVGRIVSIATILKTKNFKRFNNARKFACYSGTAPFEHSSGSSVRGKTRVSHLADKSMKTLLDLAAKSAINHDKELKHYYQQKVASGKPKMSVINVVRNKIIYRMFAVIKRQTPFKEDYLIAA

SEQ ID NO: 411028 - protein, 320 aa, unidentified
MQTPTEVLNIGADVAKHDIVVACSVGSFPARTLANQRTALLTFLKSLPTGSRIGMESTGTYHELFANAAHQLGFIVFVLNPKDARHYAKAVGLRGKTDRVDAELIARMIAHEHAKLHAWIPPTPEQREMARLIKRRAKLSSLRQALGMSLKGLDGFAADLKALRARFDQVIARLDQRVKALIEANPDRQQHVTHLRTIDGVGPVVSAALINTLERAPLKSADAFVAFTGLDPRPDDSGQHRGKRHLSKRGPAELRRLLYVAAMSAKKTKAWKPLFDHYRAKGLSTTAALVILARRIARTAWSMYTYKTEFDPARLTKSLT

SEQ ID NO: 411029 - protein, 348 aa, unidentified
MLADRLDYVVGVDPHRDVHALAIVEVRTGGVVFETSLAASSGGYARALELADEHAPGRRAFAIEGTGSFGAGLTRFLGGEGERVVEVGCLRRERRSGGKSDALDAIRAARSVLGQKRAAEPRAGGEREALRALMAAREGAVNARRAGLCQLRDLLITTPEPLRSELRPLTRAQLLRRLVAVRPERRSDVELRGTLQALRTVARRVQQLTAEERELAGEIETLTRKLAPQLLEQPGVGPLAAAQILISWSHRGRIRDEAAFARLAGCAPIPASSGQTVRYRLDRSGDRRLNRALHMILVTRRRSHPATIAYINRRIQEGKSRREASRCLKRYLARNLYRLLEHGVPLAT

SEQ ID NO: 411030 - protein, 426 aa, unidentified
MAVVMIGVDPHKASHTAVAVNAAEVPLGQLRVRASAVQAERLLEWAQAWPERAWAVEGAGGLGHLLAQQLLSAGERVLDVPPKLAARVRLLATGNINKNDPDDARSVAVAALRSADVREARRDDHAAVLKVWSKRYRDLGRMRTQVACRLHQVLCELIPGGVPGEITAGQAARFLESVTPAGAVQAARWELAAELTEDLRGVDARIRETRTKAAAAVRAAGTSLTGLFGVGPVIAAAVIGDVRHVSRFGNRDRFAAYNGTAPIEVSSGGRKVYRLSRRGNRRLNHAIHMAAVTQIRYRHTKGRAYYDKKLAEGKTPKEALRALKRQISDAIFACLQEDARRAAAAAAKSPGGQPGNHSATRAAGSHPDHRLFGPATPGPATHPTTTAPFPAPLPSRASEQPGPGPGAARPRSGARRASSTRPPASR

SEQ ID NO: 411031 - protein, 338 aa, unidentified
MATYAGIDLHSSNCYLAVIDEQQRRLFSKRLPNSLDQILSALQPFKEELSGVVVESTYNWYWLVDGLQEQGYRMHLANPSAIRPYEGLKHTDDKWDAFWLAQLLMLGILPQGYIYPKAERPARDLLRRRLLFVRHRTAHVLSLQSMVQRCCGHGISGNAIKKLMPQEAAALFSDPQLGLTARFQVETIGFLTQQIRSIEKAVLPQAKLRPEFEILLTIPGIGKILGLTIMLEVGDIRRFAKAGNYASYCRCVKSQKLSDTKKKGEGNRKNGNRYLSWAYVEAANFAVRYSPRAKAFHQRKCAKTKKVVAIKALANKLARASFYILRDQCAFDEKRLYG

SEQ ID NO: 411032 - protein, 348 aa, unidentified
MRSYFVGLDVHKQVIAFCVKTADGAIVMEGSIPATRTALDQWVKTLPGPWHGAMEATMFSHWIYRHLEPHAAKLEMGHAARMKAICAGKKKSDKIDARTIADLLRCNLFPACFVISPELGVLRQQMRFRRLVVEETVMFKNKTAGLLMSAGVEYERRRLHGKRYFESLLKDNEWISQELRPLLEFNRAQMITLQAMDRRLKGMLARHPALESRVKALCQIDGVGTVTALSWALEAATPDRFPSIKHAMSYCGLTSALRESAGQQKRGPLSKQRNPHLQSALIETAKLAPMYNEKLQEVHRKAVEKGGHRNRATLAVARKLVAYLMAADRAFFSVQREGTAVGEDTLAA

SEQ ID NO: 411033 - protein, 432 aa, unidentified
MEKIHSQAVGLDIGSRQVFVALEDGRVKSFETFTSDLVALGDYLLENKVTTAAMEATGVYWYILYDILSEAGIDVWLVDGRETRQVPGRKTDVKDCQWIQQLHSYGLLKRCYVSSGQVKELRSYQRLREDHLRGMSMHIQHMQKALIEMNIRLPEVLSQVHGKSGMAMIRAILSGERDRQVLVSLCDSRLRLSKGEELLKALEGHYTEYGLFALHQALQAYLFYKSQVQDCDRKMEVILQEINKDKDLPPGVGEKVRKPIRHNKPEIGELGKHLLKVFDGRDATKLPGITDYNWLQLYSELGADLTKWPSEKHFASWLGLSAGQNNSGKRKKSKNKGKPTVGQIFKEMAHGLLNSKYISLGSFAKRLRGRKGPAIAIKATARKIAVQYWRLMVKGSDYVEKGVEAYAQMLNEQKKRQLQKLARELNVQLIPL

SEQ ID NO: 411034 - protein, 386 aa, unidentified
MYFVGIDISKYKHDCFICTETGEVIEENLSFTNTNEGFAQLLNLLKSLDNSQEVRIGFEATGHYGMNLKLFLEKNNYSFMEFNPALVKRFISTQTLRRTKTDKKDAMLITKYLISVDYKPHPKQFYHKYSLKSLSRMREKLVKQRSYYEIQITNVLDIIFPEYKPFFNNDFSKTCLFILNKYKSPDKIKNMKDFDSIRKISRGKFTSANFIKLKELAKNSIGISNDIFETELESLLTLHSQIEIEINKLETKIESIIKELNPPILSIRGIGTISCAGIISEFGDITRFKSADACVAFAGIEPSISQSGTESHTGHMVKHGSGHLRYFLMNAADYVFMHESIFTEFYYKKRSEGKSHRVALTHVAKKLVRIIYKLESENIIFNSNIN

SEQ ID NO: 411035 - protein, 423 aa, unidentified
MAGVMIGIDPHKGSHTAFVIDGREKPLGQLRVRASCEQAEALLGWAGRWRQRTWAIEGARGLGQLLAQQLLAAGERVLDVPPKLTARVRLLESGQINKTDENDARAVAIAALRARQLPQLTVEDQTIVMRVWARRYHDLGRLRTQAVCRLHTVLCELVPGGVRKQLRTSQAIAVVDSITAESPVAQAKLELAHDLVADLQRLDAQRREVKRRVSRAVAAAPTSITEVYGVGPIVAACVLGYVRDIRRFPSRDRFASYNGTAPIEVSSGDRKIYRLSRRGNRQLNHAIHIAAVSQISHRGSEGHAYYQRKRAKGMTGKCALRALKRKISDTLYERMLHDIRPRKDPGGHSGNDAVSSAAGSHPDGPALRTSHSRATANSKTATTNQRPLTSPPAPDKRRTSRSGTGVKLQPRPRPRRGRGQERA

SEQ ID NO: 411036 - protein, 387 aa, unidentified
MYLVGIDIAKYKHTCFIATETGEVINDSFDFDNTSSGFDILLSALSSLKGEVRIGLEATGHYGMNLKLFLVNHKFTFLEFNPYIVSRFIKATTLRKTKTDKADAKFISLYLLSVDYNTYSSKSYQNYSLKSLTRFNESITKQHSRLLLDLTNILDLIFPEFKPFFGKKFTRTSVYLLNTYLTPDKMKNMNFKSFDKITTASKGRFKFSKFVTLKELAADTIGSTNELLTFQLSSILSLLNSIKNVKKEIDAKIFTIITELNPPLLSIPGVGIKSAAVICSEYGNFHNFSNSKKLLAFAGLDPAIYQSGESIKFGRMVKRGSSSLRQAIMNVTISVVRYNPIFYLYYHKKRNEGKAHRVALTHVARKLLRVIYHLEITNTKFDISKLV

SEQ ID NO: 411037 - protein, 388 aa, unidentified
MQTVADRPEAPTAIRTDLGAIFVSLELSRSTWLITSLSPGGGEKMSKQVVRGGDVAGLLERFARLREKARARTGKVFPFVVIQEAGLDGFWIDRALQNEGIESHVVDPASIATSRRRRRAKTDGIDGEVLVRALLAYKRGEPRVCAMIKAPTPEEEDRRRLCRERKVLIVERVRHVNRVKGLLFSQGISGYEPLRRDRRRRLDTLQTGDGRLLPVHLKAQVCRELDRLELLLEQIKAVEAERDVLLAAQQVAAPAPAAMLLDIKGIGPEFAAILWSEGLFRHFDNRRQVASYAGLAPTPWQSGSVDREQGVSKAGNPRLRTTLIQLAWLWLRHQPHSALALWFEERVRRNGGRLKKTTIVALARKLLVALWKYVTAGVVIEGAVMKRT

SEQ ID NO: 411038 - protein, 427 aa, unidentified
MERSIAVKKIKPKRIKAVNEKVLIATIDGGKDTHYGYYRCPDGTEGRSLLFWNNGRGFLEFWERISSAARTHGLEEIIVGFEPTGPYMEPLVQFLRSKKGVRLVQVNPMHTKRLKELSGNSPLKTDRKDPKVIADIIELGHALTVVVPEGPAAELRRLTQGRERTIASRTRLFNQLQCLLVISFPEFLQVMKDVKSASAQHLLRHYPTAQDIVALGDTSLAALLRKISRGKLREDRARALFDAANESVGVQEGRSSMLLEIELMLDTIDGYDRFIERLETEMVRYLEQVPYSRVILSLKGIGPVTTAGLIGEVGDFNKFGTISEVMKMAGLDLYEVSSGKHRGKLRISKRGRPLMRKLLYFAALSTVRKGGVMHEWYQRALGRGMKKIKALVAVSRKLLGIIYALVRDHSVYLENYTKQKPIFQEAA

SEQ ID NO: 411039 - protein, 393 aa, unidentified
MIYVGIDIAKNKHDCVILSDHATCLRPCFSLKNNSQGFALLINAIKEACGGDFNHGEVKAGLEATGHYAHNIVAFLNSNGIDTTIFNPFLVNQYRKSRSLRKTKTDKADAMLIAELLISTAANPATPSYHNQEMKTLCRYRFSLVKQRSKLKADMSRYVDLLFPELGSLGLNPTSSSVMAMLKELPGASYISICNISQLTDILSSSSRGRYGKETAEQVKAMAKESIATANKALSYIMSDTIEQICLLNKRIAKIDGELKNEVEKSGTKLTSIPGIGFCIASVILAEIGDINLFSSADKLQAFAGLDPSTFQSGNFTASHTHMVKRGSAYLRWAIMQGARLCSLNNLKYKQYLDKKIKEGKHYNSALGHLSKKLIRLIFHLLKENEEYDPKVA

SEQ ID NO: 411040 - protein, 339 aa, unidentified
MKCTAVGVDIAKNVFQLHYVDDETGEIVNKPVKRAAFLEHFANRTPCLIGMEACGGAQHWARALMRMGHQVRLMPAEFVKAFNIRNKNDAADARAIWLAVQQPSKEVAVKTEAQQAVLALHRMRQQLVKFRTMQINSLRGLLTEYGEVMSKSRAALDKAIPGVLARVAERLPAALIDTLREQWSGLTKLDEQISQIERRLRQWMKDDKAAKAIAEIPGVGVLTSTAAVATMGDAKAFKSGREFAAWIGIVPKQTGSGGKVNLHGISKRGDTYLRTLLIHGARSVLSHAKEPGPWVEQISKRRPANVVIVALANKMARMIWAILAHDRSYQKGYVSVKPA

SEQ ID NO: 411041 - protein, 341 aa, unidentified
MRYIGLDVHKDNITACVLTSTGKPKFEKNFIKNGESWDLSELMEYGDKDGFCVLMETGTYAYQPYRFFKDRGVDVDAVHAQALKVITQSDKKTDRKDAYTIARMLRLWKRGEIDLRIAYMPTREQCELKDLCRYREELSKKIGDETRRIKSQMSRNCQYLPESFENFQTIGSRKYVRANFSADFTLMRRMDHLERLFIERNAVKNEVESRLPDSREVELLMTVPGIARQTAVQIMSMIVDIDRFDDSEKLCAYFGMVPRVRDSGGKEHHGRMTKNGDKMMRAIMERVTESHVRNCDSSVTQYYRRKCSEMGTKKALITASRKMLSVIYAMLKSGSDFRLAA

SEQ ID NO: 411042 - protein, 350 aa, unidentified
MMTIKTEPIDVVIGVDTHKQTHTASIVDQLGAELACRTSRATVAGHAELLQFARTYSGGKRLWAIEGTGSYGRGLTTFLLAHDEDVVEIDRPARPARRNGAKSDALDATRAAREALSRQDLAEPRCSGDREALRVLLCTRKVAISAYKPAINHLKALVVTAPAALHDRLTGLGREALIKQCSRLRVSRTQDAEYGATVLALRSTARRACMLMAEAKSLMSEIEALVTRLAPRLLAEHGVGPITGGDILCAWSHRGRLRSEAAFAMLAGVAPIPASSGQVTRYRLNRGGDRQLNRALHTIVLTRLAHHDETKRYAERRKAEGKTSREIRRCLKRHLARRLFKLLESMPMPT

SEQ ID NO: 411043 - protein, 344 aa, unidentified
MKFTRCGLDIAKQVFQVHGVNEHGVVKGRKTLPRAKVLEFFAQLPPCLIGIEACGGAHYWGRELTKLGHTVKLMATRYVMVYRKRGKTDANDAEAICEAVGRPNMRFVAIKSMEQQAVLMVHRARTLAMANRTAQVNQIRGLLSEFGLVVPKGVARLRRELPFVLEDAENALPSLAREVLSGLLEQLRAADVRISAYDRQIRSLAEASEPARRLMRLESIGPQTATALVATVGNPHVFKNGRAFAAWLGITPRQHSSGGKQRLGHITHQGDSYLRTLLVHGARSYLRVVDKKTDAKSAWARRLKERRHVNVAAVALAAKHARIAWAILAHGTEYRAAGPQIAAA

SEQ ID NO: 411044 - protein, 325 aa, unidentified
MRQPQSQVKPQAQVGLDVSSQILDAHIRVDGKAFSVPNTDAGFDQLCEILSAYDVSMILMEATGGYEDNVACYLQLQGFDVVVINPRFARRFAQSMGKLAKTDRIDAAILAQMAFMIDSGPDRDRYIKPVTDEQRKKLSRMSSRRRQVVDLITIEKQRLTHADDYARESINEIISLLNSQLKRIESDILRYVKKNFSELANRLLSIPGVGSQAVTVLIADLAELGHVNRRRISALLGVAPFNHDSGKFKGQRRIRDGRQTVRNVLYMGVISATRFNPVIKAFYDSLLLRGKPRKVAIIACMHKLIRIINAMMRTGKSFDMSLHGV

SEQ ID NO: 411045 - protein, 378 aa, unidentified
MHKDSVYLCILRENGEKIERVYGVLTPQLDSMRDFMAENEVSEVAMESTSVYWIPIWRVLVDSFELKLVNPYFIKQLPGRKSDVKDAQWIAECVMKELIRGSFIPPPLIQQLRLYDRRIFELNAELVRKYSKIDAILQRCNIRLSNYVSNTDCKSYKNVVKRISEGVTSPQELLMLVHKRIINKHGEDTILAALTGVVSEAEIDMLAQYVAESALLEDNKNKCIEKMREICNREFEEQMKNLQTIPGVSKRSALTVLAEIGPDVNAFPSAKHLVSWCGFNPRNDESNKKIKSNKITHGNRFIRIASVQCAWAASRTKDCYFSKFYAFHTQVRKKFKLKVVVAVARKILVCIWHILKFNVSYKDFEPQKSVAKDCTQLA

SEQ ID NO: 411046 - protein, 327 aa, unidentified
MQTITTIGLDIAKSVFQLHGIDAAGNVMIRRQLKRRYVLAFFEKLPPSLVGIEACATSHHWSRELQALGHKVRLIPPAYVKPYVKRQKNDCTDAEAICEAVGRPHMRFVPTKTVEQQSGLVLHRTRSLLIRQQTSVINAIRAHLAEFGIVAPVGRNGLEALLKVVASEEDGRLPEIVRGCVAALALQLRALKAQILAFDRKMLEWHRWNELSKRLDEIPGVGPALATALVASIADPKAFRSGRDFSAWIGLVPKQHSSGGKPRLGGITKQGDRYLRSLFTAGALAVIRYAKIHAPSVGLGWRHSWRAGRRRSQRSRSPTRSRERLGR

SEQ ID NO: 411047 - protein, 470 aa, unidentified
MVDKQRKNKASRAKRVREASSELGPTLVHRDAAGIDIGARSHFVAVPNDRDEEAVREFQSFTGDLQRLADWLAKCGVKTVAMESTGVYWIPVYELLEERGFEVLLVCASHLRNVPGRKSDVLDCRWIQRLHSFGLLRASFRPAKDFVELRAYMRQRSRLVTDAARDVQHMQKSLMEMNLQLHHVLSDISGDTGMRIVRKIVAGEHDGRQLARLRDRRCKQPVEVIAAALQGTYKNEHLFTLTQALAAHDFHVKQLADCDARIVEKLAALEAAQRDSAEPRAALPPARPRCARGHQPRFEARSPLHRICNDVDLTQIPGIAPATALNLVAEIGTVMSKWPTEKHFTSWANLAPGTKITGSKSMSGKRGPAKNRAGLVLRQAAVSVGKTQTALGGFFRRIASHRGAIIAVVATARKLGALVFRALKYGQAFVEQGLADYEKQQEARKLRYLQKQAAQRGYALTPMPTAAEVT

SEQ ID NO: 411048 - protein, 348 aa, unidentified
MVVLGVDAHKRSHTVVATDELGRKLAEKTVASTSEGHLEALEWATRWPERSWAIEDCRHVTRRLESDLLVAGEAVVRVPTRLMAGARRAGRERGKSDPIDALAVARAALREPDLPVARLDGEARELRLLVDHRDDLVAERTRIQSRLRWHLHELFPDLQIPPKALRRHHVLNSLEAQLAGIEGTVARIARELVVRCRELTIQANELEREIGRMVKRLAPSLLAMDGCGVLSAAKMVGEVAGADRFRSKAAFARWNGTAPIPVWSGSPGPQRLNRGANRQVNAALHRIAITQWRGVGLQGRAYVERRMHSGNTKTEALRLLRRRLSHEVLRRLIADLPATWSDNLRAVA

SEQ ID NO: 411049 - protein, 324 aa, unidentified
MYLGLDVSKNTLDCCLNKDGFFYACKISNNQKGFEKLKAWLDGHGCDETLHCCCEAMGNYYEAAAEYLAAHYKMSVENPRKIKAYAVSELKRSKNDKQDAKTIAEFCEEKSRKLKTWKPKNQTEKELQSITRYIARLKQQKASEIVKRQTASDNIKDLIDETIDYLGRKIKEAEGRLKTYISQNPELKQKADNLTTIPGIGIQTAAIIMAALSGNNDFKTAKQFTAYLGLDPAEYKSGTSVKGKDRISKVGDCITRAALFSPALVAYRIGTFPRLVANMRQNGKHIMQILTAIMRKLAVVAYTLHKTNTTFEKQRHTRIQQKAA

SEQ ID NO: 411050 - protein, 308 aa, unidentified
MAKNFIGIDLSKARLDIHDPQTGKDSCCPNARTGLRRFVRGLAPDDIPVFEATSGCDRLLIEELTLGKRRFVRVNPLHAWHYAQSLNLPKTDRVDARMLARFGTERQPAPTPLRDPARDELAELTGRRDQLKRMETEEKNRLARTANPIAARDIRASIKTLARRIARFDAEIRACIAHNPELSETARLITSVPGIGPVVAAGLMAWMPELGTLDRRAVASLGGLAPKARESGMYKGHRRLGQGRCHVRKLLYMAALSLWRNPGVVGDMVPRMRERGKPNKVILIALARKILTFANAVLRDRKPFQSNA

SEQ ID NO: 411051 - protein, 359 aa, unidentified
MIVIGADTHKGTHALAAVDDGTGQVRGARQIAADDAGHLAALRWAVELDDERVWALEDCRHVSVRLEAALIAAGERVVRVPPRMMGASRRAERTPGKSDQIDALAVARAVVRDGVDRFPPAFLDEQAMEIRLLSDHRQDLVAERTRAQNRLRWHLVAVCPELERTLKRGGLESVRSLERIDRKLKRLPAGARVRVARDEVAQIRSLTRRVDALHHDLAALVTAHRPELLAETGCGPLTAAILIGRTAGAEHYRSDASFARQAGVAPIPASSGQRNQLRLDRGGDRQLNRALHMIAITRARHDPATKEYLARKHAEGKTKKGALRCLKRHLARRFHHLLRLPPRPEHSLAKTANTKLLLT

SEQ ID NO: 411052 - protein, 332 aa, unidentified
MKDNILGIDISKRKFDVALADEGTPIRRNFKGMARGVFENTPEGFRALLKWLEDRGIDDLHACMEATGSYGDALAMFLFDCGFKVSIVNPYQIACYARRKMCRTKTDRNDAAIIAGFCRAERPREWRPLRTEDSKLKALTSRLRDLEKMRQQEKNRIQTPGLDLEVKQSIRDMIDILDSKIEEILGRMREHVSSHEDLKIDKELLCSIPGIGEKTAMMLMGLIGDWDRFENGRQLAAWAGLVPSQRQSGDSVRGKSYLTSYGQAEVRRLFYMPALSAMRYNPVIMHLTIRLRAKNKNGKQIVVASMHKLLRIAYGVIKSGRPFDVEFYPQVY

SEQ ID NO: 411053 - protein, 458 aa, unidentified
MKRKGKRTKGMEEARPFEGMSKVNKNAAGVDIGATEIVACVSGGDDIQLVKTFGNYTVDLLAICEWFRQHDVKTVAMESTGVYWIPLFEELERQGFECLLISSRSLRKVAGQKTDVEDAQWIQTLHSYGLLKGSFRPQGDLVALRTLLRHRAQLLEHRAPHILHIQKALLQMNIQLSQAVTDVMGMTGQKIIRSIVKGERHARVLAGFRDPGCKHSEEEIEKALTGTWREEHLYVLKQSLELYDFYTEKVEACDEEVNRQYGMVRPDWVSRELPAIPDKKRNTHSKNAPKDAKAIREQLYRINGVDLSLVDGMGVSLAQTVTMEVGSNVGEKFATEKHFCAWLGLAPKHDITGGKVLSNRTLKTKNRAGQAFRLAANSVKKADCPFGVMYRRLRSRLGPAQATVATAHAIARVVYKMLKYKVEYDPLSVNEYQKKYEEQQVKYMRKRAAKFGYYLVPA

SEQ ID NO: 411054 - protein, 411 aa, unidentified
MRRVIGIDVHRTFGEVVIWEDGRLRHAGRIDMTRTALEGFGKTLLASDEVVVEATGNSMAVSRVLAPFVARVIIANPLQVKAIAQAHVKTDKIDAGTLASLQAAGYLPQIWTPDAETERKRRLVARRYQVVRHRTRLKNEVHSILHAHLIPKCPHADLFNGRGRAWLVAQPLPDDERAAIDRHVRELDRLAEDLALLDREIAQDAIDDSAVNRLMTITGVNLAVAAGIMAAIGDISRFNSPQKLVSYFGLNPRVRQSGLGAAHHGRISKIGRSHARAMLVEAAWAAAKAPGPLHAFFVRIRARRGHQIAAVAVARKLTVLCWHLLTKGEDYLWARPALVAIKTRAMQLQAGHPQQKGRRRGPAYAYNIKALRDREMLIAAQAEQSYERLVTQWKPRRPKTGARAPQLGKTK

SEQ ID NO: 411055 - protein, 355 aa, unidentified
MDNLRYIGLDVHRDTISAAVLDRDGKLIMQSVLPTRAAAILDFLHGIKGTLHVTFEEGIHSAWLYDLLQRRVARLVVCDPRKTALLKSGNKGDLIDARKLAELLRNNSLSSVYHGERSALEVQHRARSYTMLTVDTTRIMSRLKAVFRGQAVSCHGKSVFRPDHRESYLAQLPTTGLRQRAELLYQELDAVHLLRLRAKREMLAECRKHPAMKWLQSVPFLGKVRTAVLIGRVQTPHRFRTKRQFWSYCGLALETYDSAQYHVVHGQVQRKPRPVQVRGLNWNHNHDLKGVFKSAATMAAHREGVFREFYTDLLAKGMRPEMARLTLARKIAAITLKIWKEGETFNAEYVKPQAA

SEQ ID NO: 411056 - protein, 341 aa, unidentified
MNNITIGLDIAKSTFHLVQMDKNGKLLKRKQLARKKVADYFANLAPCIVVMEACGSTHYWTRVLIRCGHVVKAIAPQFVTPYRKGNKNDYNDAEAIAEASQRKNMRFVPLKSLEQQDIQMVHRVRERLMKNRTALSNQIRGLLAEYGLVIPKGVHHLKSQLPAFIEAADNELSVNARRYFNGLYEELNKLEQEIKVVDKEILSICNQHNICKQLSTMNGIGPINATALYAGIGDGKDFNSGRHLSAWLGLVLRQHSTGGKANLMGISKRGNTYLRTQLINGARSALRHCDNKTDRVSLWAKAMKGRSSFNNATVALANKMARMAWAMLHHQENYKFSNTQK

SEQ ID NO: 411057 - protein, 312 aa, unidentified
MTNKPCVGIDVSKKFLDVYVEGDQESTRVANNPEGIAQLVEQMKMVEPKLIAMEATGGYERRAAKAFSEAGFPVAIVNPTRVRRFAQAIGVLAKTDKIDAKMIARYARVADPEPNYRQDPILEQLAACTERRRQLVTQLTAEKNRLSTTPDCVLEDVQEHIDFLVRKIEAIEANIQSLISQQPELRAKAEIIDSIPGIGIVTASTLVAEFPELGTINRQKIAALAGLAPFNKDSGAKKGKRKIFGGRAAIRAPLYMAAMSAAKHNPVIKPFYQSLIKRGKLEKVAFTACMRKLLVIANALVRKGEAWQFSPQ

SEQ ID NO: 411058 - protein, 479 aa, unidentified
MTAKNKDAKTDTDGKSAGAAAEHGGDGAEVAEDRVQVVTYAAAIDVAKGFGMVCTRVPGSRPDRRRQKVWRVEATCAEVTALMDHLRCEGIQRLVLESTSDYWRIWYYLAEAAGLEVWLVNARDVKHLPGRGKSDRADCVWHCKLNERGMLRRSFVPPEPVRDLRALTRTRARLAQDQVRHQNRVEKILEDALLKISVVISDLFGASGRRFLDALVAGERSPKALAALGDTRLKATRQELEDALTGRFRDIHAFEISTHLRLIDAINDEITRLDEKIEQQLALVPRTAPACTACGLAGGGHAPGCADQEVPLLGLAGRLDEITGIGECNAAVVIAELGTDPSTFPTPGHAAAWARLTPRTMQSGETARPGRTGKGNRYIRGALGQAAMTAAKTDTRLGAMYRRIARKRGKQKAIVAVSRIICEIAWILICDPGARYQELGPDYYSPRSPARQTRDKIRDIERLNPGKKVILVDAGPEAA

SEQ ID NO: 411059 - protein, 330 aa, unidentified
MKQYDHVFGVDVSKRTVDITHVHNQQLAHRQFTNDDTGMEQLLEWLKELTPAFDKTLFCMEATGLYCFPLTRFLAGHSIDIWIEHAAQIKKATALTRGKNDKVDSQRIALYATKNLDRLRLWKPVNATLEKIRHLASLRDRLVETKKKLVTPIKEFEDVGDVVMAKLLTKTIKSSLTAIDKDLKNIESKIIDIINEDDNLKFLYKLITSVVGIGFVTAINLLVHTNGFTMLKDARKLACYCGVAPFEYSSGSSVRGKTKVHYMANKKLKCNLHMASLTAVKLDADLKAYYERKVAEGKNKMSVLNAVKNKLLARVVAVVNKQQEYVKKVA

SEQ ID NO: 411060 - protein, 412 aa, unidentified
MEILYQSCCGLDVHKKMIVACLRRTDEAGKVGKQIRTFATTTSELLSLSDWLVEAGCTHVAMEATGVYWKPVYNILEGQMELLVVNAHHIKAVPGRKTDVKDAEWIVELLQHGLLKASFIPPQSQRDLRDLTRYRTTLVRERARIVNRLQKVLEDANLKLAGVATDVMGVSGRAMLEALLAGQTDTAQLAELAKGRLRKKIPQLKEALTGRVREHHRFMLSEQLSHIDYLDEAIERLTAEIGERLRPFEEEIRLLDTLPGVNRQTAEELIAEIGTDMSRFPDGHHLASWAGMCPGHNESGGKRKSGKTRKGNRWLRSTLVEAAHGAAHTKDTYLASQYHRLVGRRGKKRALVAVGHSLLVISHYVLKRRQAYYDLGSNYFEELHRQRMERNLVKRLENLGYKVTLEALSPAA

SEQ ID NO: 411061 - protein, 441 aa, unidentified
MRIFIVNKKECCIRATFLLSLLGFKPVQHSGETICNDPQVCRIVDLPVYYELETNNGNRDYRIQIGGHYMNYNTVYVGMDVHKESFTLCSCKYEDEKASHYQRTPASYKNVLRYLAFLRTIYGEDTRFVCGYEAGCLGYSLYHQLENFNVECVILAPTTMLEQRSKRRIKTDKRDAEIIARSLAQHNYSPVHIPTETDNQTKEFIRMRDDHKAELKKIKQQILSFCLRQGYQYDGSGNWTAKHVKWLRSLKPAGLYKEILDEYLLTYTILTDKLNRLDQRIEELASKEEYKESVSKLTCFLGIKTHTALSVIVEVGDFQRFVSARKFAGYLGLVPGQHSSGDDRNGLGITKAGNTHVRRLLVESAQSYTRGKIGYKSRVLRSRQAGNSPQVINYADRANERLRRRYYKMVLKDGKKYNIAKTAIARELACFIWGMMTDNIY

SEQ ID NO: 411062 - protein, 387 aa, unidentified
MQIADRSEAPTAIRTDLGAIFVSLELSRSTWLITSLSPGSGEKMSKHSVRGGDIAALLKRFTQLQEKTQARTGKSFEIIVIQEAGLDGFWIHRVLQSKGIDSHIVDPASIATSRRRRRAKTDRIDGEALVRALLAYKRGEPRVCAMVKVPTPEEEDRRRLCRERKVLIAEQIEHVNRLKGLLFSQGISGYEPLRRNRWTRLEELQTGDGRPLPKHLTAQIRRELNRLELLLEQIKAVEVERDALLAAEETSAPAPAAILLNIRGIGPEFAAVLWSEGLFRHFDNRRQVAAYAGLAPTPWQSGAVDREQGVSKSGNPRLRTTLIQLAWLWVRHQPRSALTLWFEARVKRNGGRLKKTTIVALARKLLVALWKYVTAGVFIEGAAMKVA

SEQ ID NO: 411063 - protein, 338 aa, unidentified
MFSQLIIGCDISKDHINFCVFLNGTVIQNIQIDNDLKSLRCFVKRASSFSNDLALDVDPADPIFIMEFTGIYNNLLLEVLHNQSKTCYVVNAVEIKNSLGLTRGKNDIVDAQRIAEYAYRFHDKLSIWAPLEANILKLNGLRTHRSQLIKVRKQLTQGAQDNKKFLGSDVFKVIDKSNSKIEKILNEQIDAVDEKILETIKADLKLKTNYDLLTSVPGIGPITASALICVTKNFTRFDSAKKLSCYCGVVPFEKSSGNKIGKPHLSHAANKDLKALLHLGAGSILNSKHFLGQYYRRLVADGKHKSLARNNLKNKMLTTAFACVKKQIPFQIDYQYSA

SEQ ID NO: 411064 - protein, 388 aa, unidentified
MSLQDHQGQEQSAIRTDLGAIFVSMELSRSAWLITSLSPGAGEKMSRHSVVAGDVAGLLERFALLRRKAEVRVGRAFPILVIQEAGLDGFWIHRVLQAEGIESHVVDAASILTSRRRRRAKTDRIDGETLVRTLMAYKRGEPRVCSMARPPTPEQEDRRRVCRERKTLVAERVEHVNRIKGLLFAQGVFDYEPLRRGRRARLEELRTGDGRCLPAHLKAQISRELDRLEILLTQLAAVEAERDALLEPASDEAASPSAMLARLKGIGPEFAAVLWSEGLFRHFDNRRQLAAYAGLAPTPWKSGSIDHEQGVSKAGNPRLRTTMVQLAWLWLRHQPASALSLWFHERVQRLGGRMRKTTIVALARKLLVALWKYTSAGVVIEGAVMKTA

SEQ ID NO: 411065 - protein, 409 aa, unidentified
MRYYLGVDWADQTHAVWVVDEGGTKVTMRTVPHTAEGLSEWGRELDEWRAQGTELWAAIERPEGRVVDFLLDHGVVVYAVNPKALDRARDRFRQSGAKSDPFDARVLADFLRTDHAQLHALRPSSEAAQELKLLTDDYQRQIRQQTRLVNQLTTTLKAYYPRGLEMAELPTALAREFLQAYPTPETLTALTERQWQRWARAHRLSEARTRELWAVLQRPQLPVPAHVVRAKARLMQSLVAQLTVVVEVVGVYREAIEDFFARIPAAQWIRTLPIGDHGITAPTLWARLGDAPGRWESFRHLQAQAGTVPVTIRSGKQQVVRFRFACDKSLRYVIDHVAFLSLRWSEWARAYYDAHRARGHSYRQALRALSAKWLKIIFVMWERQVPYDEQYHLATMTRQQLRLRQKHIA

SEQ ID NO: 411066 - protein, 485 aa, unidentified
MKKNIYGDRSQLVAKCFSGGGDPREILVVAMDLAKSEHTALFCRGDGEYLLSRPLRVFNTPEGVEYLVGKVESTRQSRGIAKERVLIGGEDPGQYTFNFIYQLGLRGFPFIRVNAAEASTLRNNTRASTDFLDLDGIAQAIVQQRGRTMDAFDRIYRPMKSAARARRRLVSQETACKNRIHRDVEILFPGFLSETDTGIVPFTGSCLALLEDGFSSIKIKRMRDETLVKLLRRHHTHKPEEAAARVKALAGRVLPPPPDIVDYQSGSLATKVRMLRTVREALATEENEMARGLVQTPGFYLTTMPGMGVVLSGHIVAEFGAPTQWRAADNMVSYAGIVPRVKGTGGPSKAPVVGHLPMDANHTLKDYLLQGAHHVATTGEHRLQKHFQRVENHQGRSRLSTAKMLVRIGRQMVLGEMPYLPLEMLRPQLPLPAEYVHTFFAELTQKLTKKWGEYDLSGIPESENYLVKWEAKVNELTQLLLNRKS

SEQ ID NO: 411067 - protein, 444 aa, unidentified
MVTLVRSVMERTLHVQEVIPVKKSRAYRATRVKDVRWEKVLAGRERQAVHVGLDVSKEDVLVATRWGANDFERPWRADNPLEIARLVESLGQLGRDRAMVVALEPTGTYGDPLRQALADAGVAVHRVSPKASHDYAEVFDGVPSQHDGKDAAIVAELAALGKSSPWPFRRDPWDQELAYWVDWMEVERRSLVIWCGRLEGLLARHWPEATRLLPLNGGVLLRSLAKYGCPAALAADAAAAERLRRWGRGHVSAEKADAIVAAARCSVGVRAGEMEVRRLRQFAEQALAARRELTRSQRELKRLAADHAVIQGQGAAVGVVTACVLWAHLGDPRQYDSGPAYRKAMGLNLGERSSGKWQGRLMLTKRGPSAVRRWLYFAALRLVKQAGVKEWYEAKRAKRPDDGSEVMRALVGVMRRLALALYQVGACGARFDAAQLFPGTRSLA

SEQ ID NO: 411068 - protein, 457 aa, unidentified
MSKGSGMTRGDRKRNARRERLRGLLPRDGAVVGIDLAEDKQALAVIDHDVRVLARKTVKVKAFRLGEALDWAVAQARVKGFAHVTVACEPTGPRWMQVQRLCAERGLPLVCIQPLISHIAREQQDYTPHKSDESDCVMIARLATELHCYLPEELDETWAQLRHLGRRRAQLITAATASAHRIRDFLSVAWPVVTETCAKPLLSRTWLAALQVVTARCGGDPARLTAIGEDAFTAAVRAAVQDWGGKKAWGPISRRIFAALTDTEGVIVSSRRGLLRRCADELGDLQRTRAQLQAVEADMVAVLDELGLSRLGHIPALTAVGAAAILAETGDPHRYDSSSSLVKHAGLSPSDNASGAFTGQAHISRRGRPGLRLTVWRAVWPMLQFNPVMAAKYQAMTSAADDQAGAAAARARRAKARVACAASLLRWIYSMVVHGTSWDPAVASGGQHDHRDQAEAA

SEQ ID NO: 411069 - protein, 325 aa, unidentified
MSKYIGIDVSKKVFDVAFLKNNKTWFYKTLFNEEEGFRELTLLISKDDVVVMEASGPYHLRLALFLTKSGYKVSVVNPLIIKRYSQMLMLRAKTDKKDAKTISEYGSFTKPSLWEPKGKLLMEIQEMYTSLNLFRKQLTMLTNQFKAFESSGIFNHFLKKELKQHKSVLENRIKRIESGIEALIQSEYGELVKRLRTIPGIGVKTSTFLIVVTNAFENFSNYKELISYLGLSPRIYESGSSVRGKGHIAKLGNSQVRKMLYMCSWTAKSCNLKCAEMYDRLNEKGKPERVIKIAIVNKLLKQIFAIAKSGKNYNENYISTLKRVA

SEQ ID NO: 411070 - protein, 359 aa, unidentified
MKHEMHVLGIDIAKRVFHAVGMDDRGKIVYRKRLSRHDLMPFIAKLPPVLIGIEACGGAHYWARRFRAYGHEVKLMAPQFVKPYVKSNKNDSRDAEAIAEAVTRPTMRFVPIKDVDQQDIQALHRVRERLIGERTALVNEVHGLMQEYGIVMPKGVAKFRQAVVGKLEAEKDKLTPLSQEMLWKLVEEFATLEAQLAYDQEKLDTLAQTHPACQRLMTIPGIGPLTATALVAAVSDASAFKNGRQFAAWLGLVPRQHTTGGKERVLGISKRGDTSLRKLLVHGARATIRWVGSKTDRRSQWIRHLLERRGKNRTAVAVANKNARIVWALLTSHEDYQPATSSGEQTRVSAAAKGLWVSM

SEQ ID NO: 411071 - protein, 314 aa, unidentified
MSHLFVGVDVSKDRLDVAAHPEASSWSVPNDEAGIEDLVNRLGDLRPVCIVLEATGGLEMPALTALAVAGLPAVAVNPRQTRHFAKAAGLLAKTDRIDATVLARFAEAMKPEIRPILDAPAQELRALTVRRRQLTEMLTAEKNRRSMAPKRMVKEIDKHIAWLDRSLSRINDDLQKTIRNSPVWREKDDLLQSAKGIGPKTSAVLIAELPELGRLDRWEIAKLVGVAPMNCDSGRYRGQRHIQGGRASLRCALYMATLTAIRFNPAIAAFYQRLMAAGKLFKVAMTACMRKLLVRLNAMLRDRSPWQEKAPQTP

SEQ ID NO: 411072 - protein, 459 aa, unidentified
MRKARMKVKSTVRVGKKRSTLLEQINFNAAGIDVGSREHWVAVPADRDSQPVRSFGTFTSDLHALADWLLQCGVQSVAMESTGVYWIPVFQILEGRGLEVLLVNARHVKNVSGRKSDVSDCQWLQQLHSYGLLAGSFRPEGQVCVLRSYLRHREHLVQQASTQIQLMQKALTQMNVQLHHVLSDVTGVTGMAILDAIVDGERDPLKLAELKDPRVRSSVETIAKALTGDYRPEHLFVLKQARESYRFLQAQIAQCDVEVDTVLSGWEAKVDLEQQPLPPTRKKNRSQSKHKPLPFNLREQLYRVTGVDLTEVDGLDVLSVQALISEIGLNMHRWPSEKHFASWLGLCPDHRISGGQILKHKTRAVTNRAADVLRMAAQSLKDSRSALGAFFRRLKARLGPAKAITATAHKLARIVYLLLKYGHHYVDPGAQYYEQRYRDNVLKNLRKRAAAHPCSELGT

SEQ ID NO: 411073 - protein, 423 aa, unidentified
MTKLTSTPAGAVLVAIDMSKNRQEVLIERPEGGRRRRMTVMATKEDYDGFVEQLAAIGRPIIVGFEATGNYHRTLAHRLLTAGFELRLISSVALARTREALHNGWDKNDPKDAQVILHMLRIGATQRYVDPLAAGINDLQELSKTHETISRMKTQTWHRILTHYLPLYFPEIARFAGNSRSDWFLALIERFPTPATITALDREAFSAAAWPLIGRKVSKARLINDIYETAFASTALSVPEDSAAVTMFRMVIAQGRSLIHQRDEIERLAHARLADDVDYQLLRNIPGIGPINALTILAEAGDLRRFNHHRQFLKFCGLDLATCQSGTFRGRTRLSKYGNARLRRTFWMAAQVAARQRDNSFRDKLGRYIAGHADDADRRRKAMTALTAKMARVAHAVIKTGTEYRPFLERSDARWKDPSLQVP

SEQ ID NO: 411074 - protein, 320 aa, unidentified
MAVLGIDVSKADFHAVLLAGTDRSRRSFPNGPAGFRAVRKWLINRKVTEVHACMEATGAYWLELARSLHAGGIRVSVVNPTRTALFARSQLRRTKTDAVDAQMIAEFCATQRPEAWTPPATEILVLRGFLSYRQQLVEQRVALEQLVSQVEVDASLERLHRDHIAVLRDAISTLEEQIARHVQAHHELREAVERVQSIPGFGALTAAAVVAKLPVDRLRNAKAAAAYVGLSPSERQSGSSIRGIPRICKTGNGDLRRDLYMPALVAMRFNPALRSFAERLKSRGKPAKVVIVAIMRKLIVLAYTLLKDGSTFTAQETAHA

SEQ ID NO: 411075 - protein, 457 aa, unidentified
MRKKNKRTPGVEEAHPFSGMSRIHAYAAGVDIGAIEIIACVPGDENTQIVKAFGNYTVDLQALAQWMKSYRIQTVAMESTGVYWIPLFEELERQGFECLLISSRSLRRVAGRKSDISDAQWIQTLHTYGLLEGSFRPQGDLVALRTLLRHRSQLVEHRSPHIQHMQKALLQMNVQLSQAVTDVTGMTGLKIIRAILAGEREPQALAALREAGCKKSAEEIGKALTGTWREEHLFVLKQSVLLYDFYTEQIQACDEEIERLYGLTRPDWETGEVEPFTRRKKNSRSKNLPQHPEEIRKHLKRISGVDLSVVDGFGVSLAQTVIMEVGTDMSRFPDEKHFCSWLGLAPKHEISGGKVLKNNTLKTRNRAGQAFRMAAQSVKQAECVFGVFYRRLKARLGPSQATVATAHAIARVVYRMLKYQVEYEPLSLNEYQRQYEAQQIKYIKKRAAKFGFQLIPT

SEQ ID NO: 411076 - protein, 353 aa, unidentified
MKTYYVGMDVHNATIRIAALNGAGKVVMESTIETGAERVRGFLKQLRGKVYVTFEEGTQANWLHDVVRGLVTEVVVCDPRHNKLLQSGNKNDQVDALKLAELLRNRSLKAVYHGDNGVRTLKELVRNYDCLVGDTTRVMNRLKAIFRGRAIACAGHEIYRQDRRKQWLEKLSESGAKQRADFLYEQLAALKPLRHRAKLVMVKEARRQAAYPWLLSVPQLGAVSVAQLIAVVGTPYRFRSKRQFWTYVGLAVVTCSSADHEVVNGVLRRSTRPQATRGLNRNHNHLLKRVFKNAATSACHSGPFQAGYDARVKRGMAPSLARLTIARQLAATTLTIWKRGEQFSPERMKQQAT

SEQ ID NO: 411077 - protein, 342 aa, unidentified
MQITTIGLDIAKNVFQVHGIDAAEKVVVRKQLRRSQVLAFFKALPPCLIGMEACATAHYWARELTKLGHQVRLMPPKDVKAYVKRNKNDAADAEAICEAVRRPTMRFVQIKSVEQQGRLMLHRVRDLLMRQRTQVINALRAHLAELGIVAAQGREGIKELLKIIASEEDASLPVDAHASLVVLAAELQAMQTMIGSIDKRIMAQHCSNEASQRLESIPGIGVTGATAIAATVPDPKIFRSGRDFAAWIGLVPRQDSTGGKHKLGPISKRGDRYLRRILVVGACAVLRYARQRPQKYPWLTQLLARKPFKVVAVALANKMARIAWALLARGGTYRAPMLVAAA

SEQ ID NO: 411078 - protein, 339 aa, unidentified
MKLTPVGIDIAKRVFQVHYVDAETGEIVNRQIKRAKFLEHFVNRAPCLIGMEACGGSQHWARQLTKLGHEVKLMPAGFVKAFNIRNKSDAADARAIWLAVQQPGKAVAVKSEAQQAVLALHRMRQQLVKFRTMQINSLRGLLAEYGEVMGKGRAALDKAIPAVLAGITDRLPMVLIDTLREQWNGLTKLDDQIAVIERRLRQWMLEDKAVKAITAIPGVGVLTATAAVATMGDAKSFRSGREFAAWIGLVPKQTGSGGKVTLLGISRRGDTYLRTLLIHGARSVLYHAKEPSSWVEQISKRRPPNVVIVALANKMARTIWALLIHNRPYQKDYVSVKPA

SEQ ID NO: 411079 - protein, 303 aa, unidentified
MQQITTIGLDLAKSVFQVHGIDHEGEAVLRKKLRRGQVLKFFATLPPCLVGMEACGSAHHWARELSAQGHQVRLIPPHYVRPFLTTNKHDAADAEAIAEALVRPTMRFAPIKSIDQQAVLMLHRSRELLVKQRTMLINAVRGHCSELGMIASQGASRVNDFIVLIEDPDDTRLPAFAREALGVLIAQLHAVKEAIRTLERKLQAWPRSQQASQRLTTIPGVGVITATALVATIGDGSQFKSGRHLSAWLGLVPRQHSSGGKSRLGRISKRGDGYIRRLLVHGSRAVLRWQRGAPKQPSPWIGA

SEQ ID NO: 411080 - protein, 315 aa, unidentified
MNQAPEVFVGIDVAKRHLDVCLLPERRSFQIPYGDQGLEDLLSQMRRLKPTLIVVEATGGYERRLSAELLEAGLSLAVVNPARVRHLAKGHGTLAKNDRIDAFNLALFAQIVRPVPRQRTSQKQKELNDLVARRRQLVEMVVMEGNRLEQLADGCVKQSVQKIMALLQQQRQEIDNQIAEHLRSDDEWNGKVQLLSSVPGVGPVTAATLVAELPELGELNRRAIASLAGLAPFDHDSGRWHGRRFIRGGRKSVRVALHMATLAATRCNPLIKSFYQRLIAGGKSFRCAMVACARKLLILLNSLVKENRHWTPLPG

SEQ ID NO: 411081 - protein, 338 aa, unidentified
MTNFVSFVGVDLASASFMACVGTMPWKVTVKPVKFENEEDGFVSFLGWLKDHNLQAKNTVVCMEATGVYGEGLAYFLYASGYTVAVEPPLNIQRKFPVNASKTDELDCQYIAEYACRYADKLSLWKPRAEVLEQVKLLLTTRQHFSVQLTGHKNALHAVNRKKVSVELAKQVHQNMVEQIAKSIKAIDQEIRRLIESDPTFKQTLLLLLSVPGIGLQLAAHLLIAMQETLDPKVLAAFIGICPIKHESGTSVYSTPTSRHYGPPVIRKLLYLGACSVRTHKKQFQLYFFRKVAEGKHKKVALNNIENKILKIACAVVRSQTPYIPNYVSVNPLALKKA

SEQ ID NO: 411082 - protein, 383 aa, unidentified
MRHGGILIEANDSEGETMKKHTTNNQSLSADVSACSTVAVDLAKRVFQVAGEDALGQVIFEERIKSREAFQVFLRELPPSVTVLVETGPGAQAWARLLQMQGNPVRILPAQLVASHRSGPKNDRNDALAILRAGRDCKISAVPIKSAAAMAMQALHRARQGYVRRRTAVGNQMRGLLLEHGVAMAQGEIAISQLVPRILEDATQPLPDLLRELIAELLGEWDQMGDRVNVLTGRLEMAAKEDETAKRLMTVRGVGPIIATALIAKQTEPERFANARLFAAYFGLVPSQHSSGEKTRLGKMSKQGDAYLRSLTIQGAHAVLRQLRPDSQQPDDQRLQRWINRLGRKEAAVRLANRNLRILWVLLQNDQTYRRQPGNGQEATMSH

SEQ ID NO: 411083 - protein, 356 aa, unidentified
MSHEVKYIGMDVHKEAIVIAVLNVSGKLVMETIVETKASSILQFIHGLRGELHVTWEEGTWAAWLYDLLQPQVQEVVVCNPRRNALLKEGSKSDKVDARKLADLLRTGMLRPVYHGENGLRTLRELARSYQTISKDLTRVMNRLKAVYRGWGIPCGGTQVYAPRYREEWLNKLPQAGVRRRAELLYQQRDGLQALRREVRGEFLAESRKQKATKLLRKIPCIGPIRAGLLIALMQTPHRFRSKRQLWTYSGLGVETHDSAQYRFVRGLLQRSKKPQQLRGLNRNHNHAMKEIFKGAATRASCATGPFRDFYAALLANGMKPEMARLTLARKIAAITLTLWKKEERFDAEQLKTQAA

SEQ ID NO: 411084 - protein, 387 aa, unidentified
MSPTIAARRPAAVDYERTLILSIEVSNKNWVLAAQVPGLPHTKAKRTVDPEAEALMAAIAGYRSRAAAMGRSIERVIAVYEAGWSGFWLARWLTRHQVEVYVIQPSSVPVDRRMRRAKSDGIDAELLLRTLLAWLRGEPRVCSMVPVPDEADEDARRCIRERTELISERVGLTNRIGAVLATLGVTDYNPLLRNRHHRLAELRTGLGEPLPPNAHAKIARLLARLELVLAQIAELERERDAVVETETPDHASKMIQQLISLRGIGVQSATVLVREAFVRRFANGKALGSYAGLTSSPYSSGGIDREQGIGKGGNRRLRTVMVELAWLWTRYQPAAAQVCWFRERVGSTGRRVRKIMVVALARKLLIALWRFVIDGVVPEGAVLKPAA

SEQ ID NO: 411085 - protein, 392 aa, unidentified
MIFVGIDVAKNKHDCFITNTDGESLFNSFTITNNLDGFNDLYQKISSVTENITKVKVGLEATGHYSYNLLGYLLDKGFPTYVINPLHTNLYRKSLSLRQTKTDKVDARTIASMLMSDVNLKSYSDTSYHNEELKSLTRYRFDKVKERSALKVSISRLVCILFPELENLVPTLHMTSVYSLLYEFPGASFVASAHLTRLANLLSKASKGHYNKDTAVLFRQTARDSIGSVMPAKSLELKHTIKLIQELTSEIDEIEAAIKQIMDEEIKSPILTIPGISYRMGAMIIAEIGDFNRFDSADKILAYAGMSPSTHQSGQLDNCHSRMEKRGSRYLRYALYNATKYVCHWDKSFGAYLEKKRSEGKHYNVALSHAAKKLVRTIFAMERSGQSYIASV

SEQ ID NO: 411086 - protein, 339 aa, unidentified
MKLYTSFDLHSNNSFLGIKDENGKPVFRKKLPNEPERILNALRPYKNDIAGIVVESTYNWYWLVDLLKKEGYNVHLANTSAIQKYSGMKHTDDQDDAFWLCEMLRLNILPEGYIYPSEDRPIRDLLRKRMHLVHLRTSLIVSLQNILTRNNGFRLKTSDVKALKEDRVAPYLSDNEDLALAGSVSKKTIDFLTELINEIERVVLAKVKLKAPFTRLLTVFGIGKILALTIMLETGPITRFAKVGNYVSYCRKVASKWLSNEKIKGKGNKKSGNKYLAWAYSEAANCAVRSYTPARAYYQRKLQKSNMMVAYNAIAHKLARAAYYVIRDDVNFKPEKIFS

SEQ ID NO: 411087 - protein, 431 aa, unidentified
MLKINPLSTLYVGIDVSSKSNYVCALDFFKNKYINSSFANNQPGAEELALKILECLNQHPDLTMVVAALESTSVYSIHIANYLSSCEELMRFKPYVFVLNPKCTANYKKSYIGLGKSDPIDAFVIADYARAGNIESEPWRGSQFLALKRLTRHRLHLVECMTREKTYLISNLYLKFSELQMLEGDDQPFCDIYGATSSSVLMEYLSPEEILASSEEDLIAFLAEKSRNRIKDISKTADLLKKAARDSYRLDKALYEPLNVSIASSFNCIETFKREIKVIDNAIEKEIKGLNPNAFIILQSIDGIGPVFAGGIIAEIGDITAFHSSDALAKYAGLTWKSNQSGDFDGEDTPMIKAGNRYLRYYLGGAANRMRKHNVEYGAYYRKKYNEVPKHQHKRALALTSRKFVRLVYGLLARNQLYSGVSLDTSIKDSN

SEQ ID NO: 411088 - protein, 405 aa, unidentified
MPYILALDVSMGHSYSVLYKDDTCLFEDEIEHTQRGFHALLEEIQHLPERPLIVFEATGIYSRPVEKFFQDHHFSYCLLNPLEAKKQMEENTLCSWKTDKSDAHRLAQTHLKNQRQPKEVQSNFYLEMRDLARFYQEIEKKITRLRMDLHNCLQLTFPELEQFFLNRLTPYALILIRLFPHPDFVLASTRTKIKNKLINETRKKISANRAEQKADQIIHYAQCAYPAVEKDSIHCQKTIYYAELLQDLLEQKEALATQMIKKAEGSPCFLLYQTFPGIGALTAALLLGELGDITRFKTHKQLNAFVGIDIRRYHSGKYTGQDRINKRGNPKARKIIFFTIRNMIRQQRAAPNHIVDYYYKLKKQPIPKKDKVATVACMNKLLKCMHAMVRAHTEYDYAYAVSVDH

SEQ ID NO: 411089 - protein, 370 aa, unidentified
MLDTTTFIGLDVHARSIKAVSLDVMTGEVRAATFGYDAGAVAEWVRSVDPRARCVYESGVTGFDLQKRLSGLGVDCVVGAVSKMIKPSADRRRKNDRNDAEFLARMLSVGNVVEVWVPDDECEAARDLTRALEDARDDLSRSKQRLSKFLLRHGLAFDERTPTGRRKGNWTRAHWSWIESIRFAERADNDVLAYYVDAVRRAAEEKARLEGLVEAEARKPRWRKRVDSLRCLKGVDTASAADLVFEAGEFSRFRNARSFASWVGLTPSEHSSGESDRRGAITKAGNKHLRKTLVEAAWHYLTCSGRPKDLARGQAPDRGARRHAAKGVRRLVERREALLARGVHGNKANVATARELACWVWAVGLMAEEA

SEQ ID NO: 411090 - protein, 357 aa, unidentified
MGYVGVDIGKDACFATMITSTGRVRGRLEFANRPEGFAELVAKLKARDKLVMEAGTYIYPLHDHLRRRGFKVLVGHPRAIRQITESDKKTDKHDSEVLAQLARVGYLPPAYVPHPDILRSREILRSRLDMAHQTTRVKTRIRSFLARQGLEPPEDVFLRDRAWLRQAHWQDSRDLVLGVMADELDALEARRAKVDAVLATLAVDSPEVKLLMTIPGINYYLALLIVCEVGDITRFPTRETLRTYAGCAPRMRQSAGRNPAQGTNRNASPRLKRAFSLAAQTAVGLEGPIQDAFNKRERKTKSKARAHAVARRKMCDLVYAILRSGEPCRWATPAAIERKQRELEVMKDRAERLPPPT

SEQ ID NO: 411091 - protein, 426 aa, unidentified
MEVIYPKVCGVDVHKSFIVAVICDSTSITPKYYKKRFSTFNNDLVKFRNWLIDNDCQNVCMESTGKYYIPVYNALEAFIPNVVVANPKWVAVIKGEKDDNKDAKWIADLFKLGIVRSSFIPPKDFRILREYTRYLYKLTCNRTSEKNRFTNALTVGNCKLDLVFSDIFGKSSQAIVDTILDNDSFSDEDIINCLRKNCKSSREDILSAISGISFTYEQKLRIKLVKDHIGYLTNEINNLRDIINKIIAPYEEYINLLMTIPGIDRNSAITILSEIGIDMSQFSSHYKLASWAGLAPGCNESAGKKKSVKISRAGVYLKPCLVEVAHCAVKDKTNTYYANKFNKISKRRGKKRAYIAIARKILVAIYHMLLTGEVWNPRDLANNETSDKDRLKYTKNNFKQSLKQLLSLGLTSDELINLVNQNAKIE

SEQ ID NO: 411092 - protein, 357 aa, unidentified
MNYVGIDIHKRYSVLTAMDGRGRKLGQARIEGNSASGFAQNLKGLKGRSKVVIEACWNWGKVYDTLEGIPEVAEVILAHPFKTRLIAEAQIKTDKVDSEALATLLRGNLVARAHVPCKETRHRKDALRQRLYWARMRTRIRNRTHALLDRQHELALPQCSDLFGVKGMHALKELRLPEPDGTMLREDLELLDLVGRQMREQEKRIAAQNELNAEARRLLSIPGMGPILASVAAAEIDQIERFQSAEKLCAYAGLVPTTASSGGKTYHGPLLPLCNKWLRWAFTEAAWVAVGCSGYFGKLYRHHRARGKKANTAITIVARRMCRIAWQLLKQNRDFQQEPIARRPENTLHTFPGRSAC

SEQ ID NO: 411093 - protein, 418 aa, unidentified
MTRGDDSRIIRIVHPICCGLDVHKESVSACVIFPDDKGEEQCDVKVFGTFTDDLVRLRDWLAAHNCPVVAMESTGVYWRPVHNVLEDSVQVVLVNARDMHNVPGRKTDIGDSRWIAGLLRHGLLKSSFIPPQDVRQWRDLTRLRKKYVHTVGDYRKRTHKLFESANIKIDSVVSDLFGVTGRNLMQLLVADRKLTLSDIQTCVRGKLKGKEAELFRSIQGFFTDHHRFVLKMILETIATLEAQIEALDLQIRCAMKEHETLLDRMKQAPGIADVASREILAEIGPTLDSFRKDTALVAWSGLCPGNNESAGKRKSGKSPVRKHHLKTIMIEVAWAAIKKKDSYFKDKYYRLKARRGAKRAIAAIAHRILLGIYHVIKDGVDFRDLGGDYLTLRNKSQKVFHLRKQALAMGFDLVPQTV

SEQ ID NO: 411094 - protein, 315 aa, unidentified
MITGIDCSKDYFDIAVLKEGKSAFKGRFTNNLKGFKDMLPHILDTHVAMEATGPYYFQLARFLYDSGIRVSVVNPLVIRRFAQMRMSRAKTDKKDAMVIAEFAQMTSPRLWEPPTAAIQSIRNLETYLEGLKQRRHMLSSQLHAFEAAGTIDKLLYNEIKEEVESHDKRIKEKERQIDGLIKQHYEEMAGNIRSIPGIGPRSVSMLIIATDGFSMFENYKQVISYFGLAPRIYESGTSVKGKGHICKIGMGQVRKVLYMAATSAIRCNKACKDLYERLRDKGKPYRVALIAAVNKLIKQVFAIAKSGEPYKAQFG

SEQ ID NO: 411095 - protein, 387 aa, unidentified
MSEMFNPHAPATAYDHNTTIVAVLELSGKNWLLGAVAPGLSRRTKRSFEARNVEAVVWALERAKAESAKAGFEVARIVVGFESGRDGFWIARALQQRGLEVYVMHAASIAVERRGKRVKTDRLDVDLLLTTLMGWLRGEPGRCTMAPVPSEEEEDLREAGRRRETLVHARLKVENQIASLLIRHGIEGFKPRLKNAETKLCELRTFDGRSLPTNTMNSLRILLAQHRLLSAQLKEIEEARQRVVNVAKPDRLQRMIQALARVVGVGVETATVLVHEVFSRSFKDRRALGAFVGLTGTPYNSGSAKTEQGISKNGNARVRRMLSQLAWRWLGHQPESALAQWFNARLGGAKGRMKKVLIVALMRKLVIALWRLAETGEVPIGARLAAR

SEQ ID NO: 411096 - protein, 371 aa, unidentified
MKSDSTTKFIGLDVHSKTISVAIAAEGRKGEVRHYGTIANTFEAIDKVIKSLTATGAELRFIYEAGPCGFALYRYLTGNGFKCIVTSPAMIPRPKNVRIKNDRRDAMTLARLYRAGELTGIYVPEPEDEAVRDLGRARDDARMAERKAKQRLNSFLLRHNLIYPGKTKWNRTYFNWLGSVGMKYPAQKVALQEYIEAVNESTGRVARLSEQIGLAVEEWRMAPMVKALQALRGVSLICATVTVAELGDLSRFQNPKELMAYLGLVPSEHSSGETIRRGGITKTGNGHARRVLVEGAWTYKHHARVTLPLIKRQRELPKSICQISWKAQLRLCARYRKMVARKKPNNVVVIAIARELAAFMWAIAQEVKTAA

SEQ ID NO: 411097 - protein, 417 aa, unidentified
MRAVALDVHRDFCEVAIVEQGGLRSGGRIETKPETLELFAQSLDVHDQVALEVTGNAWEIARIIEPRVARVVVVSPSDTGIRQARAKTDRLDARALAKLLWAGSLDSVWMPDECIRAMRRRLARRTQLVRARTRAKNEVHAVLLRCLKGRPPASDLFGVKGRRWLQEQELPIPERETVDAALRQVEFLDAEIAAVEALIAAAALSWPEVKRLMTVPGVNVIVAATFMAAIGDIRRFPDRRKLTGYLGLDPRVRQSGVGPASHGHISKQGSAAARHALVEASWSTVRQPGPIAGFYVRIKARRGHSIAIVASARKLACLFWCLLTRGEDYAFAQPSLTKKKMRRLELQAGAPRFQGGRGVWSTNDAMRQAERELALQAQRAYERTVKDWQQNKRASATAGRASSGSSKEQVARQTTRP

SEQ ID NO: 411098 - protein, 360 aa, unidentified
MDVHKKTITIAIIDKGRNQQPRIYGTIENRLEALDKFCRKMLSTTNRLHFVYEAGPCGYGIYRHLTQKGFDCVVAAPSMIPKKSADRIKTDRRDAAMLARLHRSGELTAVYVPDAQDEAMRDLTRAREDAVIAARKAKQRLNAFLLRNGLTFAGRSKWSNAFFNWLCDMAMPYPAQQVALQEYIDTVHENLKRVERLTDQIRQLVPAWRLAPVVSALQAARGVSLIVAATVLAELGDLSRFDKACQLMAHLGLVPSEHSSGESIKKGTITKTGNGHVRKALVEAAWAYRMPARVSASLLKRQQAVPERVCQIAWKAQLRLCTRFRRLRARGKTKQKVVIAIARELSAFLWAMAKQLQPVV

SEQ ID NO: 411099 - protein, 331 aa, unidentified
MQCVVGIDVAARSFDLTVRKGGKSQKAQTYEQTSKGHRQAVKRLRALQPTRIVMEATGVYYLDLAMALHEAGLPVCVINPRSFRHFADIKLSTSKTDAIDSALLAEYAERMEPARWSPPPSLHLELRDLGRQINRLVHARTQAKNRLHALGAKKSTPRLVIEDEQEGIAHLDRRIDRLRQAASEVIAQSATLSEQFECLRAANGVGEASAVTILAELCVLPETLKASQVVCHAGLDVRLTQSGSSVNRPGRLSKAGNTYLRAALFMPAMVAIRHEPRAKAFFEALVARGKKRIQAVCAVMRKYLTGIWACMKNRRRFDASLLFSEKHAQTG

SEQ ID NO: 411100 - protein, 394 aa, unidentified
MERAQVLIGLDVGKTRHYAHVITSTGTVLFHRPVAQTEAALRTLLAEAGTYGKPVLVLDQCASIGALPRAVAHDVQVPVLYLPGRAFRHVADSFPGRTKTDRRDADIIATAGRPMSHAVRPLAPADPAVARIKVATGHLDALNADLCADKNRLRSLLLQLHAPLERLLGPRLGQAGVLPLLATWPTPAHLDAVPDEELVAFLKAQGSRRAATLVAELRQALTQQTLVLPGTEPLGEAIAYRAARCQAAVAEKHRVTAQLGSELAANATAQRILTMPGFGPTTTATVLAELDGKTFRSADHLASYAGVAPTVRQSGASRHVHRSRTANTRLKDALCWAAFTTIRSGAGKVAYEAKRHKGHWKAIIALARHRVSILYAMLRDQTAYREPLPPLTPT

SEQ ID NO: 411101 - protein, 313 aa, unidentified
MYYIGIDVSKKALSVFDGQKDLEFENLKGLKSLKRYLKKRYQTFDNLGIIFEATGIYSNHLKAFCADHQIKAFILNPKQSHNFARSLGKRSKTDKIDARTIYAYCQLIAKEKMQVPVINQEAKILSSYLNSYQFAQKQRVSLANHLDSIQDKDLSKLLRQELKRAQRLEDKLLSDMKTHIQDHPKLQKDFQRLLTISGIGEKLAFTLLALFINYQGTNRAQMTALVGLDPIQRESGTSVKGKAKISKNGNRYIRKMLYMPTLSAIKNNQKIAIFYQRLIAHHKPKKVAVIAAMRKLLLVAHAIYQNKTEYVAI

SEQ ID NO: 411102 - protein, 337 aa, unidentified
MYYGGIDAHRSYLTVAIMDREGRLVHERKRVPIGDGTPILEELEEFRPLEVAVETCPFWPWIHDVLEPTEIGFHLAHASELEAIANAETKTDSVDARLLARMLAANLIPEVYPKPADQREVLHLVRHRASLVTERTRFACRIHSHLHQRGLELPREQLLGKKGRRWLREEAWLRLSAEQRALVETHLELIDTLGSQIDELDGRIEARAREHAGASLLQTIPGIGPYRSLLLIGELMPISRFLSPDHLVSYAGLAPRTWSSGGKTRYGSTPQAANRWIRGALVSAIPSHMRSTPESSLGTYYERQKERIGWQKARVATARKLCRAIHAMLSTGEMWHG

SEQ ID NO: 411103 - protein, 348 aa, unidentified
MRCYTNPHRFYAGVDLHARSLFTHVLDHQGKTVFEKDLPAQPEVFLDAVNPFRDGLVVGCECMFAWYWLADLCEDHQIPFVLGHALYMRMIHGGKAKTDRIDAAKLASMLRGGLFPMAYVYPRAKRPTRDLLRRRSFFVRQRAQLITHIQNSNTQCNLPPLSKKLTYAANRSPEIAERFAHPSTRLSITADLGLIDSYDQQIAELERHLVKNAKVDDPVTFGLLRSVPGIGPILGLILLYEIDQVGRFPEAGNFLSYSRLVRCAHVSAGKVKGSGGKKIGNAHLKWAFSEAACLMLRALPAAKAWMQRQEKKRGKRKALSILEAKLGRAVYHLWRKQVPFDVKRFLAP

SEQ ID NO: 411104 - protein, 414 aa, unidentified
MNRHNFQFFVGIDLGRWLHVASVMDSSGQFLAERGFAHSYEGLAETVDWLLDLAQHDAGRIAVGIEVPHGPVVETLLQRGIAVFAINPKKLDRFRCRYAVSGANDDRRDAFVLADTLRTDRPRFQRLRLPPPEIIALKELLSARDQLVKHHVALSSQIRDLLVRCWPHLLTLAPRNRALDSFFCELLELFFHPNRTHSLQPKSIQDLLKKHHIRRVKTDQVLESLQKPPLRVAPGTIAATSIHIRLLVQQLLLVWRQRRDSDQYLERWFKQTQLTSELKKLPDSAILASLPGVGAFVLASVLAHAHDAILLRNLVALRSLGGIAPVTKQSGKRRLVLMRRARSQPLNYALHHWAHMAVLRDTHFKLHYQNLRAKGHRHARALRGVMDRILTIAIAMLRDNTLYDPSRHKNETDK

SEQ ID NO: 411105 - protein, 353 aa, unidentified
MSQQNARIAVVGIDIGKNSFHIVGQDGRGEIVLRQKWSRSQVEARFANMSPCLIGMEACVGAHHLSRRLRALGHDARLMPAKYVRPYSKGQKNDFRDAEAIAEAVQRPTMKFVATKTADQLDLQALHRVRERLVSQRTGIINQIRAFLLERSIAVRQGIRFLRAELPRILAMPPDVLSPRMVRIIEDLACDWRRLDERVEGLSNEIETIARQDAGCERLMSVPGIGPIISSAMVAAIGAGDVFTKGRDFSAWLGLVPKQISTGDRTILGKVSRRGNRYLRVLFVQAAWVVLIKPKIWERHGLKPWLEAARKRLHHNVLAIALANKLARIAWSVLARGRAFEVRKINQAAPQPT

SEQ ID NO: 411106 - protein, 385 aa, unidentified
MMKTKPRLTPTSVKQIEAKAEVLKLGIDIHKREYVIVAQMDNQAPKSPQKFSPEGFLIWIAKQRAHAHRIVTCYEAGCFGYVLHRELESMGIENLVVRPRNWDEYGSKVKTDARDATELCSHLDRYLAGNERALSVIRVPTHAQERARSLSRQRDTLVKELKRLQNVGISHARYYGYELKTTWWKQLNFKKLLSELPEYLLDILRPFQAVLASIDKQFRQATAREQCSANRELPVGLGALTASILDKEFRDYSRFKNRREVASYTGLCPSESSSGGSRKQGSINKHGNPRIRHVLIEAIWRFLQFQPDYEPIKNWKQRMCNEPFGAAKKKKMIVAIARRFAVDWWRMNTGQLDPEAVGLKVAYPTAYATQAMREGRIAKINAKEA

SEQ ID NO: 411107 - protein, 342 aa, unidentified
MHATTVAIDLAKDVFEIAIARRSGAVEERRRLSRRQFQRFVTQLEPGTQVIMEACGTAHYWGRQCTRQGAVVRLLPPHYVRPYVRRNKTDRTDAEALLEANRCSGVYPVPVKTPEQQALQSLHRVRSQWHRTRTARINTIRGLLREHGLVLPVGARKLRERVVALLDERAPELPGLVTHMIGWLLEELAAIEQRLRDVDRDLHQLAQHHPVAVRLQEIPGVGPLTATALVGSVPHIHAFTRGRQFASWLGLTPRESSSGRRRTLGGISKRGDRYLRCLLAHGARSVLRAAVVRARSPQRLTRLHQWGLRLRERRGQNRAVIGVANKLARIIWAVWSRDLAFT

SEQ ID NO: 411108 - protein, 457 aa, unidentified
MSKGSGMTRGDRKRNARRERLHGLLPRDGAVVGIDLAEDKQALAVIDHDVRVLARKTVRVKAFRLGEALDWAAAQARVKGFTQVTVACEPTGPRWMQVQRLCAERGLPLVCIQPLVSHIAREQQDYTPHKSDESDCVMIGRLAAELHCYVPEELDETWAQLRHLGRRRAQLITAASASAHRIRDFLSVAWPVVTETCAKPLLSRTWLAALQVVTGRCGGDPARLAVMGEEAFTAAVRAAVQDWGGKRAWGPISRRVFAALTDTEGVVVSSRRGLLRRCADELGDLQRARAQLRAVEADMVAVLDELGLSRLGRIPALTAVGAAAILAEAGGPHRYDSSSSLVKHAGLSPSGNASGAFAGQAHISRRGRPGLRLTVWRAVWPMLQFNPVMAAKYQAMTSTADDEAGAAAARARRAKARVACAASLLRWLYSMAVHGTSWDPAAASGRQHDPRDQAEAA

SEQ ID NO: 411109 - protein, 320 aa, unidentified
MSDRHAVGIDTDSRTLVVACHGTKGSIRIANSASAINKWLSSLPAKSRIGVEATNRYHELVVHAAQKADHAVFVLNPRDIKHYAKGVACRGKTDSGDAQVIARYIAKEADNLHEHVARSPEQERLHVLLQQRDSLVRSKAKLNLSLGAGASESALFGRIFSSLKEAIAMLDQQIQQLCRSGQQRDLYRRIMTIPGIGPTVAAFVTHHITRWPLANSDAWIACTGLDPRPNESGARIGRRRLSKRGNASLRQILYMAAMGLTRSKGGKPLYLAIRERGHSSTASFNILARKLAKIAWGVFKSGKDFDPAMLKVGQTCFQQA

SEQ ID NO: 411110 - protein, 366 aa, unidentified
MKKHTSKKQTTRKGTAKETFAFYIGIDLGDKKSDICVLDEQGELHDQFRLRMNAQELQTYFGSLARSRVAMEAGAQSRWVAEVIERCGHQVYVSNTRQVPYIHQSDAKNDPGDAYKLAELVRFQPRLLHPIQHRSQEAQADLSWIRAREVLVGSRTQIINAIRGMSKAFGERLQKCSTTSFTGKRGDQIPAPIRRAVAPLLETIDHLNEQISYYDQMIEQVARTRYPRHRLLDQVQGVGVHTALAYMLTIGDPERFDKSRAVGSFLGLRPKQKDSGERKPQMGITKAGDEYLRKTLVNCGHYILGPHGADSDLRRFGLRICERGGKNAKKRAVVAVARKLAVLLHRLWISGEVYEPLRNRQVAAAA

SEQ ID NO: 411111 - protein, 315 aa, unidentified
MTTRSLTYVGIDVSKDILDVAILGEKRVNQYTNTRAGIKDLIKKMSQVTPALIVVEATGGYERAVVLGLFEAGLPVARVSANRVRQYARARGLLAKTDRLDALNLADYGKHVQPRLFTAKSEIGQLLSALLVRRRQLGEMLKAEKNRLRTVYGELGKSIETVIACLTGELKRLDQEIRTFLDNDPEWLEQEQLLRSAQSVGAVTAATLLADLPELGKLDRKQIAALVGLAPINRDSGKRRGYRKTGQGRSTVRSVLYMATLTGIRYNPVIRRHYQHLLSRGKEKKVALTACMRKLLVILNAMMRDQQPFRTATLS

SEQ ID NO: 411112 - protein, 340 aa, unidentified
MDSIRYVGLDLHRDTVSAAVLDSDGTLMMQSVLATRAGAIIDFLHGIRGTLHVTFEECNHSAWLYDLLARRVAQVVVCDPRKNKLLKSGNKSDRIDARKLAELSRINSLSPVYHGEISALEVQHRVRNYAALTEDTTRVMSRLKAVFRSQAIECPGKKVFRKENRESYLVRLGSAALRERAENLYRELAVLHPLRLRARREMLAECRKHPATKWLQSVPYLGKVRSAVLIGRVQMPHRFRTKRQFWAYCGLALETRSSAEYSVINGRESSAERSLGKNRAACIPYPSRSVCWMSSSALAHTSLPLFRVSMYPAACTLIRELARLSRQFVSSVLKPIGSPN

SEQ ID NO: 411113 - protein, 404 aa, unidentified
MVFLGVDWAEEHHDAWLENEQGEMLGKARIANDVGGVRQLHELVAEHAHDPSQVVVGIETDRGLLVSALVGAGYQIYAINPLSVSRYRDRHGTSGAKSDRADAKLLADLVRTDRHNHRRLAGDSELSEAVKVLAREHQDLVWTRKRFINRLRSTLREFYPAALEAFGTDLGALDALAVLERAPTPWQGRQLSHAKIVSMLRKAGRQRNLEPKAAEIQRALRSEQLQAPAQLQAAMAVVVSSCVAMIKSLNLQLEQVATEMTASFEGHPDAEIYLSLPGLGVVLSARVLGEFGDDRARFADAKARKAYAGTAPVTQASGTKKIVLARFARNRRLADACYCWAFSSLTRSPGANRYYRILRTRGKTHPQALRGLANRLVGILHACLAAGQTYLESLAWPLPYEIAA

SEQ ID NO: 411114 - protein, 416 aa, unidentified
MNNWKDITHYAGFDWAKDHHAVVIVNAEGHIEADFEFTHSLEGWKSFAEKTSAWPNLAVAIETSQGAAVDQLLQRQCLVYPVHPVAARSYRERKAPSGTKTDHLDAWGLADALRVDGQGWKQLQPLDPITQELRLLCRDEVSLIEQRTALVNQLQQALAEYYPAALQAFDDWTDAFTWEFVLAFATPQLLVSAGKRRWEKFLHTHKLWRPQTAEKRLKLFAQADQFKASEPIVRAKSQLAVSLCKLLCTLRQQLKLYRKQIEALFREHPDHDLFGSLPGAKKVLAPRLLGAVGSDPDRYGSQEVLQCIAGTAPVSYQSGKINKVRIRWSCDKFLRHTVHLWSDCFRKASAWGQTYYQKKRAEGMSHACALRCLGQRLLKILFRMLKQKTPYDAELHARNQQKHGSWVIKLVHEPAT

SEQ ID NO: 411115 - protein, 343 aa, unidentified
MQIHSVGIDLGKTTFHLVALGDHGKVLLKKKFTQRQLITFTANLQTSLVGMEACSGAHFLGRALRAQGHEVKLIPAQFVKPFVKSNKNDFIDAEAIAEAVTRENMRFVPIKTDDQLDLQALHRVRERLMARRTSVINQIRAFLLERGIVFAKSPIRLREAIPDVLENANESLTPRMRNLVAMLWSEWKDLELQIVEMNDEVERIALSDDACRRLRQIPGIGPLVATAIVASIGNGAAFHKGREFAAWMGLLPKQHSTGGKARLSGISKRGNRYLRKILIHGARAVVLRSKRDRIAMGAWITSLERRAPRNVLIVAMANKLARIAWAVLSTGQDYRAVPDNVAA

SEQ ID NO: 411116 - protein, 341 aa, unidentified
MDEYIGLDVSMKDTAVSIRRAGERIWRGKCPSDPKLIAELIRKHAPGAKRVVFETGPLSVWFYHALRQEGLPAICVDARHAKAALDMAANKTDANDADGLAQLAEVGFFREVRVKGFDSMQTRTLIAARMRLLRITTELSNQIRGLMKTFGLVVPAGKGSRFERHVQERLIDQQEVASIVRPLLEVWRAARQRAAELGEQLVTAARKSEACQILMSIPGVGAVTATAFATAIEDPGNFRKSRSVGAWLGLTTRRYQSGEVDYDGHISRRGDSYMRGLLYEAATVMLTRSTADNRLRTWGLQLKERIGFKRAAVALARKLAVTMHAMLKSGTLFERSAPAAQ

SEQ ID NO: 411117 - protein, 408 aa, unidentified
MLEVKVERCAGIDVHKKFLAVCVLIGLAHQKPASEVRRFGTSVPELERLKAWLLEKGCMEVVMESTGSYWKPVFNILESSVRVILANPEQVKALRGKKTDPKDCRWLAGLLRHGLVQPSFVPPRDIRELRDLTRRRRTLMQQGASERNRVQKILEDANVKIGNVLTDVFGMSGQAMPEALLENKLNAEEMANLAQGRLRPKIPQIIEALERHWMNDHHRLLLRQILKHMAFIEDMVDELDKEIWEKLRPYEKHIELACSVPGIGRDAAASILAETGPDMSEDGPFGSCHQLASWSGICPGNNESGGKRKTGRTRKGNRWLRATLAQTAWAGAAKRNSAFRDRYQRLKPRRGPQRAATAVAHAQLIALYWVLRHGKPYQESVRAIDNQRRDLMIRHHLKRLTELGYKPA

SEQ ID NO: 411118 - protein, 462 aa, unidentified
MPGREERETSDRSTRPIEGLPVIRASVAGIDLGSERHWVCAATRDRSAREVASFGATTAELLRMAEWLKIRQVESVAMESTGVYWIAPHEVLEGQGLQVLLVDTRQLARVPGRDKKTDPTDCEWIQRLHSCGLLRGSFRPKEAVCMLRTLVRDKANLVAESGDWLRRMQKSLDQMNVRVHRAVSDIDGVTGMAILRAIAGGERDAQKLAKFRNARCSKTEQEIAEQLNGHWREDHVFSLQQGLKMYDAVQERIVAYEQEILRRLGEMEADEPPQPTAPPLQNTNKAKAIKKRGQEAKRQALYRMSGVDMTQIDAVGVETVEVVLSEYGPDLSRFPTEKQFVSHVTLAPRVPQSGAKPVKKKKRNSASTRVAAALRMAALSLRHSQTALGSYYRRIAQRCGGDIAVFATARKLATLVYRLLRWGQPYVDEGAAAYENRYRQHRIARLAATAKQLGYQLTPVTA

SEQ ID NO: 411119 - protein, 384 aa, unidentified
MTTAIDTRDVCCVALELSKTSWVCAFAVPGESKVAIHKIKAGDTDRLLAVLTGSKAKAEQQLGRPLQIVLCYEVGYDGFWLARYLIARAIHTIVFDSASFLMPRRSRVAKTDRLDAEGMTRILRRWLSGDREMARAVQIPSVEQEEAKRIERERKYLVEERISIIGRIKGLLALHGIWLVKKNIGKGLRQRLDAVKTGDGRPLAPFLRSEIERMLTRYDLISRQIADVEADRKAALNNEKGVFPHADKVRRLTTLGAIGETTATVLVAEIYHRTFLTRRQVASFVGLAPSPYKSGEVDRDRGINKAGSKLARHMLVELAWFWLRYQSNSQLSQWWHSRFGNQGMRGRKVGIVALARKLAIALWRFVEDGIVPDGATLKVRHASR

SEQ ID NO: 411120 - protein, 310 aa, unidentified
MEPFTVVGIDVSKDRLDVHVLPAGEAWSVSRDSAGLGELCQRLGGTARLVALEATGGYETIVAATLSSEGLPVVVVNPAQVRNFANALGQRAKTDPIDAWVIARFAEATRPEIRALPDRASRLLADLVARRRQIIEMIVAERQRLHRTEPARVRKSIERLLKALDKELASVDHDIDASVRSSPVWREKQDLMKSVPSVGPVIARTILAELPELGTLNHKKIAALVGLAPFTHQSGAWKGKASIAGGRSAVRTALFMGAQAAKRWNPALKAFYDRLIANGKPKMVATIAVAHKLLTILNAILRDKTPWQNA

SEQ ID NO: 411121 - protein, 351 aa, unidentified
MRDTTIETIGCDLGDRTSEICVLGADGGKRRESVRTTRKALTLYFSRPQSHVVIEVGAHSRWVGALLKDLGHRVTIANPRRVKLISQSDSKTDKHDADLLARLGRVDVGLLAPIEHRGPEAQVDLAVPKARDLLVRMRTKLVNHVRGTFKSLGEPLPKCSAESFARRTRTLIPASLKPALEPIYETLDKFEEQLRQYDQTIERVAKRYPDVDVITQINGVGVLTGLVYVLTLEDKNRFRKSRAVGAFLGLRPRKSESGCNNPQLRITKAGDPFARRLLVTAANYVLGPFGKDSDLRRWGLELAKRGGKNAKKRATVAVARKLAVLMHRLWMTGEDYEPLGYQQGKTEAHAA

SEQ ID NO: 411122 - protein, 404 aa, unidentified
MSQSSTLYVGLDVHKESIAVAYIGQAHGAEVSSLGTIGTRQCDIDTLIRKMQSKAQHLVFVYEAGPCGYWLYRYLTKKGHLCWVVAPSLIPKKAGDRVKTDRRDAVQLARLMRSGDLTPVYVPTVEDEAIRDLTRAREDALRDLKSAKFRLKAFLLRQDIRYTGRATWGPAHLRWLSEVVCATPAQQIVFQEYIRAVNEHTARLQRLEQALHEQVQTWRLLPVVQAFQALRGIQFTVAVTVAAELGDLTRFDNPRQLMSYLGLTPSEYSSGAHRRQGSITKAGNTHARRALVEGAWAYRYPAKVSRHLQLRLEQVPQRLQDISWKAQVRLCKRYRQLSARGKNANQVVVAIARELSAFMWAIAQQVPLPASHRGQSVSGPRCDAHGVAMARGKIGRSPGRGLPH

SEQ ID NO: 411123 - protein, 399 aa, unidentified
MLAVGIDISKSKSVAAILNQDGSMHTSPFEFHHTQPELDAFIKYILNSKQSATILMENTGHYHYPVLKAFQEAGLPVCMVNAYQIKKFGDMDLRKAKTDKKDAVRIARYALEKSYSLVPYTSMEQKYEDLRFLARQYNQRMLTLKTNKVFLLNLLDETMPGITNILPLTTRTPETSLSVLFINRFKSYDRIKKMGKSRFLDAFEKIARKSRNRQTKTYGLAIYEAALRNITTRGENEYTLAAQDQCLELVCESQKAADSIIPKMQTLAETLPEYAVLRSMAGVGDRLDPLILAEIGDIRRFHSGKALNAYAGNDAPPYQSGTFESHNRHISKRGNAALRKYCFEVMQALKLTRPQNDPVYLFLLKKEQEGKPYNVAKMAGVNKFLRIYYARAMETLKQQ

SEQ ID NO: 411124 - protein, 407 aa, unidentified
MEVFLGLDWAEDHHDLCLLDPSGAVLATRRIPDGLEGVAMLHALVADHVEAPGEIIVGIETDHGLLPTSLIAAGYQVYAVNPMSVSRYRDRHHSSRAKSDKSDAKLLADLVRTDRHNHRRAAPDTELLEAIKVLARGHQNLVWTRQRLTNQLRSGLREYFPGALAAFEDLHHPDTLAVLGKAPTPTQARRLRTTQIQAALKRGGRRRNLERRAQEIHAALQLPQLRAADLVEDAYGAATAAQTRIIGDLNEQIAVLEAKLEHRFSQHPDAELLLRLPGLGVILAARVLAEFGDAPNRYVDAKARRNYAGTAPITKASGTSEIVLARLVRNKRLFDACYQWAFCALNASPGARVYYDAHDPGPKTGKTARRKLANKLVGILHGTLTHRTAYDEAIAWQHWQATKPDAA

SEQ ID NO: 411125 - protein, 391 aa, unidentified
MAAVMIGVDPAKRSHAMAVLDGHEEQLAALEVGNDSAGYRAMLALAKRWPHRTWAVEGAGGVGVQLAQRLVADGEIVVDVPPKLSTRARIFDRGHGRKNDPSDARTVAVVALRTKGLREVALDDDLIALRLMSERRTDLVRSRTATINHLHQLLMELIPAGAERNLTAAKAKALLATVRPRHVAGRTRRQLAADLIEDLVALDRRLKELDKRLREAVEATGTELMTIKGVGVATAAMVLGEVGDVRRFPTRHHFATYNGTAPREYSSGGVDTRRLSRAGNRKLNHALHVIAMAHKRYDPRGSDYYARKLADGKGKKGALRCLKRRLSDVIFRVLSDERAQREVAGPEGQSGATTKSCATDRTPMVSTSEKPLAEPAAPDATPHQLPAKVPA

SEQ ID NO: 411126 - protein, 391 aa, unidentified
MPEDAPRPTQAAIRTDLGAIFVSLELSRRTWLITSLSPGSGEKMSQHSVPAGDIAGLLRRFTQLKEKARARTRRDFPIITIQEAGLDGFWIHRVLHSKGIESHVVDAASILTSRRRRRAKTDRIDGETLVRTLMAFKRGEPRVCSMARAPTPQEEDRRRVCRERRTLVGERVRHVNRIKGLLFAQGVFGYEPLRKGRRERLEDLRTGDGRPLPVHLKAQIIRELDRLEVVLEQLKSVAAERDALLEPASNEAASPAAMLVQLKGIGPETAAVLWSEGLFRQFDNRRQVAAYAGLAPTPWQSGSIDHEQGVSKAGNPRLRTTMVELAWLWLQNQPTSALSLWFHERVRRLGGRMRKTTIVALARKLLIALWRYTTAGVVIEGAVLKAEPATI

SEQ ID NO: 411127 - protein, 373 aa, unidentified
MGKGTAGRFCEQVREDRRKAWSPCPRPKEPEQLLGPHEPESKLERVTLIIQLAEDKMNQEDQSQYVGIDVAKARLDVAVGQDGEYWQAGNDERGIRRSVERLLALQPCLVVLESTGGLEMPLMVELDAAHIPFALVHPGRVKEFARSVGQLAKTDKLDARLLARFGEAVKPPVTHLPGEAEQYVNALTVRRRQVLDMLVDERNRLAATRLSMRAKIEEHLAWLQAELAELDRQIEEQIQQVPHFQEKGAILRSAKGVGPVLCAKLLSGLPELGHLDRKKVAALVGVAPFNQDSGRRRGKRKTKGGRADVRAVLYMATVSAVRSNPVLKPFYQHLVKQGKLKKVALVACMRKFVTILNAMIRDMHPFSFPYQPA

SEQ ID NO: 411128 - protein, 316 aa, unidentified
MICGVDVSSERLDAQLGRQGVSKSFSNDQAGIAALADFCRQHKVHLLAMEASGGYEQLAFGLLWSMGIEVAIVNAGSVRKFAQAMHLFEKTDRIDAGVIAWYAETKKVVATPPGSVQQQQLKALATRLRQLTQMRALERNHRTLVTDSMVLASLHQVLLLLTQQIKELEKQIARLIASDPVWGKLDTTFRSIKGVANRTVACLMAELPEIGVLSNKKISKLAGVAPLADDSGKHKGKRHIYGGRQEVRNILYIIVTCVSHHNQDFAAFKERLTKAGKPKKVIRIALAHKLLVRLNAKARDMRHTLAQTPGPLAVKP

SEQ ID NO: 411129 - protein, 347 aa, unidentified
MTYYAGIDVSLESSSVCVVDATGKIVREAKVASEPEALIAWFGALGLALERIGLEAGPLSQWLYAAIRQAGVAVELLETRHVRDAFKAMPVKSDRNDARGIAQLMRLGWFRPVHCKSLAAQEVRALLTARKLVQSKLFDVEMSLRGILRGFGLKVGPTTPLRFAGRVRDLVEGQATLAAVATALLAVHEALRREFDGLDKRARALARADGRVRLLMSAPGVGAIVALTYVAAIDDPARFRSSKGVGAHFGLTPKRHQSGEKDIAGRISKIGDASVRTVLYEAANVILTRPIKGGGLKSWAMRLAKRVGMRKAKVALARKLAVVLHRMWRDATRFVFDRGTGAAAAAA

SEQ ID NO: 411130 - protein, 342 aa, unidentified
MTRAITGGVDTHADVHVAAALDPLGGLLGVQEFPATPAGYGLLLGWLGGFGSVCLVGIEGTGSYGAGLARHVTAAGVRVVEVDRSDRQDRRRPGKPDPLDAVSAARAAQPGRARGAPKGRDGTVEAVRALMVAKRSATGERTQTINQARALVLTGPDDLRARFARHTAAALVAGTASLRPRPGDVVGYAVRVALRELGRRAEFLDGQLDRLDELIVPLVTAHAPRLLALRGIGPNTAALLLIAAGDHPERLRSEAAWAHLCAAAPIPASSGKTIRRRLNPGGDRQANHALWRIVFTRMGSHPATRAYVERRTKEGKSKAEIIRCLKRYVAREVYPHLRPPTG

SEQ ID NO: 411131 - protein, 432 aa, unidentified
MNPLSVSPEPSPVAAWVGLDWADQQHVICLYEVATGQSTVSRLEQKPEALQDWLSQLRQRFGGAPVAIVLEQARGAVIYALLSADFVRLYPVNPQSLASYRKVYAPSGAKSDPADAVLLMEMVRNSPERFRVWKPDDADTRSLQLLTENRRQLVNQKTALTNQLTSLLKTYYPQALELAGALDSLQACDLLKQWPTLEALQQARPGQIRQLYREHGRPSSEQLDRRLEQIRQARPLTSDPAALLSGSMMVQVLVQQLRPLLAAIERFDRQIAVIFGKHPDRPLFDHLPGAGAVLAPRLVAAFGTDRDRFQSAQQAQQLFGIAPVTEQSGKQRWVHWRWACPKFLRQTFHEFAGHSRHWCGWAKALYQRLRRIGKGHHAALRVLAFKWIRILFHCWKTRTGYDEQIYLKSLQKRNPTLWAEIQLLPPRKTKAA

SEQ ID NO: 411132 - protein, 382 aa, unidentified
MGDWKHYPTEAVLLRSFYGGSKMSKKEERRLCVGVDLHKTQFTVSALTEDGEVILQEEYRTTPDGYSEFIEEMHRYEEEGCSIELAVETTGNARFFKNQMEKEFFDVTVVNTNKFKVITYSTKKTDANDALTLAMYLQKEMLPEAHLCSQTSEEIRRMLKTRRILVQSSVKIKNQIHGMLLGYGIETNAAQFQSKRKRQELMNDLANHYYSDFTASSLEVMLNILDVLADQIKDVEKQIETMVEDNEDVELLKTIPGVGKIGAATIASYTEDLERFDGDFKRFAAYIGIVPSVHNSNETVHLGHITKHGPQELRTAFVQVALGMIRASKQTSDWRLIEEYRRKKTEKGSGRAIIALTRKIARIVFVMLENRETFNPDLMLSK

SEQ ID NO: 411133 - protein, 414 aa, unidentified
MEVLYACCCGLDVHKKSVTACVLWTEGKGGRRKERRTFGTFTQDLLSLLEWLKQCGVTHAAMESTGVYWKPVWNILEGQLEQVLLVNAQHIKAVPGRKTDQRDSEWIADLLQHGLLRGSFVPPRPTRELRDLTRYRVSLAEECNRISNRIQKVLEDANLKLASVATDALGASGRAMLEAIVAGEEDSEKLAEMSKGLLRNKRELLKQALEGRITEHHRFMLRQLLEDLRHAEGKMAKIEGEIDRRMGPFAEAVTRLKTIPGVDRVTAWGLLAEIGFDLKQFPSSAHLASWAGLCPGNHESAGKRLSGKTRKGSHTLRRCLCQAAWAITRQKNNYLAAVYRRLAARRGGKRAVIAVAHALLVMAYHMLVRKVDYRELGPDYFDRLNQRHITNVLVRRLERLGHNVILQPATGVFS

SEQ ID NO: 411134 - protein, 459 aa, unidentified
MKKAKSVSKSKAQTALQIIYPNAAGLDIGANEIMVAIPPDREGVTVRGFGTYTPDLAALADWLKEAGVTHVAMESTGVYWIPIFELLEERGFEVIVVNARHIKHLPGRKSDVMDCQWIQQLHAYGLLRGSFRPEAEMCVLRAYLRHRDNLLEDRAKHIQYMEKALLQMNIQLGQVLSDLTGETGLAILHAIVGGEHDPLVLANMRHGNCKHPREDMIKALTGHYRKEHLFVLKQALEMFESFSQRLQECDQEIKCLLEEMQPEVTDDLPPLPPNPKPNSHSKNAPSYNARNLIYPLAGVDLMAIPGMNEILLQKILSEVGLDMSRFPTAKDFCSWLGLAPHNAISGGRILYSHTLKNHNRAGQCFRLAARAVSKGKTVYSEFYRHIRSRSGAKEANLATAHKIARTFYYMLKRRQPFLAPDLQTYLQVQREKDIHRLEARAAKFGFRLQPAEAVQLCYE

SEQ ID NO: 411135 - protein, 379 aa, unidentified
MGHHSEAFIGIDTSKLRNAVAVADAGRKGEVRYLGEFDTSTAATRKLVAKLAAQYSNLVFCYEAGPTGYGLHRLIESLGHTCLVVAPSLVPKKAGDRVKTNRRDAEGLAKLLRAGELTAVWVPDERHEAMRELARARDAARQDLTRKRQQVSSMLLRMGLHYPGIKTWGARHRTWLANLKLEHGEQRFVLEELLQAERQAGERIARLEQAIRAAVTDWSLAAMVPALMAMRGIDLVSAVTILAEIGNLTRFENPRQLMAYLGLVPSERSTGDSVKRGPITKAGNGRARRVLVEAAWAYRHPPRVGSEKQALVAAAPRAAREIAWRAQVRLCGRFRALLRKGKKSTVVATAIARELAAFIWAIDREVTGSIKATKDLRRA

SEQ ID NO: 411136 - protein, 367 aa, unidentified
MKKVSTVGAKQSRNFSKQKLTIGLDLGDRSSWYCVLDEQGEVVVEQKLGTTPKAMKEGFGGMPRCRIALETGMHSPWVSRALSELGHEVIVAHARSVRLIGESRKKDDRLDAQTLARLARIDPQLLSPVKHRSAKAQADLTVIRARAGLVRARTALVNTARGLAKSYGERLRGCNVRNMNPEKAEGLSAELQKALEPLLAGIESLSERIGEYNERIEKLAQESYPQVALLKQVKGVGTLIALTFLLTLEDAHRFRKSRDVGCYLGLQPGRRNSGQSEPQMHISKEGDPYLRTLLVQGAHHILGPFGVDSDLRRWGLKLAERGGRNGKKRAIIAVARKLAVLLHRLWVSGEVYEPLRNSQQRAMPAAA

SEQ ID NO: 411137 - protein, 349 aa, unidentified
MIWIGVDAHKQVHEALALGSEGVVGQQRIPNTPQAWAALLDWARQWPERIWAVEGAWYLGRGLAQYLARQGERVHEVNGRWTARRRRGMRTPGKSDRLDARSVATLRREEAATLPRVYAEEDELAAVQLWSRAQAELTKDITRLVNRLHELLLQCDPEYKAKLPALTTKAAIGALRQYAAPGTGTLAREREALIRATAAQLALLDEQDRELRRKLERVSKTRFPPLRRIEGVGPLIACAIAAEVGGPRPGFGEEQLAALGGLSPLEASSAGAVRHRLNRLGNRRLNMLFHQIVLTQARVYPPARTYLLRRQAEGRTSREARRALKRLIVRRVYRAWHACFETNLERVAA

SEQ ID NO: 411138 - protein, 347 aa, unidentified
MEYYAGLDVSLKLVSVCVVDEKGKIVREAKIESDTCALVSFFSELGLPLARVGLEAGPLSQHLYAGLSEAGLDAVLLETRHVKAALSAMTVKTDRKDARGIAQLLRMGWLRPVHCKSMPAQEKRALLTARKLLVSKLIDVEMSVRGILRGFGLKVGVTTKKIFADRVRTLIAGQTTLELVLEPLLRCHGTLRSEFAILHRQLLAVVRSDEVCRRLMTTPGVGPVAVLTFTATIDDPGRFSSSRSVGPHFGLTPRKYQSGETDVTGGITKAGDAMTRKALYESSFSMLFKSQRMSALKAWGMQVARRRGMKRAVVALARKLATVLHRMWVDGTEFRWTREAPAAPAAA

SEQ ID NO: 411139 - protein, 318 aa, unidentified
MIALGLDISKNEVHASLLGDAIRPAKHSFANNPRGHEQLLKWLRNREIEHVHACLEATGGFGEELALTLCEHGHVVSIVNPSRIKAFGQSEGLRTKTDSVDAALIARFCRAQAPDPWTPPTPAERALQALLRRRDNLIDMRTQENNRAQAPRTADTVRSSIAEHIQYLDEQIKTIEDEIRRLVDGDPGIRANRDLLVTIPGFGEKTANGILGEVPNLSEFRDVKAVAAHAGLSPKHNQSGLSLGRSKLCKAGNARLRKLLFFPALVAMKKNPVIREFAKRLADRGKRPMVIVAAVMRKLLIIAYGVLKSGRPFMAPAA

SEQ ID NO: 411140 - protein, 344 aa, unidentified
MTYYTGIDVSLRSVSICVVDDKGEVCLEAKVAAEIDAIVERLRRFSSDVKSVGFEAGTLTQYLTYGLQAAGFEVICLEARQVSVTLAAMRNKTDRNDARGLAQILRTGWYSRVHVKSLQSHQVRALLASRKAILKKCVDLENELRGLLKVFGIRLPSRVGHGSFDAELRETVSTDEMLACALVPLLDARTVLYKTYLKLDNAVKGLVRIDPICRRLMSIPGVGPVTALTFKAAVDDPSRFKSSRTVAAHFGLTPRRFQSGEVDNPGHISRAGDADVRSALYVAAHSLLTRNAQWSTLKAWGTRLAKIRGHRRAVIAVARKLAVILHRMWIDGSEFRWGAAETAA

SEQ ID NO: 411141 - protein, 421 aa, unidentified
MQVIYERCAAVDVGKDVIAIAVRKPGDGPGGRVTVRRTYKTFYGVLREAARWLMSEGVTHVAMEATGIYSMPVYHALLEHGGFEKVLVCNAGHVKNVPGRKTDMADAEWLAQLLECGLLAGSFIPPAEVKAARDVIRYRAKIAQQRVSEISRLGNVLQDAGIKLDSVAWSVSTKSGRLMIEALIDGERRGAVLADLAIGRMRSKIADLSMALEGRFGDHHAMLCRLHLDHLDHLDGMLAKLDAQIEAMMQPFRSARDLLITIPGIGRLSAAAIISEIGTAVAGYFPDAAHLASWAGLCPGNHESAGKHRPGKRRKGNQHLQPVLVECAWAAVRHEGYLKSLYHRHVMKWGGYRSSIAKNKAIIVVAHAILVIIWHVLATGKPYDELGSDYFTRRLDPERETRRLVARLEALGHAVTLETTA

SEQ ID NO: 411142 - protein, 422 aa, unidentified
MVLKGVPMALKIVYQICCGIDVHKTFVVACIASTNKQGVTTYKRHRFSTFTQGLKELLQWLLDNHCKDVCMESTGKYWIPIYNVLEKDCNIVLAHPKYVKAIRGKKTDKKDAKWIADLFKHDLVAGSFMPPADIRQLRDLMRYRFKLTCFMSSEKNRLQNCLTVSNIQLASVVSDTFGKSSQRILDKILENPDDTSFDIEPLIHGSMKKKLPELELAIDGFITPEQAGKLKVIKKHFEDLESRKAELEKLILALASPYQQELDLILTAPSFKNKFTAIGIISEIGVNMEAFPSAKHLCSWAGLTPTNNESAGKKKSVRVSKAGCYIKPLLVQCANSVVKSEKHPEIRNRYLRLRKRRGHKKAIIAIARMLLTALYNMLKNKEPYNTELYRKSDVPPVNREITIEQAILMAQFQGYKIKSAAE

SEQ ID NO: 411143 - protein, 392 aa, unidentified
MVVSVGIDVSKDKHDCFILSSEGEVLVDGFTIPNTMDGFNCLLQRIQDCTTPQDKMKVGLEATGHYSYNLLGFLLDNGLATYVLNPLRTNLYRKSLSLRKTKTDRVDARTIASMLLSDAGLKPYTDTAYHNEELKSLTRYRFDKVKERAKLKSSISRLVCILFPELEKLVPSLHIASVYALLAEFPGAKQIAAAHLTRLKALLETASKGHYKRDMALEIRDAARNSIGSWMPAKSLELQHTIRLIRELDDEIVEIEEQIQAIMDELNSPITTIPGLGFRMAAMIFAEVGDFNRFDSPDKLLAYAGMSPSTYQSGQLKNCYPHMEKRGSRYLRYALYNATKYVCHWDPTFAAYLAKKRAEGKHYNVALSHAAKKLVRLIFAMEKSRRPYCLAA

SEQ ID NO: 411144 - protein, 427 aa, unidentified
MVDETPGDNPVTRGVLFVTEGQITVGVDVGSHMHRVAIGIPEKKIAEEFDLPHNKEGFENFFARISYYEKTYQVPVVVAMEGFNGYARPLDKMIQKKGYRLLNVNNLKLCRFKEIFPSPAKTDAIDARKILELVRLQPLLTDQEVILQEVCEIPRGHMVLKRLTRRRRQLVGEKAAILNRMQSDLHAVSPELVELARNKDGLAFLRFLTCREDLRQLERIHKSTLLGIKGIGKGFASKVQEWQKKAQFSEEAEYAGPMIIEDARRILELKERIKALDKQIGELCERSRLAGIVRSIPGFGLTCTSEIVAEIGSMERFRTERSLAMYLGMAPLDNSSGKRRGTRHAKQVNIRARSAMMTAMNRHILRVEESERYYRKKMKEGKRHNQAIRALGRHMVRVIWSMVKNDHFYENREATNIIVPFIEDIPA

SEQ ID NO: 411145 - protein, 323 aa, unidentified
MDKYKETFGVDISKDVFDVYGSDCGHSQFNNDSFGFKLFVKTLAPDDLVVMEATGYYHYRLAQFLYKNGIAVSVVNPLSVKRFIQMKLSKVKTDKSDAKAICEYALSNEVPLYNALSDVQAECLQLFRLMDNYLKKRTATKNKLHGEEVLGIPSKYVYRSLKRNLKHLDKEIKGIEDRLLELVKQDQQQQLTLLTSIPGIGIKTALFLVVITDGFSKFEKASQLCSYVGITPTIRESGSSVRGRSRISKVGNKKLRNLLFLCAFNACKHNKACKEIYERIVTKGKSKKLALIAVANKLLKQAFAIAKSGLPYDENYVSVLANG

SEQ ID NO: 411146 - protein, 357 aa, unidentified
MSKVKELNFEGQTIFCALDVHKKSWRTNIRDTDFELENYSQDPDPQALVAHLKKKYPGANYQVAYEAGFCGFGIQRFLQQAGIDCIIVNPADVPSSDRDIRRKTDTVDARKISRELSKGGLKGIYVPSEEMEHARSLVRQRTRLVRDQTRCKNRIWHLLMFSGLQLQPDDGPMKHWGRRFVDSLRRLGCPSAPLRLTLDIALEEYLQVRKLLSTATRHIRALSRQPAFEGTQKLLQTIPGIGLVNAMVIMTEVQDMARFKTLDKLCSFAGIVPDTDSSGESEKSRGITHRNNDYLRPAVVESSWMLIRKDPAMLMKYRKYCSAMNPNKAIIKIAKHLLSRIRYVWANKVGYEKAVVA

SEQ ID NO: 411147 - protein, 376 aa, unidentified
MDVVVARCAGLDVHKDTVVACVRTPGPDGDRVSETRTFGTMTVELLTLRDWLVAHGVTLVGMESTGVFWRPVFYTLEDAMECWLLNAQHMRNVPGRKSDVADAGWIAQLVEHGLVRPSFVPPPPIRELRELTRYRKTQIEERTREAQRLDKSLQDAGLKLSSVASNIPGKSGRDMLDALVAGTRDAEVLAELARGRLRLEIPALTRALTGRFGPTHALVVGEILAHLDYLDEAIGRVSARVDEVIRPFVAERELLTTIPGVDKRLAEAIIAEIGVDMTRFGAAARLASWAGMCPGQHESAGTSRSGRARHGDTHLQKHLAVAAMAAARTRHLPGRAVRPARRASRQGPRSQGRRTLHPRRRLPHPRGRRALRRTRR

SEQ ID NO: 411148 - protein, 354 aa, unidentified
MIIIGCDYHPGFQQIAFVDTDTGELQERRLEHREEAETFYRELAAQGLKVRVGMEASGHARWFERLLADLQFELWIGDAAEIRTKRVRKQKTDRQDAQLILRLLLEDRFPRIWVASGENRDLRQLLWHRHRMVQARTRIMNQLQAVALNEGLRSKKRLWRDSGREQLESFRLAPWASRRRRDLLELLDRLSPTIAELTQAIEQEAEKCPEAQRLRTHPGVGALTALAFVLIIGRADRFPCGKQIASYLGLVPLEESSGQRRRLGHITKQGNSLLRFLLVEAAQVTVRSDPEWRSKYFHLAMRRGRKIAKVAMARRLAVRMYWMWRQEWDYEQLKKFGSHAGQPGNRDGVPLNTE

SEQ ID NO: 411149 - protein, 424 aa, unidentified
MNNTQNQKIAQVTNKTLIVGVDIGSENHFARAILARGFEVSKKPFPFANTKEGFESFVSWIYNLAATHKLTKIMVAMEPTGHYWFAFVAFLKKYDVQVVLVAPQHVKHSKEMDDNTQEKDDRKDPIVIARLVPEGRYLIPYIPEDVFAELRVAFNRRCELVEEQVRIANRMIRWFDIYFPEYRKVYGRIDAKTGIMILKRAPLPADILDIGVDGICQIWKEAKLRGYGSKKAKQIYSAAAHSVGMKGGASVRWKLWQLLEAYELIERQLHDILQLIESLLYQIPGADKLLKIPGAGLVTVAGFLSEVGDIKRFSDPKQIQKLAGLAVVENSSGKRKGLPGISKRGRSRLRWVLFQLARSMVMFNPEMKAYHQYYTTRKENPLKKLQSLVAISARIARIFYGILKNGTEYDPAIVMKEFNKGVAA

SEQ ID NO: 411150 - protein, 374 aa, unidentified
MNVTHYIGFDVHKKVIAYCVKTADGQIVEEGTLPARREALREWAGARTQPWQGAMEATLFSAWIYDTLKPYATALHMAHPAKLKAIGCAKKKSDKLDARTISDLERCNLLPACYVLAPEMRDLRRLLRYRNLVVRESVRMQNKIAGLLMECGAPFDKHKLHGKKYFAQLLRTLQEVPAAVKDLLQMSRGAMEMFESVQKQLIRRLLAQPALQPRVERLASIPGVGPITALTWALETGDPHRFPSIGDAISYCGLTAAFRSSAGKEQRGPISKQRNAWLQTCLIEAAKVAPCWNPQLAALHAKELEYGHKNRATLEVARKLVAYLLAVDKSGQTFQLRLPSRVETTPETTKKRKTAATPAWSKKVTAALRQATAA

SEQ ID NO: 411151 - protein, 429 aa, unidentified
MTKKYILKNQTVPAERSAVETYLAPPPPSKGKIIGLDCHPDTFTAAVFAGQTPHDARKIGSRENLSLEALLKWAVAELTPQDIILMEAGSNSFELCKRLGNLGLKACVLESCHVGKHAKTYADNDKMAAARIALVYLAGNAPCVWVPDEQSRERRELLHAYRKSVDDHTAATNSIKSYLNGRGLRLGKHSLNEKTTSQWILEQADWSVLQKNILAEHLANITESKERRKRLYRLIAAEMAADPKMMRCMKVLGVGIVSAFALMAVIGDIGRFHSPEKLVAYIGLNPGQRQSGKGKDIRLGVGRRGRGDIRNLLIQGAHAIMRSGRNTPLGQWGWKLFARKGNRNVAVAAIARKLLVQVWHLLHGNPPLALESDTSFRIKLQKLAVALGSTLRTGIGLGKTLEDTVKTLLSHCQTNPEPSASPRETPQPA

SEQ ID NO: 411152 - protein, 336 aa, unidentified
MEGLSPLYRRVAGIDVHKMLHVVTLIIEAPDGTIKQQSREFGGFKRDCCALTTWLLESNVELVVMESTGIYWKSLYAHLERAGIQAWVVNAHFVKHVPGRKTDMNDSQWLAVLARFGLVRGSFIPPQDLRELRLVSRYRRKLTAMRASEINRLHKILDDGGIKLGGVVSDINGLSARAMVTGLIEGRSITALLDMARGRLKLRRDDLQAALDGELSERHRLVLEHIHEHIEILEHSLAELDAYILAAMAPYQWAHRLLQTIPGIDQIASALILIEIGGDMTRFGSAERLAAWAALCPGNNESAGKRKSARIGKGSSVIRYIMCECAKEGLNNSFSA

SEQ ID NO: 411153 - protein, 328 aa, unidentified
MKTQAGADISGRWFDICVILESKPIHRRFDNSKAGLAACIQWLESLGIKDLEIAIEPTGRYGDLVAEYFLRRKYRVLQVQPFLFHRYAESLDMRGKSDFKDAYALAQYCQERGAKLRTWRPKNELEWELRDTQLLLRSLTKRAIVLQCQLQCRLRSHFVAQALQQELERCQQQLDEALQHAKELVESHPVLSRDFELLRTIPGIGEKSALLLVTLIDFRKFRSSRSLACFLGLTKKKHESGARVHGKEGISKRGSKLIRGALFMPARSARIHNPALREFSERMEAKGKHDWAIQMAIIRRLVTVAWALVTRQKEFDRSYVNPHQLSPI

SEQ ID NO: 411154 - protein, 341 aa, unidentified
MDKELYFGVDVSKKTLDLAYYDGETIDWKNAHIKVSNDAAGFKKIGSWVAKVGKDFDTFLFCMEYTGLYNQNFRLWLESKGYIYGMVEPRKMHHFEPDLDDDQRSLDRVKTDELDAFRIAIYCEQNHKKILRNPSKLPSPVYFKLKRLLAERKQNTKQSTLYKQQLHDICAYDTDLSVERKKLLLKNMKENLKAIDKEIDSYINEDASISKNYDLLTSIPGIGRIIALETIVLTENFTAISNPRKYACYIGIAPFKKESGTSVRKRTTVSKKGFSEAKADLSIAVLSAIRNNPSIRDYWIRKRKEKCGGIVLNAVKFKLVLRMFAVIKRGTPYVETDAYKN

SEQ ID NO: 411155 - protein, 407 aa, unidentified
MRRYYLGVDWADQEHAVWVEDELGAKVTALAVQHTAAGLSEFGRWLYAQRAQEIELWAAIEKPEGRLVDFLLDHGVVVYPVNPKALDRARDRFRMSQAKSDPFDARVLAAFLRTDHAHLRPLVPNSEPAQELKLLTRDYRRLVRQQTRLVNQLTATLKEYYPRPLELFEDLTTAVVRAFLESFPTPEALRALSRKQWQRWARAHGLSEARTQALWEALTQPQLPVPPHVVRAKARLVRVLVEQLGAAVYAVEEYRKAVEDFFAAMPAAEWAQTLPGGKSGTTVPILWAELGDAPGRWQSFQHLQAEAGGVPVTVRSGKSQLVQFRFACNSHLRSTSYWLAFISLQQSEWARAYYDRQRARGHSHARALRALGAKWLKIIFLMWKHHARYDENHHLATMARQQLRQAA

SEQ ID NO: 411156 - protein, 410 aa, unidentified
MPEPTYALYVGVDWGNQTHQVAVLDTARGLRGERGGAHDGPGLHALASWLAELAAPGTVAVAIEVPHGAVVDTLRERGFAVYALNPRPMDRFRDRDTVAGAKDDRRDAQVLAAALLTDRPAFRRLHVDDPQVVQLRELTRIEAELSEALRRLANRRREQLLRFYPQALELCPAADEPWFWALLTQLPTPPAAARRRRGPVAALLREYRIRRLTADEVLTVLRRTPLTVAPGTLEAATEHIALVLPRLELIATQRRACAPRVETMLAVLAAAGQQQGHRDVTILRSFPGVGRVVAATMLAEASQLLAARAYHRLRASGGAAPVTRQSGKQRGVPMRYAWNPRLRNALYYWAFIAARHDPATRQHYEGLRARGHSQGRALRGVADRLLAVLIVMLKTQTLYDPSRREAKFAA

SEQ ID NO: 411157 - protein, 454 aa, unidentified
MRKPQVVPDEDHEVVYERVAAVDVAKASGVVCLRAPDPARPGRFVNRIWDNVPAMRAQIAELGGELLRCRVQMVTLESTSDYWRIWYYVLESIGLAVQLVSASQAKNLKGRPKTDKLDAMWLARLTQWGMLRPSFVPPAAIRRVRDFTRARQDLVAERTRCLQRVEKLLEDAMIKVTSVAKDGMKAKSVVAMVAALAAGERDPRALADLAKGPLRARRDQLAQALDGMFDSHHGMIARSLLDQVAFLDRQITLMEDQAIAALAGVPESWGVDADGQTGPQAGTSPDSPVLAAAHRLAEIPGISLWLAIVIIAEIGLNMTCFPTPAHLVSWMGLCRSAASSGTRHGKGKPKKGNSYARAAAGQAAIGAARTATFLGERYSRIARRRGKAIAQAAVARSIMIIAWHLLNDPQARYRDLGPDFYPSRINRDKKIRNHIRGLQALGLTIAITGDEQAA

SEQ ID NO: 411158 - protein, 412 aa, unidentified
MNRKRSKPKIDRRMPMVHPNAAAIDVGATMHMAAVRAERTPEPVRSFGTFTTDLHRLVNWFKECGVETVVMESTSVYWIPIFELLDARGFTVFLVNARDAKHVPGRKTDVSDAQWLQRLHSYGLLRASFQPKGQIAELRAYVRQRERLLEYAASHIQHMQKALTQMNLQLHHVVADITGVTGVQIIRAILAGERDPKVLARLRHYNCHSSAETIEKALTGSYRAEHLFALEQALALYDAYHEKASACDVRIEAVLKELSIGRGCRSDSLPSSRRRTDQANGLAFDVRAALFALLGKDITQIDGLGPYLSLKLIAECGDDLSAWPSSKHFTSWLCLAPSNKISGGKVLSSRTRRCGSRASALLRLAAVTVGRTDTALGAFYRRLSARIGKAKAVTATARKIAVLFTRHATASG

SEQ ID NO: 411159 - protein, 415 aa, unidentified
MSLLGRWVGRAIGVDVHRGFCVIAICEEGVVRSAGRVSSIPEGIEAFAESLLPSDRVALEVTGSAWELARILEPRVDRVVVVSPDDTGIVQARAKTDRLDARALARLLWAGELESVWVPDERCRVLRRRLARRQQLVHARTRSKNEIHAVLQRRLRGRPPCSDLFGVKGRRWLSGLELPLEERESIDAAIRQIEFLDWEIREVEQLIAHQALSWPEIHRLMTVPGVNLICAATFIAAVGEVNRFMTSRKLVAYLGLDPKVRQSGEAPARSGRISKRGSATARWALVEAAWQAARQPGPLHAFYQRTRARRGHGKAIVATARKLAVLFWCMLTRAEDYAHQQPSLTKRKLRQLELTAGAPKHARSTVGALSRNETLRQAERQIAEQAETSYLRMVKDQQAAAPTRKAGASVTLERA

SEQ ID NO: 411160 - protein, 373 aa, unidentified
MKEKVRFLGLDVHAETIAVAVAEPNGEVRSLGTIPNRAESIRKMIRKLGTAEKLRACYEAGPTGYVVYWQLAELGVQCEVVARTLVPVKAGDRVKTDRRDAEKLARCYRSGDLTAVWVPDEGSEALRDLVRAREAAKQDQMRARHRLSKFLLRSGQRPPTGVRPWTRLIWVAQLRLTQSAQESTRQDYLHEVEHMRARVTRLEQAIMEAVQLASPSLQQVINDLQALRGIADISAVTIAAELGQLSRFGSARQLMGYCGAVHSEDSSGKRIRRGSITKTGNAHLRRIVGEAAWSYRRPPCIWYGLRRRQESISEEAKEIAWKAQHRLHKRYMRLGAAGKPQGKIITAVARELLGFIWAIGTKAETTVSQRAAA

SEQ ID NO: 411161 - protein, 412 aa, unidentified
MEVLYPHCAGLDVHKDTVVACVRHMVAGTVKREVRTFKTTTKELLALSEWLAAEGGTDIAMEATGIYWKPVWHILSDGDFVLVLANAAHVKNVPGRKTDVNDATWLADLVAHGLIQSSFVPDEQTQEMRTLLRTRKQLVRECSRHVQRLQKTLEDANIKLDSVISDVMGLSGRRMIEALIAGETDPAALAAMAHRRIKATPDELEAALRGRVTRHHRFLLQLHLQQIDAVNAAIDQIDQEVDADVEPFRATVHLLTTIPGIDELSACVILAEIGRDMSRFPTAGHLISWAGLCPRNDESAGKRRSTRMRKGAPWLKTTLVQCALAAARKKASYLQAQFHRLRARRGAKKAIGAVAASILTAAYHMLKTGALYEDLGADHFDKRGKGKQIDRLVRRLQNLGFAIEITPVAAAA

SEQ ID NO: 411162 - protein, 410 aa, unidentified
MSVLEVALDPSTVIVAVDPGKAFNRVWISNGSGLLVDPRSLPVSREGITALELELNKHGPDCPVIAIEATGSLHHSWVVELERRHPGSVRLFAPSETKSARMQLGSGRFKTDDRDCAALTYMARQGGGRRCGQLASVEALRAAVRHRRGLVADRKVAQQRLHDQLNALCPGLSAPAGHGRSLAIETPTGLAVLACAAAFAGRPPQRRSLMRRAPGRLTTSTAQYWVTRWRQCLPPPPDAEQRALRLGRDVDRYRRLRDDIDAIDLEIGTLLSETAGQILTTLPGVASIRAAAFAAHSLPIERFPDAEHLYSATGLAPALYQSATLHRRGRISRQGLAEHRDALMGIAWGLSQFSPSFTERDAELRARGMAPIQARVALARHACRLAYRLLRTQQPFDEQRYRQGRLSSER

SEQ ID NO: 411163 - protein, 346 aa, unidentified
MNSVGIDLHRKRSHIAALDEEGRQLLSRRIVNDPQTFLGLLEDVGECRIALEATYGWEWLADVLQDAGYELHLAHPMRTKAIASARVKTDAVDARTLAHLVRADLLPEAYVAPRELRDLRDLLRHRVALTRMRTSLKNRVSAILAKHGIAAPYSDMFGVGGSRFLAQVELREGPRRRLDSHLALIADFTREIKATSHEIDARAKEDPYVPVLCQIRGVGHYIAMLIIAEVGDIGRFATARRLCSWAGLTPTVRSSDGKARLGHISSQGSRPLRWALVEAAQHAATGGGPLRETYERIAKRRGKQIAKVAIARQILTLCYYGLRDGEIRCLAPRATTRAVRPLAVSA

SEQ ID NO: 411164 - protein, 368 aa, unidentified
MKQYHKYVGLDVHKDRNEVAIAESSGEVRLYGSISNDLHALEKLVAKLRGENVVLHFVYEAGPCGFGIYRRLKQLELDCLVVSPSLVPRKSGDRVKTDRRDAVMLARLHRAGELSPVHVPDERDEAVRDLIRARTDAIKDQRASRYRLKGFLLRHGYKYTGKSSWTEAHLRYLRELVLAHAAHKIVLEEYLLTINQATDRIARLDEAIEAQVSQWRMRPVVEALMGLRGVKLLTAAALVAELGDLSRFTHPRQLMAYLGLVSSEHSSGNRRRQGSITKAGNGHARWFLVEAAQHYRLPPKVSKELAPRLEKLPQRLKEISWKAQTRLNKRYWALAQRGKLTQKIQVAIARELVGFVWAMAKDVRPLAD

SEQ ID NO: 411165 - protein, 338 aa, unidentified
MKLYGAIDLHSNNNVTVLIDEQDQVVYQKRLPNDLPLIAQQLSGYRDRLQGIVVESTYNWYWLVDGLMDQGHKVHLANTAAIQQYEGLKYTDDHSDARWLAHILRLGVLPQGYIYPKEERAVRDLLRKRGQMVRQRTTNLLSLQNLVTRNTGSSISSNRIKTLDAEQIDQLLPNPDLALAVKANLAMIQCAAAQIDILERPVTERIKLRAGFSFLKTVPGIGQILALTIMLETGEIRRFPTVGDYASYCRCVGSQKLSNGKKKGSGNTKNSNKYLAWAFVEAANFAIRYNARIKSFYQRKKAKSHGVLAIKAVAHKLCRACYYIMKDQVPFDITKAFA

SEQ ID NO: 411166 - protein, 347 aa, unidentified
MTEAYDGRQVVGIDLHRRRTVIVRMTEDGRKLGTVRIANSPAALRKEIAKAGQAPQAVVEAAYGWYWVADTLAEAGAEVHLAHPLGVKAFSYRRVKNDERDAADLADLLRMGRLPEAWIAPPEVRELREVTRYRHKLVGMRTSLKDQVHGVLAKLGIAVPCTDIFGGFGSAWLDGLDLPQPYAGEVDSLRQLMAALAGEITLMEQVTGDLLAGHEGYRAIQGLPGVGPVLAAVIVAEIGDIRRFPGPGQLASWAGLTPRHRESDVKVARGHVTKQGSRTLRWAVVEAVQRQPAGARPRQVKDAIIARRGKEAKNIAKVAAARELLCDVFYAMRDGRVRRAPRPGQAA

SEQ ID NO: 411167 - protein, 401 aa, unidentified
MVSDFTKGRYNLMNIFVGIDIAKLNHFAAAVSSDGEIILEPFKFTNDADGFLLLVSKLESFDKNSIIIGLESTAHYGDNLVRYLVAESYQVCVLNPIKTCQVRKNNIRKTKTDKVDTYVIAKTLMMQDSLRFVSFYDLDMMDLKNLARFRQKTIKQRTRLKIQLTTYVDQVFPEIQYFFKSGLHQNAVYALLKEAPSPKEVASMHLTHLANLLKVNSHGHFKKEHAKDLRVLAQKSIGANDSAISIQITQTIQQIELLDSQLNKIEAQMADIMQFHDSVIMTIPGIGFINGGMILGEIGDIHRFSNPSKLLAFAGLDPSVYQSGNFQAKTARMSKRGSRVLRYALVNAAWNVVRSNATFKAYYDAKRAEGRSHYNALGHCSGKLVRVIWKMLTDEVEFNLE

SEQ ID NO: 411168 - protein, 340 aa, unidentified
MNIKRIGLDLAKNVFQIHAVDHHEHVVVRKSIRRAHMHAYFSQLAPCTIGIEACASSHYWSRELTRMGHTVRIIPPKFVKPYLKGNKNDANDAEAICEAISRPAMRFVAVKTERQQTLQAEHRVRARVIKSRTALCNEIRGFLGEFGVVLPVGISQLRKALPEILSQQEQWDDRFMRLLCELAEELRMLDDRVAGHDRRLAEAAREDICIQRLMKIEGIGVITASAMVALLGDATQFKNGREMAAYVGLVPRQHSSGGKQQLGHISKRGDSYLRTLVIHGARSVLKTCAGKEDRRSQWLQSVAERRNRNIATVALANKNVRIAWAVMSRGEDYHGSRVAG

SEQ ID NO: 411169 - protein, 327 aa, unidentified
MNTIGVDVDSKFLICHIHRSGRDSPAAQFNNDPAGHRKFIKWATRHGKSARVCMEATGVYSLPFALCLHTVPQIEVMVVNPKAIKHFATANLQRGKTDSLDAAVILQYLERMPFRTWQPPAEEILEIQHICRRVVQLHTELTRERNRHKAAKRLGSLGRVVANDTAVNMRHLERRIGLLEQAALDLIQCIPELNDKLKLLTSTTGIARKTGPRILAELACLPDDMTGPQWVAHAGLDPRPHESGTSTNKPRRITKAGNRYLREALFFPALVASQKDPHIKAFYQQLLKRGKKPLQAIVAIMRKLLLAIWGMFKNNEPWDGNKFFKIA

SEQ ID NO: 411170 - protein, 416 aa, unidentified
MNSPAKSTSQRFLALDLHKHYLVVGGVNFRQQVVLNPRRISLEKWPAWAKANLLPCDAVVLEATTNAWDIYDQIVSLVARVVVAHPPKVKWIAEARVKTDRLDALRLAHLLAADLIPEVWVPPVEVRELRALMAHRRRLVQMGTRARNRLHSLLHRHNLKPPAGKIFAQKHREWWQKLDLSPTQLMRIRHDLATLDHVQGQLAEIEQELSRLSTAAPWADQVPFLLQLPGFGLIVSLTVLAAIGDISRFSHPKKLVGYAGLGASIHDSGEKHRTGRITKRGRKELRWVLVEAAWRAADTHPYWKAQYERLERRIGSTKAAVALARKLLVAVWYVLTQRTSDRHADPDKVAFKYIMWSWKLDDVKRNGLNTRQWTRYHLMRLQLGEDLTHILRGGHRYPIAPGEELRALLPELQAAD

SEQ ID NO: 411171 - protein, 462 aa, unidentified
MSKNTPDSQPLSIKNMMTLPTPKHLEHLNIWSAGIDIGATSHFVAVPEGCDEQPVREFKTFTTGLNELADWLKQCGIKTVAMESTGVYWIPVYELLEEKGFDVKLVDARQVKNVSGRKTDVLDCQWIQQLHTYGLLNGAFRPVDEVCELRAYIRQRSMLVKSASRHIQQMQKALTQMNLQLHHVITDITGDTGMKIIRAINNGERDPIVLAKHRDRRCKSSIDDITAALTGNYRAEHLFCLKQSLELYDLFQEKIQACDCEIESKMAKFATDSRVVDVSANELSPSKKKASKNSPDFNLGSELHRLTGVDLLAVPGINTVTAMQLIGEIGLDMTQWNNAKQFASWLGLCPGNKVSGGKRLSGKTKPSNNRAAATLRMAASTLYRSPTALGAYLRRLKAHKGPMKAITATAHKLAKIIYNMLRHGTEYMEAGQQYYEEQYRDRSIRNLKKRAAELGLQLVETT

SEQ ID NO: 411172 - protein, 351 aa, unidentified
MIIIGCDFHTRYQEIAWLDTDTGEIHERRLEHTGDETRKFYAAFSGPVRVGIEATGYSQWFERMLRELGHEYWIGDAGAIRASVVRKQKTDRRDAAHILDLLMTNRFPRIWVPTPAERDLRQLVLHRVKLVQLRTKVQNQLQALAMGQGVCRKKKLWSVRGRAELESLPLDRWAQRRRQELLQLLDQLEGSIRELHAAVEQQARQHPEAVLWMTHPGVGPVTSLAFVLTIGPVSRFARSKKVSSYLGLNPGEHSSGGHQQMGPISKQGNSMMRWLLVEAGQTAARRDPVLGRMYQRLKFRRGSAIAKVAVARKLAVRLYWMLRSQCDYAALVRMSGSSSSAVVPEVSGSGR

SEQ ID NO: 411173 - protein, 432 aa, unidentified
MDVVFPRCAGLDVHKKRITACRIVPDPTGQKAEGITELQPFGTMTRDLLALADWLTEASLTHVAMESTGEYWKPVYNLLEDTFTVFLVNAAHVKNVPGRKTDKADARWLAKLMRFGLLQASFIPPKGQRDLRDLTRYRTKLVQERVREVNRVQGVLERANIKLASVIADIMGVSGRAMLEALIAGRADPATMAALAKRRMRSKIPVLEQALTGIVHDHHRQLLAMQLAHIDFLDEQIEALNAAIETSLKALSTAEPSREAQPLPLTFSRAVELLDTIPGIDQRGAEVIVAEIGIDMSRFETAPRLAAWAGVAPGNDESAGKQRSGKTRKGNRPLRAILTQLAHAAVRTKDTYLSALYQRLAVRLGKKRAIIAVAHSIMCSVFHMLSRNEVYRELGANYFDERRRHSTVDRLAQRIERLGYWVHLEPVATPAA

SEQ ID NO: 411174 - protein, 384 aa, unidentified
MKKDNILFIGLDTHKEQTQIAYTLDHRTCEVNDLGRIQTTKSGFVKLARQLQSKYPHATLHFVYEAGPCGYWIYRLLTSLGHCCFLVAPSLIPKKPGDRVKTDKRDAQNLARLLKNNDIDPIYVPEPEDEAVRDLSRAREVAMRDLNDAKHQLKSMFLRNNIRYTGSDSWSLKHLRWLTEIVLPHPCQQIVLQEMIQTISERMARLKRLDNELTHQVMQWRYYPVVKAIQAMRGVRLLVATGLIAELGDLSRFDTPRKLMKYVGLTPSEHSSGEKRKLGAITKCGNGRARRLLVEGAHSYRYAAKVSKEMQVRQEGLPKAIIDKAWEAQMRLCRRYQRLLMRGKSRNVVTTAIAREMIAFIWSISREVVLQRVDPRTRLSRVPA

SEQ ID NO: 411175 - protein, 342 aa, unidentified
MQHTTIAVDVAKSVFEIGISHRPGHVDKHYRVSRNQLSIFFANQPPATVVMEACSSSHYWARQFMRFGHDVKLLPPFYVRPYVQRSKTDRTDVKGMLEAWRNSEIRPVPIKTEAQQQLIALHRVRSTWIATRTARINTARGILREFGIVVADGASRVPARVTELIEDAGTELPMGVRDLLNELVVEIRQLTSRIENVERQLAAMAGETPVVERLRSIPGIGLLTATALIAFVGNVERFPSSRHFACYLGLTPREHSSGLRRQLGHISKRGDAYLRMLLTHGARSVLWAAKSKSKPDKFSTWAVDIHGRRGHNKASIAVANKMARIVWAVWKHGNSFGIRSHG

SEQ ID NO: 411176 - protein, 347 aa, unidentified
MKFYTTLHKYYCGIDLHAKILYVCILDQQGDKLVHQKIGADPQALLRLLEPYIGNIVVGVECMHCWYWVSDFCQTHEVDFVLGHALYMKAIHGGKAKNDKIDSYKIASLLKGGNFPLAYNYPREMRATRDLLRRRTGVVRHGASLKAHVVNTDSQYNLPAQSLNLKNVSAREHLRHHYDDEVVQRTIELDMVLLDCYAKELAKVEYFIEKQAKQHHGTYLYIIRSFPGIGQILGLTILYEIGHITRFKSVQNFASYSRLVKCKAESAGKTYGTSGNKIGNGHLKWAFSEAAVLYLRGNDKAKNYLNKLQRRMSKGKALSALAHKIGRCVYFMLRDKTVFDEKKFLKG

SEQ ID NO: 411177 - protein, 357 aa, unidentified
MIAMKYYTSTTQFNCGIDLHARQMYVCVMDRDGKKLVHSNIKNNDFAFFLKLVAPYRHDLTVCAECMFGWYWLADACQAAGLHFVLAHALYLKAIHGGKNKNDRIDSEKLAHLLRTNLIPPAYVYPAEKRPLRALLRQRLRYIWNRTELLARIQSHQLAYNRPISRQRLYNRESWKEQLLTSEPDPVRQLALQNDLALIGHFDAQLAVLEKDLLKLTKRTTSRDFALLRTTPGIGDYIGLTLLHEIGDITRFPTVKDFLSYCRLVKGTVASAGKIKGLRGAKLGNPYLRWAFGEAAVVAKRDALLGPLAQRLEARMNGNKFKANAVLAIKLARAVYFMLKNKTAFDVDRLVAALSPN

SEQ ID NO: 411178 - protein, 486 aa, unidentified
MPSPIPEGTGRPSLPLHRYGVGVDCHSRFFQVCILIPQGTEIVRIERHVPAVWPELRAAQAWVLQTLVEHGIDSPQSDLRYTCESTGQYHMPLCLAWRGHPAIINPSDTSHVRRKTDRLDAEKLAQHSLCGLWRESWMAPDEIQELRVLANQRSQLVAERSRLTNRINSDLLRFGHVVGQLGKINGSLVRALIEDFCANGSVALHRDHFSEAQIPAGVVRVLDQRWKRVDALDQEIKAVEDLCRERADDLTWRIGEGRSAPGRQLRSNLESIPGVGTQTVITWLAEVGDITRFGSVNKLLAYAGLDPSDRISAGKVTATKPRKGNARLHAALRNAARTMLAHTPSCKFAMWARGYLGRHSRGGKSKAVHALARRVGKALYYCHRKDEPFDDSGYQALLEESSYPLCPVEEMGLSPGVVRKLKANGLRTSRQVVDAFYSDLGRRPGCGKVTVQAVATWIDRYRGRSPDRTRKPKGPEASGDPPGTEG

SEQ ID NO: 411179 - protein, 346 aa, unidentified
MNYYAGIDVSLEQSSVCVRDGDGKIVREAKVASEPEALIAWFASLGLVMERIGLEAGPLSQWLYAAMEEASLAVELLETRHVRTAFKTMPVKTDRKDARGIAELMRMGWFRPVHCKSIPAQETRAILSTRRLIESKLRDIEMSLRGVLRGFGLKVGKTTPTNFADRIRELVSGHSTLEVIAASLLAVREVLLREFRAYEKRVRTTARHSEDARLLMTTTGVGAVISLTYSSAMDDPERFKRSKQVGAHYGITPKRYQSGDTDYTGRISKIGDKSVRTALYQAAHIILTRPVKPSALKTWAMQLAKRIGMAKAKVALARKLAVIMHRMLVDRKPFDHKLLANQPAPA

SEQ ID NO: 411180 - protein, 309 aa, unidentified
MKHELTLIAVDVSKESLEIQTDERSFDVPNTEKGIARLIKAAGAAQLPFVVCEAAGGYERLLPESMHAVDIPICRANPARIRAFAASEGIQAKTDPIDADVILKFAKSKELRPAAPVSSRRRELIALLDRRDHLKEQGAREKNRIRNSPDFIHASIKRMLNVLKKEITAIEKRIRELIKSDESLSACLSCLTAIKGVGEVSAWMIMAFLGEITMLSRNELVALAGVAPYNRDSGRFKGKRKIKSERAKVRKALYMATGTAAMYNPVIKAYTDGLQSRGKPYKCAMVAGMRKMLIHMQSELRKAEIKVEL

SEQ ID NO: 411181 - protein, 385 aa, unidentified
MSAHPTPIQAAAQLQANTLFASLELSKARWLVTVSAPGSDKLSRHQVPGGDGQALLELLWRLQAAAARRTGAPVMIIVIQEAGLDGFWIHRLLVQNGITSHVVDPASIAVNRRHRRAKTDKIDGVKLLRTLMAWMRGERQVCTMVQPPSPEDEDRRRLARERARLLKERIQHTNRIKGLLSGQGIPDYDPLHRDRRPCLAALTTGDGRPLPERLKAEIGRELDRLEMVVSQLTVVERERDALVARTAEADACAAPAALARLRGIGPELAALLWLEALFRRFDNRRQIAADAGLTPSPWQSGGIDREQGIAKSGNPRLRRAMIELAWFWVRHQPGSALSRWFVERVGTARGRVRRIAIVALARKLLVALWRYVTQGVVPQGAVLKA

SEQ ID NO: 411182 - protein, 408 aa, unidentified
MRYYLGVDWADEAHVVWVISGDGTKIATRTVPHTTDGMIEWARELDEWRGQSIELWAAIERSDGRVVDFLLDHGVMVYPVNPKALNRARDRFRQSGAKSDPFDARVLADFLRTDHAQLHALHPSSEAAQELKLLADDCQRHIRQQTRLVNQLTMTLKAYYPRALEVAELTTALARQFLQDFPTPAAVAALSERQWQRWARAHRLKHARTQELWEILQQPQLPVPAHVVRAKARLMGSLVGQLSLVVAAVAQYREAIEEFFATIPAAQWARTLPIGKHGITAPTLWARLGDAPGRWESFRHLQAHAGAVPVTKRSGKQQRVVHFRFACDKALRSMVDHVAFLSLRSSEWARAYYDQQRGRGHSHYEALRALGAKWLKIIFVMWQRHAPYDEQYHLATMTRQQLRRQKIA

SEQ ID NO: 411183 - protein, 345 aa, unidentified
MHIASIGIDLGKTTFHLVALGERNKILLRKKFSRPQLLAYTAKLPLSLIGLEACAGAHFLGGALREQGHQVRLIPAQFVKPYRKSNKNDFLDAEAIAEAVTKQNMRFAQLKTQEQLDWQAMHRVRDRLVQRRTALINEIRGFLLERGITFAAQPVHLRKNLPGLMEDAERNLSPRLRWLLDRMWQEWKQIEIDIEAITDEIERISNDDARCRQLRQIPGFGPLVSTATVAAIGNGAAFRRGRDFAAWVGVVPRQYSTGGKQKLYGISKRGNVYLRRMLIHGARSVLFRVKYDTGGFGQWVRRLAQRAPSNKVVVAIANKLARIAWAVLSSGRDYRHQPLPQLAAA

SEQ ID NO: 411184 - protein, 349 aa, unidentified
MNATTVAVDLAKNVFELAVADGEWRIIERHRLSRARFARFFVHRPPCQVVMEACGSAHHWARRILAEGHTVRLLPAHYVKPYVGRSKTDRADAAALIEAARSPRIRAVPIKTLEQQQLQSLHRLRSQWMSTRQRYLSTLRGILREFGIMIPLGPSVAKAQIGAALAEADSGIPDGLRPGLAEMLQEIAPLEEKILSVERQLAALTRTDERVQHLRQIPGIGLLTSTALLSTVGDIHRFPSGRHLACWLGLTASERSSAQRRRLGKISKQGDVYCRTLLVHGARSALLAARRAQRAGKPLDRLRRWALNCERERGHNKATVALANRLARIVWATWKYERAFDGNWGNQAA

SEQ ID NO: 411185 - protein, 346 aa, unidentified
MSHKTAATVAHTIGIDTGKNILHLIGLDDQGAIVLREKIARGRIAARLANVPRCLIGIEAGMATHYVARELSALGHDVKQVPPAYSKPFRQGHKNDFRDAHAIAEAVQRPSTRFVPVKTDDQLDLQALHRVRSRLVGQRTAVINQIRGFLLEHGITVRQGLRFLRQQLPDILAKRSDVLSPRMIRIMEDLSGDWRRLDERIQHITEEIEVLAHGSESCRQLMTVPGIGPLIASAMVAAIGNGAAFAKGRDFAAWLGLVPKQMSTGDRTILGRISKRGNRYLRTLLMQGARVILLRPANWAKHSFGPWLTAAANRLHHNVLATALANKLARIAWTVLMQARSYEARV

SEQ ID NO: 411186 - protein, 390 aa, unidentified
MPSVSERPEAPTAIQTHLAASYVSLELSRSIWLITSLSPGSGEKMSKHSVRAGDVAALLARFSELKRKASERTGKSFPIVVIQEAGLDGFWLHRVLQSEGVESHVVDPSSIATSRRRRRAKTDRIDGEALLRALLAYKRGEPRVCAMVKAPTPEEEDRRRLCRERKVLIAERVKHVNRIKGLLFCQGVSGYKPLRRDRRQRLDELRTGDGRLLPKHLKAQIGRELARLELLLEQIKAVEAERDALFAAAKAAAPAPGPLAMLLNIKGIGPEFAAVLWSEGLFRHFDNRRQVASYAGLAPTPWQSGSVDREQGVSKAGNPRLRTTLIQLAWLWLRNQPQSALALWFKDRVSRNGGRLKKTTIVALARKLLVALWKYVTAGVVIEGAIVKSA

SEQ ID NO: 411187 - protein, 405 aa, unidentified
MWYAGIDWADDHHDAVVIDEQGQRVASCRVAHTPEGLAQLIAFLQGTSGSAPTPREIACLIETTHGLLITALLDAGLAVYPVNPKTVDRRRKPSGAKTDAIDAYLLAKTGRSDLADLRRLALDSPLVQELKALTRDQDGLIQSQTRLVNQLTACLKAYFPVALDLFTKLQQPLTLAFLQGYPTVEVAQRASVDALTQLLRQHHHPTPAATAQTLWERLHLPQLHADAITTRTKSRLLLALVSQLAPLLEQIKQYDAEISRLFLRHPDSTVFLSLPRAGKRIAPRLLAGWGDDRERYAHAASVQALAGTSPVAYASGNYARAHRRYACIKPLRNTLYQFAWQSTFQEPWAAAYYQRKRVEGKTHSMAVRALANGWVRIIQAMWLRQRPYTAETFLAAQHAHARQVA

SEQ ID NO: 411188 - protein, 403 aa, unidentified
MNSVGIDISKGRSTIAVMRPFGEVVISPFEVRHTDSELSELARQLKSLDGETRVVMEATGNYHTPVAKLLHDAGLYVSVVNAKLVHGYGNNDLRRVKTDKKDSVKLANYGLDRWLTLPRYIPEEDTRLLLKNCYRQYRQYSKVQTVLKNNLISLLDTVFPNANRLFSSPIRGDGSEKWVDFVAELWHCRCVSEKSERAFTSKYLRWCRKHGYNFSEAKAHTIYAEASGHIGVMPKSETTKLLVEQAVAQLRATSAALAALKHEMQTLASQLPEYPAVMDLFGVGPTLGPQLIAEIGDVRRFYSKKALVAYAGLDAPPNDSGDVTGRHKSMSKIGASSLRRTLFLVMSVYLQTAPLDEPVYPFMDRKRAEGKLYRVYMMASANKFLRIYYATVKAYLESLEHTA

SEQ ID NO: 411189 - protein, 403 aa, unidentified
MEPSTTPEIIIGLDVGKTDHHASALTTTGERIYDKPLPQDEAAQREIFASMQAHGSVLMVVDQPNTIGALPIAVARDCGCTVGDLPDLAMRKAADLYPGRSKTDRRDAFIIADTARTMPHTLRAVDRDDETLVALKMLAGFHDDIAKDATRTKNRLRSVLTQIHPALERVFAGEILSRTLVLDSLIHYEGPTKLAAAGRGRVLKWMRNRAKKDPVALAIFAALAEQTVTVPGMAAAELVIPQLAANIEALQAQRDTIAGQVEEMLESFPLAQVLMSMPGVGIKTASNIVLPIGDCQDFADAAHLAAYAGIAPTTRQSGTSVRGEFPTRAGNKQLKNAMFQSAWIASNCPPASRDYYLRKRTEGQKHNAAVMRLARSRCNVIYALLTRREFFREIPARNIATAA

SEQ ID NO: 411190 - protein, 343 aa, unidentified
MQTITTIGLDIAKSVFQVHGADAEGNVVIRRQLKRRYVLAFFQKLPPCLVGIEACASSHHWSRELQALGHTVRLMPPAYVKPYVKRHKNDAVDAEAICEAVTRPNMRFVATKTREQQSCLTLHRTRHLFIRHQTSVINAIRAHMAEFGIVAPVGRNGVEELLAVVADASDKRLPEIARASVAALGAQLRALKAQILQFDRLIMAWHRSNQASRRLDDIPGVGPALATALVATVADPRAFRSGRNFSAWIGIVPKQHSSGGKDRLGSISKRGDRYLRGLFVAGALAVIRYAKIHGTKHRPWLTALLARRPTKVAAIALANKIARMAWAMMAKGERYKEPVALAA

SEQ ID NO: 411191 - protein, 328 aa, unidentified
MEYEHYISLDWSQSVMSLARMGRHSSKVEVKEGSSSIRGIKNFLSKYSGSKIFTFEESTPAQWLYTELKEEVDQVIVCDPYRNRLLSEGPKTDRIDAIKLCRLLKADLLKPVFHCTDEWIHRRKLMSVYEDLVKSGVRIKNQRSSIFRSHGKKVVSVSEVELASDRFILESLENQIESYEEQRKIFKKEFSRLSRNDSLIQLLETMPGFGSILAIRFAAIVVDPRRFKRPSHFLSYCGLVRLDRISGGKSYGRKRPRYSHTLKGVIKSATITALTKKNIYQDYYHYLKEKKGYPNHHARHAVARKLALVALGIMREKKKFDPDKVFTV

SEQ ID NO: 411192 - protein, 350 aa, unidentified
MVTIGVDLHKRWHTAVAVDEHGRKLAERTVRATPAGHLELLAWGQARSTERRWALEDCRNLSRRFEQDLLAAGEMVVRVSPRLMGTARRSGREPGKSDPIDARAVARAALQEPDLPVARLDGPERELRLLVDHREDLVAERTRAQARLRWHLHELLPGEEPASRTLDRPAVLGALEVRLASLPGVVAHIARDLVGRIRGLTVDIDALEKRIGSLVRPLAPSLLALQGCGVLTAAKLIGEVAGIERFRSAAAFARFNGTAPVPVWSGNVTRHRLSRGGNRQVNAALHRIAITQRRLPGPGRAYVEKRLAANDTRTEAIRALRRRISDEVRRRMLLDLALGTARPAPLGMAA

SEQ ID NO: 411193 - protein, 363 aa, unidentified
MIVIGTDTHKRTHTCAAVFAQTGQLAGELTASAREPGFRELLTWGRSLDEERIWAIEDCRHVSGSLERFLVACGERVVRVPPKLMGQSRRGERSAGKSDLIDALAIARAALREGPETLPVAYLDERSLRVKLLLDHREDLVKARSEDQCRLRWHLHDLWPELEIPAGCLDRIVWLDRLGRRLARAEQGTRVRIARELVNEIRRRTRRIKELEREIAALVKAQAPELLELEGCGALTAAKLIAETAGAERLTSDAKFARLAGVAPIPASSGNRVRHRLDRGGNRQLNCALHRIAVSQGQAHPPARDFLAKKQAEGKSRMEALRCLKRHLARRVWRLLLESERERPMTTVDPQRDSLTPQIAAAA

SEQ ID NO: 411194 - protein, 319 aa, unidentified
MARLVIGIDVAQEFLDVHVRPSSERRRFANSPDGIAQLVAWARPLAAERIVFESTGPYQMAAVGALLADGQPAVVVNARQVRDFAKAMNYLAKTDRIDAAVIAHFGEVATTTVRPLESQEIRTLRELYDRRGQLVHMLAMEKNQRHSATVAHASDKVLRSIDRHITYLKKQIHDLEKRMDRLIENSATFQARNEILQTITGIGPQVSRTLLVHLPELGQSTRQSIAALVGLAPFNDDSGDHSGQRHIRGGRSKVRVGLYQAAIAAIRHCPRMKAYYAALKARGKASRVAIIAVARKLLVLANALIRDMVAYREPANSVC

SEQ ID NO: 411195 - protein, 341 aa, unidentified
MDHYAGIDVSLEYSSVCVVDANGKIVREDKVASEPEVLIAWFRSAGLSLVRSGLEAGPLSQWLYAAMREGGLAVELLETRHVRKAFEAMPVKSDRNDARGIAQLMRLGWFRPVHCKSRTAQETRALLTARKLVQSKLRDIEASLRGTLRGFGLKVGATTSRRFAERIKQLVPGHSILEVVAEALLAAHAVLLREFNGFERRVRTMARHDAKARLLMSAPGVGTMVSLTFASAIDDPGRFKSSKQVGAHFGMTPKKYQSGETDYTGRISKIGDKEVRTALFEAAHVILTKPVKGSALKSWAMRLAKRAGMKKAKVALARKLAVIMHRMLVDGTTFDFAAAAA

SEQ ID NO: 411196 - protein, 355 aa, unidentified
MAVTIVEEARPVTCRTAITGGVDTHADTHVAAALDPVGGLLGVREFPATAAGYAGLLSWLGGFGTVALAGIEGTGSYGAGLARHVTAAGIRVVEVDRPDRQDRRRQGKSDPLDAVSAARAAQSGRARGAPKGRDGAVEAIRALMVARRSAAGERTRTINQARALILTGPDDLRARFTRHTPAALVTGLASLRPRPGDVAGYAVRVALRELGRRAQFPAGQLERLDELIVPLVTTRAPGLLTVYGLGPRTAALLLIAAGDHPGRLRSEAAWAHLCGVTPIPASSGKVTRHRLNPGGDRQADHALWRIVFTRLGSDPATRAYAGRRTAEGKSKAEIIRCLKRHVAREVYRHLRPAAG

SEQ ID NO: 411197 - protein, 437 aa, unidentified
MNKSKAYRATDVNNVNIEELVQAAAGRQAAVGMDVGKHAVLCVVRWQDGEFERPWKVKNPAEIPLLVGLLRSLAERCRLRAAMEPTGTYGDPLRAELDRQGLGLDRVGGKAAHDYAEIFDGVPSQHDGKDAAVAPELAAIGKCRPWPYREPSEEEAELNRWVAWLDGQDRIQQLWTGRLEGLLSRHWPEVTRLLDLSSVTLLSALAHYGGPAALAALAADPVAASQLARWGRCSARSPAAANVIASAKQTAGVPQRRHEAEQLRQYASLALAAFREKQRTAQRLAQLARSHEALARLAAAVGAGTASVLWVTLGNPADYPCGAAYRKAAGLNLKERSSGKYRGQLKITKRGPSLARRWLYFAAMRIVQEPAVRPWFEAKKAKDKGRGQGALLAVARKLTLALYAVAARGETFDARRLFPGAGETKAAAKRADEATVC

SEQ ID NO: 411198 - protein, 351 aa, unidentified
MERYLGADVHAASATFCVLDASGKQIRRDVVETNGRALVGYLQSLAGKLHLCIEEGEWSQWLYEILSPHVAELVVYRGEWKPGQKSDAIDAHGLAEKLRSGRIDRPVFKDAKRFTALRDRARTYTMVTRDVVRVKSRLKSFFRARGLPCAGAALYQPEERAKRARDLPPATREVVDLLGRELAQIEALKAEAEAAMLRESRRHRIARILETAPGLGPIRVAQMLPIVVTPHRFRTKRQFWAYCGFGVVMRSSSDWVQDQSRWVKARVVQTRGLNFNHNRLLKAIFKGAATTVIAHCGANPLRANYDRQLENGTKPNLAKLTVARQIAAIVLAMWKTEEEYDPGRGPELARR

SEQ ID NO: 411199 - protein, 443 aa, unidentified
MFGENNNQGEPTLNSMQRNTRNRQAVPDRERGVVVGIDVSKRKMDFGAFRGDECSKRHSVGQDSHGLQTLRDLMDDLMSQGYDPWIAFEPTGPYSTCLREWMISNNWHVVQVNPYHVKRTKEVRDNSPHKTDGKDPSVIADLVWQGCYQELVSLSGTYAELRAASAEWASLTKKRTAMRNEFQGLLEVWFPEIAEVFKDAVCQSVRGIVRKYPTVTALASARLSSVRATLKKASAGRSMCRAESIVSAAKNSMAPSCGQQARHSAMVNLLDMLDAVDLRRSRLLSETHQFMGTLPEAEYMLSLPGIGAITVSGLLGECGNIGKFKSYERLEKFLGLNLYEVSSGKHKGKRHISKRGRALARSLICHIALTQTRSSGLYGQYAKEMRDKGKKTGEIRVAVARKLLRLLYAIARDCRVFDPQQFVTGARTEHGPVIQQGTQAQAA

SEQ ID NO: 411200 - protein, 343 aa, unidentified
MSQSNQYVGLDVSLKETSICVIDDADKIVWRGQVDSTPEAIAAAVKQYAPHAVRIGLASWLFHELKEAGLPVICVDARHAKAALSLKVNKTDANDALGLAQIMRVGWYREVTVKGLDCQAVRALLVARAQIVSQITTLKNCVRGILKTFGRVLPKGLRSQFPARVRAAIDGHPILGAIIEPTLLVLEATRAQLLVYDKAVIQRARSDDTARQLMSAPGVGTVVALAYMTGVEDPARFKRSSSVAAYFGMTPRRYQSGEVDHAGRISKCGDGMVRGLLFEAAKVLLSRSARPSALKTWGEALGKRIGAKKATMAVARKLAVILHRMWTTGTTFQWNAEAASPVA

SEQ ID NO: 411201 - protein, 347 aa, unidentified
MKIIGCDFHPSYQQIAMVDTQTGEMWERRLEHEQGEARRFYESLEGPVRVGMEAIGNSQWFERMLAELGHEVWIGDAAQIRRLVVRTQKTDRRDARHILDLLLDGRFPRLWVPSVEMRDVRQLLRHRQKLVEMRMQVKNQLQHLALNQGVRRKRRLWSKEGRAVLESLPLEGWTARRRADLLAMLDRLETQVGELDTAVRTEAARRPEVRLLMTHPGVGPVVGLAYVLTIGPTARFPRGKQVASYLGLIPRERSSGGRQKLGSISKQGNTMMRTLLVEAAQTAARCDEELRRDYSRLKARKHSGLAKVMVARKLAVRMYWMLRENKPYAPRPVARMQGSPSHSVVAG

SEQ ID NO: 411202 - protein, 409 aa, unidentified
MERVIERGAALDVHKKSVTACVRGPRADGGRRQEVQTFGTTAAALLALRDWLSAHGVTHVAMESTGVYWKPVYYVLEEMFTCLLVNAAHVSKVPGRKTDVRDCEWLAQLLEHGLLRGSFVPPVPIRELRDFTRYRQVLVQDRTREANRLHKVLTDAGIQLASVASNVLGKSGRAMLAALVEGTTDPAVLADLAQGKLRRKLPALREALAGRFRTHHALLVSQLLAHLDYLDEALDILTTQIEEALAPFAREAARLDAIPGVGPRTAEILIAELGVDMRQFPTARHVASWAGLCPGTHESAGKHRAVRTRKGNRWLRAALIEAALAAINVRDSALAARYRRLVRHCGHKKAIVAVAHKMLTTAYVLLADGRTYQEPGAGYYDAQRKDRSVRRALQTLERCGYRVSLEPAA

SEQ ID NO: 411203 - protein, 355 aa, unidentified
MIIVGCDYHPSFQQIAFVDTETGELNEQRLEQRESAEAFYRELASRGEKVRVGMEASGHSRWFERLLAELGIELWLGDAAVIRAKRGRRKPKTDRQDAQHILHLLRKDDFPKIWVPSWENRDLRQLLWHRHRMVQARTRIMNQLQAVALNEGLRCKKRLWREKGRKQLEAIHLAPWASRRRENLLQLLDGLNPTIAELSAAIDREVDKSAEARRLMTHPGVGPLTSLAFVLIIGSAERFQCGKQVAAYVGLVPLEDSSGERRRLGHITKQGNSLLRFLLVESAQVAARSIPQWRNQYFHLAMRRGRKIAKVALARKLAIRLFWMMRQGWDYEQMKKFGSHAGQPGNRDGVQQSIE

SEQ ID NO: 411204 - protein, 352 aa, unidentified
MVVLGVDPHKKTHTVVAADDAGRQLASITVATTTAGQLKLVRWAAERYPDRRWAVEDGRHVAGRLLRELMAAGEQVTPVPTKLMAAARAGARTRGKSDPIDALAVARAALREPDLPAAHLDAEALDLRLLVDHREHLVAERTRHINRLRWHLIDLDPDLEPPVKTMTRYKTLRRLLEQLDQIPASVRRDLAIEITRRVLADTVQINQLQRDITALVTPPAPTLMTIIGISALSAAKILGEVAGIQRFPTSAKLANHAGTACIPVWSGNHEKHRLNRGANRQLNCALHRVAITQVQHHPGAKALYARRRATGDTKADAYRVVKRHLIDVIYRAMNTDTQTQQTTTHPPISQAA

SEQ ID NO: 411205 - protein, 433 aa, unidentified
MLLTPYNSIEPLVPKGVPMALKIVYQICCGIDVHKTFVVACIASTNKQGVTTYKRHRFSTFTQGLKELLQWLLDNHCKDVCMESTGKYWIPVYNVLENDCTIVLAHPKYVKAIRGKKTDKKDAKWIADLFKHDLVAGSFMPPADIRQLRDLMRYRYKLTCFMSSEKNRFQNCLTVSNIQLASVVSDTFGKSSQRILDKILENPHDTSFDIESLIHGSMKKKLPELKLAIDGFITPEQAGKLKIIKKHFEDLESRKAELEELILALASPYQQELDLILTAPSFKNTFTAIGIISEIGVNMEAFPSAKHLCSWAGLTPTNNESAGKKKSVRVSKAGCYIKPLLVQCANSVVKSEKHPEIRNRYLRLRKRRGHKKAIIAIARMLLTALYNMLKNKEPYNSELYRKSDILPVNREITVEQAILMAQFQGYKIKSATE

SEQ ID NO: 411206 - protein, 345 aa, unidentified
MEITTIGVDLAKNVFQVHGVDERGKTVLRKQLRREQMVEFFAKLPPCLVGMEACGSAHHWARVLQGQGHTVRVIASQFVKPYVKSNKNDAADAEAICEAVARPNMRFVPVKSVEQQAVLAVHRARQGFVKARTAQANQIRGLLAEFGLVIPRGLWHIQQRVPALLERAADALPLALRHLIERLLGQLRQLDRQVAELEAQIQAWHRSSELSRRLERIPGIGPLTASALVASIADARSFDNGRQLAAWLGLVPRQSSSGGKPLLLGMSKRGDVYLRTLLIHGARSAILAAQRKVGAADTWLGQLLKRRHPNVAAVALANKNARTVWALLAHDREFRPDCRPRLATA

SEQ ID NO: 411207 - protein, 328 aa, unidentified
MAKEKFDVSFFNPTVKNCSGTAEHKVIRNTDKGIQKFLSSLPVDAVLVAEHTGIYGDRLLKHCTDSHIDIAYVGGHVIHTYKSSPDRGKTDEQDCAVLREFGERFADKLTFKKFPQAEIYGLRQLARHRSMLVEDRKRYVTADKGEDCRPCRETFVKESMKRIVAMLDEEIAATERQMQHLISSRKELEKNYDIITSVKGVGLVTAVEILVKTDNFTTITTARQYAAYAGTAPYEKSSGKMNKGRHISRIGNRRSKTLLYICAESARMHNKDIKLFYERRRTIDKKAHHYVLNAIANKLLRIIFTLIAKGQKFDDKFIRKDPRQIKHN

SEQ ID NO: 411208 - protein, 356 aa, unidentified
MAMLAELVDGVIGVEPYRDSLTAAAVTRLGGVLAQTTTSADAAGYQRLLGFAQAHLPGRRCWAVEGAGSFGAGLAVLLHQRGERVVEVGRPKRPASRSGAKSDALDAVRAAREALGQDQLATPRRRGEREALRVLLTTRRCATLARVAAIGQLKALIVAAPEELRAELRGRNTASQIDYCARLRPRPTRSLEHQATVRALRATAQRIQLLQAEADQLQAKLAVLVGAMAPWLLEVPGVGPLSAAQVLVSWSHAGRFRSEAAFAALAGTNPIPASSGQVTRNRLNRGGDRQLNRALHTILLVRLRIDPDTRAYMARRTAQGKSRRDAKRCLRRVIARQLFRLLERYDQPGVEILRAA

SEQ ID NO: 411209 - protein, 344 aa, unidentified
MSNITSLAIDLAKNVFQLHGTDSKGKVILKKKVSRTKLLEFVANLAKCKIYMEACGSANYWGRKFEEMGHKVKLIHPKYVKPYVKRNKNDMNDAAGIAAAARDPEMRFVNIKTKAQQDMQSIHRIRSLLIQQRTALANQIRGLLAEYGITVVKGITHVRSCLPGILGDNPNDMSALILNGLVMLYENFKNLDERIEECDKKIEMLFKDNETCHRLSKVPGIGKLGATILASVLGNGAAFKNGRHFAAFLGLVPRQHSSGGKDRLLGISKGGDTYIRTLLIHGARAVLAWCDKKTDNQSRWLKSLILRRGKNKAAVALANKMARVAWALIHEDMEYMPNHKPIIN

SEQ ID NO: 411210 - protein, 323 aa, unidentified
MIDGVLGIDVSKNTIDVSMSGCNKVRARSFANSADGWRHLLAWLISQKIQRVHACLESTGRYSIGIASALYEAGHIVSIVNPAQIRDFARTKLGRNKTDGVDATHIREYCELFKPQPWAPASEAHRRLGELQTIRAGIIAGLTEWKNRKNSGMIDAVAQSLADVTISHFTSQLGAVDEAITQTIDNDPVLRRKRDLLLTISGVGETLAGVVLAELPGPDVLRSGAEVAYAGLNPRLHQSGTSIDRMTRISKIGNAVLRAALYMPAMSAMQHNPAIVALVARLKARGRLKPKQIVVAAMRKLLVLCFGVLKTGKPFDPAIAMGC

SEQ ID NO: 411211 - protein, 466 aa, unidentified
MARKRKSDKSKKSQRPIRSLETIQPNAAGIDLGSREHWVAGPPQKDKAPNVERFGTTTPELLRLADWLTQQGVKTVAMESTGVYWIPLFEILDSKGFEVLLANARQVTHVPGRKTDMLDCQWLQLLHACGLLRGSFRPSDDICQLRALIRERNTMVDQRSDWVRRMQKSLNQMNVCVHHAVSDITGVTGMRIIRAIVDGQRDPHALARMRDRRCQKSEEQIAAELTGNWRPEHLFNLRQALKMYDQLCTVVADYDSEILGYIQTLQPADNNDTDVPPPGSKAKARSISKRGQEPLRQALYRFSGFDLTTIDGIGVDIASDIISELGLDFTVFPSENHFVSYLRLAPNLSISAGKKVSSKSKASTCTRVATALRMAALTLRRSKTALGAFYRRVAWRKGASVAVFATARKLAQLVYRLVRYGQAYVDAGAKAYETRFNQRRLKFYTKALNNMGYNVKPLSTEEAIAM

SEQ ID NO: 411212 - protein, 315 aa, unidentified
MQTPVDIGADISKDYLRVSCATGSLPSIGLANRRASLLAWLKRLPAGSRIGMEATGTYHELLATLAHRLGLVVYVLNAKHVHHYAQATAQRGKTDRVDAELIARYVAKEHSHLHIWHPASPAQRQLQRLMRRRGKLTRARAALRSTLQGVPSLRTDVRVLLKQFDALIAKLDTQARALLKASVEREQAFQRLDAIPSVGSAVGIGLLAALERWSLPRADSFVAFIGLDPRPDDSGKRSGRRRLSKDGDPELRRLLYTAAMSASRTRVWAPVYQRALARGLSRIQALVILARHIARTAWSVYTHKTQFDPARVHSS

SEQ ID NO: 411213 - protein, 341 aa, unidentified
MGLEETSLCIVDSEGKTVREVKVAIRCALEGYADRLSRIGVEASSLGPWLYRELQAEGLPIIAVEARHMRVSLSTMRNKTERNDARGIAQMIRLGWSRAVHVKNVEMQKMRTLLTNRKLLKRKLVDIENHIRGALRTYGLLVGAVSRGQYEARVRELIERTDFVFSTMIETMLDVRRAIFDGYAKLHRVLLQVIQHDQICLRLMTVPGVGPVAALSFKVGVDDPLRFTRSRTVGAHFGLTPRRHQSGTSIDYEGRITKQGDVSVREALCEAAASLLLRVRKWSALRAWGLRVAKRSSMLCAIVAVARKLAGILHRMWIDGSDFKVGFGAKVTKRLKLKPAQ

SEQ ID NO: 411214 - protein, 316 aa, unidentified
MEVLFDSCCGIDVHKKTLTACIMIGKDGKITKKEIRTFSTMTEALEEFRDWLKSEGVTHVAIESTGIYWRPVYNILENDVEVILANARHIKNVPGRKTDVADSEWLCKLLRNGLIQGSFIPPRHIRQLRDLTRYRSRLNNNIAAEKNRLQKYLEDANIKLSSVATDTLGVSGRRMIREIIRGNRDRDSLSELAKGRLRSKIEELKKSFNSRITEHHRMLIEMSLKHIEYIEEMKEKLEKEMDGLIKERKLDEDVELLDTIPGVDKIGATIIIAETGADMSKFPSASHLSSWAGMSPGNNESAGKKKAEGPHQETSG

SEQ ID NO: 411215 - protein, 392 aa, unidentified
MTEQVPRVVIGMDPHKRSVTIEVMTADESVVGGGRFDTTVEGYAAMLEHVAAWPDRVWAIEGCEGIGRHIAHRLLADGQDIVDVPAKLSAKARVFATGQGRKTDATDAHSVALVGTRMAGLRPVVSDAQLEVLQLLVDRRRSIGDEHTRKISQLHRILLEMLPGGAKKYLSAAQAKALLSTVRPRDAVGKTRKRVGAELVADLERIDARKKAADKELKELVAATGTSLLGLHGVGPSGAARLLVEIGDLSRFPDRNHFASWTGTAPIDASSGDHVRHRLSRGGNRQINRVLHIMATVQLRTPTEGRAYFDRKKAAGKSSMEAMRCLKRRLSDLVFRTMLGDYTAGKMTGPGGHRGNDSDSSATGSQPHTGSSEKPLPGPVATQRRTALPTAS

SEQ ID NO: 411216 - protein, 346 aa, unidentified
MSKVYIGIDLAAKRCVAAVRNQEGELVSVVEFPTGENSLVAFMQSVEREAVVLMEECDLAFWARRVILPYAERVDVADPKRNAWIHKDAVKNDRVDARKLSEIAWMGRYHAVYHTPDEDVYALHLAVKAYEKLEKKAVAQKNLVKARLRAQGIICEGSRVFGIRGRAEALEGVKNPTVREVISSDYDLLDFLLRERDKARRRFLRLASGIPITRAWQDIPGVGPYVAAVFCAYIKCPQRFSNPRKLWRYCRLGITQCASGGRELRRQMLDRNGNGALKYISGVAFLGAMRASGDNRFKRAYRSTLAHTGSPVHARLTVQRKILQVMWAMWRCGTPYDDDNRPSGMA

SEQ ID NO: 411217 - protein, 350 aa, unidentified
MNSSSKKPSYTGKDVFIGIDVHKRTYSVVSVVEGIVVKKWQTAAVPEQLAKQLRSYFSGANLYSAYEAGFSGFVLHRRLEEVGIKNIVVNAASIETTVHNRVKTDKRDALKIASLLEAGRLKRIKIPSEREEAQRLLTRTRQQLIEERTAVKNKIRMKCHQIGLIAADEQRKMSHKLVQELLEKSPFQELNLVIGAYWQIWKALDAQIKKLDEELKQQAQQDPNEKIYHSAPGIGPLGARILSNELGDMSQFDNERQLFSYTGLTPCEHSSGDNTCRGHITRQGNSRVRWVLCEAAWRAIKKDMSLKECFERLYPRTGKKRAIVAIARKLIGRIRSAFRARSEYRIAPVA

SEQ ID NO: 411218 - protein, 360 aa, unidentified
MAHFAGLDVSIEETAVCVVDDQGMVLLQCSVATEPEAIAEALAPFAATLRRAGHEAGSLSPWLHPQLKALGVPVVCLETRQVRAAMSAQRNKTDATDALGLAHLMRTGWFRQAYVKTDGAYRLKLLLTHRRNLKRKFLDLENAIRHSLKSFGVRLNKVGRGGFEQAVREACAGDAFTAELMECMLTARAALWRQYLKLHKLAVGLVARDELCRRFMAIPGVGPVTALTFSTAIDDPSRFRRSRDVAAYFGLTSKRWQSGASIDVQGRISKAGDPDVRRALYEAASAMLTRYKGKTALKSWGQKIAKRCHKKAVVAVARKLAVIMHAMWRDGTAYADRPHAAGRPDDAPTAKERKLLGVLA

SEQ ID NO: 411219 - protein, 330 aa, unidentified
MSLEYIGIDLHKAFFQACSVTSGGERLWEGRFARTADGIGAFQQRGIGAEHAIAVEASGPTWSFVDALRPTGARICVVDPRKTQLKAGVAAKTDRLDARRLADALRRDSVVSIYVPPPAIRELREACRGRHQLVRLRTRLAQMIRALLLRCDAGEPPGTQLYAPRALAWLDQVTLPPEAHQALQRLVTAYRAVHTEAQGADAVARLRAAADPIAVALDAMVGIGPVLALTLRAEIGDIARFAGGPALASYAGVVPHVEQSAGRVFHGRITRQGSPWLRWALIEAARHAIRRDDPTGRWARRLVVRKGIAKARVALARALCNEVVTRWPRT

SEQ ID NO: 411220 - protein, 422 aa, unidentified
MLAKTQDNQEIIERVAALDIGKAELVCCARVPDEDHRGGRLQEVETYSTMTRPLLGMSDRLACLGVTRVVMEATSDYWKPVFYLLEAAGFDTWLVNAKDVKHLPGRPKTDKLDAVWLCKVAERQMIRPSFVPPPPIRRLRDLTRYRADLVAARTAEKNRIEKLLEDAQIKLSAVVSDIFGVSGRDMLAALVAGERNPRALAQLARRTMRRKITVLEEAFTGHFTDHHAFLLSRMLARVDAITGDIAALDGRIEEQIAPFAAAVRKLDEVPGINLAAAHAILAETGLDMTRFPTAGHLVSWAKYAPAVKESAGKKKGKNATGHGNPYLARVLGNAAAAVARTDTFLGERYRRIARRRGATKANVAVGRSILVIIWHLLSDPDARFHDLGPDFYAARIDPERRRRNHVRQLEALGYTVTLEPAA

SEQ ID NO: 411221 - protein, 324 aa, unidentified
MIDAILGIDVSKNTLDVSISRCTKVRTKSFANSSDGWHHLLDWLTTRKIQRVHACLESTGRYSLGIACALYEAGHVVSIINPAQIRDFVRTKLGRNKTDGIDASHIREYCELFKPSPWAPPSEAHRRLGELQAIRAGIIAGLTEWKNRKNSGIVDAGAQALADATISHFTSQLGAVDKAIALTIDNDSDLRSKRDLLLSISGVGETLAGVVLTELPGPDVLRSSGEVVAYAGLNPRQHQSGTSVDRATRISKIGNAVLRAALYMPALSAMRYNPAIVALVTRLKSRGRLKPKQIVVAAMRKLLVLCFGVLKTGKPFDPAIAMGC

SEQ ID NO: 411222 - protein, 409 aa, unidentified
MHDQDRHDQDREVTGGVDTHAEVHVAAVIDATGRILGTESFATTLAGYRALLRWLRRHGRLVRVGVEGTGSYGAGLARFLTGEGVAVVEVNRPDRQRRRRRGKSDTVDAEAAARAALNGDAAGVPKAGGGTVESVRVLRLARRSAIKARTQAANQIRDLTVTAPDQLRSRLRDLDTNDRVAVCARFRTGDVADHAEATKVALRTLARRHSELSGEIDALDGQIAQLCAAINPALLAAHGVGPEVAATLLVTADDNPHRMSCEAAFAALCGASPVEASSGKVTRHRLNSGGDRQANNALWRIVLVRMSSDSRTKAYVARRTLEGKSKKEIIRCLKRHVAREVFRLLTNPPAVPLGAELRSARVDAGITLAIAAEALGTWPIRISELERGLIHDAELARRYELWLHLEQAA

SEQ ID NO: 411223 - protein, 437 aa, unidentified
MISDERGWGEDMESTDEPVELVERVAALDLGKAALMACVRVPHEDRPGRRRQEIREYVTLSRSLLELADWLRCERVELVAMEATSDYWKPVYYLLEAEGFTCWLLNAKHVKNVPGRPKTDKIDAVWLAKVVERGMCSPSLVHPKPIRQLRDLTRYRRSLIRERTREKQRVEKLLEDAQIKLSSVIADIFGVSGRQMLEALIAGQRNPRALAQMARGTMRAKTAVLEEALTGHFEDHHGFLLQAMLDHIDALTAQIDALGARIEEVIAPFSEHVTQLDEITGVGTTAAQELIAEIGVDATRFPDAAHLVSWAKFAPIDHNSAGHKRGGNTGRGNPWLAGTLGEIVASVSRTDTFLGDRYRRLARRCGKNRAIVAVGNSVLTIIWHLLVDPDAHYHDLGSDYYSTKVNTRRREHDLIRQLERLTGKKVTLKLNASTPAA

SEQ ID NO: 411224 - protein, 338 aa, unidentified
MTIVRVGIDLSKSVFHVHAVDGTERPVLQRMMTRPELRRFLALTSPCSVAMESCGSAFHWARYAGSCGHRTQIIASQFVKPYVKSNKNDFNDAAAICEAASRPSMRFVPTKSIEQQDIQALHRVRTRRVAERTALGNQIRGLLLEFGIAIGLGLTTLKRRLPDIVTDESNELTPRGRALFRELYDELIELEGKIFAIERKIGQVFRSSEACQRLAEIRGVGPLISTALVAAVGDARVFKNGRHMAAWLGLVPRQQTTGGKPRLMGISKRGDRHLRTLLIHGARSALRVIDRNPDQRSRWAADVARRRGANVATVALANKTARIAWAMLAHGESYRMAA

SEQ ID NO: 411225 - protein, 314 aa, unidentified
MANAVGIGIDVSKDKVDVASTDGWSATYVQTPEGLKELAQAVQARKPHRVVLEASGGYERGPLVALYAAGCPVVLLEPARARAFARSQRKRAKTDPIDARVLGQMALVGVEEDPLWEPLEANLAALRDLVLRRQAVLRIIDEETKRRANAPAAVLASITRVLEVVVSERRLLEKEIDALIASVVELKEKAEILEGVRGVGRTTAAVLLIAVPELGRLSRGSVASLVGLAPMNNESGTWTGKRRIQGGRVLARRALYMAALVATRHNPHIKAFYARLRAAGKPGKVALVACMRKLLIYLNNLLREHGTMRVAAAA

SEQ ID NO: 411226 - protein, 344 aa, unidentified
MQITTIGLDLAKSVFQVHGIDTTGQVVVRRSLRRSQMLPFFAKLPPCLVGMEACGTSHHWARELIKFGHEVRLMPPAYVKPYVKRGKTDAADAEAVCEAVTRPTMRFVPVKSPEQQAALSMHRTRDLLVKQRTQLINMIRGLLAEFGVDIPKGLERALLMARQIVDGKAPEVPIEAAKVVATLSQQALDIHVRLREIDRDLLVSLRCSDVARRLMTIPGIGPVGATALAASVTDPHQFRSGRQFAAWLGLTPLQKSSGGKERLGRISKMGDKYLRKLLIVGMTSLVRRAKYNPDKIDPRLANLLARKPTRVATVAMANKTARVIWAIMARGETYRAAHQPALAA

SEQ ID NO: 411227 - protein, 428 aa, unidentified
MNVLNERITRITATTIIVGIDAAKEIHWARMTDYRGVDLSKPIKVHNSMDGFENLLAKIEKLRTKHGCDQVVIGMEPSGHYWRALGWYLKLYESEPVLVGVNPYHTKQAKELNDNSQTKSDPKDALVVAHLIREGRYFDTYLPEDEYAELRQLNTERQRIMKQISRANNILIALLDEFFPEYATVWSDVTCPTSLELLKIYAFPSDIVTAPRDKLLKDIRMASNGKEGTRLMEKMISAASHSIGVKEGLRAVRMRMLSLIDELYYFEEKKADVEAKLEAVMDTLQLGKVLQSMLGVGPIISAAFMGEVGDISRFTNWKQVRSLAGLNLVENSSGQHKGKTKVSKRGRPYLRHMLYMAGECGCRCNPEMHKFYRYMRDRKNNPLNPQQAFVATGLKIMRILFHMAKTGETYNPDKALGAVRLQQIASLA

SEQ ID NO: 411228 - protein, 510 aa, unidentified
MSLPPNDDNPPSPKVRKPRSAAKQESIQKPQVAPQHKLRKSSRKSKASRSLPVAAPSMPAELKQVNLNAAGIDVGATVHFVCVPQGRDAQPVRSFGAFTADLEAIVDWLAQCGVTTVAMEATGVYWIPLFELLERRGFAVKLVEPSRLKYVPGRKSDVLDCQWIQQLHTFGLLSGSFRPNDAICVLRSFVRQRQMLVRSLSRCVQHMQKALTQMNLKLQHVLSDITGVTGMAILDAILAGERDPQQLAKLRDGRCSHDEATIALALQGNWREDHLFALKQAMDTYHFYQQKLAEVDEKIETHLKTFEDKSQGKPLERSTGTNKHRASDPACEMRTHLYTMTGMDLTEVDGLEAKTVLTVISEIGLDMSRWPTEKHFTSWLSLCPGVNKTGGRAESRSGRTRASSNRAAAALRMAASTLLRADCALGAYGRRMRARLGAPKAITATARKLAIIIYNMLKYGKTYVDRGEEYYQEQYRTTMLKNLKRRAKQLGFALVEVTAQPVAAETTPCA

SEQ ID NO: 411229 - protein, 354 aa, unidentified
MVKVQEILEKGKPLYVGIDVHLKSWTVTVRTRDAELQTVSMVAGKEELERFLSSYGGHAIQAVYEAGYFGYSLHDFLQERGIDCVVTPPSMVPESAGNRVKTDKKDSRKLARCLSNGELKRVYVPSAEERSARMVSRRRRQLLSDRTRVQHRIKAELRFYGVGRQEMCGSWSLAYRKLLGEVKLHDRWATESFHQLLQEFDALSEQLAVQTQLLKELAQTDRYQKRVALLRSIPGVGMVTAMEFLLELQDIGRFRTAKALAAYLGLTPSQYSSGEHTHLGSITGMGKPALRAMLVESAWILVAKDSSMRERYEKLRVRAGGKRAIVAIARHLALIARRILLDEQPYNLCAAVAA

SEQ ID NO: 411230 - protein, 392 aa, unidentified
MTATTHPSESITAGVPTLLLAFDLGASSWKLGFTSTLGQPPRIRSIRARALDDLLQEIAAAKKRLGLPANAPVVSCYEAGPDGFWLHRWLSSQGVHNRVVDSSSIEVNRRARRAKTDRLDVRKLLELLRRSLAGEKPWSVVRVPSVAEEDGRQLHRELETLKHDRTRVTNRVHSLLATQGVVLSLAPELTVVALGQRLERARVWDGQPIPAALQARLLREWDAVVLATTRIAQLERDRRAQLGAAATPAMEQVQALMDLRGIGENSAWLWVMEFFAWRNFRNRREVGGLSGLTGTPWASGDRQHDQGISRAGNRRVRAMAVEIAWLWLRFQPQSALSQWYQHRFAGGGSRLRRIGIVAMARKLLIELWRYLQSGVIPEGAVLKGAISESAAR

SEQ ID NO: 411231 - protein, 396 aa, unidentified
MKYGVGIDVSKGKSIVAILSQAGEVIELPFEVEHTIEGMQVLENRLSKLPKQDLKIVMEETGTYHLPILGYLLDNDYFVVGENALKIKKYLDRDLRKAKTDNKDALKIANYACENWYKLTLSKVQASIYEDLKFLSRQYLNKISIQTTMKVDFVNLCDLMFPSFNSLLNENNYILGLEIFKIYYHPTLVLNKNQSEFITEIDELAKKLGHKSAGKSLAIKIYNLAKNTLSPCPSNKYSQLAATSCVNALILIIKTSSSIIAEMDRLARELPEYETVSEMDGVGTKLTSRIIAEIGDIRRFKNAGSLIATAGIDAPPYQSGQYEAQIRHISKRGNRYLRKTGFEIMKAIKTSCKSGVELYDYIVKKEMEGKPKKVAKIAGLNKFLRIYYARVNELYS

SEQ ID NO: 411232 - protein, 461 aa, unidentified
MPQPNSSSRVEPLAGVHPNAAGLDIGAREIWACVPQERAPEPVRRFGTFTPDLNALADWLIACGVATVAMESTGVYWIPVFEMLEARGLQVFLVNARHIKNVPGRKSDYLDCQWIQKLHALGLLTASFRPDAEMCALRAYLRHRAQVLQHRAPHILHMQRALHQMNLQLTQVLTDVTGVTGLAILRAIVAGERDPLTLARLRNPACKSSEEKIVKALTGNWQPEHLFVLKQSLELYDFYTAQVAACDVTLEQYFTALKPRYEPAAEDLTGPALPRAKPGSKSKNRPAFDARAHLVRLLRIDLVAVEGVSASLAQTLLSEIGTDMTKWPTVKHFASWLGLAPHNDISGGRVLRSRTLKTDNRAGQAFRQAAASVTRSDSAFGAYYRRKKAQIGPQQARVATAHKIARTVYHMLKHRLAYHETGALVYEQHQRERELAHLQRKAAKLGFTLTAHEPVLAPAAT

SEQ ID NO: 411233 - protein, 355 aa, unidentified
MNDAKYIGLDVHQATISVSVLDSSGKLVMEAILETKAETILQFLRGLRGSLHVTFEEGTCASWLHDLLKPHVAQVLVCDPRKNTLGKVGNKNDRNDARELAELLYRNKLKPVYHGEHGVRTLKELARSYLTITRDLTRVMSRLKAIYRSWAIPCAGQQVYTPRYRAEWLAKISEAGVRRRAEFYYQQFDALAALRQQARRELLAASREHFAVKLLCQIPSIGPIRAALLVALIQTPHRFRTKRQFWSYIGLALKTYGSGEYRFVGGQLQRSKKALAIRGLNLNHNHDLKNIFKGAATWAAATSGPFQNFYEACLARGMKPSMARLTLARKIAAITLLVWKKGVRFDAEYLKQQAA

SEQ ID NO: 411234 - protein, 349 aa, unidentified
MVIIGTDSHKHTHTCVAADELGRRLAERTVAATGAGHLELLAWAARFTDRSWALEDCRHLSRRLGRDLLGAGEPVVRVPPKLMAGARRSSREPGKSDPIDALAVARAALREPGLPVARLDGPEREVRLLVDHREDLVAQRTAHENRLRWHLHELAPGGEPAPRTLGRLPVLDALGARLGGIDGPVARIARDLVARIRELTTAVTALERELAALVRPLAPTLLALQGCGVLTAAKLVGEVAGIGRFRSAAAFARWDGTAPVPVWSGDTTHVRLSRGGNRQVNAALHRIAVTQLRLPGPGRDYVAKRRAAGDSWTEALRALRRRLSDEVHRRLRADEPVHMSRPAALQAAP

SEQ ID NO: 411235 - protein, 351 aa, unidentified
MPHKSSVRTVTTIGIDMGKTTLHMVGLDSCGAIVLREKVSRGRIASRLANLAPCLIGIEAGMATHYVARELAALGHDVKQVPPTYAKPFRQGHKNDFRDALAVAEAVQRPTTRFVPPKSNEQLDLQALHRVRSRLVSQRTAVINQIRGFLLERGIIVRQGLRFLRQLLPDILAKRTDVLSPRMARIVSDLAGDWRQLDDRIETVTDEIETLAKADDNCRRVMTVPGIGPIISSAMVAAIGNGSAFSRGRDYSAWLGLVPKQMSTGDRTILGRISKRGNSYLRMLFIQAARVILLRPANWPKHGFGAWLVRAIQRLHPNVLAAALANKLARIAWTVLAQERSYEARVTKAEA

SEQ ID NO: 411236 - protein, 372 aa, unidentified
MGKCIRYVGLDVHADTIAVAVAEGRAEVRSLGTIRNRPGAVQKLVKGLEPRPTLRVCYEAGPTGYALYWQLVALGVKCEVVAPTLVPVKAGDRVKTDRRDAVKLARSYRARDLTPVWVPNAAHEALRDIVRAREAAKKDELRAKHRLSKFLLRNARRPPEGTKAWTGRYWSWLSTVRFDYAAQEATLLDYRTEVQRAADRIDRLEKAIDAAVQEAPAHMKAVIEALQALRGVAKITATTLVTEVGNFSRFPRAKQLMGYGGLVPSEHSSGKTKRQGAITKTGNAHIRRVLLEAAWSYQHRPKLGGKLKQRQKGVSEEIKEISWKAQHRLHSRYWRLTSKAKVPGKAITAVARELVGFIWAVGVQAEREAAAP

SEQ ID NO: 411237 - protein, 391 aa, unidentified
MTYFVGIDIAKFKHDCFIADDQGCVIRESFSFKNDKDGFNVLLFILNDLKSKGQIKIGFESTGHYHFNLKLFLEANGYSYLEFNPLLVHKFVTTQTLRRTKTDRKDSQMIARYLMTVDYKPYVNKFYHINNLKSLCRLRETLITDRTRFLNQITAYLDQIFPEFKPLFKDGLNKSAFYLLTHYMTPLKMSKLDANKYSKMKSELRSPISYQKICLIKEAAKNTIGYSSEALEYALKASLNTYLFLDNQIDELETKIIEIYKSLDYRIDTIRGIGILTAAGIASELGNLDKFLTPNQMLAFAGLDPSRSDSGTVVGKIGKMVKHGSSYLRKYLMTSAETFYTFNPVISEFYWKKRNEGKHHNVALSHVARKLVNTIFTLEKHKINFNPDFVK

SEQ ID NO: 411238 - protein, 331 aa, unidentified
MKILDTVGIDMSKLTFDARVHSTQSYAQFENTNEGFKQLLNWTYKNSSFPSENIFFIFEHTGLYSHKMAVYLTEKKVAFALVPGLEIKRSLGLARGKNDKVDATNIAKYAYRLRDEIEPYEMPSEQVQSLKQLLSLRERFVKQRAGYKASLKEQKRILPRKGNNILFTSQEKTINYLTKQIATIEEEMMEIIKSDQQLIEQFKLIISIKGVGKQTALFMIAYTHGFTKFKNWRKFASYCGIAPFPNQSGTSVRGKTKVSNLANKKIKSLFDLCAKSSIQHNWEMKNYYNKRVDEGKNKMSTINIIRNKLLSRIFAVVERKTAYVDLMKYAA

SEQ ID NO: 411239 - protein, 458 aa, unidentified
MSKKRSSRTGKKNRRVLEQINHNAAGADMGAREVWIAVGDHVSDEPVQKFGTTTSELRRSAEWMRSCGVDTVAMEATGVYWVAAFEIYEEYGLNPVLVSSRAIRSFNGMKKSDFIDCQWLHLLHTFGILQASLRAEAEMIELRGYMRQRRMLTERASEHIQHMQKALVLMNVRLDQAVSDITGATGMRILRAILEGERDPNKLAKLRDPACAKSEEQIAEALTGHYRDEQLFALDQAVQLWDFHRNLIEECDKKIQAVIEKLPVKADRATVPKARGKRGKPRKNEVQFDARTLLYERLGLDLTQIAGLHILTILTVISECGYDLTRFPTAKHFCSWLGLSPGTNITGGRVVSSRSRRTANRAATALRLAAQALATSNSELGAFYRRKKGQIGPEKAITATAAKLARRIYDSLRTGRPYSDRGQEFYELMDRERFLSSLQRRARRLNMKLVPIDQHEAA

SEQ ID NO: 411240 - protein, 334 aa, unidentified
MAETRLSSNRFTHVVAFEVSKATLLVEARPGGERREIPNTAPQVRCLLGREMKRNGREQLGPLLVVCEATGGYERHVLAVATELGLACHRAHGTRVRYFARFHGRDAKSDGLDVGVLAAYGVATEGLRLYAPPRPEEAALRDLKTRRRELQEMLVAENNRLEHQRVPAAAASTKAVIRVLTRELEKIAAEIAALIKRDEEFRFKAGVLQQTIGVAAGTASTLLAFLPEIGTLAKTTVARLAGLAPLDNDSGTSRKPRHIHGGRGEVRRCLFMAARTALNHDPDMIAFAARLRGNGKSYKVVVTAVMRKLLVRLNARLRDALALRAGVAPAPSAT

SEQ ID NO: 411241 - protein, 368 aa, unidentified
MRQCKDIILVVDYHAENIEFRWFNEATGEERTGKYATTLDGILRQVEQAKREVVPGGEVVWIMESTTGWARVKDLIGTRATFVLANVLQMPLPPKARRRKTDKVDTGRLLREYLHGDLPQSFQPAAWWRQVRRVVDCRQDLMERQTAIKNWINSLLQHETWEDRENLWSGKGRRRLERLGLSVSDRALVELKLQQLDQLAAQQVEIEKRMRAIYEGWPEAQWVDQVRGIGMVTAVSVLAHVGPIERFATAEDLISYAGLAPGVRQSDATCHHGRIGGGGTDSHLRYLVIEASVWLRDIPRYRPTYERVLKRRGKKIARIVVARLFLRSLHKMLKDRLQFNPARWERMKATTTTATTTATATATAGCSG

SEQ ID NO: 411242 - protein, 347 aa, unidentified
MRFYTKQHKYSCGIDLHTKKMYVCILDEAGKIMLHKNIRTDRKDFLKVLKPFREDVVVAVECMFTWYWIADLCAQENIKFVLGHALYMKAIHGGKAKNDKLDSEKIARLLKGGMFPKAYVYPAKMRATRDLMRRRNHLKRKRAELLAHVQNTRSQYNLPDPLGTIAKPQNRKGIEERFEHPCVKKSISVDLLMVYAYDPIIDGLERYITKTAQNHDPVAHALLKTIPGVGKTLSLVILYEIENIKRFPRVQDFVSYSRLVKCAKESNNKKYGTNGKKIGNAHLKWAFSEAAVLFLKGNEPGKKYLNKLTKKHGKGKALSILAHKIGRATYFMLKNKKPFDLNRFLGL

SEQ ID NO: 411243 - protein, 481 aa, unidentified
MKAKQKEPIEKYTGQSRQLNWRHMNRKQRRDLERKIQSADLTLQLIHPDAAGIDIGNESHYVAVPPDRDSQPVQRFGCTTAELRTMANWLKQCRIRTVAMQSTSVYWNAVYDVLEQAGLEVYLVNARETKNLPGRKSDVQESQWLMKLHTYGLLRNSFRPPQEVRMMRTYWRQRNDLVRSAARHIQRIQKTLTQMNMRLANVLSDVSGVTGQAIIKAILAGERDPQRLAAFRDPRVKASEKDIARSLEGNWQEDLLFVLKQEQAAFEFCRKQMAECDHQLELYLQKMEDRSQGATLPEEKRKDRQQKKGNQPQFDLQQQLFRMTGTDLTQIDGIDVMTAATILSEAGWDMIKWKDEDHFVSWLRLAPDNRISGDRIVGKGRLPTSNRVTVALKLAANNLRTSQSYLGAQFRRLRARLDTPVAIKAMAAKLARLIYRMLRYGTKYLDHGSPYYELQQRTRDIRRLKLKAATLGFQLIPSTAA

SEQ ID NO: 411244 - protein, 321 aa, unidentified
MTHQATIGIDISKAQFDAAHLDEKGRYRHKKFDNHPEGFAAFLAWVDSLDGAKPPVCMEATGAYSVPLAESLVGRGFRVSVVNPAKIHAFAKSELSRAKTDKADAKLIARYASKMQPPPWNPPPRNIRELQAMLRRVEDLLEMQQMERNRLDTADPVVVGAIKTHLEALEKELDSTRDAIRSHINLDPALKPRRDLLESTPGIGPATSAWLLVVLSEHYHFTDAKQAVAHVGLAPRLRQSGKWAGKTRLSKSGDPLVRKALYMPSMSARRHNPIIRAFCERLKANGKHGMAINCAAMRKMIHIAFAILKSGKPFNSNLVLA

SEQ ID NO: 411245 - protein, 375 aa, unidentified
MTKINRIGVDTSKSVFVLHGVDCAEQPMVRKKLRRRQFLEFFAKLEPTRIGLEACGASHHWARELQELGHEVVLLPPQYVKPYVQRNKNDSRDAEAICEAMSRPRMRFVPVKSAEQQAALMLAGTRDALIRRRTQLTNTIRGYAAEFGLTAAKGLNKIEPLLARIAAAENLPDLAKELFASCAQEYARLKEQLRTIEARLMAWHRSNEASRRLAEIPAVGPIGGALTVMKVPDPKAFRCGRDFAAWIGLTPKDHSTAGKTRLGVITRAGDEALRSVLVAGATAVIQQARKGRGQHSRWLLDLIGRKPPKLAAVALANKNARIIWKLLVSGERYNPARAMRNAAVSEGHGAALRRAPRRAPRSPASQIGATAMIEA

SEQ ID NO: 411246 - protein, 353 aa, unidentified
MRYQDGKPLTIIQTLITGVKVMIFVGIDVGCKELVFVIRHQGKSSKAETVTNTFKGHQAIIKKLEKLSDSVRICVEATGVYHLDLVLALSRAHLDVMVINPKTSHNFAKVLMKRTKTDNVDAEILAQYAERMDFTPWQCPSSKALEIRACSRHLEELSYQCTRLRNQIHAMKSNGTTPVYLLKDNQQALVSLEKRIVSIRNKAVQVIEQDELIKMRYELLLSIKGIAQKSAVQILGELLVLPEDMSARQWVAHTGLDPRQFSSGSSVNKKPRLSKAGNQHLRRALFMPALSGVRWEGNVKAYYMHLANDNGLKKIQAVCAVMRKLLHAIYGMFKVGKPFDGTRFYKFPSGKAA

SEQ ID NO: 411247 - protein, 313 aa, unidentified
MTAVLAAGVDVGRDYLDVAFAPQGRAFRAPNTPGGIETILSRLRRAGVRKVVMESIGSFGARLVRALAEAGFEVGVVDPRRIKALRLAEGKRAKTDRLDAELIARFALSMQDAARPVPSAQAFQIRALSTRRRQIVELAAMEKTRLKQALDQEIAESCRTIIAALAQERARIEAELDALLAAEPANPRRRQLLQTIPGVGPAVSITLLADLPELGRLDRRAIASLAGLAPHPNDSGTRSGPAHIQGGRPCVRTALYIAAVSAARSDAGFKAEYRAMRAAGKPAKVALVAIARKLVVAANGMLKADRPWQPNQP

SEQ ID NO: 411248 - protein, 463 aa, unidentified
MKHSTKKHEAKQPKGRKSFPIINPNAAGIDIGSGEHYVAVPEERDDQPIRRFGCFTSDIESMADWLRECRIDTVVMESTGVYWIPTFQILETRGFQVILVNARQVANVPGRKTDVSDCEWLQRLHTYGLLSGSFRPDDSVCVLRSYWRHRDNLIRYASAHIQHMQKALTEMNIQLHKVISDITGVTGMRIIGAIIDGERELVKLAEMKDHRIKSSADTIARALQGDYRQEHLFALKQALQLYEFYQQQIAECDREIEAYLRQFDSKVDLESNPLPPNKKTRRKPYKNEPDFDLRTHLYRIAGVDFTQIDALDVTTVQTILSEVGLDPGDFPRYKNFTSWLGLCPNNRITGGRIKSSRTRKVANRAAKAFRLAAQSLANSKSALGAFYRRIRARLGAPDAITATAHKLARIFYHLWTTGESYQDPGIDYYEQKHKERTIRNMQKRANLLGYEITLTPIADNLVT

SEQ ID NO: 411249 - protein, 410 aa, unidentified
MDVVYPRCCGIDIHKKTAVVCVIASDTKGPPHKEIRTYGTMTDDLLALADWLAAEGVTHVAMESTGVYWKAPFNLLEGQFEVLLANAQHIKTVPGRKTDVKDAEWIADLLRHGLLRASFVPDRPQRELRELTRYRTALVRERAAEANRLQKTLEGANIKLGDVASNVLGRSAREMLEGLVAGNADPATLAQFARGRMREKIPQLERALAGHFATHQRFMVAQQLAHVDYLDEAIEHVSAEVAERLAPFVATIERLDVIPGVGRRTAEILLSEIGTDMTRFPTAAHLASWAGMCPGHHESAGKQHDGKTRKGSPWLREALIEAASAAGKTKGTYLATQYHRLLRRRGRNKAAVAVGHSILVIVWHLLQHDCPYVDLGSTYFDERDRTATEHRLVRRLEQLGYSVRLDRPAA

SEQ ID NO: 411250 - protein, 341 aa, unidentified
MTIGIDLGDVWSHYCTLNEDGEVVDRGRFRTSPSGVEKWFTDLPRVRIAMEAGTHSIWISEQLQELGHEVIVANVRELRAISHSDRKSDPVDAEKLARYARLDPKILCPIAHRTVAQQEALTLIRARNLIVRLRTAAVNAVRGLAKPCGYRLPASSTLCFAKRCVAVLPPGLAQALGPVLEQIAEMTKKIKHYDRLIKRLTETEYPETQALIQVYGVGQLTALTYVLTLGNKERFQRSRDVGCYLGLRPKRSQSGDRDPQLGITKAGNIYLRTLLVECANHVLGPHGRDSTLRQWGLHLASRGGKQSRNRAIVAVARKLAVLLHRIWITQEPYIPFYGVAA

SEQ ID NO: 411251 - protein, 492 aa, unidentified
MNSTPTAFRTKKMSLKRDASSEKNQTVRYTKRLEIVHPHCAGLDIHKEKIWVCTSPFHDGVAPEVSTFATDTGSLEKLAAYLRERKITTVALESTGVYWLPTFLTLRQKNLNPILVNPRDVKNIKGRPKSDRADCVWICRLHSYGFLRASFVPPDVVLDLRSFYYAHEKLTVDSASMLQRMNDELVKMNIRVDLILTDLSGASGIRLIEAILGGECSPERLYQLLDEQIMKKGKDVILPYLHGDYREGNLAILRTWYDLYLGIRKEISRINQKIYELLQSFPKKADAKDLPRVKKNYREDKLDFPYELRPIFFEIYGVDLTQLPGIGAGVLLALVCMVGTDLSPWPSAKHFVSWLGLAPINKESAGYRKSGSTQRINNLLSNAFKMAAMAAKRTTTDIGRTARHLAGRILPKKAKVATARKLAELVYNILQNGMELKVKTEEEYEQRRKQRDIQFFVKGLFKYIINGQLLPEVEKVYQEHCQGIKAASLTNA

SEQ ID NO: 411252 - protein, 351 aa, unidentified
MMIIGVDYHPSFQTIAFLMEETGECGEQELNHSDGQAEKFYRELKQRGICVRVGMEATGYSRWFERLLAELGFELWIGDPAEIKTRRVKKQKTDRKDAQLLLRLMRENNFPQIWVPGPENRDLRQLLWHRHRLVQMRTRIMNQLQALAMNEGYRWKKKLFSEQGRAQLEKLSLAPWASRRRQELLELLDRLNPTIEELTAAVEQEARKRPDVLRLMTHPGVGPLTALAYVMIIGTPERFHCGKQIGTYVGMIPSEDSSAGKQRLGHISKQGNSLLRFLLVEAAQAAARSNPEWRRRYIHLAMRRHKSIAKVAMGRKLGVRLYWMWRNGCAYSPSLEFGSYVGQLGTGHGVK

SEQ ID NO: 411253 - protein, 348 aa, unidentified
MTIAMIGLDTAKNLFQVHGLDEGGRAVLRRKLHRSELVGFFEQQPRCTVFLEACGAGHYWGRLLSGFGHEVKLIAPEAVRPFVKRGRKNDAADAAALCVAGTRPETRFVPIKSVEQQAVLALHAGRSLLVKQQTMVANALRGLAGEFGVIVPRGLHKLEELMALVSAEEGIPAAGRQAMAELYAHGRAVAERVATLEEQIVHHARQDATARRLATIPGIGPITASLIAATVGDHIGAFRSARHFAAWLGLVPRQHSTGGRTRLGGITKAGNAEIRRLLVLGATSMVWRATRWDSKAGLWVRGVLARRPVRLVTVALANKLARIAWALMTRGEVYQAQGRAPAAAATVA

SEQ ID NO: 411254 - protein, 408 aa, unidentified
MEQLYVGIDVSSTKHAAYLMKPDGDKFSSFPMQNDRSGAKMISEKIVSALTKLGLKDVVIGMEATSIYGDNLVYALREDGNLGRFHRKIHVLNPKQVKNFKKSYPELPKNDPVDAFVIADQLRFGRIGKEVYMDDYRYKALQTLTRARFYAVQNLTREKERFANYLFLKCSGIAQSKDIPNTSATTLALMEHFETVDELANADLNELTAFVNRAGHGRFADPEATAKLVQAAARGSYRLPKTVNDSINQVMSASIAAMRALESQIRTLEKAIEKQFEIIPNTLISIPGIGKVYSAGIIAEIGDICRFTGQASVAKYAGLVWTQHQSNEFKAEDTRLIKSGNRYLRYYLLEAANSVRRCDSEFRRYYDLKYKEVNKHQHKRALALTARKLVRLVFRLLKDNRLYKLPEG

SEQ ID NO: 411255 - protein, 347 aa, unidentified
MLADQLDYVVGVDSHRDSHALAVVAVRSGVVVFEATVAADSGGYLEAFRVASEHAPGRRAFAIEGTASFGAGLSRFLLERDEQVFEVGRLRRERRSGGKTDALDAIRAARSVLTQKRGAVPRSSGEREALRALMAAREGAATAKTAGLNQLHALLVTTPEPLRGELRGLTRSPLLNRLAATRPESRRDPELRGMLLALRTVARRVLQLTSEERALAREIEKLVRALAPQLLEQPGVGALSAAQVLLSWSHSGRLPNEAAFARLAGTAPIPASSGQTIRYRLDRGGDRKLNRTLHLILNTRKRTHRPTIDYIERRISEGKTRREATRCLKRYLARSLYRLLENPPAMT

SEQ ID NO: 411256 - protein, 351 aa, unidentified
MQRFIGIDVHGQSCTLVVMGPSGRRLGEHVVETSAKALIERIRSIPGDKYVCMEEGTQSEWLYEVLESHVKQIVVTQPLKRAGSKSDAIDAWALADMHRRDALERTVFKSPKTSTALRQAARGYIAVRRDMVRAKCRLNALYRSRGCNPKAEIYDPDTRNSWLAKLPPAYRTLGELLSEQLDGLCQSHQAAESWLLKEAERIPVARRLATAPGIGPIRAALLVAIVVTPTRFRTSRQFWSYSGLAIVTRSSSDWVRDGRGWTRKLTAQTRGLNRNRQPELKAIFKGAATTVIQQMPNHPLHKDFQRMTDAGIKPNLAKLTLARRIAAATLAMWKHQEDYDPSKQTRAPQSQ

SEQ ID NO: 411257 - protein, 369 aa, unidentified
MNKTVKYVGMDVHKKTIDIAIAAEGRDGEVRHYGTISNDTDAINKFLRKLIATDCELRFAYEAGPCGYHLYRYLTANSLDCIVVAPSLIPRKSGDRVKTDRKDSISLARLLRAGELTAVYVPAADDEAMRDLTRAKEDATIAGRKAKQHLSAFLLRHGKIYTGKSTWSKAHFSWIADIKMMHPAQQIVLQEYIRAVTECSEQVARLLAQIHVLLEQWRMAPVVKALKALRGVSTVVAVTTIAELGDLGRFDHPSQLMAYLGLVPSEHSSGESKKRGGITKTGNGHVRRVLIEAAHTYRLPARISRVILARQKDLSAEIQKIAWNAQVRLCGRYQRLIGRGKETNVVVAAIAREIAAFMWAIAKQIPLPA

SEQ ID NO: 411258 - protein, 344 aa, unidentified
MDHFAGLDVSVKETSICIVDDTGRIVQEVKVASEPDALLKVLGSQAYCFKRIGLEAGPLSQWLFSALGEAELPVVCVETRHMQAVLKAQINKTDRNDARGIAQMMRVGLYRPVHVKTLRSQKLRMLLTHRKLLQSKAIAIENDLRGTLRNFGLKVGMVGTVNFEARIKELVENFSDLAVLVEPLLIVRRALREQIIILHRRLLAIVRDDEVCRRLMTTPGVGPVVALTYRATVDVPARFRKSKAVGAVFGLTCSRYQSGEIDWSGRISRCGDEMMRVMLYEAAQSMLRSKKWSWLKAWAMQIARRRGMKKAIVALARRLAVIMHRIWVDGTEFRWTRAQAVAAT

SEQ ID NO: 411259 - protein, 425 aa, unidentified
MKSTQNEKISQIKFETLVVGIDIGKETHYARAFDYRGIELARLLKFSNTDQGFQLFDQWMRDICKQQEKTEIIAGFEPTGHYWFTLGDHLKSQGHKLAIVNPFHVKRTKELDDNSPTKNDRKDPKTIAMLVKDGRYREVYIPDDIYQELREAVSERERLQEQLTSIHNRVVRWLDIRFPEFTTVFKDWRRNAALITLRSFPTPEKVMEMGVDKIVETWRKQMKRASLKRAEALVKAASRSVGRTSGKVASEASLQNLLAEYDLYCQQYDKQEQLMQDLLMQVPNADKLLDIKGVGLITAATFVGEVGDISRFQDPRQIQKLAGLNLVENSSGKHKGKTTISRRGRRRLRQSLFFSMIAMLGKNQEFRLLHQRNLTRENNPLNKMQSIIALCGKLIRVFFAILTKGVDYSPEKMLGDMEQSIRVAA

SEQ ID NO: 411260 - protein, 497 aa, unidentified
MKTTAPTKKAARLAKAGHRNARQVNKVKAPRVQEAALEGLDTINLHAAGIDIGSKENFVAVPAHSLKAGEPTVRSFGVFSWEQDALVEWLKTCQIRTVAMEATGQYWMALYDKIEAAGIAIVLVEPRSVKQVPGRKSDVLDCQWLQKLHTYGLLSGSFRPDAGIRRLRTLTRHRLELVQNGAACLQHIEKAMVQMNLQLHLVVSDIQGDTGLRILEAILKGQRDPKELVQLRDPRCKKSTVAEKMEAALKGHYTDEGLFIVSQSLENWKHYQKQLQACDQELGRALAALPTAKTATLPVPPKPVAPAPQTKKPKRRSGQGNNELTLEREKVSAQLQRICGVDLMNVCGLNLLSVLMLIAEIGVDMSWWRSAKAFCSWLGLCPGAKISGGKVLSRRTRRVVNRASVILRVAALAVGRSDSWLGRFYRRKKAHLGAPKAITATARKLACVIYHMLKYQENYVPLDVAIWELKAGEQRQRRLRREAEALGFELIQKQTTA

SEQ ID NO: 411261 - protein, 346 aa, unidentified
MKQIITIGLDLAKQVFQVHGADAEGSPVFNRKLRRSEVLRFFEKLPRCLVGMEACGSAHYWAREIAALGHEVRLIPLVYVKPFVKRGKTDAADAEAISEAVTRKTMRFVPIKTAEQQAAAMVLKTRALLVRQRTQAVNALRAHLAELGIIATAGLAKVEALVAIVRDETDARLPAAARFALKAIADEIETSADQIDRLERAIVMEAKHDEDMRRLTTIPGVGPITAATIKALVPDPSGFKSARHFAAWLGLTPRPHSSGGKERLGGISKMGNPELRSLLIVGATAVLRVVRNDARARPWLKALLARRPFKVAAVAQANKTARIIWALLNKGGTYRRPDPLTTAAAV

SEQ ID NO: 411262 - protein, 339 aa, unidentified
MDEISTLAIDLASRVFQLHGVNRHGKPVLRKKITRSKLGEVVAKLAPCLIVMEACGSSNYWARRFQSMGHQVKLISANFVKPFVKGNKNDRNDAEAIYEASARPTMRFVPIKSIEQQDIQAVHRVRSLLMKDRNATINQIRGLLAEYGILIPQAAASVRRHLPAILEDATNALTALARSVFADLYDRLVDLDTRIVGYEQRVQQIFIASPICKKIEQVRGVGPLIATAVVATAGDGKEFRRGRQFAAWLGLVPRQHSSGGKQRLLGISKRGDKYLRMLLIHGARAVVAQAEGRHDALSRWINGIKSRAGANVAAVALANKNARVIWALLRRDTEYQAPK

SEQ ID NO: 411263 - protein, 319 aa, unidentified
MAQNGLVVAGIDIAKDKADVCIRALSQRQTFPSTAEGRRQLISWLRKHKVTKAVMEASGGYERDWAKALRQKDIEVRIVDPKRVRHFAQSAGRLAKNDVIDADTIAWFAEIFGEAPSQAHDAAREKLQQMVNARQGLLDMKTMLSNKGEHDVPEPVQKSHARLLKTIAVELANLEAAITATIKATPDFAARAEIIESVPGLAGTTSAGLIAAMPELGQVSNQAISALLGVAPYDDDSGKRQGGRQIKGGRRKVRNLFYMACLGAATRHNPALMAFYRRLIAKGKKAKVALVACMRKLIVILNIMIARGEKWDASRYAVD

SEQ ID NO: 411264 - protein, 469 aa, unidentified
MTQHSKKVKSKPEKKYSRRKQSNSFPTMNTNAAGIDIGSGEHWVAVPEDRDDKPVRKFGCFTAELHAIADWLENCGIETVAMESTGVYWIPVFQILESHGFEVKLVNAKHVKNVPGRKTDVLDCQWLQRLHTYGLLSGSFRPEDSICVLRSYWRHRDNLIRYAAAHVQHMQKALTEMNIQLHKVISDITGVTGMCIIRAILAGERNTVKLAQMRDPRIKSSVETIAKALEGDYRKEHLFALKQALELYEFYHHQIEACDQQIEACLIQFDSKVDLKSNPIPVSKRGNKKPQRNAPRFELRTHLYRITGVDFTQIDGLDALSVQDIVSEVGLDPGEFSTSKRFASWLGLCPHNRITGGQIKGSKTRKVVNRAAEAFRLSAQALSNSSSALGAYYRRMRARLGAPKAITATAHKLARIFYHLWKTGQLYKDPGPDYYEQKYKERVLSNIKKKAQQLGYQITLEPLANGEVS

SEQ ID NO: 411265 - protein, 320 aa, unidentified
MLSLCGIDVSKDRLDVIVLPEEQRSSVSNNRAGWADLVERLRGCSIAAIGLEASGGYERGVMRALLAGGLPVRQVNPFKLRQFARASGVLAKNDPLDARMIASFVGIMPTRPAQRPTPAAELVAEMLAVRRQLSSEKVAAENASRLLEDALLRRLSRRRIGRLAADIELLDNRLVEIVATDAALAHRYRLLTSMPGVGPVLACTLIVLLPELGGMTRKQVAALVGVAPYAFESGTLKGRRCIWGGRANVRQVLYMAAMSASNWNPGLKAFHDRLEAAGKKPKVTIVAVMRKMITTLNAMVRDDVVWADRHSGRNSVTTAR

SEQ ID NO: 411266 - protein, 346 aa, unidentified
MKYFAGLDVSLEETAICVVDETGRIVKEARAGSEPQALSEALRKVDLPLERVGLEACSPTAWLHDGLCADGLPAICIETRQASAAMKTMPNKTDRNDARALAQIMRTGWYRQVHVKSRQCRLWRSLLVARRTVLNEMRTIENVVRAILREVGIKLGTPSRTAFAGRVREVAGTDPIVMPLVEPLLTILATMLGEFTRLTKQVLGIVRKEEICRRLMSVPGVGPITALAFRATIDRPDRFKRSRDVGAHLGLTPARYQSGETDIQGKVSRCGDELARAALYEAAHTLLVRSKKWSSLRAWGINIAKRRGMARARVAVARKLAVILHRMWADATEFRYGKAPVSAAAA

SEQ ID NO: 411267 - protein, 370 aa, unidentified
MPNFVGLDWGGAGHAVCVVDDGGRIVARLETRHDAAGLADLLARLGRIAPAGELPVAIERPSGLLVDTLAAAGHPIVPIHPNVVKACRPRYRSAGKSDPGDAYMLADILRTDGHRFHPLAPLSDEIRALRALVRGRDDLVVQRVAMANQLRALLQGFWPGAAAVFADIDSAIALAFIRRYPTPHSARRLGEARMAAFLAQNAYCNRRSPAELLARLKAAPAGQTGEAETEANGQLACALAELLRNLLSQIANITGRIEHAIAQLPDGRIVMSFPRAGRVCAAQILAELGNVRERFQTHDQLAAEAGVTPITRQSGKQQKRRLPMGLQQKTAKRHHRLRRQLPSRITMGKRDLSKRQNPRLQACPRYPHPR

SEQ ID NO: 411268 - protein, 352 aa, unidentified
MSEKYVALDVHKASVAIGVRDERGKYIMESIVETKAVTLLDFVKGLSGTIHLTLEEGTQSAWLYDLLKPHVAECVVCNPRQNKLLEAGNKGDRIDVRKLSELLYLGSLRPVYHGDHGTRALKELVHGYESLVRDRTRVKNRLKAIYRGRGISCEGEQVYHPQKQEQWLAQLGEPGVRQRAVSLYTQLESLNVMVTEVQRQMLAESRRHKATAILRSLSTLGPISAAMIIATCDTPHRFRTKRQFWTYCGFAVVTRSSSDHYFENGELRKRRKPALTRGLNQNYNRRLKQVFKSAATSGTRQGPFKPFYEQLLAKGLRPDLAKLTLARKIAAIALAMWKKGVPFDPKKLKVNS

SEQ ID NO: 411269 - protein, 358 aa, unidentified
MNISKDSKLDFTGQPIYIGLDVHKKFWRVSIYTRYGEYQNFNQPPSVAALLHYLRHHFPGAVYYAVYEAGFCGFWIHEQLGQMGIHCIVVNPADVPTGNKERRRKGDRVDCRKLARGLCHKDLKGIHVPPRLKLEDRTLVRTRLSMGRKQTRCKNQIKAMLLFYGIEIPEEREMGHWSRRFIQWIQGVRLQRASGDMALQIHLEELIHLRQGIAKLNRAILALSRTPEYLSWVRLLKTIPGISTLTAMILLTELGEIVRFRSINQLCSFVGLIPDIQGSGDKEHVTGITPRRHSHLRWLLIEASWIAVRKDPALMEAFDQYRKRMLKSKAIIKIAKKVLNRIRYVLKNEAEYVTCVIQ

SEQ ID NO: 411270 - protein, 331 aa, unidentified
MNYIGMDIHKKFTVAVVKDVEGNLLQEEKFDNDEFAFRKFLMIYHPNETKIVIESTCVWEYIYEILEELSYEVKLSNPTRTKAIAYARIKTDSVDASTLADLLRANLIPESYISLKHIRLLREITRERRTFVKQTTQIKNKIHAILIKRGWKLPNVSLCKSAIIWIRDKAEASDILLHYLDLLEYHTKMLQTIESKIKNIADTNKEAQLLMTIPGIAEIRAMDIVAEIGQINRFQTADKLCSYAGLVPAIRQSGDTLQFGRLIRQASRTLKYVLIETCWNLVRTRESNQLQEFYKKLVKKKGKQKAICATARKLCCIVHAMLRKGEEFRYS

SEQ ID NO: 411271 - protein, 402 aa, unidentified
MDIEDIEVFIGIDVGKTDHWATALNQEGRKVFDRALPNDEDRLRALYEKLASHGSLLVVVDQPATIGALAVAVAQDMGITVGYLPGLSMRRIADLTPGSAKTDAKDAAVIAGAARTMPHTLRAISTSDEETAALSMLTGFDLDLARQVNQTANRIRGLYTQIHPALERVLGPWLEHDAILEVIAAWPTPADLKRAGKARIDARLKKHGCRRHATWAGQIVSALELQSVTVAGTDAAAVVLPHLARQLIALHAQRADVAAQVETLVQAHPLYQVLTSMPGIGVRTAAVFLAETLGKTFDTGAQLASYAGLAPVTRRSGSSIRGEHVSHGGNKRLKRAMFLSAFASLRSDPVSRAYYQRKRDQGKRHNQAVLALAHRRILTLHAMIRNGALYDPQPATKLPAAA

SEQ ID NO: 411272 - protein, 330 aa, unidentified
MKHNHVGIDVSAKTFTTIIEHDGARTEAFDLPNDPEGFKKLIRLVTQKGFTAQVVLEATGNYSLDLALALHRAKRIEVMVANPRAVALFAGAYLRRSKTDALDANVIVEFSIRMPFEAWKPPEAHCFDLRAISRRIEALTKNATQEKNRLHAARTYDEMSDVVRNDIEVNIRHLERRIDRLREQAREHIAEHPDLERAFLHIISVKGIAQAAGIQLLAELSILPKDMDVRQWVAHAGIDPMQFQSGTSVNKPSRISRRGNAHLRRALFLPALVAAQHEPHVTAFYQKLLDRGKTKMQANVAVMRKLLHAIYGMLKHDRDFDGEKFYVLGA

SEQ ID NO: 411273 - protein, 430 aa, unidentified
MTKPQLTPTQGILVAIDIGKTRNEVLIEIPGQARRRRLTVLNTRADYDRLIDLLSGLGQPVTCAFEATGNYHRPLAWRLLQAGFTVRLISSLALARTREALHNGWDKNDPKDAQVTLHMLRIGATQHYHDPLAAGLNDIQEVSKTHEAISKAKTEVLHRILTHHLPLYFPEIGRFRHNSRSDWFFAFLDRFPTPGSITALSKEAFIAAAWGVVGRKVAKERLLGDIYETARASIGLPIPIDAPAVRLFRLVIAEARSLIEQRNALEAMAIELLHESPDYKLLCRIPGVGPITALTILAEAGDLRRFGHHRQFLKFCGLDLATHQSGAFRGQTKLSKYGNARLRRALWLAGQVAIRQKENSFRDKFERTIARDRHNADLRRKALTAITAKMARVVHAIIKSGADYRPFVEGPVPGGRTSLSMGREGATATL

SEQ ID NO: 411274 - protein, 457 aa, unidentified
MQSFYLGSDVSKGYADFVILDSRKQQVMKNFQLDDTFEGQRHLYDILSQFLPGHSGATLFAAVESTGGYENNWYNAFVKFQSTLNIQAARLNPLGVMYNSKADLKRNNTDKISAQSIAEYLITHTEKVTYQQRDQMASLRKQWGFIKMLTKQSTQLLNQLESLLYTTNTELLAYCKYGTPAWVLKLLLKYPTAARLARARVPAVSQIPYVTSERAQELVISAKRSVASDSDQITEKLVTATAKQILNLKKIINEQAELMVKECSIPEVDILKTFTGISDSSAIGLILEIQAVERFKTVKKLASFFGIHPIYKTSGDGSSGFHMSKKGRKEPRQILFMTALTAIRSNPLIRNIYLEHTEKGMEKMAAIGLCMHKILRIIYGMLKHGKPFDPQIDLNNRQRSIKKKPAGQRDKSRRFQDYDLNAPISRRQNKKRLERKQSHSVNNTKFGINAPAPELVS

SEQ ID NO: 411275 - protein, 460 aa, unidentified
MEAYLGIDVSKGYADFTLLDKEKQELEKVFQLDDTCGGHDALKKLLKQFTLQHNISTMYCAVESTGGFENNWYNWLIVLKKELPIKVARLNPSGVKNNVAASLERNVTDALSSRYIAQYIISHAEKVKYDVPDNIYSSYRSMSKHIALLKKQNTQLINEMKMVLYSTFPELMRYCKQGMPAWVLDVLKKYPSPAAIEKLKVEQLSKIKNVTHDKALSIINKAKNSTTSRNNSVQEFLIKSLAKQIADKQELIDEHKNYLADNCKGAEVDLIDTIPGIASYSAAAIMIEIESIHRFATPSHLASYFGLHPVMKESGDKQFAYRMSKKGRSGMRALLYMCAQTSVLHDEHLKNIYHRHRSKGKNHKNHKQAIGVIMHKMLRMIWGVLTSTQPYNATTDKNNQTKKIKQQPDNKKEELKTKRRYQALDTDAPISNIQSKKRKAQSEPQVSSAEQVRDHQIAPV

SEQ ID NO: 411276 - protein, 338 aa, unidentified
MYPFYLGIDLHLKRTYLVLMTKTGKILEQKRIRNDKLKEFLNKHIPKETYAVMEATRNWEFLYDFLQKKVDRVEIAHPKKLKAIASSTVKTDKIDAEVLAHLARLNYLPIAYAAPQEVRDLRLYIRHREWLVRQRTQAKNRIKSVLARYNLVAPMSDLFGVKGREYLKGVLEEVRPMAKRVILDQLMLIDMHNERIQALEEDLALSPEQQKDVRLIESVPGIGRINGVTVLAEIGEIKRFGSAKALCHWAGLTPRVRKSDQVVHHGRITKEGSPYIRSAMTRAATIASRVSPKWYDVHERMVSRCDKRGAKVVVARRLLAVIYYILKRQQPYQEEYSS

SEQ ID NO: 411277 - protein, 318 aa, unidentified
MLIHYIDIAKRNFVIAVSSLSKTKTETNNPKGIAHTIEYLKKHKVALVVTESTGGLEIPAAKAIRRAGIAVIIANPRQTHQFAQSQPLTKTDAKDAKMPAFFAQMTAQKEDSQTMPYQPPTEAEEVLEALVNRRNQLVDMRTAEKNRLHQVHETQVGSVKQLIAHFDRLIDELDKQIDDHTHTHFDGKAQVAEQIKGIGSITTATLMAMLPELRRLSHKRIAGLAGIAPHPRESGETKFKSRCFGGRSAVRKALHMATVAATRFEPLIRDFHQRPLSEGKPYKVAVTACMRKLLTISNARMRDYFAENDTAENGIRTA

SEQ ID NO: 411278 - protein, 398 aa, unidentified
MTESSDYESVQVFIGVDVGKDTHHAVAINRSGKRLFDKALPNDENKLRSLISDLKQHGQILLVVDQPATIGALPVAVARSEGVLVEYLPGLAMRRIADLHAGEAKTDARDAAIIAEAARTLPHALRTLKLADEQIAELSMLCGFDDDLAAQTTQASNRIRGLLTQIHPALERVLGPRLEHPAVLDLLQRYPSPEKLASLGEKKLAAQLCKLAPRLGKRLAADIAQALAEQTVVVPGTNAAAVVLPRLALQLITLRKQRDEVALEVEQRVIAHPLYPVLTSMPGVGVRTAARLLTEVACRAFASAAHLAAYAGLAPVTRRSGSSIRGEHPSRRGNKALKRALFLSAFAALRDPLSRAYYTRKMSQGKRHNQALIALARRRCDVLFAMMRDGTFYTPQGS

SEQ ID NO: 411279 - protein, 347 aa, unidentified
MVSIADWKCFVGFDYHDCFVQVCILDAFGKELGNQRISNDLNSILEYVDNIRDGRIIGGAAAEACCGASCFVEQLQEQDWPVQLAHAGICSKMKQSPDKSDLADAFLLADLCRVGYLPRVWLPPRAIRDLRRLGRYRQTLVEQRRNVKLRIRAMLREERIRVPGDVGNAWTKSYLAWLKTTDALDEHSRWVMDRHLEDLERLVDKVREVEKRMEEATADDPVVQKLREIKGVGLVTAVVMRAEIGSFDRFTCGKQLARYCAVTPKNASSGNRQADAGLVRAGNLTLRTMLIETAHRLARYQPTWKEMKEGLKKRGKPASVAAAAVANRWVRKLFWEVRGIDEQSAAA

SEQ ID NO: 411280 - protein, 367 aa, unidentified
MNKQSIDYTNQDFFLGIDVHKKSWKVTVRTNGMELKTFSMDPSPEQLYGYMHKRYPGGNYHSVYEAGFCGYWIDRELKRYGFNNIVINPADVPTTQKEKSTKTDKVDSRKLARELDKGELKRIYVPDEFHQQLRSLCRLRFRVGQSQTRVKNRIKGHLAFYGYVIPDHDEMSHWSRGFIEWLKTLEFSYGMGRDYLWLCIEELESHRRRLVEILRLLRRYCREYGIWEQVKNLRSVPGVGFVTAITLYGELMDMSRFRSIDQLASYAGLVPSVSGSGERESTLGLSFRRNRYLRYLLIEAAWVAIREDPALGYVFSRLIRRMTKQEAIVRIAKKLLNRIRYVWKHKEVYACGLISQMIESRSSKSQT

SEQ ID NO: 411281 - protein, 337 aa, unidentified
MERQYVGIDLHRRASTIYRMSPGGEMLGCVKIPSQPLELAEAMAEAGEAPEVVLESTYGWYWAADLLKAMGANVHLAHPLGNNWGNRRVKNDERDAKDLAAMLRLGRLAEGWIAPPEVRELREVVRYRFRLVAQRTSCKAQVHGVMAKNGILPARREMWGPGGTAQLDALELPTGYAIRVDSLRDLIDIYDREVAVIDTYIHGQLKDHPGYRTIQQIDGGREVIGAIFVAEIGDIGRFENPKKLCCWAGLTPKHRESDDKVHRGPITKQGCPLVRWAAIEAVSKMRGGPKLRADYHQIAERRGKFKARVAVARKLLTLVYYGLRDNEIRCLEAPEAA

SEQ ID NO: 411282 - protein, 315 aa, unidentified
MVSYLGIDVSSLSLDAAVRPQGTRLHVSNDPAGFEALLDGLCGLSIKRVLLEATGGYERNILRFLQDAGYKVIRVNPRRARAFAESIGVKAKTDAIDAEVLAHYAEVIPDQPTLRISPERALLRELLQQRDRLVQQRDDDRRRLKQAQFSAVSDFLKANLQHFKSQIKLIEQAISQQTEALKDERVTQLVQVKGIGVVTAGKLITLLPELGRVESKEIASLVGVAPFNHDSGKSVGKRSISGGRFEARRSLYMSCLVAIKYNPALKARYEALRGRGKVAKVALVACMRVLIVRLNAMLRTGKPWLDLVLPQPMRI

SEQ ID NO: 411283 - protein, 347 aa, unidentified
MSNELYCGVDLHSNNGVYHVVGADGKQVWHRRLPNCPEAVLTALASFQADLVTVAIESTYNWYWLADCLEDAGYSVVLANPSRMDQYRGMKNTDDDSDAMFIAELCRLRILPTGWICPREERSLRDLLRRRALAVQSRTRQINSLQSMLVRQTGSSARYATLETCTTEELIDILTHESLLVVAHTQIELIGAHDAAIATLEQFALEKCRPRPEYPLLTSIPGVGKILAMTIMLEIGDICRFASPGELSSYVRAVRADRLSNGKVKGRNNDRNGNRYLAWAFIEAVNHAVRCCAPARNWYQRKAAATLPVVARKALASKFSKAVWYMLTEKQPFQIRKVFGEGFARGG

SEQ ID NO: 411284 - protein, 272 aa, unidentified
MQQFLSWLQVIDGTSENVVIGIEGRGGKGSAFISSMLETYEHVYEVNPQYTRQRRQFGTRGGKSDIRDAKCIAEVTIRKLPELPKITQGQLSSRLLKLKKLVWYYEEETRFLTRLKNHLRQLQRENNFSSNREEKKLIAQIIREKQQERRKIVRKQHGLEKNFESLLEEQEKNLTTVPGIGVILAARIVAHTDSLERFATIDKFLQYAGIAPLERSSGQLKRAVQNNKGNRLLNNALYMVAICQIKHNPKAKIYYQKKLSEGKTKKHAVRCV

SEQ ID NO: 411285 - protein, 466 aa, unidentified
MTSFYMGIDVSKGYADFVILNQQKQPVMENFQLDDTFQGHSQLYEILERFLAEHKKATLYAAVESTGGFENNWYQALIGFQVLLPIQTARLNPKGVMHSSKADLKRNKTDKISAQSVAEYLISHPEKVRYQQEESLAGLRKQWSFVQMLTKQCTQLLNQLHSLLYTANPELLSFCRDGIPDWVMKLLLQYPTAKRLARAHEKTLVKIPYVTIERAQTLITAAKNSVASSGDDISAQLVISMATQILHLKKTIAAQTKLMVTQCDLPEVRLLKTFIGIGDTLAIGLMIEIQNIVRFKSAKKLASFWGVHPVYKISGDGSGSFKMSKQGRVQPRRLLFLVALTAINHNPVIKSLYEHHVKQGREKMDAIGICMHKILRIIYGMLKNNTAFDPQIDDRNRKRIIRLKNSGPKKDKNRRFQKYDAGAPVSGRQNKKRMEREQSQSIKNTKCGISAPVPLGSILADVLNKL

SEQ ID NO: 411286 - protein, 402 aa, unidentified
METPLLVAVDVGSRFHEVAIGDGSGCVLDGFRIDHDPDGFAAFFDRIEAHRSGPGQAVRVAMEGYNGWARPLDSQVLERGWALYNVNNLKLARYKEIFPSPAKTDAIDTRSMLELFALDGHAGVARNALQRVAVAPEDHRRLKYLTRRRRVQVKERAGRLVRLGCELQALSPGLVAITGSLDNQWFLRFLTCRERLTALPRLQAKTVSGIRGIGRCYLEKIRAWQRTARFSPDIAFADTDVVDDARAILALDERIAALDARIEALSGESSFATTLRSIPGFGVTGVAELTGEIGTLERFAGESSLAIYVGVAPLDHSSGLRVKGKRAKCVNDRCQRAMMTCVVRHMACVAESRAYYDRKRAEGKTHNQAVRALGRQLVRVMWSMLIHEREYEDRTQNGDAAA

SEQ ID NO: 411287 - protein, 341 aa, unidentified
MKHLYLGIDWGKNFSQLFGFDQDGEVVIEERLKTLDLSVWRKKLRSLKDYSIHAAFEIGAHYDWLYDLLTEYCGEVAVIDPAQFAVICKSQRKTDKIDAQKIAEGLRRGDLPLVHVPDKQTRADRRLVAFTHWHSQQAASVKGKIRSLLLAQRLECPYSNITGMAALEWLNEQAPQMSDDAQLFLRLLLAEVELLRQQRQELDARVAIRVKRYKQVAVLDSIPGFGQLTILAVLSSIAGVARFSRPEQLSSYWGVCSSVYQSGTTLRLGSLTRRGNVHVRWLLSQALQHLHRKDARARKRYLKLKRKKPRGVARAAQVRWLTQIIWHLLKKDEPYRIKAAA

SEQ ID NO: 411288 - protein, 344 aa, unidentified
MILIGVDPHKSSHTAVAVDAAGHQVAQRRFVVNAGTFRHLMRWCEQWPDRRFAVEGAGGLGRPLAQQLAAAGENVVDVPSTLSARARLLATGGDRKTDAKDALHVAQVALFRTDLRPVVQEDQTTILRLLTERRDDLVHERTRVLNRLHAVLRDLLPGGAPTGLSADKAAALMKGIRPVTATDNCRRDIARDLLADLRRLDRQVKDNEAEMREAVAATRTTLTTLPGLGTVLAAKVIGHIGDVSRFPTEHHFASYTGSAPLDASSGNNVRHRLNTGGNRALNSVLHTIAVCQIRDGGRGQDYYLRKISEGKTPSEARRALKRRLSNVVYRIMKRDQRNHLAHAA

SEQ ID NO: 411289 - protein, 338 aa, unidentified
MNPSQTVETYELFVGVDIAAKTAMASTLRPGGKTSRSFTIDQTPEGYSSLLHTLQATGHAPSEVLVVMEATGSYWISLATRLVHKGFAVSVINPAQAHHFAKALLKRAKTDAIDAQTLAQLAMVLRPEPWALPPPIYYALQQRLAQRDDLLNLRQQVRNQLHALVQHPEVIAEVRARMESLLATFEAQLTEVESEITAALSQDSAWAAAAERLQSIKGVGWVTAAWTLVATLNFSSCDTIDALTAYAGLAPMPRQSGSSVWHRPSIGHTGNGRLRTALYMATLSSAQHNPVIKAFYTRLREAGKPEKVARCAAARKLLHIAWAVVKKDQPFDPNYALG

SEQ ID NO: 411290 - protein, 416 aa, unidentified
MNAVGIDVSSRKSTVAVLRPLGEVVCLPFDVTHDIAGLASLVEKLKAIDGETRVVMEHTGRYYEAVAKALHEAGLFVCAVNPLLIKEYGANSLRRVKTDKADAIKIARYALDNWADLRDFTPMDAIRYDLKTLNRQFQLASKQRTASANNLIALLEQSFPGIRKCFDSPVRSDGTQKWVDFAHSFWHVDCVRKQPFAAFCERYRKWCKLHAYFFKLRNAEKVYALAKRAVVLTPKSKVVKVLVQEAANQLISISRSVEVYRAEMDRLAAMLPEYPVVMAMYGVGKSYGPQLMAEIGDVRRFERKQALVAFAGIDPMPNQSGDKNVRSNKSSKRGSPYLRKTLFNVIRTYLQCAPQDEPVFQFLNRKRAEGKPFYVYMLAAANKFLRRYYAKLRDYFASLDTFQSVDPIPTTLKASL

SEQ ID NO: 411291 - protein, 345 aa, unidentified
MGIDVHKRKWSVATITESGFQRVHTQNASAQELIDFLHRHYPDGDYRAVYEAGFTGFSTYYSLNAAGISCMVIHAADVPTTQYENVMKTDKIDCVKLAKSLRAGLLKGIYIRPKDSIDDRGVIRMRRAVIKDLSRYKIRVKHLLMSNGVEVPEQFDKRKGNNWSGAFIQWLKGDVSLLSETRRTLDMLIAQVERMRQAQVEATRELRKLSRTERYATNYDLLCSIPGIGGIVAMTLLTEIYDITRFRNECQFASYLGLVPTSHSSGDKTIHGEMTFRGNKELGPMMIEAAWVAIRNDTGLAASFSNYCRKMKPQQAIVRIARKLANIIISVLKNKKKYVPYSCNG

SEQ ID NO: 411292 - protein, 309 aa, unidentified
MDSIIGIDVSKDHLDVAVRPGGASFVVERNEQGLQVLVGRLCELSPHLVALEATGGFETVVAAALASAGLPVVIVNPVQVRAFATAIGQRAKTDPIDAAVIAHFAEATKPTPRPLPDEATRLLADLIARRRQILEMIGAERQREQRVRIPRLRKSIRRLLKALEKELESLDGDIDDAVRGSPAWRAKENLLTSVPGVGPVIARTLICELPELGNLNRKEIAALARLAPFTRKSGKWKGKSFIGGGRTAVRCALFMGAMVAKKHNSILKAFFNRLVAAEKPKMVALIAVAHKLLTILNAILRDNRPWQIA

SEQ ID NO: 411293 - protein, 433 aa, unidentified
MMTPDDIDVWVGLDVGKSAHHAHALDHDGNTLYDKPLKQDEKAIRTMLGKLSKHGRVLLVVDQPNTIGSLPLTVARNMGIAVAYLPGTAMRRTAQLLPGDAKTDRRDAHVIAWAALKLPETLRDAGPDDETLAALKLLAGHDEDLAHESTRHVNRLRSLLLQTHPAFERALKGERITRDATLALLERYGGPMGVKRAGIEDVKDWAKSNGLRAGRIIDDMFKAIGEQTVTVPGTLMAETIIPSIAHDIKTIRDRRREVGRQVEKLLEDHPLLTVPASMPGTGVRTASNILLGIGGDIANFKSSAHLAAYAGIARHRPIRHQHQRRTALQAGQQTPQERAVADRVRRIHQTPALRSLLQAQTRTGQTPQRRHHLPRASALRRDLQHAQKRNPLPGTSPRSLNRATRERTPDATGRAKRAHDSQPESRHVNSPRS

SEQ ID NO: 411294 - protein, 387 aa, unidentified
MTVRTVNNLPAATHGETVRCLFAIELSKQSWVIAFNTPLSEKISRRTLTGCKWKRLLELIEDVRARVSRETGRAVEVMSCYEAGYDGFWLHRQLEAHGVRNYVIDPASLQVDRRARRVKTDRIDTERLLRSLMAYLRGEPKVWSVVRVPSVAEEDARRLHRERDRLVSERVQHVNRIKGLCALHGIYDYNPLRPQAMARLEQLRTAQGGALPPRLKSEIKRELQRLELVVEMIATLEAERAAIVEDEASTHVNAKKIQNLHRLKAIGPEFATVLVGEIFHRDFNNRRQLASYVGFAPSPFQSGNVAHDQGISKAGNRKGRTTGIELAWLWLRYQPDSDLSVWFRTRVGTMKGRIRRIAIVAMARKLLVALWRYLETGLVPRGAVLKG

SEQ ID NO: 411295 - protein, 349 aa, unidentified
MLADELDYVVGVDTHRDEHVLAVVAAATGAVLARQVVPANERGYQAALRFAGEAAHGARAWAVEGTGSYGAGLARYLAGRGESVLEVSRTPRTERRLRGKDDALDAARTARAALASEALALPRNGERREALRLLLVARRSAVDVRREALGQLRGVIVTAPDRLREELRVLPTGRLLERCSRLRRSSRAGADELATRLVLRSLARRIDAATREAAELEREILAHVRALAPALLDEPGVGPIVAAQVIVAWSHRGRLRSEAAFARLAGVAPVPASSGQTTRHRLSRGGDRQLNRALHTVVLHRRQHDAATKHYIARRLAEGKSRREATRLLKRYLARHLYRLLQNQEPLLA

SEQ ID NO: 411296 - protein, 372 aa, unidentified
MKVTYQTCCGVDVHKSFLVATIVKTTGGIEPSYQKKRFSTFNNSILEFKQWLLDNHCHDVCMESTGKYWVPVFNLLEDKINVVIANPKWVKAVKGNKDDTKDSKWIGDLFRLGLVKGSYIPCKKVRILREYTRYRYKLVSCRSSEKNRYQNALTVCNVALDSVVSDIFGKSSTSIIDYLLEQSGTSINHEEIASKLLRSLKSKEDAVQFLCTIPGVKRDSAITIISETGTDMSQFSSSKRLCCWAGLTPGSNESAGKKKSVRITRAGVYLKPALVQCAHAAVKSDKSPYYKKKYESLVKRRGKKRAIIAIARMILTAIYQMLSTGEQWNPSDLYKIDMPVALVEKQKAKAIKQAKKLLQREGLLPPDEPLAS

SEQ ID NO: 411297 - protein, 360 aa, unidentified
MRTITIGVDLAKQVFSVCSVDAAGRIADRRDLRREAFMRWLPSVAAGTTVAMEACSGAHHWARRCQDYGLEPRLIAAQFVAPFRKSRTAKNDRNDAEAIATAARQGNMRFIAVKTVDQQVRLSWHRVREGYKVEALATGNRLRGLLAEFGVVVAQSDSALRRTLADLDALSLPSALVELLRDVDAQWQQLRARIAAADRRIQAHAQADEACKRLREIIGVGPITADAVVATLGSAHSFANGRQFAAWLGLVPMQHSSGGRTRLGHISCRGDGYLRTLLIQGARSSLQRAKAVTWDKGTPEQRWIQDLERRLPFGKVLVAIANKHARQLWAMLARGEHYDAEAWLKHPMVQRTASRQSVSE

SEQ ID NO: 411298 - protein, 442 aa, unidentified
MDTDCFSLYVGIDWGDAQHQVCMLSDPNHPKELQVKHGGRALADLAMALAHDVWGQNHRVAVAIEVDSGPVVESLLLQGFAVYSINPRQLDRLRDRYFPSGAKDDRRDALVLAQSLRTDRQLFKRVEADDPDTITLRHVTRARDELQRSLQRTTNRLRNHLAQYFPALLQLSPDASDPLVWALIERAPDPEAAAKLSIVTIAKIVKDLRIRRVSPQQIRDVLREPPVQLLPGARQALAQRALTLIPQIRLFHEQFVEHTRAMERQIADRCQPVQEPVSEPAGEPALEAPAPDQSSKPSDAPTSPAPRLSDAAILRSMVGIGAYVLAVLLTEATRAIARRDLAALRAQTGIAPVTRQSGHSLHVSMRRACSWRLQKAAYCWGMAAIQNDPLSKAHYQRLRASGHTHARALRGVVDRLLDVLITMLRDGTLYHPERRRELHNAA

SEQ ID NO: 411299 - protein, 342 aa, unidentified
MFMEIDHVVSQCVGIDVSKKKLVATMCMFSQAEQAVYSKATEFDNNKTGFNQLVKWSRKEAMKELPLRYVLEATGVYHEHLANHLVRIGCTAVVMMPAKAREFACWEGMISKNDTIDSRVLALVGCVKRNLRPWKPTSPLYRELRTMTRFSQDAKKLRTELKNHLEALEHSHEAERSVVRHYESLVASLDRRIEKNLEDMRKKVDSDEELSKKVANIMTAPSLGFLSAVTVIAETDGFALIQNRKQLTSYAGLDVRDSQSGTVNGVSRISKRGNSRIRAILYMPAVQCRLHNKHLKKAYDRIVAKHPDKKMIAVTAMERRLLLLIYALWKSDRPYSEDYDKE

SEQ ID NO: 411300 - protein, 405 aa, unidentified
MDDKKEYVMAIDVAKGKSMYYILSIHGEVVLDAIEYEHTLSNFKLIDLKIREERIKQNLAVFMESTSIYHYPVMRYFLEQAYEVIVVNPNLVKKSSTTFRKTKTDRLDCIKIAETYFKEEIKSNSARTNDIYFNLMALNRQLLSLEKALTAIKNRYTRLLDICVPEHEIYYTNSSDKYNKKYITLFQYLPHSEHIQKTRVDRITNILNLPFKRKYTKRLTKEAIRLKGISKNAYPGVSKLSSEVENLGQIISIMTYLMSEHERSKTKLITLGKQSKEYKYINSIPGIGEQSASQVIAELGDISRFRNYKQINAYCGLEPSIYQSGKAFYNGRITKSGNGFARKVLYTTIMGIIKSSRSYYPEHPINVYYTKKKENKSTKESVIATSTKLIRIIFSLCKNELTFIK

SEQ ID NO: 411301 - protein, 360 aa, unidentified
MCQRVIVGDESHEGAIHMQISTIGLDIAKNVFQVHGVDAAGKTVLTRQLRRGQVIGYFEQLPPCLVGMEACATAHHWARELMELGHTVRLMPASYVKAYVKRSKHDAADAAAVCEAVTRPSMRFVPVKTIDQQAALMLHRCRDLLIRQRTQLINALRAHLAELGMIAAKGKEGVKNLVAIITDAVKATVLPEPMRQALQALVKQLAALQQQIGELERSIHAQHRASDRSRRLETIPGIGVLGATAIAATITDPSAFKSGRECAAWIGLVPRQNSTGGKERLGGISKQGDRYLRRLLVIGATAVIRHARTHPDKHPWVTRLLAKKPYKVVAVALANKMARIAWAILAKGETYRAPALAAAA

SEQ ID NO: 411302 - protein, 341 aa, unidentified
MEQATTIGLDIAKHVFQLHGADAAGHVLFRKRITRVKLLGFLAAQTRCVVAMEACAGAHYWAREIAKLGHHVRLIAPAYVKPFIKRQKNDAADAEAICEAAQRPSMRFVPVKTEEQQANGIVFRARDLLVRQRTQCVNALRGHLMEYGYVFPKGITHVETLVALIEDLQSSLPDSVRAILKLLVDTFTALEAQIAVLDAEINQRSKSDPTARRLMTIPGVGPIASTAITALVPAAEGFPAGRDFAAWLGLTPLQKSTGGKQKLGAVSKRGERTIRRLLIIGASAVVQQASRRGAPKGSWLAQMLARKPKMLVTVALANKMARVIWALLVKGGTYRAPAVAA

SEQ ID NO: 411303 - protein, 413 aa, unidentified
MLEVTFSHCCGLDVHKKSVTACALVPKDDGQGVKQAIKTFKTTTGALRELADWLASLGVTHVAMESTGVYWKPVYNILVEQFELWVVNARHLKQVPGRKTDVKDAEWIAQLMRLGLLERSFIPDVEQRDLRDLTRYRTRLTNEKSAAVNRLQKILEDANIKLASVVSDVQGVSARAMIEALIAGQSDVEQIADLARGRLRPKIPQLVEALLGNTRHHHRFMLRELLAHIDELNTRLHSLNQRIRTATAPYEAIIERLSAIPGVKRHIAEVILAEVGHLVDQFPTAKHLASWACLCPGNNISANKRRSGKTQKGQLWLKTALVEASWSASRSKDTYLSAQFHRLKARRGAKRAAVAVAHSILTIVYHLLADPEAAFHELGGDYFQKQNQGAYKRRAVKQLERLGYQVVLTPAVA

SEQ ID NO: 411304 - protein, 362 aa, unidentified
MRIIGCDLHARQQTLAMLDTTTGEVVEVTLKHEGDNVREFYSLLPRPVRVGIEATGSMQWFLNLMEELGIECQVGHPAQIRASAPRKQKNDRRDAELILKMLVEGRFPAIWLPSKELQDLRSLLRHRHQWVRMRTRIQNALQSIALANGLRRGTALWSHDGQSRIASLPLAPHTAYRRSELQAMYEKFEAEIEKLNQRVEEQACKSPGARRLMTHPGVGPITALATEVFLGDPARFADSKALASYVGMIPREYSSGGRQRLGGLSKQGNPLLRFLWGEAGAHAARKDPELQRFYRRKLVQKGLGKASVAVARKLGIRLWIMLRDQIEYNEFCRRGQKQQKSSDACVGMPETRYGAKSHRPID

SEQ ID NO: 411305 - protein, 355 aa, unidentified
MEIRTIGIDLGKTVFHFVGVNARGQVVVRKKGSRTQLLRFTSNLRECLIGMEACGGAHFLGRALREQGHDVRLMPAQYVKPYVKTNKNDYIDAEACSEAVTRPTMRFVPIKTDDQLDLQSLHRVRERWVVRRTAVINQIRGMLLERGITICKGRHHIEESLPGILEDADNKLSGALRVLLTQLRLEMQYLHGQIEETDKLTAVINQIRGMLLERGITICKCRRLVAIPGIGPITATATVAAIGNGAAFKKGRGFSAWLGVVPGEHSTGGKQKLTGTSRRGNKYLRKLFVQGAHTVLLQKTKQSSGLSTWLVNLTSRKRKQVATVALANKMARMAWAVLFKGEAYRPPSVPQVIAA

SEQ ID NO: 411306 - protein, 341 aa, unidentified
MEEVIIIGLDLAKNSFQLHGASADGAVVFRKKLSRGQVLKFLAAQPRCIIAMEACASAHHWGREFGQLGHDVRLIAPIYVKPFVKRQKNDAADAEAICEAAQRPTMRFVAVKSEDKQSSAMIFKARDLLVRQRTQTINALRGHLAEFGIIAPKGTAHLGRLISHVEAADTSLPKPVCAVCLILIDLVRTLIEQIRVLDAEIKARSRNDAVAKRLMTIPGVGPVIATALEALAPPAETFRRGRDFAAWMGLTPRQWSTGGKPRLGKISKMGQRDLRRLLIIGASAVVRWARKRGAPEGSWLACMLLRKPPMLVVVALANKIARIAWALMAHGGIYRTPVRAA

SEQ ID NO: 411307 - protein, 387 aa, unidentified
MIFIGIDIAKNTHFASAVNSDGEVLVKPFSFENSKKGFDLFISKFNNFDLDNCLVGLESTGHYGDNLICFLFSKGFKIGIINPIQTNSLRSSNIRKTKNDKIDTFLIAKCLQLGNFSLMQEKDVSIIKLRTLCRFRFDIIQSQTRLKTQLTTCLDLLFPELDNFFKGNLHLKTSYALLEKYSSPKEISNARIDTLTKLLTTNSKGHYSYDEAVKLKNIAKNSIGIDNPAISIQVKCLINQLALLKKQINSIDKNIKEIMDNINSNILTIPGISYTLGAIIISEIGDIHRFSNPTKLLAYAGLDPSVRQSGNFNAKTTRISKRGSKHLRYAIQRASSLIIWNNDVFYEYYTTKRSKGKSHNNAVGHVCNKLVRVIFKLLTENIPFNLS

SEQ ID NO: 411308 - protein, 481 aa, unidentified
MSQSKKHSPKTRKEKPAAGQGKRGGKRTGMCLEDRPILEPNAAGIDIGAREIFVAVPPDRAEDPVQVFSTFTEDLEKMAQWLVSCGVTTVAMESTGVYWIPLYDVLETHGVKPCLVDAHGMKNVPGRRTDWHECQWLQFLHSVGLLRGAFRPDGDVCAVRSLMRHRSDLVQMTNQHIQHIHKALTQMNVQIHHVIDDITGVTGSAIVDAIVAGQRDPLELAKLRDPRIKASEEMIVKSLKGNWRPEHLFTLKQSRQMYRHYQEQIAACDEEIEKLLVAFQARVDPQEKPLPPDRKKRKRGRCKKNAKTKQGFDLRTESYKIFGVDLTQIPGLMAMVLTLFSEVGRDMSRWKTAGQFVSWLALCPDNDITGGRVAWRGMRRVHNRAGELFRMAAYSLHHDKSPLGDYLRRMKSKLGPAGATTATAHKIAIIFYTMVKRQVEYDATLWAERDTQREKRFEAKLKRQAQQLGYKLVPIEEEPAA

SEQ ID NO: 411309 - protein, 345 aa, unidentified
MTVTIGIDPHKSTHTASAIENATHGDLATIRVRATTASTRDLLTWAEGWPDRAWAIEGARGLGYLLAQQLVAAGECVVDVPSTLTSQVRLLETGGGRKTDQVDARAVAVIAATRTLAAVRAEDHSQVLRLLADQRSELAQTRRRTINRLHRHLRDLIAGGGPVHLSSKTAATLLAKVRPVTVVETERKRIAKDLLAELRRLDKAMVENRRRSREAVEASGTTLTQIYGISEVLAAKIIGQIGTIERFPSADHLASYAGTAPIEASSGDVTRHRLSRRGNRQLNNAIHLAAHVQAIRPGKGQDYFRRRLDAGDSRKEAMRALKRQITKVIYRTMTLDSKKQLRATS

SEQ ID NO: 411310 - protein, 463 aa, unidentified
MPKARKSRKKLALKVDVTAGLEALHHHAAGIDVGNAEHYAAVPVGRDPQPVQTFGSFTADLHRLAKWLKACQIETVVMQATGVYWIALYEVLEGYGLQVNVVNAKYTKTLPGRKTDVLECQWLQKLHSFGLLNNSFLPPEEIRVLRTYLRQRENLVAAAGACIQQMQKVLTQMNVQLANVSSDLSGMTGMAILQAILDGQRDPQQLAALADPRVQASRKEIAQSLAGHWREDLLFVLRQVHGLYFTYLESITACDQRIEAHLKTMQAKVDVVAQPLPEARPKDRLPNRKHIPQFGLREELYRITGVDLTRIDGIQVQTAQVLVSEVGVDMTRWPTEDHFSSWLGLSPNNQITGGKVIRRGTKKVLNRAATALRLAAQTLHRSKSYLGAQYRRLRARLGAPKAITAMAHHLARLIYRLLRFGTQYHDKGVEYYERKYRETEMKWLQKQAAKLNMQLIPTGALTK

SEQ ID NO: 411311 - protein, 421 aa, unidentified
MNQLTDTVYTAYVGIDWADAKHDICVQAAGSEDRAFDIIMHKPERIEAWARAMVQRFGGPIAVALELTKGPIVTALEKYDFFVIFPIDPKRLAKYRQAFTPSGAKDDPTDAEFALDYLVRHPEKLTALTPQSVPMRKLMYLVQARDRLKGDRSRWVNRLVQALKQYYPQVLDWFSQRNTVVFCDFLNQWPTLQQAKRARKSKLETFFKAHHVRFARVIEDRIEAIKAATPLTHDEAIITVHRLQVATLVAQLKLTIQAIKEFDKEIAATVEQLPDYALLFSPLPGAGAVFAPRLLAAFGEDRARYSSAEEVQNHSGIAPVTQRSGQMEWVHWRWQCPKFLRQTFVEWAAQTINKSAWAGAYYRQQCAKGSSHQAAVRSLAFKWIRILYRCWQDRMPYDESKYLEALRRSGSPLLKLLADAA

SEQ ID NO: 411312 - protein, 347 aa, unidentified
MAVTIVETPITGGAVTHADVHVAAALDPVGGLLGVAEFRATPAGYARLLSWLGEFGTVCLVGIEGTGSYGAGLARHVATAGIRVVEVDRSDRQDRRRQGKSDPLEAVSAARAAQSGRAAGAPKGRDGSVEAIRALMVAKRSARAERTQTINQARSLIVTGPDDLRTWFARHTVAALVAETAALRPRPGSTVGYATRIALRELGRRATFPGGQPGRLDELIVPLVTARAPGLLALYGVGPDTAALLLIAAGDHPARLRSEAAWAHLCAAAPIPASSGKRTRHRPGPGGDRQANHALWRIVITRDEPCPPTRAYVERRTAEWLSKTETIRCLKRYVAREIYPRLRAAAD

SEQ ID NO: 411313 - protein, 356 aa, unidentified
MNKRSKLDFSGQPIYIGLDVHKKSWSVSIFTQYGEYKTFSQPPEAETLSQYLQHHFPGGQYRSVYEAGYCGFWIHDQLKDKGIQNIVANPADIPTRDKERKNKRDRVDCRKLARALRGDEIEGIYTPPRWKLEDRSLVRTRLSMGRKQTRCKNQIKSMLLFYGVGIPERREMGHWSRRFIRWIEEIRMERASGDMALQSHVEELCHLRQLIAKLNRTIVALARTEQYRSWISLLKTVPGISTLTAMIVLTELHEITRFGSIDPLCSYVGLIPDIQGSGEKEHVGGVTQRRHSQLRWLLIEASWIAVRKDPVMMEAFQQYCKRMRKTKAIIKIARKLLNRIRYVLKNQVEYVTGVIE

SEQ ID NO: 411314 - protein, 400 aa, unidentified
MANTPSIKFFVGIDVSKEKFDVCCIDGTGEKLFRLSTDMVRSGFEELNKKLTKLADSRDSVVIGMESTACYHIPLFSYLTSEGYNVVVINPLLISNYMKLQLRKTKTDKKDAQVIAQYLNEQREAYSQSVMRSDITELRDLSRQRESLVDQMTAQKVDIKRILSVTFPELERITNIFTKSMLRLLSQYPSASAIKNTRRAKIAKALIPGSYGKQTDESVDVIRKAAKTSIGVVSLAKEVVLKQKVAILIQLEEHLSELSEILIELCQSQMGEDVEILTSMKGIGNQSATNFLIELGGGVDPYKSPKQVIAMAGLDPSVYQSGKHEGKGRISKRGNRHLRRIIWLMSTKVIIFNDFFKEYYLKRREDGLPYKKAVLATAHKLIRTLFAMLSNKTTFKVRAS

SEQ ID NO: 411315 - protein, 429 aa, unidentified
MEVLHPRCCGLDVHKETVVACVRLVIDGKPVKEVRTFSTTTVSLIELSEWLTETKCTHVAMEATGVYWKPVWHILADDGFQLVLANAAHIKNVPGRKSDVKDSDWISDLLSHGLIRPSFVPDGSTQEMRTFLRTRKQFVHEKGSHILRIQKTLEDANIKLDSVITDIIGVSGRNMIEALIAGERDPAKLAALADRRLKASQQTLRQVLRGRVTAQHRFLLRLHLDQIDALDAAIARIDREVEASIAPFRTAVEQVSTVPGIKSLAAQTILSEIGIDMTRFPSSGHLISWACICPRSDESAGKRRSTRIRKGSPWLKTTLVQCAWAATRKKGSYLQAQYYRIRARRGPKKAIVAVAASILTAIYHMLKDGTMYQDLGPNHFDANAKERQKNRLLKRLADLGYDVELTPFPTGVAPAEALAAEALAAEALA

SEQ ID NO: 411316 - protein, 433 aa, unidentified
MKVKYEDRQKQKVIAITTDTLVVGVDIAKNYQWARFVDFRGIEHGRALKFKNSRGGFETILARIREICRKENFAKAVVGMEPAGHYWKAFANWLEKQDGIKAVLVDPYATKQAEELDDNSQTKSDKKDALTTAELVKDGRYFELCLPHDVYAELRGLSTARTGLNRRKNALKNTITAVMDEYFPEHGEVFKCPLSGKASRHILKTCPFPKFILEPGEDGVTDEIKKAVKKTVGRKKAAQLIETAKESIGVDYGEEAAGLKLRLMLEELELLEKQAEELEVQMEAALQKTDYAGFLLSIKGIGVVTLAACLGEPGNPARFENPRQMSRMAGCNLAEDSSGKNKSGTKISKRGRKNLRSVPYQMALIMAATNDEMKQLYHYLKTREEAPLRKMQALIVVSKKILALVHAPAKKKENYDPGKVFGPVRREQLKAAA

SEQ ID NO: 411317 - protein, 344 aa, unidentified
MKVTTVGIDLAKNVFQLHGVNEFGKPVIKKQIRRDQMAEFFVNLPACLIGMEACGSAHYWARKLQGLGHTVKLMAPQFVKPYVKTNKNDAADAEAICEAVTRPNMRFVPIKNVEQQSVLALHRVRQGFVKARTAQANQIRGLLSEFGLIIPQGIGHIATRVPELIEDASNELPGSFRLLTQRLLDHLKELDRQVDELESQIVKWHRQSEASSKLAQVPGIGPITASALVATIGDAKNFGNGRQVAAWLGLVPRQHSSGGKQNLLGMSKRGDTYLRTLLIHGARSVIYRAQQKPDSCSWINGVVNRRNKNVAAVALANKNARIVWALLAHDREFRPDYTTAKAAT

SEQ ID NO: 411318 - protein, 358 aa, unidentified
MKYIGCDFHPSFQVIAMADQETGDGVERKLLHTEEAKKFYEELKGPVVVGVEASGNTHWFESWLARCGHELWIGDAAAIARQEGRKQKHDRRAAQLILQLMLENRFPRIWVPTVGERDLRQLLIHRQHLVRMRTRIKNQLQHIALNQGWQKKRKLWSEAGLELLRRLELEPWTGQRRDTLLTMLAELEDKIRPLDLAVAKEAQAQEAARRLATHPGVGPVISLATVLTLGDVKRFADSRSWVSYVGLNPSEQSSGQRRRLGSISKQGNPFLRYLLVEGAATAVRGDKDLARMYARLKAKKHHGVAKVAVARKLAVRLYWMARTEKSYPEVVRTQGSQSHSVAEVMAERLNRPPASHQK

SEQ ID NO: 411319 - protein, 335 aa, unidentified
MIQPEQSPGPVTRARIGKEGCVMPQGAFVGIDVSKDTLDMYVLPSGQTIHTSTSLQDTQALRTRLRRLRPALIALEATGGYGTTLAAELQDAGLAVAVVNPRQVRAFARALGLLAKTDTLDARVLALFAQKIEPPARPVGDPSARHIKALVARRRQLVALRTAERNRLARADIAEVRTSIQSVLDAIEQQLTDTDRRIHQAITASPLWLEKATLLESVPGLGSVTASALLAELPELGQLTRRQIAALVGVAPMNRDSGTLRGHRAISGGRTAVRNALYMATLVATRWNPVIHAYYHRLCAAGKKKMVALIAAMHKLLTLLNAMLKHQQAWKPKTA

SEQ ID NO: 411320 - protein, 392 aa, unidentified
MFFIGIDIAKRSHQAAVTDVSGNIIIKPFNFKNSSLGFNQFLSVLESNSVPKDDCVIGLESTGHYWYPLYFFLVEQKFNVKVFNPIQTAAFREITIRKVKNDNLDSIMIADFTRFGRYSETHIPSENMLALKNLSRFRLSVSDICGTLKKRTIVLLDQVFPEYDTVFCDIFGTTSKLLLEKFSTPEEFSEISTTKLANFIHKVSRGRLGREKAELIKAAANNSIGISYAVDTFSFQIKQLIEQIEFMENQLSEIDAEMAKLLALSEYSVITTISGIGPTLGSIIVSEIGDIERFETSSKLVAYAGLDASVKQSGEFNSSQNKISKRGSPYLRRALWMAAFMSLQCDPALYDYYSRLRARGKSHRLATTAVARKLCIIVWAIMKSKKPYSPHI

SEQ ID NO: 411321 - protein, 347 aa, unidentified
MNYFAGLDVSLEETAICIVDDEGRIVREARVASEPDALVAFFNALGMTMERVGLEACSLTAWLHQGLTEAGIAAICIEARQAKAAMGAMPNKTDRNDARGIAQIMRTGWYRAVHVKNPSCRSWRALLTARRMVLNKRRDVENGVRALLREAGLKIGTPSRKNFAARVGELVTDDPVLAGLAESLLSVIDVMTREVDRLTKRVLDEVRVEPTCRRLMTVQGVGPLTALAFRATIDRPDRFRRSRDVGAHLGLTPRRYQSSETDVQGRISRCGDELARTALYEAAHSLLIRSTKWSVLRAWGMNVAKRRGMARARVAVARKLAVILHRVWSDGSKFRWGKQVATPAAAA

SEQ ID NO: 411322 - protein, 513 aa, unidentified
MPTLRGPFWSRKGIACSLRAAARYKLDGAERSAHMIALGGGEVEKAVGIDPDASGFLCVLVCEQTERRIARRFSVSTEGLKQFVSWLTEERPTIVALEGIDGQSRPIEKALREAGLVFYSFRPSDTEKYRKAVLGENKNNERDAEAVARFALSMKQQGKLEKWRRVWAADMDLRVLTRRYESVGKQLTGEVNRLWKLLRQASPDLYLALGGKLEELECSPRLLKNEGILTLLVAKPQIGQWKELSEDELMEGMGGGEYKGRRAFVRQLMTITASFPLLSRWMSLVIQRSAQQVQMFKREQTALDSALEEVGLERPAVQRLKQMRGIGTLTASGMVAEIIDIRRFPSEDNLASYSGLGKVEDKTGDRENMKKARKYNRRLKDLFMTAAMNMVHFDPNSHLAGYHRNLVKRGMKPTEATKRVARALVRVIYRELMALIEAGPEASAADEQKKGQSGVASGRGRGDKKHLSNTPPRSPKPSRARPGSRVKRATRGTGRTSSTKVVKRGRVRLAKSA

SEQ ID NO: 411323 - protein, 442 aa, unidentified
MGHDVEEIDAEWDEQVLERAGAIDVAKASAKVCVRLPGHNRRVTKVWDVAATTNTIIGLADELAELRIERVVLEATSDYWRPFFYLLEARGLCVWLVNARDVKNVPGRAKTDKLDAVWLAKLNERGMLRPSFVPPREIRELRDYTRLRAELVEDRSRHKQRVEKLLEDSLIKLSSVATDIFGVSGRAMLEALIAGERDPRVLAEMARGRMKAKNAALIEALTGRFDAHHAELARMLLDEIDALSDKIERLTTRVDELVAAIPAAGPPVDPTTGEIGPGGSLPALDRLDEIPGIGLRAAQVIIAEIGLDMAQFPTADHLASWAKVSPRTIQSGPRNRSGKVGKGNPYLKRVLGEVATAAAKTDTFLGERHRRLARRQGKQKALVAIERSILVVVWHLLADPTARFVDLGADFYDQRVNKERRTRDLVRQLIALGHQVTLVPAA

SEQ ID NO: 411324 - protein, 317 aa, unidentified
MKKHSMVCAGIDTGKRKLDVALNGQAERLQVANADAGYRELIGWLRRHRVKRVGIEASGGYEQAVVNRLRRDGFLVIVFQPLQVRAYAQFHLQRAKNDRIDAALIAGCAAEAKKIHAPPDPRLAALAAQQTLIDQIVDQMARFKNYREACRDAPLRQFWNDEIKRFRGLFKRELKQLVTAIRQHPDLAERLELIASVDGIAVRTATAILVRLPEIGSVSREQAAALAGVAPYDDESSDRIGERHIAGGRERLRKNIYGAALAASFHWNAELIELYQRLTAAGKDHKVALIACTRKLLVFANAVVARGTPWQPRTAVR

SEQ ID NO: 411325 - protein, 411 aa, unidentified
MQVVYGRCAGLDVHKESVSVCVSVCEGKNKRRETRTYGTFTADLLALEDWLKEQGVTHVAMEATGVYWRPVWAVLEGQFEQMMVNPQHIKAVPGRKTDTRDCEWIADLLQHGLLKGSFVPPTPIQDLRDLTRYRAELRQSQNRVDNRIQKFLEQGNLKLSSVASDTLGVSGRRMLEAIIGGQDDPRQLAKLARGKLKRRVPQLEQALAGRVLDHHRFLLAEYLDEWKALGERIQRIEAEIDKRIAPFEEAVALWQTMPGVDHVTACNLVAEVGVDMQPFPTSQQLASWAALCPGNHESAGKRMSGRTRDGNKWLRRSLCQAAWAVTRKKDCYLSAQFKRLAARRGVKRAVMAVAHTMLVIGYHMLKTRQGYHDLGGDYLERINKNQLQRYYVKRLQRLGLVVTVQPAGAPA

SEQ ID NO: 411326 - protein, 352 aa, unidentified
MAATAQSAIAVIGIDIGKNSFHVVGLDGRGAIVLRQKWSRGQVEARFANMSPCLIGMEACVGAHHLSRKLKALGHDARLMPARYVRPYSKGQKNDFRDAEAIAEAVQRPTMKFVVTKTADQLDLQALHRVRERLVSQRTGIINQIRAFLLERGIAVRQGQRFLRVELPRILATPPDVLSPRMVRVIEGLASDWHRLDERIEGFSSEIEELAKRDAGCERLMSIPGIGPIISSAMVAAIGTGDSFSKGRDFAAWLGLVPRQISTGDRTILGKISKRGNRYLRVLFVQAAWVVLVKVKPTRWQGHGLRPWIEAAKKRLHHNVLAIALANKLARIAWSVLAHGRAFETNKLLAAA

SEQ ID NO: 411327 - protein, 407 aa, unidentified
MMDSRKRYIGLDVHKYYLIAFGVDEDLNVVLPARRVELSHIEAWMRKTLTKHDEIVLEMTTNTWQLYDELVEYAGSVMVVHPPHVALITRSQVMNDKIAASILARLLAKGLLVGIWIPPQEIREARGLVAQRQKMVRLATQAKNRLHAVIQRHHLVPPRGNPFGANNKEWWQSLSLGKLERLNLQSDLETLQFAEQQVKDLTEIMEGMAVEQEEIGRLLHLAGFGIVTAVTVWAAIGDIRRFAEPQKLVGYAGLGTRVHDSGMTSRSGKITKAGRRDLRTVLIEAANVVANSHPHWKTELARLEPRLGRNKAIVAIARKLLMAVWFVLQGKTDKYAEPEAVAQKMLKFAYAVGKANRPKGQTAAQFARIRMDTLGLGSELTSIPWGSKKPIPLPPSKLNKESAVPNK

SEQ ID NO: 411328 - protein, 417 aa, unidentified
MTVNSLMQRRSAIKPDTLIVGIDVAKFDHVARTLVPGGAIGRPFAFANSREGFAALSAETEARKPTPASAVIVGLESTGVYWINLAHWLAEHGCRVVQVSGLYVHRAKELADNSRGTSDGKDALLIADLVLQGKYLSFVRPAGVLADLRQLVGLRQRLVRERAARYNLLHQSVDLLFPEFPTVFKDVTGSGARRVLRRFPTPAAALANPPDEMRRLLSEAGRVQANVAKLTRLQAAAQQSIGTREGTAGIEYALNDTLLELDSLDTRVKQVEAEISRLLAQIDETPILTSLVGPMTAAVILGETGGLRQYSCAAAVLKLAGLNLYQISSGQYRGDRHISQMGRPLLRQALYLAALQHTHPGMPLYPYYAELLRRGKPKPVALIALCCRLVRLLYALVRDGRCYSAQPPEKNRQTLAA

SEQ ID NO: 411329 - protein, 345 aa, unidentified
MKIVGCDLHTRYQQIAMLDRETGELVERRLEHASGEARGFYAALCGPVRVGIEATGHTRWFERMLSELGHELWIGDAAQIRAAMVRKQKTDARDAAHLLELLLSERFPRLWRPTPAERDLRQLVWHRQKLVWMRTAVANQLHALAMGEGVCRKKKLFTQKGRAELDSLALGPWASYRRQELLRLLDQLEVWLKELDQAVAQQAEPNPAARLLMTHPGVGPVTSLAFVLTLGPVERFARSKQVVSYLGLNPREHSSGGRQRLGSISKQGNPMMRSLLVEAGHTAARLDGELRQDYQRLKLRRGSGVAKVAIARKLAIRMYWMLRRQAVYAQLVRMQGSPWATLVEQ

SEQ ID NO: 411330 - protein, 344 aa, unidentified
MMYIGMDVHQVSTTFCLFDPSAADRRRYRTLTRPTTVEAIRAVLEPYDGCCKVAFEVGTQAQWVAKIVRPLATDVEVANPSRIPWLFRDGRKNDRLDARKLVTLLYLDQLPTVHLPSEAVSAWRALINHRRTLVKRRTMIKNQVRSIVRTFGCRCPHKSCWTRAGVAWLRSQTFDETRHFMVATMLDELAFVGSQLVKVEVQLDGIAETQPNVALLRTVPGVGPRTAEAIVAFTDWVGRFSNRKQFASYFGVTPTEDSSGLIERHGHISKRGPSVVRWLLVESAHRVIARCPALRAFFDRVHRGQKSRYKKAIVATGRKVLTICYGMMRDQTAFDARKVVRSAA

SEQ ID NO: 411331 - protein, 422 aa, unidentified
MRGLRTKGVKAVKEETLIVTVDVGMASNTGYCTTVDGRDIKPFKFDNTREGLDKFWSMIVASQNRFRCSDVMVGYESTGPYAEPLIHYLMNKPVRIVQVNPMHTKRIKELNDNSPLKTDDKDPRVIADVLRLGHTLSVVVPEGDAAYLRRLNHARERHVGERTALLNQLQQLVFLLFPEFKTVFNDIKVKTAQRILTRYTTPEKIGSLNQGELGEEIRKQSMGKFGVQQADLLISLARDTIGIKEGIAGIVLDIRHILMQLEAVHGFVAEIEAEMEKALERIPWSTKILSMKGLGVITVAGLVGEVGDFSKFRTQSEIMKLAGLDLYEISSGKRKGQRRISKRGRSLLRKILYNAAISSIRKNGIMYTEYTNLIGRRMKRTSALIVIAKKLLRIIHAMMRDGRDYIHNYASPKRVGVIEKAA

SEQ ID NO: 411332 - protein, 384 aa, unidentified
MTNKISTLFVGVDIHKETHTLVGTNFACEQLCELTFRNDLDGFQQALKSITETAKKNQFTPLVGLEDSSGNGLAFANFLNRINVPVKTINPVLVVRNREYETHPEKSDPQDALGVSKVLTQRADRLPDYILTENTEFAKNIKILVKDREEIVCEQTKLKNKLHWALQQVWGIQYKTVYQKNIFGKRALKFWNKYPSAIDFKRTTKPLIEKPEWIKNTSFSDLPTASDIERTHVKRIITKLQMLNEHREEIEKQLEGLVSQNHSYLTTCPGCATVSAAGLIAYIKDIDRFDSESKLAKYCGIAPRKYESGKIKRDRTSMRGNSNLRRIFKSIAISQIGRTGNQKAKEYFRKKVAEGKSKKHAIKCLMRQNVKIIYCLMKEQRPYY

SEQ ID NO: 411333 - protein, 356 aa, unidentified
MKKEFKEISYVGKEVYIGIDVHKKSYTVVAKVEGEVVKKWTTTASPQALAQQLLKYFAGATIYTAYEAGFSGFVLHRELEKNGIQNKVVNAAGIEVASNNRVKTDKRDALKIATLLEAKRLKGIRIPSEEEEAHRILSRTRKQLVEDRASVKNKIRMKFHQFGVIAADENSTMTHALVEELLKNAPSNELRIAINAYRMIWKSLDEEIKKIEDELKAQAKDDTNEKTYQSVPGVGPQSARVLSNELGNMSQFKNERELFSYTGLTPSEYSSGEKVAKGHITHQGNKHVRGILIEIAWRVIEKDPALGEFFNSLFPRAGKTKAIVAVARKLIGRIRAAFRKGEEYQSGYPSSIPEAA

SEQ ID NO: 411334 - protein, 350 aa, unidentified
MKTYYIGADVHSNNIELAIQYRQNIVARHSLPATIPAISHVLDTIKGHKHMAIEEGPMSGWLYRNLRTYVDRFVVSDPRRNKLISSDGDHDDHLDAGKLALLLSGGFLREVYHTDNDRRAELKQWVRLYHDRVRDAVRHINKIRARCRMEGISIPRKVLRQSEHRGSWLRQIRRPELARQLEMLWIGYDAIAKQARIAKQHLINRSRAYPILRTWKQLPGVGIIRAVTALAYLDTPWRFKKKNKLWKYAGIGLQRTASGTDKNGRPKPARLQLPWAANRALKNVFLGAALTAINQKQNTFKETYERMVRNGVKPCNARHTVARNLLTVMWGMWKQSWQSSPDPTGCGSLK

SEQ ID NO: 411335 - protein, 364 aa, unidentified
MCDSTMTVAVGLDVHARSIRLAAVRADELLEERTLPYDEAQVERLLRRWPSVRCCYEAGPTGFGLYRHLVDRGVDCTVVAPGLVPQRPADRVKTDPRDARKLARLLAGGLLEPIHVPSPEHEAARDLVRAREDARLDRMRDRHRLSKFCLRHGRILPTSSWTVVRRKWLGEQRFEFVAEQLTFDTYVHALDLVDARIEQLERAIRETAEQEPWRQLVARLRCLRGIDTLTALALVAEIGDFNRFRSAAEFMAFVGLVPSEHSSGEKRRQGSITKVGNSHVRRLLVESAWHARRRPKVGYDLARRQRGQDAVVLERAWRCQQRLSQRWQRMAGRGKPQQQIVVACARELAGFVWAIATEQPLRTT

SEQ ID NO: 411336 - protein, 341 aa, unidentified
MSNAPIVYGVDLAKSVFQMHWVDPETGEVMNKQFKRAGFLSHFANRAPCLIGMEACGGCHHWARQLIKMGHQVRLMPGEYVKAFNIRNKNDAADARAIWLAVQQPSKAVAVKTELQQAMLALHRIRQQLVKFRTMQINALRGLLTEYGEVASQGRMSLDKVMPEILARIAERLPTALIDTLREQWNGLTKLDEQIAAIERRMREWKKDDCAVKAISEIPGVGLLTATAAVAMMGDAKAFRSGREFAAWAGLVPKQTGSGGKVKLHGISKRGDTYLRTLLIHGARSVLINARDPISWVQQLRQRRHPNVVIVALANKIARTIWSVLAHNRPYRKEYISMKPA

SEQ ID NO: 411337 - protein, 352 aa, unidentified
MRIIGCDLHARQQTLAVLDTATGQVMEKTLTHSGSNVQEFYAALPGPVRVGIEATGTMQWFLSLMEELGIECQVGHPAKIRAAEPRKQKHDRRDADLILQLLVENRFPSIWRPSKELVDLRALLLHRHQWVRMRTRIQNALQAIALANGLRRGPSLWSHDGQSTIASLPLAPHTAHRRSELQAMYAKFETDIEKLNQRVQEQAAERPGATLLMTHPGVGPITALATDVFLGDPKRFADGKALASYVGIIPSEYSSGGRQRLGGLSKQGNPLLRFLWCEAAAHAVRRDPELQRFYRRKLVQKGLGKAKVAAARKLGIRLWIMLRDQIDYHEFCRRGQMQHSSGDACAGMPGTR

SEQ ID NO: 411338 - protein, 477 aa, unidentified
MAAKQEATSQVKPNRKQRRDQQRRIWTADPGLEVVHHDAAGIDVGNSEHYVAIAPEKSAEPVRKFGCFTGDLREVVLFLKAHGVRSVAMQSTGVYWIPLYDVLEEEGFEVYLVNARDTKNLPGRKSDVQESQWLLKLHTHGLLRNSFRPVSEIRVLRTYWRQRGDHVHTASECVQRMQKALTQMNLQLANVISDIMGWTGQKILRAILAGERDAEKLAEMRNWRIHASQEEIVASLTGNWRPELLFTLKQEMERYDFCQRQIAECDHEIKQHLDTLPARHRETDPAVQPVAPPKKNKKVQGNSPQFALDKELQRITGVDFTRIDGINVMTAQTIISEVGLDMSRWKTEAHFASWLGLCPHNAVSGGKVLRRGTRKVVNRAATAFRIAGSTLRRSDSYLGVQFRRFRSKLGAPKAITAMAHKLAVLFYRMLRFGQEYVDRGQHFYEERYRQQQISLLNRKAAQLGFSVIPATNRPASI

SEQ ID NO: 411339 - protein, 384 aa, unidentified
MNKHSMIFMGLDTHKEFHEVAYCEEQRGATPVHYGRIPSSKVSVKKLIRQFESKYPDATIHVVYEAGPCGYWIYRLITSLGHCCYVVAPSLIPKKPGERVKTDRRDALKLVRSLKSEDLTPIYVPEPEDEAVRDLSRAREAAMKDLKEAKYQLKALLLRNNIRYKGTANWSKKHLRWLTELILPHPAQQIVLQEQLQTIEERIRRLERLDNELTHHVHQWRYYPVVKAIQAMRGVRLLVAVGVVAELGDLHRFDHPRKLMAYLGLVPSEQSSGGKRHLGAITKAGNGRARRLLIEGAHSYRYPANVSTELQLRQEGLPKDIVDIAWKAQLRLCKRYQRMSNKGKHYNLIITAIAREMAAYIWAIAKEVVLTPVNPKLRLSRVPA

SEQ ID NO: 411340 - protein, 342 aa, unidentified
MNDGLIVGIDIAKKDFAVAYRAPGTLGEDERELGKFANDPNGYALLQAALLRACEAHGLCKIQLILEATGGYEAAVMTYAYEQGWGVSLPNPKQVRDWAKGVGYRVKTDRVDARILAHYGAERRPPLRPQLAIEVSHLDSLLKRRQDLEKTLHQEQNRLSESAGRPGLAPQVEASLRQVIAALMKALTEIEQAIAALTKQHEPFQLQLARLLALPGVGPKVVLPLLVKLLQWYNLTNGAGDAAGLVAYIGLDPQPYESGRSVRRHPGISKMGDGEMRRLLYMGALGGVRGNNPLKPFYQRLVGRGKAKKVALVAAARKILVWAWTLFSRQLDWNPVFHQIGA

SEQ ID NO: 411341 - protein, 312 aa, unidentified
MTRIICGVDVSSQKLDARIGREGRFATFKNNPEGVEALVGFCREHGVALVVMEATGGYEKQPFTLLWGHGVEAAIVNPRNVRDFAKAMGRLEKTDRIDAGMIAWFAEIKTIKPTPPKSQTQDHLAVLVTRLSQLTALRTAQGNQRKLVKDPAVLRSFTQLLAFIARQMRALEREIAGLIDSDPLWSELNKAFRSVKGVADRTVARVMAQLPEIGLVSGKAISKLTGLAPIAKDSGKTQGKRQVRGGRSGVRATLFVVAELVSRYDPDFAAFRDRLAAAGKAKKAIRVALAHKLLLRLNAKAREVRAKFAHAA

SEQ ID NO: 411342 - protein, 452 aa, unidentified
MEEPQEVQDEEYEQVWERVAAVDVAKASGVVCTRVPDEDRPGRRRTRVWTVTATMNGVTELADHLRCQGIQIVTLESTSDYWRVWWVVLEAAGLRVQLVNARSVKNVPGRAKTDKKDAVWLAKLTERGMLRPSFVPPPEIRRLREFTRLRADLVNERTRHWARLEKLPERALIKISAVASSLDTQSARAMIEALIAGQRNPRALAGLAKGRMRVKRAELAEALDGRFEPHHGELARILLDQIDALSAQIDQLTTRVTELIEAIPAAQGVDADGTTGPGAGTGPGAPVLPAVARLDEITGCGIIAAQAVIAEIGLDMTVFGTPGRLVSWAKRCPQTRQSGTKTSSGKAGKGNRYLNGILGEIAASAGRTDTFLGERYRRLARRRGKRKAITAVARSILVIIFHLLADPEARFRDLGPGYYDTHIDRQRKIRNHIRQLEALGLDVTTAPKHDVA

SEQ ID NO: 411343 - protein, 403 aa, unidentified
MTAVAGLDWATEKHDVLICDLAGRKLAERIVTHTEAGMRELCELLIAHQVAHVAIERPDGLLIDRLSAAGIAVMAIHPNQVKAARPRFSAAGGKSDRFDAMVLCELARTDAHRFRIAKPDTDATRALRSQTRSREDLVEQKVAAANQLKAQLDAFWPAGACVFADLASPISLAFLARHPTPADCRGLGPARMGAFLKRHSYSGRTTPQQLLARLTGPATGRTGPLETQARRQVVLALVTVLQALVTQITELTRQITQTLHDHPAAPVFRSFFTSTKTTICPATLIAEIGDSLARYPDRDALCSDAGMAPVAIESGKHQHAVFRRACDKRLRKAISVLADASRHTNPWANDVYTRARARGQDHPRAIRTLGRAWTRILWTCWTTNTPYQPAQHRALQQLLATRG

SEQ ID NO: 411344 - protein, 354 aa, unidentified
MANYYIGADVDSKMTEMAIGKNEKIIRRYRVPTSIPALREVLGSISGKKFLTFEEGPMAGWLYRNLKDNVDQLIVCDPRRNKLIACDGDKDDSIDAGKMAGLLRGGYLRQVHQSDDVGRVILKQWVSIYHDKVREAVRQINKIRGRCRMYGVRIPRRALRNQIVRGQWMAGLKEKSLAEQLEVLWIGFDTAAKQVKMAKKQLIRNSKDYEIVRYWSELPGIALIRATTLLAYLDTPWRFSSEKKLWKYCGVGLQRTASGTDRYGRPNRGKLKLAWAVNRRLKGVVIGAAMSAINQGHNIFAYEYERMICNGLTASNARHAVARKLLSVMWAMFKTMSRFDESLVCSSPVTVKAG

SEQ ID NO: 411345 - protein, 346 aa, unidentified
MTILDCTRPVTGGVDTHLDLNVAAALDSIGGLLGVAEFRTTRSGHGLLVDWLGGFGPVARVGVEGTGSYGAGLARFLRGAGIEVVEVDRPNRQARRRTGKSDPADAIEAARAALSGRAQGAGKTRDGNVEAIRALVVAKRSARSSKIKALNQIRHLGFTASDELRERLSGISRQHLGAAAARLRPRAGSDAITFATKTALSTLGRRVLALDEEKERLNVLLAELVGKTAPSLLELHGVGVDTAATLLVAAGDNPGRLRCEAAWAHLCGVAPIQASSGKVTRYRLNRGGDRQANSALWGIVITRLRSDPRTQMYMERRLKEGRSKPEIIRVLKRYVAREVYPHLPRG

SEQ ID NO: 411346 - protein, 341 aa, unidentified
MKTARYVGIDVGSKEVVVIVIRHGKVGKIKTFENTPEGHAGLINYISTPKHLVKVCLEATGTYHLDLAVALSKAKGIEVMVMNPKATSNFAKALMLRSKTDAVDAQLLAEIASILDSQGKFEVWQSPAEIVISLRSCERRIVELTRQRARAKNQLHALSATTSTPEIVLESVRQTIQHLDAQVKSLQQQVLALIETDEKVQAALDLIITVTGIAKPSAISILGELLILPKDMTARQWVAHAGLDPREYTSGSSVNKKPRLSKVGNRYLRCALFMPALSAIRHNIHVKAYFNHLVEGLGKFKMQAICAVMRKLLHSIHGILKTKQPFDGAKFYAIPAVTVAE

SEQ ID NO: 411347 - protein, 416 aa, unidentified
MNTISIGIDVSCSELVVCLLDNDGHIIGEIQTFQNSLPGAEKLEKLILKTAKKVKSDQILIATESTSIYDLHIIDFLASSISLKSLNTSAFRFNAKVIKNFKRAYLEENKTDAKDAFIIAERLRFRKPKHEYTANMPHLPLQRLTRYRFHIVDSIRKETQYFLTNLFLKYNRFRNMNIFSDSTGHTCISIINDFTAEELASMSLEDVTNFIINESKNQFKDPKSIAKTLKQVVRESYRLRPTMAKSINFILCGCIQNIRVLKASLKQLNKAIDSELKCFPNTLTTVNGIGPVFTAGIIAEIGDISRFASDSQLAKFAGLTWNIKQSGKFNAEETRLNAKGNQFLRYYLCEAANSLRVHNEIFKTYYKKKYDEVPKYRHKRAIVLTARKLIRLLFALLTKKQLYDTSLPAERRFSRK

SEQ ID NO: 411348 - protein, 330 aa, unidentified
MGTIYIGMDIHKNYIHAVGVDAKGRKVIEQRLGADRESITVFLGQFSDVHVAIESTTVWVHIYEAIDSMGIEVTLVNTRGTKQKMKTDKLDALKLARCLRTGFIARSYIPSRQIRELRNLTRHRISLVKTRTVTKNKIHSILLKNGVRHGFSDVFGKAGKGWLKTIDISPTENYGLRSYLAVLSSIDKEIASVEKRVKKECKANIMAMLLTTIPGVDYWSALLIIAEVADIGRFPEPKKPCSYAGLVPTVSQSGSHTYYGHTIKECCTNLKWILVQCSWVHVRCCPDSCITKRFRRVAKKRGSGKAIISAANKMAIAIWSMLTRMEEFRV

SEQ ID NO: 411349 - protein, 377 aa, unidentified
METSSKTCVAVDTEQATLFVALELSQSTWLVGLHSPIADKISINRIDGGDTDKLLALIEKKREQAARQLGRPLRVVSCYEAGRDGFWLHRFLIGHGIDNRVLDSASILVDRRARRAKTDRLDAAALLRVLMALVRGEEQVCRVVQVPSIAQEDERRLSRERERLLHERNSHIARIKGLLALHGVRDYRLVVRVWKERLDAIRTANGHALPARAKTEIECRRLWLAKEMLAEVEREIEQTIERDSAAAGKLIRVRGIGPTFASVLTHEVFYRSFDNRRQVGSYLGLVSIPWQSGGVRRDQGITRSGNARARRCAIELAWLWLRHQPGSALAGWYRTRVGTMTGRMRRIALVALARKLIVALWRYLQTGTVPEGAVLKA

SEQ ID NO: 411350 - protein, 349 aa, unidentified
MEFYAGLDVSLETTSVCVVDREGKVIREGKLASDPDAIEMFLAEWGIHLKRIGFEAFSFSGWLFTGLEEKGLPVVCIETRHAKAAMNAMLNKTDKNDARGIAQMMRTGWFRAVHVKSGEAQTLRALLVGRKAMLGKVIDMENMIRGLLRPFGLKVGPISTGQFDARIRELVAGMAKLEAIIAPLLDARYEMRLQLAKLHRLAVVAAREDKAVRRMMTVPGVGAVVALTFRATVDDPTRFKKSANVGAHFGLTPRRYQSGETDYTGRISKCGDEMTRTMLYEAAIAILTRIPRNFKLRLWGLRLIKKRGLKRAATAVARKLAVLLHKVWVDGTVFRYGAGMKRGRIAAAS

SEQ ID NO: 411351 - protein, 337 aa, unidentified
MSYLGVDLHTNSFTVCYRTAQGKQRIASYAIDRMEAFRKTLRRRDVVAVEATGNTAWFIEQVRNRVRKVIAVDPNRFMVIRKSVKKTDKHDAKTLAWFLSKDMLPEARMKQKKHTQLHSLAATRDKLVKQRTALVNKIHNVLNSYGLKWKKETLTTEKGLREVMLLDWDTIVRVELEVLTDQIRSLSTSIKRLDADISEHGKDLKGHANLQSIKGIGDRSATVLLSVIGNVKDFADEDKLAAYFGIVPKVKDSNESVRHGRITKHGSTLARTTLVQCTLSAKRYSPYLRRYYERIQRTRGSGKAIIATARKFLGIIYKTLTNDWIFEDFPNFVIANT

SEQ ID NO: 411352 - protein, 432 aa, unidentified
MSKFFYNPTVGIDVSADFSIVAILAPDGDIYRKAFKIYHNVDGFNHLVKEIKKVEKEFNMKPGIFMESTGVYHLSLFHFLKTNNLEAYVINPLVTNSNKNKDIRKVKNDKKDALAIAKIGKFENIKASSYFDVSIFTLKSLCRDYYKLVDTRSTFKKKLSADLRIVFPGYNSVFSDITGATSIAILKCYQTPESILDAPKKDIVKILKESSKKNLIWCNNTYDKLVKAASNAKDIAISSIGLSTKIIINIGTIENFNKQIELILKEIENVLYSNDISSKFKQNFLLLMSIPGVGFISAVTILTEIGDFQGFLKPKQLVAYFGVDPSVNESGKFKSDKDKISKRGTRFGRRALYSIALASIRTKRTGEANNKILLDYYKNNLHGKKKKVALVAIMHKLINYIFAVLRDQKEYEQRSPKIHHKMYLENFNNSAA

SEQ ID NO: 411353 - protein, 398 aa, unidentified
MVWTGRTTVMAVNVVDDEGTMIDEFEVPDSSDGLGDMCRRLKKAAVRRVAIERPDGPVVDALLEAGLEVVVVVSRSVKALRVRYGASGNKSDRADAYVLADCLRTDGHRWQSLQPDTPATVTLRSHVRARKDLVEHRVAIANQLRAHLKVVFPGPVGLFSDLDSPISLAFLRRFPWEGKAAWLSEKRLGAWLRTQSYGGRRSAADLYGHLTQAPVGLLGDEGEARSSVTLAFVTLLETLDSEIKTLNRRIRELLDAHPDGHIFRSLPRANTIRAATLLAEIGDCRARFPEPEALSSLAGVTPSTRASGKHRAVTFRWAANKKLRDAICDFAGDTPNGNEWARHRYQQLRTDGKSHPHAERILARTWTHIIWRCWQDRVPYDPTRHGALQRLQNGTSLT

SEQ ID NO: 411354 - protein, 337 aa, unidentified
MSRYVGVDLHRRRSQVVVLDEDGQVVSSVNVDNCEPAELVAAVAVGGEGCDVVIEAAWGWYWIADLFAAAGFVVHLAHPLGVAGYRNRRVKNDEKDAILLADLLRMGSLPEAWIAPPELRELRELVRYRRKLSQLRTGLKAQIHAVLGKEGVVPQLTGLWGPAGARWLDDQQLAAAYQDRIVSLGRLIDHYDTEIRRLDRQIHGWLRDDVGYREIQRIDGIGPVFAAVFTAEIGDVSRFKTPKQLCSWVGVTPRHRESDETVKRGPITKQGSALVRWAAVEAVARYQGGPPIRGAYRRIAATRGNKIARVAAARRLLTLVYYGLRDGHIRCLDKVAA

SEQ ID NO: 411355 - protein, 387 aa, unidentified
MSQTVAALIPAAVDYERTLVLAIEVSNKSWVLAAQVPGLPHTKAKRTIDPEAEALLAAIAGYRSRAVATGRSIERVIAVYEAGWSGFWLARWLMRHGVEVYVVQPSSVPVDRRMRRAKSDGIDSELLLRTLLAWLRGEPRVCSMVPVPDEADEDARRCVRERSELISERVGLTNRIGAVLATLGVGDYNPLLRNRSLRLVELRTALGEPLPANAHAKIKRLLARLELVLTQIAELERERDAVVETEASDQASKMIQQLTALRGIGVQSATVLVREAFVRRFANGKALGSYAGLASSPYSSGGIDREQGIGKAGNRRVRTVMVELAWLWTRYQPAAAQVCWFRERVGSTGRRVRKIMVVALARKLLIALWRFVIDGVLPEGAVLKPAA

SEQ ID NO: 411356 - protein, 344 aa, unidentified
MITIGIDPHKSSHTAVAVDASGHQLAQRRFVVNVGTVRQLMRWCEKWPARRFAVEGAKGLGRSLAQQLAAAGEHVVDVPSTLSAWARLLATGGDRKTDAADALHVAQVALFRHGLRRVEAEDQSTILRLLTERHDDLVNERTRIINRLHAVLRDLLPGGAPTRLSAEKAAALMKGLRPATATDCCRRDLARDLLADLRRVDRQVRDNEAQMRDALAVARTALTALPGLGTVLAAKLLGHVGDVTRFPTEHHFASYTGTAPLDVSSGSNTRHRLNTGGNRALNCVLHIIAVCQIRDGGRGQDYYLRKITEGKTPAEARRALKRRLSNVVYRTLKRDRHTTLAAAS

SEQ ID NO: 411357 - protein, 348 aa, unidentified
MTVYIGVDFHARQQTISYLTTEDGEIQHLTLWHESPVEVRAFYEQFTGQQVVVGFESSGYAAWFEELLEELGCEIWIGHATYIRQYAKRRQKNDRRDADLILELLLAGDFPRIHRYSRATRQVLQQLRYRQRLVKMRTMVVNMLLFMAASRGATFRTQLQSKRGQARLAQLPLPQPLAHQRDELLQLLQELDRKIAKEEQGLEKTAAQDVAVQRLRTHPGIGLLTGICVRYTLECVDRFATTRKVSAFAGFDPMENRSDEHGRMGAISKQGSRWLRFFLVEAGQVAMRKDADLARLYKRISLRGGHAKAKVAVGRRLLVRAFIMLRDEIDYAEFQRRGVAARSSRGSA

SEQ ID NO: 411358 - protein, 392 aa, unidentified
MYIVGIDIGKNHHEASIVSPEGKQIGRSLRFATTHKGADSLMRFIFKNIGNSPCVFGMEATGHYWYPIYSFLKAKGYTIYVINPIQSDSLRKMYIRQTKNDSIDSFLIAEVIRFGQFGTTSMADENILAMRQLCRYRDSVISSRTEIKLRIGTIMEQIFPEYEKQFSSLWVSTSMGILEKYLTPENIENTPIDELFEIIKDKSHNRLTKAKAISIKEAAADTFGIKIAQDAFSFQLKQLIDRMNFLDKQIEALDIEIMKYYEQFDCYLHTIPGIGIIGAATILAEIGDISRFKNSSALVAFAGIDPTVRQSGEFNSTHNHMSKRGSPYLRHAIFLAATTCSFHNSPLNAYYKKKRDQGKHHLTATGAVARKLTTVIYAVLRDSKPYEPKKFC

SEQ ID NO: 411359 - protein, 348 aa, unidentified
MRYIGVDVGKTRCRAAIMNEKGTLEKEFFFENNNKGITSLLSTLNTQDKVVMESTGNLWLNIYDTLDQRNIKVVLANPLNTKAIASAKIKTDKLDARILAHLLRADLIAESYVPEGNIREMRALVRHRLSLVQMRTMLKNKVHAIVDKYGYRCEYSDMFGKAGIQWLRAQEMNEIDCLLVENYLSLLDSVKVQIGRVDDAIKEKACEDEDVCLLLSLTGMGVYTALLVRSEVGSIGRFSDYKKLVSWAGLAPSVYQSGNVEFYGRITKRGSPLLRWALVEDARIAVRHDERLRAFYLRVAKRHGDQKAAVAVACKMLKIVWFMLTRREPYESADLRRYGEKLKSIDIK

SEQ ID NO: 411360 - protein, 474 aa, unidentified
MKVVHSICCGLDVHAKTVVACLIKGGEKERRTFSTMTDDLVRLKEWLIAAECPRVGIESTGVYWRPVFNILEDRVEVLLLNARDVKGRRGRKTDMLDSEWIAEMVQYGLVEGSFIPPANIRELRELTRYRESLVRHRTSLANRIQKLIESGNIKLGQVASDVFGASGRAMLRALADGQSDAHGLASLARGSLKKKETELARALQGQLTEAQRWVLKALLNQYEQTEIEIAEVQERLSAEVADNADPFAPDAVALLQTVPGIGEKVAMVIIAEIGLDMTRFPTAGHLASWAGLCPGNHESAGKRSSGRTTKGNPYPRTSLVQAAWAATRTRNTYLAAQYRRLVKRMGAKKALVAVAHTMLTMVYYILKRREPFRELGGDYFERRNVDDQRKSLVRKLESLGFSVTIAPLLPDPTIAQASPRKPDFHSRGARASGPSPQVARPGSSARQLLQAAPDRWALYADLATGTMTVPSGAT

SEQ ID NO: 411361 - protein, 341 aa, unidentified
MEQANTIGLDIAKQVFQLHGADAAGHVLFRKRIIRRKLLAFLAVQTPCVVAMEACAGAHYWAREIGKLGHTVRLIPPAYVKPFVKRQKNDVADAEAICEAAQRPSMRFVPVKSEEQQANGIVFRARDLLVRQRTQCINALRGHLLEYGYIFPQGITHLAALVALVDDPESCLPESARVVLKLLIDTFTALEAQISQLDGEINRRSKADPTARRLMTIPGVGPIVSTAITALVPAPQNFPAGRAFAAWLGLTPLEKSTGGKQRLGAVSKRGERTIRRLLIIGASAVVQQASRRGAPKGSWLAQMLARKPKMLVTVALANKMARIVWALLVKGGIYRVPVAAI

SEQ ID NO: 411362 - protein, 315 aa, unidentified
MKASLEKSVVYYVGIDVAKTRLDVATTQLYAVFPRDPAGLDRLVAWLRELGPGAHVVLEASGGYEREVVAWLQAHDLAVSVVNAGWVRNFARSQGRLAKTDRIDARVLVDFAAANAPRLTAPVSPPQQKLTGLVRARQQLVTVRTLLHNQLEHTREPLARRSQEELVALTTTRIERLEKAIAALIAETPELATKVQKLTSVPGIGLTTAALLLAELPEIGTLSKAEAAALAGLAPRNHDSGALRGQRHIAGGRPAVRTGLWMPTLVATQHNPTLKAFHQRLRAKGKPAKVALTASARKLLIYLNSLLKTPSLSSC

SEQ ID NO: 411363 - protein, 449 aa, unidentified
MREPQEIPDEEYEQVLERVAAVDVAKASGMACTRVPHPERAGRRRTLVWEVPATTNAVLELADDLARERIQKITLEATSDYWRIWFYLLEAAGLEVQLVKAHDVKQAPGRPKTDKLDAVWLAKLTERGMLRPSFVPPAEIRNLRDYTRLRTDLTRERTRYYARLEKLLEDALIKVSAVASSLTTLSVRDMIEALIAGERDPKVLAKLARGRMKVKYNALVEALTGRFDAHHAELARMLLDQIDVLSAQIGTLTARIEELIAAIPAAQGVDRDGTAGPGAGREPGSPVLPAVDRLDEITGIGRDSAQEIIAEIGLDMGCFPTPGHLVSWAKLSPRTVQSGAKNRSGPAGKGNPYLKGALGEAAAAAARTDTFLGERYRRIVRHRGKLKALVAVARSILVIVWHLLTNRAARYHDLGPGYYAGRIDKDRKTRSHIHQLEALGYTVTLAPAA

SEQ ID NO: 411364 - protein, 308 aa, unidentified
MKEYVGIDIAKDRLDVAMLSGETQVFANHEAGHLALVKQLSPLQPSCIVLEASGGYEKPLFQRLLAAKLPVVRVNPRQVRDFARATGLLAKTDRLDAQVLARYAQALEPKIRPDLEDEALRSLVSRRRQLVHMLVQEKNRLKQASLATIQDSITRSICGLKAELSKLEKTIQGMLKESVLAKRLKAVAGVGDTLVATLLAEMPELGRLNRKEVAALAGVAPFNCDSGRFRGQRKIWAGRASVRMVLYMAALSAIQCQGELQSFYRKLRQAGKPAKVAIVACMRKLLVLLNAIARQNLMEAQDLMEAKA

SEQ ID NO: 411365 - protein, 398 aa, unidentified
MTRKNTLKSLPTDTDFRVVGLDLAKSDVSVAAIPVDDNTPSLVDRMTYADLLDWAGKISPTLFAMEPCNGYSLLCLQLENLGHEIKVISGWTVSMWINTHLSGQKTDLNDAIALARLAVSDAELTPIRHKSITEIRIQTVQAVRQQLMSQRSKSIVSFKALAQQWGIPCAAGHRNLKKLRESIEAKVDLITRPVANAMLFLLDAVKSLDRQIGQLNQTLQELVMSDERGRLLQSVLGVGTQISARVITVVGNIERFNSPRSLVAYVGVAPRNFIIGHKNLTKKKHGNCPDLSHKGQGKISRRGDKLLRSLFIQGAACLYMQFCKDQLPECQLKRWILKQLASQKPYGKLIVSLAAKLIRIVWAVLTYGEKFNIQKAGMTRSMWSEMALETPLNKEVPA

SEQ ID NO: 411366 - protein, 361 aa, unidentified
MLANQKAREKRSRYADYRCDYHPGFQQIAFVDTETGELQERRLQHREEAEKFYRDLAAQGMKVRVGMEASGHARWFELLLAELNIELWIGDAAEIHRKRERKQKTDRQDAQHILRLLLKDDFPKIWVPSWENRDLRQLLWHRHRMVQARTRMMNQLQAVALNEGLRYKKRLWRDAGRKQLEAFRLAPWASRRRHDLLELLDRLNPTIAELTQAIEREVEKCPEARRLQTHPGVGPLTALAFVLIIGKADRFRCGKQIASYLGLVPLEDSSGSRRRLGHITKQGNSLLRFLLVEAAQVTVRSDPGWRSKYHHLMMRRGRKIAKVAMARRLAVRMYWMMRKGWNYEQLKSSVRTRDNSYQAMV

SEQ ID NO: 411367 - protein, 326 aa, unidentified
MTHKLGIDVSKVKLDAALLKVDGKYRSKVFSNNMAGFKNLLLWIETNVATGIAGVHICMEATGAYHEDLALFLSDQGIAVSVVNPLLVKRFIEVDRVRNKTDQGDAKCLARFCQLTQPELWEAPSLGVRTLQALVLRLDTLQEMRQGELNRLGVAHASVQQSMRDVISDLEHGIEAVRKQIQRAIDDDPDLKQRQSLLASIPGLGDKTIPQLLAYIGRPERFKNVKALTAYAALAPLIRQSGTSLNKHRGTHPQGHRVLRSALYFPAMVAGKYNPLIAAFWQRLKAQNKPGKVIVVACMHKLLAIAYGVLKSGKPFNPDHLKPIIA

SEQ ID NO: 411368 - protein, 411 aa, unidentified
MRRVIGIDVHRTFGEVVVWEDGRLRHAGRIDMTRTALEGFGKTLLASDEVVVEATANSMAVSRVLAPFVARVIIANPLQVKAIAQAHVKTDKIDAGTLASLQAAGYLPQIWTPDAETERKRRLVARRYQLVRHRTRLKNEVHSILHAHLIPKCPHADLFNARGRAWLAAQPLPDDERAAIDRHVRELDRLAEDLALLDREIAQDAIDDSAVNRLMTITGVNLAVAAGIVAAIGDISRFNSPQKLVSYFGLNPRVRQSGLGAAHHGRISKIGRSHARAMLVEAAWAAAKAPGPLHAFFVRIRARRGHQIAAVAVARKLTVLCWHLLTKGEDYLWARPALVAIKTRAMQLQAGHPQQKGSRRGPAYAYNIKALRDREMLIAAQAEQSYERLVTQWKPRRPKTGARAPQLGRTK

SEQ ID NO: 411369 - protein, 404 aa, unidentified
MIFVGVDWAEAHHDVCVLDEGGAVLGSRRVLDTLEGVRQLHELVADHAEEPGQVAVGIEKDRGLLVVSLVAAGYAVYAVNPLASSRFRDRHQVSGAKSDRGDARVLADMVRTDRHQLREVAGDSDLAEATKVLARAHQSAIWSRQRHLNQLRNALKDYYPGALEAFGTDLASNDAVAVLTAAPTPAAGRALGTGELEALLRKGGRQRNVAARARQLRDALCRGQLEQPGIVADAYGAVTASELRLIAAATAEVATLEEALSAAFEQHPDAKVVLSLPGLGTVLGARVLGEFGDDPNRYASAKSRRNYAGTSPVTKASGLSRVVLARVSRNRRLVATCDQWAFCALTSSPGARRYYDELRQRAKTHRVAARALGNRLVGILHGCLEHHVPYDEATAWRHREQLAA

SEQ ID NO: 411370 - protein, 397 aa, unidentified
MIAVGIDISKAKSTVAVIDSDGTVLASPFTMAHTQPEMEAFVTYLKGLGEPTTILMEYTGHYHYPVLKKLQGEGFPVCIVNPYQMKKYGDVEIHKAKTDKKDALRIAAYALEKSYKLVPYSSMEQKYEDLKFLSRQYSQRITYVAKLKVQLIALLDQTMPGITRILPLNSRNPEKCALLLFIRRFKSFDEIHRIGKARFLASYDVLAKKTSERSASSKGLSIYELAVDSITTRGEDPYIWLSQNQCVDLLSATQNAADEIISQMRNIAETIPEYKVLRSMRGVGDRLGPIILAEIGDIRRFHSGKALNSYAGNDAPPYQSGQFESRNRHISKRGSSTLRKACYEVMQALKLTKPQDDPVYLFMLKKEQEGKPFNVAKMAGVNKFLRIYYARAMELYK

SEQ ID NO: 411371 - protein, 334 aa, unidentified
MKYSGIDLHSNNAVVAVIDDQDRVLYCKRLTNDLGLILAALAPYQAELEGVVIEATFNWYWLVDGLMAAGFAVHLANTAAIKQYEGLKYAGDERDAVFLAHIFRLGLLPEGYIYPPQERALRDLARKRLQLVQQRTLHILSIESLLARQINLRMNGEHIQRMDDAAVHALALPPHVERAMMANMAVLRTEIAALETILHKEAQLRPEFETLKSTPGIGNVLAATIMLETGTITRFADVGHFSSYCRCVDSKRISNGKKKGEGNVKNGNKYLAWAFIEAAAVALRCCPQARRFYERKKAKRLPVVAMKELAHKLARAAYYMMRDGKPFEVQRCFS

SEQ ID NO: 411372 - protein, 443 aa, unidentified
MSKKNSVHLRGERGQAFADLIRGVPPEHILCVSVDISKYFHVAMMHNGLGEIVMPTFEVDIYQSGFDQLCQKIEQAQADTQARVVLVGMEPTSHYFENLAQHLLHRSQPVRLINSYSVKQNREQQLMRREKTDQIDVAAIGDLLRRGEGTPYRPPQGVYLQLQQLGRVRLGKIKIEGMLKNQILGHLDRIFPGLVLLGEPAKERYTPLFDVNFWQCQTLQALIRICPNPHQLVAMSPDQLVQAFHHQKCRMGPAMAAKIIAQAHKTLLPNPELAAIRCELLQHDLALLETLQAHVTQLEQRLIELVAQTPYQVWTKLKGMSPVQAASLAAALGDPAHYTEAAQVFRRSGLVSGRNDSGNHQRKGKGAPILKTGDIYLRRSLMNAVATLILHQPVLFRYYKQLSLTKPAGVARVATARKTIGILWAAQRDQSSNTLINCKGADM

SEQ ID NO: 411373 - protein, 342 aa, unidentified
MKDTMIGVDLAKSVFQLHGASMTGDVRFRKKLSRPQFMKFMAEHPAAVVVMEACGGASYWARELVRAGHEVKLIAPQYVKPFVKRQKNDAADAEAIVIAAQRPEMRFVLPKTEDQQARAVLFRARERLVHQRTELTNALRALLYEYGHTVPQGKVHLKRIAEIIEAETCDLPGVAREEAQDLLEQIAEKTARIEAKTRKIAAQAALTPTARRLQTMPGVGPMTALAIEAFAPTMEMFKRGRDFAAWLGLVPRQMSSGGKERLGRISKAGQSDIRRLLIIGAMSRLNWMGLKGVREGSWIDRLRARKPKMLVAVALANKMARMIWAMLTKNEDYKDPALAEAT

SEQ ID NO: 411374 - protein, 354 aa, unidentified
MSDKSSLLITTMGIDIGKNTFHVVGLDRRGAIVLRQRWSRGQVEARLVNMPPCLIGMEACVGAHHLSRRLHSQGHDARLMPAKYVRPYSKGQKNDFRDAEAIAEAVQRPTMKFVATKTPDQLDLQALHRVRARLVSQRTGIINQIRAFLLERGIAVRQGLRFLRAELPIILATRCDVLSPRMLRVIEELAGDWRRLDERIEGLSQEIEALARQDPACERLMTVPGIGPIISSAMVAAIGNGAVFTKGRDFGAWLGLVPKQISTGDRTILGAISRRGNRYLRALFVQAAWVVLVRIKDWDRYGLKAWIDAAKKRLHHNVLAIALANKLARIAWAVLNKERAFEYVKTRATASQPA

SEQ ID NO: 411375 - protein, 346 aa, unidentified
MMIIGCDFHPSWQQVSWLDTETGEYGEQKLVHASGDAQQFYRALAAPVLIGMEATGNSQWFIELVEDMGHVIWIGDAAQIRASYVRKQKTDKRDAEHLRKLVMEGRFPRLWMPDREQRDLRQLVLHRHKLVMIRSRVKNELQHLSMNKGVQRQHKLWSQAGQKMLRELPLKPWAACRREDLLGLLSMLNQQIGKLDDAVQQAAEENPQAKLLMTQPGVGPNTALAYVLTIGDVSRFRRGKQVASYLGLIPREESSGGRQKLGAISKQGNRMLRSLLVEAAQTAVQHDPGLRKQYLHRCHQKPKGVAKVAAARKLAVRLYWMLRTQVAYPEIVRIESSSRVALVGAS

SEQ ID NO: 411376 - protein, 407 aa, unidentified
MANEEFKVIAGIDTHADTHHVALITDYGKRLGDRKFLAVGSGYRQIAAYLTRFGPVTAVGIEGTGSYGAELARVLAEHGFIIREMNRPNRAERRLRGRSDPLDAYQAAESVLADRGTSTPKARDGYVEALRVLRTARTSAMKARTALMNQISAVLTAATDEVRAKYRGLSSEARVKAMASSRPTGDPADPVIATLMTLKRLGTRHRFLSEEINETDAALEAIILTYAPELMDVKGVGVVVASQLLVTFGDNPERMNSEAAFAALAGVAAVPASSGKTSRHRLCRGGDRQANSSLCRIVVVRMSTDARTRAYVAKRTEDGLSKKEIIRCLKRYVAREIFHVMKNPRSAPLTNDLRILRLKLGLTQVFVAAALGTWPGTISRIEHGKSQDCEAISRYRAWLEEQAPERN

SEQ ID NO: 411377 - protein, 394 aa, unidentified
MKLIGIDIGKNKHFFCIMDKDSGEIVSQPASFSNDKEGFDFLLQKIKSYPKNSVLIGMEDTGHYHFALLKYLLDLQYTVALINPKTTDFNRKMQGGITKNDKLDTINICDVLDTPERKKQYRITKVNNFDLYEQKQLTRQHHNLKEELNVYKNRLQKSIDIVFPEFNSLFKSKYGTVYMNILKTFGSAENIANTDIRTIRKCFEIEGRGNRISLTPERLKECASSSIGISSSAGVIQIKHLTAQIELIEEQLTEIDKKIEEFSIQNNSPILSIPGISHFSGTSILAELGDISNYSKPSQIIKFAGVAPLHYESSQFNAQHTAITKKGSKYLRKTLYQIILPVIRHNPVFNKYYQLKISQGKGHRCAQGHCVRKLLRIIYHLLKTNQQFDPQLLR

SEQ ID NO: 411378 - protein, 345 aa, unidentified
MKYFAGLDVSLEETAICVVDESGRIMKEARAASEPQALAEALRKVDLVLERVGLEACSLTAWLHDGLRAEGLPAICIETRAANAAMKTMPNKTDRNDARALAQIMRTGWYRQVHVKSRQCRLWRSLLVARRTVLNEMRTIENVVRAMLREAGVKLGLPSRSAFAGRVRELVGADAEVMAMVEPLLAILGAMLKEFARLTRQVLDIVRKEEVCRRLMSAPGVGPITSLTFRATIDRPERFGSSQAVGAHLGLTPARYQSGETDIQGRISRCGDELARTALYEAAHSLLVRSKKWSSLRAWGMNVAKRRGMARARVAVARKLAVILHRMWADATEFRVGKEIATPAA

SEQ ID NO: 411379 - protein, 450 aa, unidentified
MRRIQSDDLSLEVVHPDAAGIDIGNESHYVAVPPTRDTESVRRFGCTTAELRAMAGWLKQCGIRTVAMQSTGVYWIAVYDILEQAGLEVYLVNARETKNLPGRKSDVQESQWLMKLHTYGLLRNSFRPSQEIRTMRTYWRQRNDLVRAAGRHIQRIQKALTQMNLQLANVLSDLSGVTGQAIIKAILAGERDPHKLAAFRNWRVKATQEQIARSLEGNWQEDLLFVLKQELDGYEFCQQQMAECDRRLKQYLQQREDRSQGASLPEEKRKERLKKKKGNAPQFDLRTELFRMTGTDLTQIDGIDVMTATTILSEAGWDMSKWQTEQHHFVSWLRLCPDNKVSGDKIIGKGRLPTNNRITNTLKMAASSLRTSDTYVGAQFRRLRTKLGAPVAIKAMAAKLARLVYRMLRYGMQYVDQGAKFYEAQHRNLQIAHLKWKAAKLGFRITQLTA

SEQ ID NO: 411380 - protein, 348 aa, unidentified
MRFYCGLDVHSKTSTLCLLDQRGKQIETVTLTGGWDKPLDRLRAIAALGELTVCYEASLGYGALHDRLAALGARVVVAHPGRLRLIFRTKRKNDRVDAGKLATLLFLDQVPRVHVPSVDTRAWRELIEFRRRLIDKRTAVKNALRSLLRGLGIRSPRGAGLWSKKGRAWLEEQELPTSQARLRRELLLADLDHLGGQIKRVTAELDRLAGLHPGVALLMSVPGVGPRTAEAFIAYVDDPSRFARVRRIGSYAGLVPSQDATGGVNRLGHLTKEGPATLRKLLVEASWRAVAKDPAMEAFFQRVTGGKPERRKVALIAVAHKLARVMLAMLRDGCVYEKREGGLERAAA

SEQ ID NO: 411381 - protein, 387 aa, unidentified
MEKTRGRVVGLDVHPDSFAGAVMEGTDPLSAQVLSTSTRVQLEQLERWALRHTRTEDRLVLEASGNSFAVAERLRMIGRKVDILDSHRAGKVGKVYCANDRVDAVKIARIYLSALSPIVWQPDEKTLERREVFSAYQAVVKESTRTKQQLRSMLNEHCVRLEKGFRLCHPKAITRLLALREWTPARTMLLQQLHGSLVAARARRTLLRRHMAQEIAAEEALLRLTRLCGINLITLYGVVAAVGDVRRFPHSKKLVAYLGLNPSVSQSGNFEGSTALKRHGRGALRALLIQSGKKLLEVNNPLQKWGLAVASRRGRNKAAVAVARKLCVALWHVLMGHVIGALERLDTLETKLSKFATEIGPAALRAFGYNNKAEFVEKKLYVLRSYP

SEQ ID NO: 411382 - protein, 409 aa, unidentified
MEEEKGTMEIKQQLEKAAGFDIHNEKITVCFYVKGKPLKIKDYGTFTEDLYQLRDDCLQYDIREIIMESTGVFWIPIHTIMTDAGIKSHIVNAKFVKNMPKEKTDRKDAKWLCKLLVNGQIRDSYIASTEQQAFRDLCRSRKKYGNHIIQTQNRMAKFLNRRNIKLTSVISTLETKTARKIIKALSEGETDVEKLVLLACGKLKFKRDLLRRALQGILTEHDRNMLKMLLNDLEHFEQNINLLNTEIQKHIDSIDQQLVKNIDDIAGIGKETTEIILAEIGHNVDAWDNADKLAAWVGSTPGNNESADKQKKSGRRPGNKFLLTSLVQMAWSAVRKKNSYWQALYWNLKKRLIEQKALMVIVRKLVKVIYKVIKGCMTYNEYGAEFFRERLQARLEQRHNHNIIVKSAH

SEQ ID NO: 411383 - protein, 366 aa, unidentified
MRKNSTVVKNGNKIFKQPALTIGLDLGDRTSCYCVLDELGNVILERSVPTTSSGIRQAFGKMPRSRMALETGTHSPWVSRQLARMGHEVIVAHARNVRLIGESSRKDDQFDARTLARLARIDPGLLGPVRHRSAQAQIQLTVIRARAALVSTRTALVNAARGLTKSYGERLRKCGSEQMNREIAKGLSQELREALNPLLAEIESLNERIAEYDGRIEQIAKEIYPQVAVLKQVKGVGPLIALTFVLTLDDPHRFRRSRDVGCFVGLRPGRRNSGRSEPQLHISKEGDRYLRTLLVQGAHYILGPFGQDSDLRRWGLKLSERGGRNAKKRAVVAVARKLAVLLHKLWVSKEIYEPLRNNRKQMAQVA

SEQ ID NO: 411384 - protein, 343 aa, unidentified
MTVIIGVDPHKASHTAVAISGGEEELDCKKVRATCVQVDQLVAWAEPFQTRMWAIESAGGLGYLLAQQLVAAGETVVDVPATLASRARLLSTGRSNKNDPNDALSIAVAALRSSSLRQVEPVCHSEVLRLLAKRNTDIGNQRSRLVCRMHALIAELAAGGIAKEINASDVDRFLEDLTPVTPVEQVRYDLTLELLDDVRRLDSQLKASHKRIRRAVKASGTSLTELFGVGPIIAGMLIGYTGDVTRFANRDQYAAYNGTAPVEFSSGGRVVHRLSERGNRKLNHAIHMAVICQLRQPHSDGRIYFERRVAEGKTNKEAIRSLKRQVSNAVYRHLVADARRTRR

SEQ ID NO: 411385 - protein, 369 aa, unidentified
MEKDTTYVALDDSKRKIVVGILRSGDTQPELREIANDPRQIRRLFERLKREGPVAACYEAGVSGYDLHRQLIALGVAGAVIAPALTPRRPGQRIKTDRRDAAKLVRLFRAGELTAIHVLDESEEAVRDLVRCRDDIRRDVLRWRHRVLKLLARHGRACLTGKNWSRAHWRWIREQRFDLPPLQRAFEATLFALEQALARQAELDKELEAVAATASYREPVGWLRCFRGIDTLSALILLAEVVDFQRFRRPRELMAYLGLVPSEYSSGESQRRGALTKAGNSHARRILVEAAWHYRHRPTIGRALATRTHGQPDEVVAQAWRAQQRLHRRYRHLVGHGKRTPVAVAAVARELVGFIWAAMTRHESRRAAA

SEQ ID NO: 411386 - protein, 341 aa, unidentified
MMIIGCDFHPRFQQIAFVDQETGEYGERRLSHPEEAERFYRELAGRPVRIGAEATGNFRWFRHLLDEQGHEFLLGDATTIRAACPRRQKTDKRDARHILNMLVEDRFPVVWQPSVENDHVRQLLLHRCRLVRMRTRIKNQLDSIAKNEGLLSSRVWSPKRRGEIEALPLPGWYAHRRADLLGLLDELDKRIRPLDEAVREAAEDNQEARLLMTHPGVGPIVSLAYVLTIGDWRRFPRGKQVGSYLGLIPEEESSGSTRRLGQVSKQGSVLVRWLLVEAAVHAQRHDASWHRQYLRLSMTKHHGVAKVAIAHKLAVRLYWMLRSGEDYSKVMERGSHAGQSV

SEQ ID NO: 411387 - protein, 409 aa, unidentified
MEVIHPRCCGIDIHKESVVACLRLQEGRRVKTEVRRFGTTTAELLRLHEWLSHAACTHVAMESTSVYWKPVFNLLEGSFEVVLANAYHIKAVPGRKTDVKDCEWIANLLAHGLIRASFIPPPPIRDLRDLTRHRKSLVRDRVKATNRVHKLLETANIKLANVVADVLGVSGRAMLDALVAGETDPEPLAKLAKGSLTPKVKPLAEALRGRFTSHHAFLLGQMLTQLDQLAALIARCDVRILEVSKRFEPEIQRLQTIVGVGRRSAEVLVSEIGVDMSRFSSAGHLASWARICPGSYESAGKRRSAGTGTGNNWLKTTLLESAWAAAHSRKSYLGAQFRRISKRRGPKRAGIAVAHSILVIAYHTLRNGVDFNDLGADYFDRMNSAKLKRYHLRRLAELGCDVSALAVSA

SEQ ID NO: 411388 - protein, 404 aa, unidentified
MWYVGLDWADTHHDVEVLDEAGKRVGIRRFAHSHAGLHELQAFLLGIAASPEELVCIVETTHGLLISFLLEAGIPVYPVNPKTANQLRKAAGAKTDRIDAHRLSKLGRLDLAELRRLAPDSETVQELKTLTRDQDALIQTQTRLVNQLTACLKEYYPAALQLFAKVQQRSTLVFLQTYPTPQAAQAASLEAITATLRASKHTNPTKAARKIVEELHRPHLVATELVVRAKSRLLLSLVKQLLVVIEEIAGYDKAIKPLFLSHDDHAIWSSLPGAGKHLAPRLLAEWGDDRSRYADAGSRQALAGTAPVPFASGNYAKAHKRFACVKPLRNALHQFAWQSTRQEAWALAYYQRKRAEGKTHSMAVRALANVWVRILYRMWVNQTSYQTATFEAARLAHAPRPHAA

SEQ ID NO: 411389 - protein, 465 aa, unidentified
MSRQHTSSKYQSQSGKTKKRIAAHLEKINLFAAGIDIGSRSHFVAIPEELDDQPIREFNCFTGDLEAMADWLVRCGINTVVMESTGVYWIPAFEILESRGLEVKLVNARHVKNVPGRKSDVLDCQWLQHLHTFGLLRGAFRPDDQMCALRSFMRQRDNLVRYRASHIQHTQKALRQMNLLLDNVVTDITGQTGMTIIRAILSGEHDPQVLASYRDKRCKKSENEIAKSLKGNYRPEHLFALRQSVELYDTYDEKINACDVALEQQLNKFDSAGSPPDSPDSGSSAKRKSRSAPGFDVRSELYRVAGVDLTKIDGIDEKTALKIVSETGLDMSRWSSVKKFTAWLGLCPGTHISGGKVLKRATKRIPSAAACALRMAAFGLMNSRSALGAYCRRMRSRLGAPKAITATAHKLARLYYSMLKHGSDYVDKGQDYYEREYKNRVMKNLKNKASELGFTLVPVEPTMTG

SEQ ID NO: 411390 - protein, 326 aa, unidentified
MKVQHIIGADLSKRTIDLFCNSYLKIENNKAGFHQMMKWLKDQNIDTSEVLIVMEHTGLYSLCFENFLHDHHIAFCKVNAYVVKRSIGIARGKSDKIDARRLADYGFEKKDKLTVEPVASKELQRLQMLYTTRERLVRHKAALLNAISEYKNIGLSASDLIIITHTRVIKCYEREIEKLQNELDVIIRNNPSIKQNQCLLQSIKGVGKVISIATIIKTKNFTRFPNARKFACYCGTAPFENTSGTSIRGKTKVSQFADKTMKTLLDLSAKTAIQYDKELREYYLRRLEKGKSKMSTINIVRNKILYRMFAVVKRQTPFVENYLQTA

SEQ ID NO: 411391 - protein, 384 aa, unidentified
MDVHTSNYTLCSLDPGYGVEKDNYFAEVQFTNNFVTNVVNYVSNLKKKLKDCEFVCGYEAGCLGYSTYKDLTKVGIKCVLMAPSTMAVQKGGKKVKNDRRDARLIAQCLAYQTYKEVYVLSEHDEAVRGYLRMRDSHNKALKRIKQQIIAFCTGHGLFSPTKSNWTVAHLKWLKDLKFNDPVEQEILNEYLSSLTFLSDKIKAMDVRIEELASEKQYCENVKKLRCIKGIETNVALTLLAEIGDFNRFSKPTDFAAYLGLIPGEQSSGDKVRGTGITKAGNSTLRRKLTESAKGYWRGRIGIKSATFKKLEKELPKEVTEYALKANTRLQRKFFNMTHVKGKNMNVAASACAREMACFVWGLITNHYEKAPAVPKTDEELLDLN

SEQ ID NO: 411392 - protein, 411 aa, unidentified
MFVGNDWAEDHHDVEIVNERGRRLARRRLPGGLEGITRLHALIAQFFPEEWADLEPAEAASRVKVGIETERGPWVQALIAAGYEVFAINPMSVARYRERHSTSGAKSDSGDAHVLAEIVRLDRAHHRPVAGDSELGEAIKLVTRAHQSLVWDRTRHVLRLRGVLRELFPAALEAFADLDAPDTLELLALAPDPDRAARVPKSKIVAVLRRANRRGVEERATTIESVWRAPALRQPTQVQAAFAAILTSQVRLITALNAEIAELGEVVAHHFGRHPDAEIYTSQPGLGVILGARVLAEFGDDRGRFADAKARKNYAGTSPITRTSGTKKVVLARYARNERLADAVQQWAFGSPKGSPGARAYYDALRTRKIGHQAALRQLANRLVGILHGCLKTGTLYHEATAWAHHHAAAA

SEQ ID NO: 411393 - protein, 339 aa, unidentified
MTVRTVGLDLAKDVFQVHGISENGRVIFNRAIKRAKLLTFFETLPPCVVGMEACGSSHHWGRQLCKLGHDVKLMPAGYVKPYVKRGKNDAVDAEAICEAVRRPTMRFVEIKSEEQQAILSIHRTRDLAVRQRTQMANMIRSLLREFGHILPIGIEAVTAFAKRHLDGDQPDMPNIANGMLGMQCYQFIGLNERIAGYSKMIEQHALLNADARRLMRMPGIGPITASAIVATIGDAKQFRTGRDLAAWLGLTPLNKSSGGKERLGKITKQGDRYIRKLLVVGMTSRAVMAKRSPEKVDLWTAKIIADKPFRLATTAMANKAARSIWAMLTKKQEYRQPAF

SEQ ID NO: 411394 - protein, 373 aa, unidentified
MRESTVYVGLDVHKDSISLALAGERGEVVELGRIENEPTAVRRMVERLARRHDGLCFAYEAGPCGYDLYRQLLSMGHSCIVVAPSLVPRRPGDRIKTDRRDAITLARLLRSGDLTAVWVPDRRHEAVRDLVRCREDFKQAERRCRQRMCALLLRHGRRYAGSNWTQRHRRWLLSQSFELPESQAVFEHSLHAIAEAEERILQLERRMEQALPDWSLAPLVRGLMAMRGVKLITAMTLVSELGDMSRFDNPRELMAFVGLVPSEHSSGKTRRQGAITKSGNRHVRRVLIESAWAYRHKPFWSQSLRARARDVSEPVRAIAWKAQKRLHGRYGRLVHRGKVAQVAIVAVAREELGFLWAIGRQVMQEQLALAQGD

SEQ ID NO: 411395 - protein, 346 aa, unidentified
MFADAWDYVLGVDTHRDAHALAVVAAPVGTVELETTIAASGRGYREALRLAERQAPGRRVWAIEGTGCWGAGLCRFLQAEGERVLEVDRPRREGRSPAKSDPLDAIRAARTALALERLPEPRSAGKREELRALVVAREGALTAKRAGLCQLRALIVTAPEPLRNELRRLSRARLIARLRGLRPDRNTSQPRGLLLALRSVASRVSELTREERELRSEIRTLVTELAPTLLDEPGIGPASAAQILLAWSHPGRLHSEAAFARLAGAAPIPASSGQTIRYRLDRGGDRQLNRALHTIIVSRRKTHPETIAYIDRRTSEGKTVREAIRCLKRYLARSLYRQLEATPMST

SEQ ID NO: 411396 - protein, 313 aa, unidentified
MQQSFVGIDISKNSLDVHVLPEGTSYSFGNEPQKVKALIRKLKKLKPTLIVMEATGGYEISLAVELSGAKLNAAVVNPRQVRDYARAIGKLAKTDAVDAYVIARFAQDVRPEAREQLNLKERQLKELVMRRQQLIDMRTAEKNRLSRAYTSQVQEELRCHIAELTARIKAIDEQLHNEIKNDPNWNQKLKIITSVPGIGANTAHSLLMCLPELGTLNRRQIAALVGVAPMNRDSGMMRGKRTIAGGRTVVRKMLHMPTLSAVTRWNKRLKTFYYHLRQQGKKHRVALTACMRKLVIMLNSMLKNNHPYSENYC

SEQ ID NO: 411397 - protein, 339 aa, unidentified
MKLYAGIDLHSNNSYLAISDEEGKRYYKKRLPNQEDIILAELEPYRNDLAGIVVESTFNWYWVVDMLMDNGYKVHLANPAGIQKDKGLKYSGDNHDAFWLARLLRLGILAEGYIYPKEWRPVRDLLRKRGHLIKLRTSLINNLQGIISRNCGCQLPGKKIKQVRTNHVAPLLEAHTDLALSGSVSKECIDYISQKIREIEVSVESRVELLAPFAGLQTIPGVGKILSLTIMLETGDIGRFEKVGNFSSYCRKVPTSWTSNGKKKGRGNGKNGNRYLAWAFSEAAEFLRRYDQSARAFYNRKTAKKNFMVAHAALAHKLCRAAYFIIRDGVEYNPHKLFA

SEQ ID NO: 411398 - protein, 421 aa, unidentified
MASTVEIVYPVCCGMDVHKNFLVACIAVTNEHSRTEHHIRRFSTFTGDLRKLSAWLESHNCRDVCMESCGKYWIPVFNTLENAGVNVCLTHPKYVKAIKGKKTDKKDAKWISELFKCDLVRSSFIPPPDIRQLRDLCRYYVKLTGFASGEKNRAQNCLTMCNFKLDDVFADVFGKSATRVLDALLEHGSGNFELDDLVDGRCKSSPEKIRAALDGELDPMQAEKLNLIRQHITDINVLKSALENLIYKLSAKYQPQIDLLMTVPGISTKLTAIRIIAEIGVDMSVFETAKKLTSWAGLTPQNQESAGKKKTTRVGRAGAYLKPLLVQIALAVSKSDKHLELKNKYLALKKRRGGKKAVIAIARKLLTAMWHILTKNETYNAELYRIADKPPVTREFTTAQAVAFLRNKGFVIVDEETGEVA

SEQ ID NO: 411399 - protein, 417 aa, unidentified
MNTENYAALVALDWGETEHAFAAQVGESPVETGSMPATPECLHGWLEELHKHCDGLPVALALEGGKSAVIHALTAYPWLEVYPVHPATSERFRKAFTPSGAKDDIPDALVLLTILTQHRSQLRPLKLDSAQTRKIEGLVAARRQAVDRRTRISSELGSTLKTYYPQALELCGREPATELMLDFLTRWPELKSLKAARPATLKAFYATHNSRHADVVAQRLALIAQARALTEDRAVIEPAVLEVKMLVDILRPLQKNIELIEERIAEAFDAHPEAALFQGLPGAGPATAPRLLAAFGTDRSRYPDASSLQKYAGIAPVKQKSGHSLWIHWRWNAPKFLRQTFVEWAGQTVPKCAWAKAFYRQQRAAGKNHQATLRALAFKWIRILWRCWQDQVPYNEARYLTALRQKGSPLAARLAAT

SEQ ID NO: 411400 - protein, 337 aa, unidentified
MMYSGIDLHSNNSVIAIIDDGDRVVAQKRLPNDVTMIVGFLVRWQEQLAGVVVESTYNWYWLVDGLQDAGFHVHLANTAAIKQYEGLKHSGDETDAQHLAHLLRLGILPTGTILPREHRVVRDLARKRMQLVQSCTTHVLAVENIMARQLGGRMTSNQIKRLTDDTINSLPLEGDVGLAIKANVAVITTLQSQIEVLEKRLQERVKPRPQYGLLTSVPGIGQTLATVIFLETGPIDRFAQVGNFASYARCVDSVLTSNRKKKGEGNVKNGNKYLAWAFVEAANFARRFCPEAKRFYERKKAKTNNVVATKALAHKLARASYHILKEGKPFDVTRCFA

SEQ ID NO: 411401 - protein, 340 aa, unidentified
MSKIKGMLSKITINPANFSGSIRENISQWVGIDISKATLDVYLRPMGKAMKVANTKEDISKLVETLKSYTVNLIVLEATGGLETELVIQLQEADLPVALINPRQGRDFAKATGKLAKTDAIDAQILAHFGEAMQPQILAVESEESRQLGDLISRRRQLVEMRTAEKNRRERARGKALVDIEAHLEYLDNCLEKLNQEIEELTQANQQWLEKVNLLKTVPGIGQVISTTLVSDLPELGQLTAKQISRLVGVAPINHDSGQHKGKRMIQGGRAQIRATLYMGAVVAMRHNPVIKTFYERLVGRGKSKKLALTACVRKILVILNAMVRQNQPWQLADNLPPCS

SEQ ID NO: 411402 - protein, 335 aa, unidentified
MQIYGIDLAKEKFDVSFFDLTSKKVSNQPSHKVVKNNFKSIGRFLETLPSDAVLVAEHTGVYGDTLLKCCMDSNVKIAFVGGYVIHRYRATPDRAKTDVLDCALLRDFGERYPDKLKYKTFPEEALYELRQLARHREMLVEQRKQLITADKSEDCRPIRSLAVKRSMDRIKEMLDTEIAETEKEMLKVINGHESIRHNYELVKSVDGVGLITAVELLVKTENFTKITTARQYAAYAGTAPYEKSSGKMDKGAHISKIGNRRSKTLLYICAESARLHNKEIKLYYERRTLIDKKPRHYVLNAIANKLLRIIFTLVEKGEYYDANFIRQDPRVVKHN

SEQ ID NO: 411403 - protein, 340 aa, unidentified
MEDYIGIDVAKSTLQIYIPLNKMDIELENSPDGLKKLYSKLKKLYGKAKKDIDEIVFVYESTGAYSTLLESYCEQQKIKCFKVGAYQSSSFSKTIKNRNKTDKVDARMLSRMYILAQPKDIKIPYRDAKAHQIRSLIKYYQSLVKEENRLSNYLEAATYNLEDSYILETVQNKIIDIKTEQSTLISKILKIINANEIYKEAYENITSVKGVGEKSGIILLYLFLRYPRASRQHITALSGLDPIKKESGTSVNKRARISKQGLSLVRSILFMPVMTAVRTNDEMKYFYDKLLARGKCKSLAQIAVMRKIILLAHSLYKNNKKYNPKKYLEYIEKEEVTNMA

SEQ ID NO: 411404 - protein, 474 aa, unidentified
MGKSTKKKNQVITANIFEQQELLKKIEVVRENLTASTWHELETKGKFDKNAKLSFICDDMLILGCDVGSETHYLRAIDTRGRELSKSAFSFSNNVDGFSKAKEWAVKIAAEYDKKQIVLGLEPTGHYWFCLATWMISNGISVVQVNPYAVKQTKELEDNSQLKDDAKDPKLIANLVKDGNFGMPYLPEQLYADLRRLSMFRDQLNEDRIRSINRLHRELKIYFPEYKEALGKTEGTFSLELLKQAPFPDDLAALKEDGIRQIWHNAKLRGRGYSRAGEILEYAKASVGIREGKETGKLVVQWFVQKILELDAELALIETQINQKCLEIPHTDKVLEICGIGENTLSGMVAEMGDISRFDDVKEIQKLSGLGLVASSSGKHKGETRISHRGRKRLRYWLFQAAKSAVAHAEEFKKLHVYYTTREQNPLKKMQSLIAIACKLLRIIFTILKKGIKYDPRKMLKDIRRESRQESLAA

SEQ ID NO: 411405 - protein, 352 aa, unidentified
MERTTIAVDLAKSVFQVAVSSRHGSIDVERRLSRDRFLTFFAEQPPAKVVVEACGSAHHWARQLQRLGHTVRLLPAHDVHRYVRRNKTDRMDAKALLEADRHEDIHAVPVKTVEAQAIASLHRLRSAWVATRTARLNGLRGLLREFGIGIPLGAHHVVPRVRELLVEPTPVPDLVRAALANACDEIAGLEANMTAVEHQLLTIGSTMSAVALLQTVPGIGWLTATALVALVSDIRRCRSGRHFASFLGLTPKEHSTALHRRLGAISKQGAVYLRMLLIHGARTVLWHARAKAHPTALQRWAVHTAGHRGPNVAAVAVANKLARIVWAVWARQRPYEAEPLPVGGESTGTRFS

SEQ ID NO: 411406 - protein, 396 aa, unidentified
MRALLDCCCGVDVHRDTLQACIIKGLSDDPEKIHAEFKTLPADLERFVQWLQVHQCDYIAMESTGVYWRPVYEAIEETHPNYQCLMVVNAHHMRNLPGRKSDIKDAEWIATLLRHGLLEASFVPDKTIRVLREYSRLYRSFTFEKTSYLNRLEKFLQTHGFKLSTMLSNIFGVSGRKLLYKLSEKGHLSPTDIREAVNKRVKKSNEEIHEAINGKLTVCERRLLQTLLTKIDQIQIEIEDILLLMQEVALPYQKPLEQLDSIPGVDTLSAITILAEISHVPHHHFPSSAKLCSWAGLSPRNDESAGKVKSRKILHGNPYIKSILCQVAWASVRVRKSSFAIWFWSHQGKLGRKKAIIAVARKILTVIYTLLKSGEFYDSNIAVKAQSLPPLTNSLL

SEQ ID NO: 411407 - protein, 417 aa, unidentified
MKKHSNSVKKSEPPPKRRNSRSEERRDSSEVMAELVSQLRRQLKVQIVPAAESAGEERDAVRPNLDRLTVGVDLGDQWSNYCILGLGGETLREGQFRTRRQEVGEFFQGLAISRVVIEVGTHSAWVREAIAGLGHEVLVANARRMEGSKRRRRKNDRIDAAKLARLGRVDPKLLYPIQHRSTEIREDLLVIRVRDSLVESRTKLISTVRGMVKTMGARLGGCSSVSFSEKAPDQIPSEVRETLEPLLRMIQTLSEEINSYEKRIEKLGREKYMDTKLLRQVNGVGPVTSLAYVLTLETPQRFKRSRDVGPYLGLVPQQEDSGDSQAQLGISKAGDRMLRKLLVGSAHYILGPFGPDTDLRRFGMKLCERGGKNAKKRAAVAVARKLAVLLHRLWSSGEAYEPLSYGIQSTKTESAAA

SEQ ID NO: 411408 - protein, 361 aa, unidentified
MSESMALVGLDVHQAQTVAAGLDPSTGELRVNRLRGGPASVVPVFLEELDRPVAAVYEAGPTGFALARVAEERGLDIRVVAPGSIPRAPGDRVKTDRRDAKRLVRLFAAGELSFAFVPSEADERFRDLVRCLEDARKDLMRSRHRLSKFLLRRGERFPCKAWTQPHEQWLCKLRFEDAPSQATFVDYLCAVQALVARRRALIGVLEQAVPESSHAQTVARLRCFRGIDTLTAAGLCAEVGDFHRFSKPALLSGFLGVVPSEYSSDEKRTQGQITKAGPPHARRLLVEAAHHYRHRPAVGLHLRARQAEQDPRVVQIAWRCQRRLHERWTHLHSRRGKRTGTVAIACAREPAAFCWEAATLD

SEQ ID NO: 411409 - protein, 377 aa, unidentified
MKKVRFIGLDVHADTITVAAAEPDGEVRSMGLIPNRPESIRKLVKKLGPVGALRVCYEAGPTGYVIYWQLSALGVHCEVVAPTLVPTKAGDRVKTDRRDAEKLARSFRAGDLTAVWVPDAAHEALRDLVRAREAAKKDQLRARHRLGKFLLRHGRRPSTAMTAWSQRHLTWIRQVQFEHPAQEATRLDYLHEVDHAVGRIDRLERAIDEAVKTAPPSMRAVIEALQALRGIALVSAVTIVAEVGALSRFERAPQLMGYSGMGAREDSSGPRIRRGGITKTGNAHLRRIAIEAAWAYRHRPAVGGALRKRQATLSEEVKAIGWKAQLRLHGRYRKLLGRGKCQQQVVTAVGRELLGFIWAIGVTVERQQRKTSSSIAA

SEQ ID NO: 411410 - protein, 351 aa, unidentified
MNILAMDLGKSKTVVCYYDSKTGKHKYGKVKTTPQQMHDLLAEHRPDRVVFEICSSAGWVYDICSCLKLYTEVANPNTQGWRWKNVRNKNDRSDALKLAQLSSMNQLPVVHMPKRSVRQKRSIIQYRQSLVRQRTRIKNSIRAILNRQGQSMPNGMRGWSMASIKRLRDISLPLEQCGIDNLWRGQLGVELEMLEKVASCIAKLEQKLDSLGKEDKDIQLLQTICGVGPRLAEAVAAFIDEPDRFETGKQVGSYVGLTPRQYQSGDIDHQGKISGAGNKVLRSLLVEVSWLGLRHNKWMNETYHRILRGSESRKKIAITAVARKLLVRCWAMLRDGQPWSDGEIEADKEAA

SEQ ID NO: 411411 - protein, 337 aa, unidentified
METYVGLDVSQKSTAVCVIDGDGNPVWRGTVASDPQAIDSIIRQQAPEVRRVGMETGPLAVWFYHALRNRGVPVDCIHARHVHAALATQLNKTDSNDARGIAQLTRSGWYRAVEVKSIASHEVRLLLGARSQLVSMRTGLYNQIRGVLKTFGVVLPPGTRSAFEKLVEQHTPSTSLIRGVVDILLDSWRHIDRQVRETDKALERIARASDVCRRLMTVPGVGVKTAVAFAAAVDNPDRFRRVGDIGPYLGLTPRKYQSGDVDHNGGISKTGCRLTRHMLFEAASALLLRHKRDCALRRWAQALIPRIGLRKALVATARKLSTLLLSMWRNGKEFIPG

SEQ ID NO: 411412 - protein, 294 aa, unidentified
MEKRYIGIDLHRNRFTCCIRLENERTYVTEWALESLTKFVKKLRPTDEVAVEITGNTRLFHDAVVGSVARVVVVDTNQFGVISRSVKKTDANDARLLSLYLSKDLLPEVRMKNKELAQLASLTQTRDTLVKQRSALKNKVNNILSARGLNLAKEALSSEKKLAEVQELPFDEIVQIELRVIVEQIRSLNKSIAELEKTIGEEGSKLEGHKELSSIKGIGKITGAILLSVIGDVNDFGDEGRLASYFGIVPRVSNSNETERSGRIHKRGTKLGRTALVQSALIRGEIQSLPEEFL

SEQ ID NO: 411413 - protein, 404 aa, unidentified
MKGPIVSIDVSKGKSDYQAFKNLNVKYTGSRSIKHTKEGFDEIVNLVREMEKKLETEVCVVYEATGVYHRVLKKVLEDNDIKQFIINPLLSAKTRKNDSLRSPKTDKLDPKSIAKTYYSHSLHNSHKQETIYHELRELSRYYEDILVHIRKDKVAFRAQLDIVFPGYDTLYDDLYGPVALAVIEKYPHPEMLQKKKINTVSKVIQSKTCHRQAASDTMADKAIEYSKTIYSGCDKDDIEVLILQRLIKKLNEDMAEAERTIGEMIKLAQELPDFSIIKSIPGIGDNLAARIIAELGDMTRFKKKNELVAFAGLDPRISESGQNDGDHMHITKKGNKRLRCLLYLAVTCSIRLKRDDNSIKDFYIKKKQQSNPMCSKAAKTACASKLVRIIYSMCKTGELYQYNK

SEQ ID NO: 411414 - protein, 371 aa, unidentified
MKTSITHVAMDTHKKQHQVAWVNPETGEIQEFSVANTAREIERMVKKIHKQAPGEIHVCYEAGVCGFVLQRQLQKLGCVAQVIAPSLVLRKPGERVKTDRRDAKKLLSQFVAGQLTEVFAPTVAQEADRELTRCRDSAQIDLKRARQRLNSFLIRHGYIYSDGDLWTGKHQQWLKALSFDQPRLRTVFEEYYGEMEHGLQRVQSLDRQLQQLAQSEPYRAAVAALRCFRGIDTLTAITVLTELFDFGRFDSPRALMAYLGVTPSEDSSGERRRPGAITKTGNRRVRRILTETAWHYRHPHRVSKALKTRRQDQPAWAVDLADRAGQRLYRRYRHLVERGKAPPLAVTAVVRELAGFLWALLRQLQTAQPPA

SEQ ID NO: 411415 - protein, 339 aa, unidentified
MDAASLIAIDLAKTMFHLHGVTASGAVLFRRKLRRRQVLGFVSSQPTCRIVMEACATSHWWARQFEDMGHSVQLIAPAYVKPFVKRQKNDMADAEAIAEAAMRPTMRFVEVKTARQQERTMIFRTRDLLVRQRTQAINALRAHLAEHGIVAPSGTANLRRLAEVLGDNAADMPETLRELGHMYLTQIDEQTLRIRELEKRLREAAAGNEQLARLQTMPGVGPITAIAIESFAPDLTVFQRGRDFSAWLGLVPRQHSTGGKQRLGRISKMGQRDIRRLLISGAMSVVQWAARRRDEEGSWLGRMLARKPKLLVAIALANRMARAIWAMVSKQENFRPALA

SEQ ID NO: 411416 - protein, 410 aa, unidentified
MEVLYLRCCGLDVHKETVVACLRLVSGGKVDTDVRTFETTTAGLIALSEWLAENGCTQIAMEATGIYWKPVWHILADGEFELILANAAHVKNVPGRKTDVNDATWLADLLAHGLIRASFVPDTQTQELRTLLRTRKQLVREKASHILRVQKTLEDANIKLDSVITDVMGMSGRAMMEALIAGESDPAKLARLANYRLKTSQEKLREALRGRVTKHHRFLLRLHLNQIDALDADIATIDRQVEAGIAPFRAAVEQVSSVPGIRDIGAHVIVSEIGTDMSRFPSEGHLISWAGLCPRNDESAGKRRSNRLRKGAPWLKTTLVQCAWSAVRKKGSYLQAQFLRLKARRGPKKAIMAVAASILTAIYHMLKDGTLYQDLGSNHFQNRSKGQQTNRLIKRLADLGYDVALTPRTS

SEQ ID NO: 411417 - protein, 348 aa, unidentified
MDRKTIAIDLAKDVFELAIDNGGTVTRERLTRNRFLQYIAHLAPAHIVMEACGSAHHWARHLKARDHDVIMLPAQHVKPYRRGNKTDRADANALLQADRVGGIKPVPIKSVEQQNLQHLHRLREQWKMTRTARINALRGILREHGHAFPAATDTFLASAMAVVDTDPALAMLRPVLHALQAEITFLEDQMADVERQLRELTRHNPEVRAMQTVGGVGLLTSTATLAAVGTPTHFRNGRQFSNWLGITPREHSSGTRQSRGSITRRGNVYLRTLFIHGARSALLAAKRCAKMHPDKLTRLQCWALDLEKRVGHNKAAVALANKMARITWAVWHHAREFDGNWQPAACAA

SEQ ID NO: 411418 - protein, 431 aa, unidentified
MSGPLVLVPVCNAIVGIDLADNKQMVVVTDHDSKVLARRTFRCRAWDLGLALDWAGHQASKAGFAGVTVACEPTGHRWRVLGQLAADRGMAFVCVQTLLTSWARRSEDLTFDKTDEKDAVLIARLTAQLRCYVPEPLDERWGRLRHLGARRERLLAETVGQVQQIRDLLECVWPASLDTAKQPFRSRTWLAGMSVILARTDGDPARLRRLGPARFEAAVRREVVARQGKRPCLRIARLLFVAAADPRGVTIHRPGALERAQLLLDDFRDTQRRLGEAEARMVAVLDELQLSELVCSIVGLSALGGATILAETGDLTRFASARAVVKHSGLAPREKSSGTFTGRTKLTGQGRPGLRAAAWRAVWGAQKANPVYAAKFTHLTSRTENKLNRGQAHAAIAAALLRQLYAVVSTGQRWDAAIAAGGRCEVIRPAA

SEQ ID NO: 411419 - protein, 321 aa, unidentified
MSNKKSRRSWIGIDVSKQLLEVAVHKSDYHFRSPNDPKKFPALIAELMDLRPARIVLEATGGLELPLLQALRAIGLPVVQVNPRQVRDFAKALGLLAKTDRLDARVLAHFAAAVEPPLRPIKTTDDTELDALMGRRNQLSDMLAAEKNRRGSATTATARADIEVHIEWLEQRLKAVDQQLKDQLKRSVAWQQKDKILQSVTGIGFVTSVSLLADCPELGQLNRHQIAKLAGVAPLNRDSGKQRGTRHIFAGRAQVRAKLYMATLTAIRFNPVIKAFYQRLIARNKLKKVAIVACMRKLLTIINVMVRDNKLWNVKALPVSA

SEQ ID NO: 411420 - protein, 379 aa, unidentified
MAEGTTVFVGLDVHKDTIAVALADAGGGEVRSHGVIPNTPTAVARLVKKVGAPARLRVCYEAGPCGYVLLRQLTKLGVACTVVAPALIPTKPGERIKTDRKDAAKLARLHRAGELTAVAVPTPEQEALRDLTRARQAAQQDLHRLCQRLRTLLLRLGVAEPAKTKRWSARWRVWLAGLSLEQAVQQTVLDDLRGAIGEAAARVDRLTAAVEAQAASGPFADLIGALTSLRGVGVVTAVTLVAELGDPGRFDSPSQLMAFAGLVPSEHSSGGREQRGRITKTGNAHVRWVTVEAAWHCRRKPHLSQELARRQRGQSAALTTIAWTAQTRLHARYVHLVVKGKPKPKAAVAVARELLGFIWAIARQVVAERAAGSADPIAA

SEQ ID NO: 411421 - protein, 412 aa, unidentified
MNIVYERCAGIDVHKRNVVVCAITPDVQGQRQKEQRTFSTMMPDLLRMRQWFQSLNVTHVAMESTGSFWKPIFNVLEGHMEVLVVNAQHLKAVPGRKTDLKDAEWIADLLQHGLLRPSFVPPAFQRELRELTRYRTSVIEERSRTINRLQKILEDTNIKLSAVASDLMGQSAREMLAGLVAGEADPAVLAQLARGKMRAKHDLLVQALQGQFKSHHRVLISEQLAHIDTLDEEIERLSAEIAQRLRPYEAQLKRLETIPGIKRRLAEVILAEIGPAMQRFPSARHLASWAGMCPGNRESAGKRLSGKTRKGSPWLRTALVEAAHAATHCKESYLAAQYHRLVLRRGGKKATIAVGHTLLVIVYHVLADEKDYQELGGNFFDEHDRQAVQKRLVHRLEKLGYEVTLAPTSPAA

SEQ ID NO: 411422 - protein, 347 aa, unidentified
MRFYTKQHQFYCGIDLHARTMYVCILNQDSEIMLHRNMKASPETFLKAIAPYREAMVVAVECIFTWYWLADLCVQEGIPFVLGHALYMKAIHGGKAKNDKIDAHKIAVLLRGGMLPQAYVYPANMRATRDLLRRRMYLTRKRAELLAHIQNTNSQYNLPEIGKKLAYKANRDGVAERFPDLAVQKSMEVDLALLGYYEPLLRDLELHIVKAAQQHDAHTLYLLQTVPGIGKILSLVLLYEIHDIQRFPRVQDFVSYCRLVKCAKESAGKRYGTAGAKIGNAYLKWAFSEAAVLFLRDNPAGQKYLTRLEKKHGQGKALTLLAQKLGRAVYYMLKRQKAFDMHKFLHE

SEQ ID NO: 411423 - protein, 421 aa, unidentified
MIQAVLECCAGIDVGKKFVIVCVMTGPADGEATEQSRKYGTNTADLENLRDWLRTCGCTHVVMESTGSYWKPIFNVLEMTPGMQVVLANSKLVKNLRGHKTDPSDSRWLAHLLRHGMIRPSFIPPLAVRELREFTRRRKQLVRAGTQERNRVLKVLEDANIKIGNVLSDVFGLSGQLMLQALVEGQATAEQVAQLAQKTARRKIPKIQAAIEGHRMTDIQRTLIRFSMAHLAFLEEQIVELDQQIVRHIEQAQLQRAYALLQTIPGVKKLAAAAIVAELGTKMDVFGTGPRCSSWAGLCPGNNESAGKRKRAPVLRGNPWLRTTLIECAWAASGKKQSAFQMRYQRLAPRIGHKRAIVAVAHSLVLTVFDVLSRDQPYTGFGADTMPATRVQRLIRHHSKRAATLRRWLVRISKDNHSRAT

SEQ ID NO: 411424 - protein, 317 aa, unidentified
MTAPADRPFVVGVDIAKDAVEVAFGADGPTRSVPNRADDLAALVLEIKAVNPQVVVMEATGGYHLELAALLGGAGVPLHIVNPAQARSFARAVGLRAKTDRVDARLLARMGADLRLAPVALPSEDVRRLDALVTRRRQLIAMRVAEENRLSVSPAALRKGIQKHVAWLAAEVADVDGLIARFIDDRPEWKLKDELLQSIPGIGPVVSRTLLSGLPELGTLNRKQVGALVGLAPFARDSGKWSGRRFVTGGRIEVRNKLYMAAMAVTKGRSSLAAMYRRLVAAGKNKKAALIAVARKLATLANAVLQHQRRYDPAYAR

SEQ ID NO: 411425 - protein, 402 aa, unidentified
MDIEDIDVFIGIDVGKSEHWATALSRDGQKVLDRALPNDEERLRALYKKLADHGNLLVVVDQPATIGALAVAVAQDMGITVGYLPGLSMRRIADLTPGSAKTDAKDAAVIAQAARTMPHTLRAISTSDEEAAALSMLTGFDLDLARQVNQTANRIRGLYTQIHPALEAVLGPWLEHDAILEVITAWPTPAELKRAGKTRIDARLKKHGCRRHATWAGQIVSALEHQTVVVAGTDAAGTVLPHLARQLITLHAQRADIAAQVETLVQAHPLYQVLTSMPGIGVRTAAVFLAETLGKTFDTGAQLASYSGLAPVTRRSGSSIRGEHVSHGGNKRLKRAMFLSAFASLRSDPVSRAYYQRKRDQGKRHNQAVLALAHRRILTLHAMIRNGALYDPQPATKLPAAA

SEQ ID NO: 411426 - protein, 351 aa, unidentified
MLIIGLDYHPSFQQIAFIDNETGEYGERQLLHKGGEAESFYRELKQQGVEVRIGMEATGHARWFERLVAELDFELCIGDPAQIRAKRVRKQKTDREDARLLLTLLMKGRFPRIWVPGPENRDLRQLLWHRHRLVQMRTRIMNQLQAVAMNEGVRRKKRLWSDAGRAQLESFSLAPWATQRRRDLLQLMDQLNLTIEELTTAVKKEAEKIPEVLRLMTHPGVGELTALAFVLIIGTPQRFQCGKQVASYLGLIPSEESSGGRQRLGHITKQGNSLVRFLLVEAAQAAARSDPEWRGRFLRLAMRRERRIAKVAMARKLAVRLFWMWRRQWDYQQLMKFGSYAGESEYVHGVQ

SEQ ID NO: 411427 - protein, 403 aa, unidentified
MKEFTPKSIEIESTSLLNIVNAYREQDNYAAYVGLDLHSKTIAVAVAYKGRGKPVSRAEIVNTPKAIRKLVTQLMQEFGGEVILFCYEAGPCGYDVYHQLIALGQACEVVAPTLIPRKPGDRIKTDRRDAIALAKYSRSGELTAVWVPEKEQEAMRDLTRIREDMKATEKIHKQQLGAFLLRHGKTYDRAKKYWTQTYFSWLETVKFDNPTQQIVLQEYILAVKEAQRKEDSLKQQMYQALENWSLRPVVEGLIALRGIDVVTAMTIMAELGDISRFDSPKELMSFLGLVPSEHTSSDKRRLGSITKTGNGHVRRVLVESAWSYRFPARITKHLRQKESKATAAAKAIAWSAQKRLCGRYRKLIEGGKNKNMVCVAIARELVGFIWAMVCEVMSKPHASKCAS

SEQ ID NO: 411428 - protein, 347 aa, unidentified
MNFYHSTHRHYCGIDLHARSLYVCIIDQQGEVLLHKEIKARPEPLLALLEPFRDDLVIGVECMHCWYWISDLCEEHGIHFILGHALYMKAIHGGKTKNDRIDSFKIAMLMKGGNFPLAYVYPKEMRATRDLLRRRTRIVQHGAMLKAHVVNTTSQYNLPPNKVNLKNVGAREQVQAAFAGQDVQRNTDLDLAIIECYHRELSKLEEHLERQAKQHDPASLSVLRTIPGVGRILALTILYEVGDVQRFESVQKFASYARLIKCKAESAGKVYGTQGNKIGNAHLKWAFSEAAVLYLRGNDKAQRYLQKLQKRMNKPKALSALAHKLGRAAYFMLKHQRVFDEQRFLKG

SEQ ID NO: 411429 - protein, 320 aa, unidentified
MTSRGAEKMKNDTIGVDVSKDHLDAYRLADGAAQRFANDRRGHKALIKWLAQAPPCRVVFEPTGPYHRAVERALGVASVPFVKVNPRQARRFAEATGKLAKTDRLDAAILARMGALLELEARPARSEILLELKELYVAREALVKDRTAAKNRGKVLTLSLLKRQIAQRLEQIDRQIATVEAAILQIIEADASLTDRFAILTSIPGISNITACALLIAMPELGAMEAGQAANLAGLAPIARQSGRWTGRSFIRGGRADVRQALYMPALVAARFNPDMKTKYAHLIETGKPAKVAITAIMRKLVVLANALLKANRPWTPKTA

SEQ ID NO: 411430 - protein, 331 aa, unidentified
MKKIIIGIDVSKLTLDVAHFTSEGRVKSNHVVIDNNVTGYNDMLTWFKEKKFKLKEVFICMEHTGIYTDQLTKFLEKKKIQYTLQSSLHLSKSLGVVRGKSDDIDSFRLSEYAGERKEKIKVSKRASENQIRLKQLARERKQTVYALAKARLLKSEIAVHQKVSSQKRKEKQIVFLKKIILEIEKEMQSLIKSDNELSKNYWLLCSIPGIGPVNAINTIVFTRNFTTFTNPRSYACYVAVAPFPHQSGTSIHKRTSVSKIGNHYLKAELSQAAKSAIINDLQIRKYFDRKFNGKKGPESNYGQVLNAIKFKMICRMFAVIRRQSPFLGLDF

SEQ ID NO: 411431 - protein, 426 aa, unidentified
MKKADLLSTLFVGIDVSSKENVVCAIDYEAQKLLRFSVQNNHPGAVKMAEKLHEFLAGNPDINKLVVALESTSFYGIHIANYLSSCELLMPFHTHVYCVNPKMIANYKKSYIDLGKNDAIDAFVIADFARVGRINTAPWRGSQFLALQRLTRHRLHIADCLTREKTYMLSNIFLKFSEFSILDDDQQPFSNNYGTTAASILTDFLSTEDIATMPIEALIEHICKKGKNRFVNPEHTASLLQQAARNSYRLDKCLYEPLTISIASSFNLISAYESELKAINKAIEKTIKGLDPCAYQSLLSIPGIGPVYAAGIIAEIGSIDAFKSHEALAKYAGLVWRENQSGNFRADDTSLSKAGNAYLRYYLIEAVSHVKNHVAEYAAFYHKKYDEVKTHQHKRALALTARKFVRLIFGLLANHQLYSPSRVNPS

SEQ ID NO: 411432 - protein, 321 aa, unidentified
MNRVLVGVDVCKDFLDAHARPTGVQKRFDNTPAGIEQLVAWVRPLAPERIIFESTGPYQKAAVGALLAADLPAVVVNARQVRDFAKGTGQLAKTDAIDASILAHFGEVVATVVRPLPSQEILEFREFCDRRSQLVRMLASEKNHRHAAQGASAKVLKNIDKHIAFLQRQIDDLEERMDRIVADSETFKAKDEILQSIVGIGRQVSRVLLVHLPELGKGTRRSIAALVGLAPFADDSGASSRIRHIRGGRAKVRMALYQAAVAAVRYCPTMKSFYASLKARGKATRVALIAVARKLLVLANALLRTGIPYQCPTNSVCLKNA

SEQ ID NO: 411433 - protein, 385 aa, unidentified
MMSTIIGIDVSQQSSSFHIFKSGEIKQISGSFPMSRKGFESLLNATSDFKSPSFFMESTGRYHITLAHFLLQNGLSTTIVNPVLVKQFSKANTLRKTKTDKIDAKLVAHYAQQVPKEKIVNSKAMDDQRLSIARRREQVAEDVARAKTQLKADLTVAWPEILAYNVFTQTMLKLLSQFPCAQAIEEATDEQLALALKSPTGRTIALSVEKLKQLADESIGIASYGPLVANSASNLIFLERSLEQLTETLVDLVRETQDEEMQIITSIPGIGEITAAHFLAEIGSIDRFERYQNLIAFCGTDPGIYESGTIYKRGRITKRGNASLRKYLYLMATGVIRCNPFFKDYYDKKREEGFAHRKAMVALMNKIIKTLFAMLKKKESFIVPN

SEQ ID NO: 411434 - protein, 358 aa, unidentified
MAQHVGVQVLAFVGNPNSYLNSFRMLQGRDMTNADVRELTSLAFVGVDMAKESFDWAVHGEASRHTLPNDDKGFEGLLVALKAYRVGLVVLEATGGWEKRLARFLLGYGLPVAVVNPRAAREFARSMGHLAKTDAIDAMALAHLAQTLAAKADQAGVAFAPPPAEVERLQLLVTRRAQLIDMRTAETNRLSGAGRALQRSITAVVKTLDKEIARVEGDIDAHLKSHFEEQARRFDAIKGIGPITCAVMLAFMPELGRVSNARAAKLAGLAPLNRDSGKERGQRHIFGGRSIVRSTLYMAMCSAVRFNPVMKIFHDRLIAAGKPKKVVLTACAHKMLRILNAMARKGQPWNEDLHPVAP

SEQ ID NO: 411435 - protein, 351 aa, unidentified
MHYAGIDYHKRYSFVSIQDEAGRIVREQRVEHRQPERFRQLLGHLEEPVSVVFESSSGWVWLYEILEEIPNVVQITLANPYRVRLIAEAEIKTDRLDARRLATLQRLGVVPGCYIPDAETRRRKELLRQRAYWVKMRTAVKNRIVHLLGRQREVNLPPVSDLFGRKGREVLLRQELAGSEGRLLAQQFRLLEMLDSLIGELEKEIVDWSQEDERIRIVKSVPGIGPILGSVIVLESSPITRFCRVEKYVSYAGLAPRTHSSGGKTYQGRMVQQCNRWLQWAYVEAAWVAVGCSPYFGTLYRRHRRRGKVANRAIVIVARRMCRIVYWLLKEGRYYEPRRLKAAIPAALVKN

SEQ ID NO: 411436 - protein, 345 aa, unidentified
MKKIAIGIDFAKEKFDVTVKNVETGASGYGQYPNTPAGGRSMVRMVRKFAKGIDSSEWLFCGEDTGYYSQTIARYLTEKGYFMWLQNPYSIKHSEGDIRRGKDDRADSAAIADYAHRYEDKARKWELPSKVSEELHLLLTRRDAYVRAKRVIQSGASEIPKRDKQGESVSLIKSSAKRLLREIDEEIERLEEQMKKIVKEEEAMQKNYEILRSFTGIGLVNSMCFIAYTDNFKKFDLNARKIATFWGVAPFGKDSGKTVHVDPHVSQFCNHWLKAIISNAANSALKWNPIIIAYNERLVKRGKCEGIRRNNVKNKIIQTVVAMIRKGEKFDPEFKFTNKMVPVEC

SEQ ID NO: 411437 - protein, 365 aa, unidentified
MPSVTPPAGLIHLGMDTSKNTIVAAVLLPGEQIPAVDRIFNDEAAIRRLIGRFPDRGLLRACYEAGPGGYDLYRLLASMGVACDVVAPSLIPKGGSDKVKTDKRDSFRLARLHRAGELTPIRVPSPAEEAVRDLARVRAAVLADRKRAQQRLTAMLMRHGRVWRNTYWTGPHRAWVAAQSFPEPALATALAHYRAALDTRESELACIEAELAPWARREPLAAAAGRLGCYRGIADLNGLTLAAEVAGWRRFASARAFMGFTGLVPAEYSSGQRTWRGHITKAGSGPVRTALIEAAWAYRFAPAVGVTLRRRQQGAAPDTIARSWKAQRRLHGKYRRMVTGGKAAPEAVTAVARELAGFVWAEMTS

SEQ ID NO: 411438 - protein, 620 aa, unidentified
MQVTYERCAGLTVRKKVAEVCVLVTRADGTVEKLLRTFSTKIADLLALEEWFAFLAIEHVVMESTGIDGYLVYNLLKDGCYILPIQPRQLKALSGSRIGLHDCEWLAYLLRHDMLHVSFVPPGPIDELHNLLNYRKMLIARRAQEFQHLQTLLEEAELELEVIVTEKLGRGEWLMIDAITGEQRDAEALVKLARGHLRPLFPALRLALDEQLPSHQQFLLQRILTHAEFCEESLTDMQKEIEQRLTFFGELVMLLQTIPGVHLMTAISILSEIGMDMKRFPTHKHLSAWAGMSSGGKRSDDRPGGDATTEGNLHLQAILNGVAATIAQSEETNYLTTLYWHTTYWGGRRRALRAVAHTILVIAYYVMRDRQPYRDEADYLDKHKVARNRLRAIERLEERQYATIPLGSEPNRKTRVLSSPTEAGANAWQLLPIWLWIGLTSFGGGASCLIAIQHEFIEKRNWLTSQEFSHFWSLCGITPGTSQIAMSILIGRKLGGTPGIVASLIGFLLPSTVITYLLAAGFQRLESVPAMQAIWKGLMPATGGLMFLISLRLTRPLLARGRKEGLPALSISLVMILACVFSILILKITAIFVLLVASLVGVILFTSIHRRLPKGVKQYD

SEQ ID NO: 411439 - protein, 372 aa, unidentified
MDEGIKFFIGLDAHKDSTSVAACEAGREPARFAGTVGPDVRPLLKVLAKAGDPAQVSVVYEAGPTGYGLYRELRRRGYRCEIVAPSLIPRRPSDRVKNDRRDCTRLAELSRAGELKPIWVPDEAHEAMRNLWRAREDGLGMRLRARQQLKAFLLRHARRYPGKTSWTTRHERWIAEQCFDHEADRIALAEYQLAAQSADQRVQRLTFALTEATRGWRFEGVVAALRALRGIDTVSAIGLVCEIGDIGRFASARHLMGYLGLVPSEHSSGNSIHRGSITKTGNAHARRLLTEAAWNYRFPARLSGQLRERSKALPEAVRNHAWKAQLRLCKRFANLSSRGVQPNKVCVAVARELTGFVWAIAHQASPKASPVQ

SEQ ID NO: 411440 - protein, 412 aa, unidentified
MSQRSKVCGVDIHKQFFVAALLSQVGESTIKRFQSDRSGLLEFKDRVLDEQCELVALESTGVYWYSLYSTLEDHIEVIVANPYFIKNIPGRKTDIADAQWIAQLALNDLIKPSRVFPKKQREIRNLTRSREHLVNNRTMLKNRVHRILESASIKLSSVLSDIFGKSGLHIVQGLLAGTDLDTIIASIPNEKIRSKEPELRNAIQHNLESSQILIIDQCLSLMEQITRRIDELDEEIDARMIDRKKDLKIAMSIPGIGKVSAMTILAEIGSYEEFVTPEKLAAWSGLIPSVYQSADHLKTGPITKRGSPHLRRIMVEVAQAAVKTKNSRLRSFFLKLKMKKGYNKAIVAVARKILCILWTILKKQELYSEGNLPQKKALISLTSPPHPRAIQDAIEILGRAGYVIKKLDSSGG

SEQ ID NO: 411441 - protein, 406 aa, unidentified
MPYVLAFDVSMGKSYFAIYASQKSCLSEGEIHHQRLGFEKLYEMIVDMTNETEELPAIVFEATGVYSTQLERFMNDHGFPYTLLNPLESKLQMAGMRIHKTDKSDAHQLARTHFTAERRVKAPQDSYFEEMRALSRYYAELEEDLAILRNRIHAMVQLSFPELEVLYKTKSELYYQLLCQYPHPSFVLAHSKTVLRNRILKSTDQNMSGRKAEERAYDLMEAANTCYPAISETDPRLDQLRDYTKRYLELVHQKEAVIKKMVNLSEERNEYGILTSIPGIGEITAVRLIAEIGDIKRFDNHKQLNAYAGIDIRRFESGTLFYKDKINKRGNKELRKILYNMVQNMIKMRRFGGNHFVEYYDKLKTQPYNKRHKVASIACVNKFLKVAFHLISHNLTYNYEIAVTHS

SEQ ID NO: 411442 - protein, 345 aa, unidentified
MKHYAGLDVSVKESSVCIVDETGKVCREVKVISHPEDIIRALKNPAWRLERVGLEAGPLSQWLFRGLAEAGLPVVCIETRHTKAFLKAQVNKSDRNDARGIAQMMRVNLFRPVHVKTLTSQKRRALLTARKLLQEKAIAIENDIRGLLRNFGLKVGVVGLIKFEERIFELVDGMPDLAEIMASLLGARRTLREQTAKLHRQLLSIVREGDACRRLMTIPGVGPIVSLAFTATIDIPARFKSSKAVGPALGLTPIVNQSGESNRIGRISQCGDGMMRTLLYEAAQVMLTRTIKWSWLKAWAMNVAKRRGKQKAIVALARRLAVIMHCMWRDGTQFRWTKEPVPAAS

SEQ ID NO: 411443 - protein, 287 aa, unidentified
MTDGSSEQPKMTAGLDIGDKYSYLCLVDQHSGEVIEEGRLRTTPEAFLRRFASETPMRIAIEAGTHSPWASRVLEECGHEVLVANARKLRIIYANKRKTDEIDAENLARLARVDPKLLYPLKHRGEESQTHMAIIRSREALVNTRTQLVNHVRGAVKSFGARLPKCPARSFHNKAPEHVPEALMVALGPVLEQIGSLTQRIREYDRELQEISKERYPETDLLRQVEGIGPLTALTFVLTLEDPHRFEKSRSVGAYLGLVPASDQSGDKDPQKRIFKEGDEMLSVSSW

SEQ ID NO: 411444 - protein, 391 aa, unidentified
MNRNTGMHAGQVIGWMSGLQVVGMDIAKSVFQLYTVDMKTGELRDKRLKRDKVLEYFRLMAPAMVAMEACGGAHHWARQLQKLGHHVRLVHAQAVRPFVQGNKTDVTDARAIWLAVQQSGMRFVAVKTEAQQAALTLHRQRQQLIKMITMQLNGLRGLLYEFGVTLPLGRKAMLAQVVGAIDSVAPVLPKMTVDSLLQQVQRIVQLRQAVDEVEVSLKQLISQDRQMQRALSIPGVGILSATAAVATMGDPHHFKSGREFCAWLGLVPRQEGTGGKVKLLGISKRGDKYVRTLLVHGARAVLLRKGQSSDWQTELQKRRHKNVAVVAQAAKIARTIWAVLAKDQDYQANHKSVRPQHSSAAAQEPSQDGSPTCPPRRSFVAGDARRRGQVS

SEQ ID NO: 411445 - protein, 419 aa, unidentified
MKSEKSASKYVIVVGIDRSDKELEVAVRGPEGSCEVETVSTRPEALNAWWERLREAHPQGLIAVGFEQPARALLAFFEFKADVAVYALNPSSIWGYRQSLKVSRAHTDSTDATCIASFLSLHHGELRVYQPASPLARQLQLCCVSRRKIVNSRTALTNRLLAILKDYFPAALDLLSEDVYRPLNVAMLRRWPRLSDIQAASESQLRSFFKKQGSHSETRLQQRLLVISNAQTLTKNEAIIEPNVLQLLCLLDQIEALNSGVLMHDRHIRKLMQQNERAALFIKLPGAGPAYAPRVFAAFEAHAPNCKDAAALASLVGMAPVTEQSGNMRRVYRRLRCDRFLAQSFHEFATESWKHSRWANAFVKHHQAEGKPYHSIMRKLAVRWIRILFRMWQTGQAYDEQKYINSLLKRDHYLTPYLT

SEQ ID NO: 411446 - protein, 354 aa, unidentified
MKYYTSTTQFNCGIDLHARQMYVCVLDRDGKKLVHTNVRNNDFAFFLKLVAPYRHDLTVCAECMFGWYWLSDACAAAGIHFVLAHALYLKAIHGGKNKNDRIDSEKLCHLLRSNLIPPAYVYPAEKRPLRALLRQRILYVWNRSELLSRIQSHQLAYNRPTCRQTPYNRQPWEQQLLASEPDPVRQFALQNDLALIGHYDSQLASLEKELLKLTKQTASRDFTLLQTTPGIGDYLGLTLLHEIGDIARFPTVKDFLSYCRLVKGTVASAGKIKGLRGAKLGNPYLRWAFGEAAVVAKRDAVLGPLAQRLEARMGGNKFKANTVLAIKLARAVYFMLKNKTVFDAERLVAALGKN

SEQ ID NO: 411447 - protein, 349 aa, unidentified
MDHIGIDVHKRDSQIYILAEGGEIIEQRIRTEPERFAAVLGARPRARMLIEASTDSEWVARCLEALGHEVIVADPNFAPMYATRSRKVKTDRRDARALAEACLLGAYRPAHRLSDPQRHVRGRLGVRDALVHTRTRYISVIRALLRQHGYGVPSGSAERFVDRVRGLPLPGRLRSVVAPLLAVLRPLNQQLAYSDATIEHLAVQDPRVPRLRSVPGVGPVTAAAFLAAVDDAQRFHHAHQLEAYLGLVPREYSSGETQRRGPITKAGHSRTRWLLIQAAVSLLRRHPPQAEDLRTWALRIAARRGKQVAVVALARRLAGILYALLRDGSVFEPQRGRPPRPTAAALVTM

SEQ ID NO: 411448 - protein, 341 aa, unidentified
MSKGSTVACQRLFCGIDVSAATLAVAVQQEGLERFEHHEFANTCAGHKKLTAWLLRHSRTVRVSLEATGIYSQDLALALDAAEGIEVAVLNPQQVHQFARSMKRSKTDKADAMALAEYSRRMPFVPWRRPSLAALRLRAISRLIASLREDHSRLRSRLHAARASAATPDCVVKLLKDAMAQLQKSRLKLVREAMAVTAQDTELQRKFELLKSVKGIAETSAVQLLGELAGMDPAMSVRQWVAHSGLDPQHRSSGTSVHPPSRISRRGNRHLRLALYMPALVASRFDPHMKVFYNQLKARHKASLQALVALQRKMLHAIYGCFKSNTPYNGATLFPKLIPTS

SEQ ID NO: 411449 - protein, 315 aa, unidentified
MRKSTTIIAFDQHAATTVAAVLLPGQGTPALHPLASDSGTILKFVARFRRAAPLTCCYEAGPCGFELQRALRARDIPCEVIAPALIPRRAGDRIKTDRRDAAPLAVLYRAGALTAIHIPTAQEEAARDLLRCREDIRADLLRARHRLSTFLLRHGRRFTGTKKAWSKRHDVWLRAQTWPLPALDQTHRAYLRAVEEGMARLRAVEEDLRGLLTLEPLQSRVQRLRCFRGIDDLTALTIAAELGDPRRFATAPRTMAYVGLVPSEHSSGTKRAQGGITKPATAICVACWSNRRGMIATIHSSARRYGHGSGARPRT

SEQ ID NO: 411450 - protein, 387 aa, unidentified
MPQANDLSRCLLTLEQGSTLIAVVELSQASWLVAGIVPAVERQPLKKIEADEEALLRLLHRWRDEAARAGRAVTRVAVAFEAGRDGFWLARWLRARGVEAHVIHPSSVAVPREHRRAKTDRLDTELLKRAFLGWLRGERGHCTTAAIPTAEEEDAKRPNREHESLVGERTRIVNRMRSALARLGVRGFRPTLRKACERLGTLRTPEGAPLPPNTLAELRRDMARLRLVREQIAEVEAARLQRLEEEPGSRPHAMVRLLARVIGVGVETADMLVREVLSRDLRDRRAVARYAGLTGSPDESGRRRREKGLAKAGNARVRHGMVQLAWRFLLFQRESALARWYRERTADARGGTRKTMIVALARKLLIALWRLVTTGAMPEGVVLRPAA

SEQ ID NO: 411451 - protein, 398 aa, unidentified
MKHFVGIDNSKLTHSVSIIDENGNLLKTFDVENDYSGFEKLQKLINNFENPVIAFELPHGPLVDFLRRLPYKMFSLNPLKVKRFKEIYSVSGDKTDKVDSNAIAQYIRINEKQSKELIFNSPEIETLKILGISHDRLTKDHTRYSLRLIFILRQYFPLYDDLFHDSASKILLKLIQKYPTWAVLASESSENLTSFLISNNYRNGKYIQKVLAKMQAYKHCIMPETEIALSMEAVAIASILLTLKDQLALIEKRMAEISKSNPIGEILYTLPGAGIIIASKLLGVLGDNKTRFSKANHVQCLFGTAPMNYQSGGYHKVIMRKACNKKGKSILYVFAFSSLRFSKWARDYYDKQRKLGKRHSVAIRALSNKWLKIIYSMWLNQTEYSDNIFKNKRTSNAA

SEQ ID NO: 411452 - protein, 340 aa, unidentified
MEKRYIGIDLHRNRFTCCIRLENERTYVTEWELEDLGKFVKKLRPSDEVAVEITGNTRLFHDAIAEHVGRVVVVNTSQFRVIRQSVKKTDPNDAQTLALYLSKNMLPEVRMKDKEHGQLASLTQTRDTLVKLRTALKNKINNILSARGLNLPKEALSSEKRLAEVLELPFDEIVRIELRVIVEQIRSLNRSIAELEKTIGEEGSKLDGHKGLLSIKGIGKITGAILLSVIGDVNDFADEGHLASYFGIVPRVSNSNETERSGRIHKRGTKLGRTALVQSALIAAKYSPYLKRFYEQVKARRGAGKAIIALAKKFLGIIYRTLKNKWVFEDFPNFVLAEES

SEQ ID NO: 411453 - protein, 344 aa, unidentified
MSKHAVRGGDVSRLLERFSQLREKARARTGKVFPLIVIQEAGLDGFWIDRVLQNEGIESHVVDPASIATSRRRRRAKTDKIDGETLVRSLLAYKRGEPRVCSMVKAPTPEEEDQRRLCRERKVLTAERVLHVNRIKGLLFCQGICGYEPLRRDRRDRLEELQTGDGRPLPPHLKAQVERELDRLELLLKQIKTVEGERDALLAAAQTAMPAPAAMLLDIKGIGSEFAAVLWSEGLFRHFDNRRQLAAYAGLAPTPWQSGAVDREQGVSKAGNPRLRTTLIQLAWLWLRNQPQSALTIWFHERVRRNAGRLRKTTIVALARKLLVALWKYVTTGVVIEGATMKAA

SEQ ID NO: 411454 - protein, 345 aa, unidentified
MDEQQPADRQIVGMDLHRRRSVLVRMNQDGERLETVRIVNDVDRLAEVIARAGESPEVVLEATYGWYWAADALAELGANVHLAHPLGVKGFSYRRVKNDERDAADLADLLRMNRLPEGWIAPPATRELRELVRHRAKLVHLRTSLRQQVHALLAARGVAIPVSDLFGVAGNQLLDRVSLSPAARTRVVSLRSLLDALDVEIDAFTKLTAKRLRGDPRYKAVQTIPGIGPVLGAVFLAEIGDITRFPGPTQLASWAGLTPKHHESDTTVHRGRITKQGSVLVRWAAIEAAQCAGKYTRTGQRRERIAQRRGRNIGVTAAARDLLQLVYYALRDGHVRCLEPAAQSA

SEQ ID NO: 411455 - protein, 355 aa, unidentified
MQNEKSIVDFTGYKLFIGIDGHRKQWTVTLRLRDFEIKTFSMNPTPQQLLNHLEKNYPHADYHSVYEAGFCGFWIHRELCRLGINNIVVNPADVPTTHKEKTQKRDKRDSRKLARELAERTSLEAIYIPTPAQESLRLLSRLLRQITKRTTQTKNRIKQFLHTQGIDVPNKAEISHWSRRFINWLNAIEFKYDASKYYLDKLLRDLERERLERLHLLRQIRTIIKGNDIIQLLKSAPGVGLITAFTFYAEIMDIYRFQKLDHLIAYIGIIPSVEATDGKEKILGLTNRCNKFLRNLLIEAAWIAVRTDPALTLAFNDLIKTRSKQRAIIRITKKLVNRMRYVWINQQEYVFAVAE

SEQ ID NO: 411456 - protein, 354 aa, unidentified
MRRNSWVYPRSTVGLDLGDRKSVICELDAAATVVKRATVATTRAAMCAYFGRRSGSRVVLEAGTHAPWVSRMLEELGHEAVVANPSAVYGPRRRKKRNDRMDAEFLARQGRADVQLLHPIEHRRLQAQEHLAVIRARDQLVRSRTKLINHVRGSVKAQGDRIGRCSTESFPRQAHRQVPGEMRIAVFPLLDVIAELTTRIHDFDRQIEEIVVQSYPEALRLQQLRGVGALTALAFVLLVDDPYRFTRSRDVGAYFGLVPRLDDSSDGTPQSRITKAGAELGRRLLVSAARYILGPHGPDCDIRRHGQSIAERGGKNARKRAAIAVARKLAVLLHRLWVSAGHYDPDPLLRRRAA

SEQ ID NO: 411457 - protein, 406 aa, unidentified
MISIGIDVSKGKSTVSIMKPGGEVLSAPFEILHNIESINTLIKQINTYDEEVRVVLEATGHYHLPVVTMLAGKGIFVSCVNSLRMKKYCSQSLRRAKTDEIDSIKIASYGLTYWHELVAVLPVGDTYSELKTLSRQYYQFNSLVVKAKVNLSNLLDQVMPDIKTLLTDSTSNHKLTDFTIRYWHYDNILKMGQYRFISDYCKWAKKQGYRSNERKANDIFALSQNSIPVFPNTLSTKIVVLETVRILQELEKSRNTILTQMKELVNFLPEYSVVLDMGGVGKTLAPKLIAEIGDVRRFYNRNALIAYTGIDSPPYQSGAFTATERHISKRGNKYLRKTGYEIMQSLIRHKPGNDAVYQFIQKKRSEGKSCNEAMIAGLNKFLRIYYTRVSEVYNEIDEQLIFGSNI

SEQ ID NO: 411458 - protein, 428 aa, unidentified
MKNRETSKLEAITPTTLIVGVDIAKEVQWAKFTDYRGIELGKALKFRNDKTGFESILASIEGVCKLKGLDKVILGMEPTGHYWKPLANYLVLAGIPVVMINPHHTKRAKELDDNSPTKSDQKDALTIARLVRDGRYYEVYMPQDIFAELRVLTNSRISLMRRCNSIKNSITTVMDEYFPEMVQVFKYPLKGKASLQIMKSCPFPSLILELGVEGVLAEIKKAVKKTVGRKKAEELVEIAQNSIGVTYGINSAKLKVQLMIEELELLTKQLEQIENAMGKALSDTGLKELILSIPGVGVVTAASFLGEIGDPLRFDHPRQISKLAGYNLVEDSSGNNKSGTSISKRGRKNLRSVLYQMARTMVAQNNEMKELYQYLKTRSNNPLKAKQALIVISKKIVTIIYNLVKKQAEYNAELVFNEFRKNQMRQAA

SEQ ID NO: 411459 - protein, 412 aa, unidentified
MQDILTCAMGLDIHRDGIVACLAKGELGTDPEIEIRSFSTLIPEMRKLRDWVLEAECRYVAMESTGIYWQPIYEMLEPCFDGQINILVVNARHMKNVPGRKTDMRDAQWIATLLRAGLLKGSFIPDKTFRELRHLTRYRKSIVRDITAQKNRIDKFLQSSGFRFTAFLSDAFGASGRNIIRHLMEYGNISREALDRCLKTQTRKRIDEILIALNGSLSEHQRGFLRMIFGHLEALEQHRHTVEDAITKEITKHEEALSLLCSIPGIDVTAAAAIIAEIGTDMSAFPDSQHICSWAGLSPGNNESAGKRKSAHINKGNPYLKSMLCEVGWVISGKRSLYLSGWYWRIKQRKGAKRATIALARKLLALIYTMLKTGSPYNEDCFEIRRKQSERKRASRMVNELQKLGYFVVAPG

SEQ ID NO: 411460 - protein, 334 aa, unidentified
MEQITTVGIDLAKRVFALHGVDRNGRVVLRRTVRRDQVLEVMATLPPCLVGMETGSGAHEWARQLEALGHTARLMAPKFVSPYRTGGKNDGNDAEAICEAVRRPGMRFVPIKSAEQQALLSLHRARQGFITERTAIINRIRGLLAEFGVVLPARADTVRREAAAAAEAIPLLARRVISDLLTHVRLLDGRIAEYDGELDQQAKLCEPAQRLMKIRGIGTLSALAIVATIGNARDFNSGRQFAAWLGLTPRQHSSGGKTRLGHITKYGDSYLRCLLVQGARSVLHTAGGHADRMSCWAQSIESRRGYHRALVAIAAKNARIAWALLNRNEVLRTA

SEQ ID NO: 411461 - protein, 341 aa, unidentified
MAEVSTIGLDLAKNVFQAHGADASGAVLFRKKLRRHQVLTFFAAQLPCTVAMEACSSSHHWAREISRLGHQVRLIPPAYVKPFVKRQKNDAADAEAICEAAQRPTMRFVVPKSEQTQAAALVFRARDLLVKQRTQIINALRGHLAEFGIVAAKGPARVPQLMLAVEDPDEPIPELARPILQMLIETLRGLDKQIARLDHEIAQRAKENEAARRLMTIPGVGPVTAVALAALAPPAEIFKRGRDFAAWVGLTPLQRSTGGKQKLGATSRMGERTLRRLLIIGANSVLVQVARHGAPAGSWIARMVARKPPMLVRVALANKMARIVWALLARGEVYRAPAAAA

SEQ ID NO: 411462 - protein, 412 aa, unidentified
MNLRVEKACGIDVHKSFLVATILTCTGAKETKEFNTGLEDLINLREWIMERHCQRVAVESTGIYWTPLYTCLEGKVETIVANPRFIKNIPGRKTDYLDSEWIAELCLNGQIKPSFIPSKEIRELRDLTRTRTKMIQTRTAFKNRVHKVLQRANIRISVVLSDIFGIAGLQILNGLLNGNSIDDVLKDVKRINNKKAAIKEAVCGELSQADVFVIRECLETIAFLQGKIDQLDSMINQRLEKVQKKNQMEILMSIPGISFTSASAILAEIGDINVFPFPKNLVGWSGLAPSLDESAGKSSNGHITKKGSKYLRRMLVQCANAIADGRPNKLRFFFQRILMKKGRKIAIVALARKLLSITHHLLRNNETYIEEDLKPKQVRVPNFKVISEFSIDEMIKIISNSGYTVDKRSSNC

SEQ ID NO: 411463 - protein, 433 aa, unidentified
MTSTHPFDLVIGLDRSDRKADLQLINTHTGQTHQQTIGTSPEALHDWLAQLRQQYPATRIAICLEQPAANLILFLEAYEWITLYAINPIALQKFRETFVTSRAKDDAKDAAYLAELLLTHHAKLKAWQPDDSQTRQLQQLVSHRRALVDERTGLSNRLKALLKQYFPQALELCGEDLWRPLATAFLLKWPTLQALQKARPAPIKEFYYLQGSRSQKLIEQRLERIARARALTDELAVLQSHTLRVRLICKELQLLQKTLEQFDERIAEVFSQHPDREIFESLPGAGPTLAPRLLASIGSRRERYGRAANLSSFSGIAPVTKQSGNKHYVHRRYLCPTFCKQSYHEYAAQSVLHCRWAAAYYAQQRAKGCSHHTAVRALAYKWQRIIWKCWQTHSVYQEQLYQAALRKTGSPLVALLDRIQLGKSPFKNPVKKI

SEQ ID NO: 411464 - protein, 344 aa, unidentified
MDNHTQYSGFAGVDLAKKVMQIHFVTEDGEITDKSTKRAGFLDFFRNRGKCLIGMEACGSSQDWARKLEAMGHEVHLMSPKAVKPFVSGQKNDHNDAIGIYKAMFNGVRRVPVKSTEIRDLQTLRRIRSQVTKDKVKEINHVRGLLAEYGIVMGKSLKAFNKDISSALESLKERGDVSPLVAEELRTTVEAIKTKIKRQKKLDQEIEQLARGCKSYENFLKTPGVGPVTAAMLCVLLCDPSIFANGRQFAAYIGLAPRSRGSGGKNYVIGIPSKFNCDCESRAVFVECAQAIARCKNKSPWVEGILRRKPKKVALIAIANKLARQVWAMANKGESFKQMAILTA

SEQ ID NO: 411465 - protein, 337 aa, unidentified
MIHVGVDLHQRFCYMTAVDATGRSLKQGPVANEARALRRWLQGFDEPLTMAVEACSFWPAFKDAVQEQVQTLRLVHPQRVKAIASAKLKNDRVDSATLAHLSRCDLLPEAWMADGETREKRQQMRLRISLGQHRASLKNQVHAILHQHGLRAPVSDVFGKKGRVWLKQVKLPAAARGAVDTYCGLIDQVSREILKQQRQIGAMAAADPRAQWLATIPGIGVYSAMILLSEIGEVQRFGTAKALFSYAGLVPWVRESAGHKSRGGISRCGSPRLRWVMVEAAHTAVRCSPAAKTYFERLKKRKHPHVARVALARKLLGAAYALLRDGVCFDESIFAAV

SEQ ID NO: 411466 - protein, 354 aa, unidentified
MDRYIGLDVHASSCTLAIVGPSGRKIGSQVVETSGRALTKALRAIPKPRHLCFEEGTQSAWLYEVLSPHVDELIVTQPTRSRGPKSDQHDALALAQSLRQGTLDTIVFKAPRRFTRLRALVRVHSFLVRDVTRAQCRVKAMFRERGIPNAGKSVYSANERATWLRRLPTPTRAATELLFAQLDSVQQLKNNAEQDLIAELGRHRISRILQTCPGLGPIRTARLMAIVVTPHRFRTARQFWSYCGFAIVMRTSADWVRKDGSWVRATMNQTRGLNPRRNPMLKDVFKGAATMVASSQGQNEPLHQDYQRLLESGTKPNLAKLTLARKLAATALAMWKNEEVYSPDKYRTPTLTPG

SEQ ID NO: 411467 - protein, 371 aa, unidentified
MKSIIYIGMDVHKKTYSLCALLKETGEIIGETKIPADVSLIIKFIENAKKSVDSDDVQIKTGYEAGCLGYSLYWQLAEKGIECDILAPSTMHRSAKNKVVKNDRRDAKNIAANLANGTYKSVYVPTDEDVEIKEYIRMMHDFKIELKKVKQHINAFLLRFGHHYPGKSKWIPAHIKWLKELELSDMYREILDEYLSQLEILTEKIERFKYRLEELSQKETYNEKIGQLRCIKGIDTTAAMTMHAETSDFDRFPTANAFASYCGLTPGEDSSGESYHRLGITKQGNSMIRTTMVEAAQVLVRGTIGKKGKKVKSKQKDQDVKVIDYADKAVVRLQKKYHRMIFRGVKRNIAITAVARELACFVWGIETGHIS

SEQ ID NO: 411468 - protein, 400 aa, unidentified
MQNYVGIDISKDDFHFCAINEKAETIHSGQLPMSSDGFSQLLSILNTLSNPVVVMESSGRYHLPLYCFLLSHSIQTFILNPKITHRFFEFISANNPSKCDKKDAKIIALFAISNPQFLTSSPDESNLRSLARLIQKLKKELAEAKTQIKYSLSVLFPEAEKSFNIYSHTFLHILLKYPCAKTLSKAKPNEIAKIINNSIVRGRKVSFAPDELISTAKTSIGIEDPYYAQSLVLYIEKLFFLEPRIEKLEQMLMYEIQKTDNDQLKLISSIKGISEKLAGLFLAEVRDIKIFPNAKSIIKYAGTDPVVKQSGKYTARMSISKQGSAYLRNILFQMTVGVVKWNPYFREYFLRKKKQFGSFKKAIIAVLNKLIRVIHALCRKGVSFSPEFHSSCHSIEMAHV

SEQ ID NO: 411469 - protein, 460 aa, unidentified
MSRSTPKEKNVQAAASLPALHPNAAGIDIGATEIYVAVPPDRTEQPVRSFPTFTPDLLVLADWLQACRVETVAMESTGVYWIPLYAILEDRGLEVLLVNARHLQSVPGRKSDVRDCQWLQHLHAVGLLSGSFRPPKEVCAVRSVLRHRDTLVTMAATHTQHMQKALTQMNLQLHHVLSDLTGKTGLRILDAILLGERDPETLADLRDRRVKANAETIRKSLQGDYREEHLFTLRQALTAWRQYQLWIGECDAEIERLLQAFAPPDDPPEEKPTEALTEAQTIPEKSDPAQRFDLRQEMTRLLGVDLTTVPGLQAPSVHRLFAEIGRDLSAFPTAKHFVSWLGLCPDNRISGGKILSAKTRPVNHRAATVFRLAAQTLHHSQSALGQFYRRMRSRLGAPKAITATAHKLARIVYHLLQSKEPYEDSAFAQTELRYQSRKLQRLRKEASALGFTLAPHPQVS

SEQ ID NO: 411470 - protein, 309 aa, unidentified
MPESIVIGIDIAKQTFDAALGVSGSIKTFANDNLAEQAVDLIVMEATGGLESNLACALQAAGFAVAVINPRQARDFAKAMGYLAKTDRIDAKALAELAQVLARSPERDRFVTALPTPEQQALQALVARRRQLVAMQVAERQRLSVSHAAARKSIEAMIMAIRTQLDEVETELAKHIETHHADLALRLSSVRGIGPTTVATLIAEVPELGQLSRREISALIGLAPFNRDSGQMRGKRAIFGGRGQVRRGLYMAALAAIRFNAVIKQFYDRLVAAGKPKKVAIVACMRKLLTILNAMVRTGKAWDDSLHTA

SEQ ID NO: 411471 - protein, 378 aa, unidentified
MKTTHPVIIGIDTHKASHVAVAIDTQGTRLATLSIPTNPKGYLELERWSQSLGKVQAFGIEGTGSYGAGLSRSLLAHGHNVIEVTRPNRQLRYTQGKTDSLDAEGAARSVLSGQATARPKTQTGSSEMIRHLKIARDTAVKSRSQAMVTLKTLIINAPADLRDALNHIRGKIALIRHIAAFRPGDIDNPLASAKAAMRALARRWLWLHEEIIAHDKELERLVTERAPELMAPHGIATLTVAQMLILVGDDPTRIRSEAAFAKLCGVCPIPASSGKTHRFRLNRGGNRQANAALYRVAIVRMRSHEPTLAYVKKRTKDGKSKSEIIRCLKRYIVREIFNEIWLPHNGLFASKCGEKSVNKSRGYSIDNQPIEVSLLGTW

SEQ ID NO: 411472 - protein, 427 aa, unidentified
MNATESNRVNEFRQFKQRIRGSTEDLVVGLDIGKRKHHAFFGDANGKTILKGLIVENSAEGFGQLLSRVDFYMQRDGFTGVVFGLEPTSVYHKPLAEHLIGQGHVVVYATNEAIKKNRSLIDGRWDKHDTKDSANVADLVAQSKCHYYDLPELRLRDLRSLLLLRKRLKKQEHSCRVRIRNNLVAQYFPELDGFWNNAAAENLAIVRGYLDPARIRQLSCEQFVARVATHNGGLRQKRRLRQIWEAAANSVGCRPGPAMQLEAELLVDTLQSIKGQLAQVKQAIQALAAGFPEYAYLKSIPGFGPYVAAMTLAAIGNPHRFENRAQLIRLAGFDLCAHRSGQKSTTAVPVISKKGKADLRYALYQAALVASSLTRHFRPYYNRLLEGRQREKGIRTKMRVKIAAKMLVIAWTLMKRKEFFNPAHIQA

SEQ ID NO: 411473 - protein, 347 aa, unidentified
MDQIIRIGMDTSKHVFQLHGVNAAEEPVLRKKLRRQDLITFFGKLPPTVVALEACGGSHHWARLLQSLGHQVKLIAPQLAKPYVKRGKNDAADAEAICEAMSRPTMRFVPVKTPEQQAALMLVGVRDRLIRQRTQLVNVIRGYAAEFGLIAPKGLCRIEPLLERVKTEETLPALARELFEMQATEYARLQVQLEEVEDRLMAWHRAHEGSRRLARIPGVGPIGAAMLVMKTPAPEAFRSARHFAAWLGLTPKDHSTAGKVRHGVITRAGDEILRSVLVVGATAVIRQLRRGQSAHASPWLVALLKRKPPKLVAVALANKIARIAWKLMVTGESYKAPTSVSAAACAV

SEQ ID NO: 411474 - protein, 398 aa, unidentified
MTESSDYESVQVFIGVDVGKDTHHAVAVNRSGKRLFDKALPNDENKLRALISDLKQHGQILLVVDQPATIGALPVTVARSEGVLVGYLPGLAMRRIADLHAGEAKTDARDAAIIAEAARTLPHGLRTLKLVDEQIAELSMLCGFDDDLAAQTTQASNRIRGLLTQIHPALERVIGPRLDHPAVLDLLQRYPSPEKLASLGEKKLATQLSKLAPRLGKRLAADITQALTEQTVVVPGTNAAVVVLPRLALQLITLRKQRDEVALEVEQRVLAHPLYPVLTSMPGVGVRTAARLLTEVACRAFASAAHLAAYAGLAPVTRRSGSSIRGEHPSRRGNKTLKRALFLSAFAALREPISRAYYTRKVSQGKRHNQTLIALARRRCDVLFAMIRDGTFYTPTPS

SEQ ID NO: 411475 - protein, 356 aa, unidentified
MTRILAIDLGKFKSVTCLLETETNETEFWTMATDRQYIEAVLKNYEPDLVVMEACGIAGWVHDVCTAVGYEVLVCNPAQEAWKWKNVKRKTDRDDALKLAKLAALDQLVPVYIPCQQQREYRRLVKYRKVVVSRVTRVQNNIRSIFAQRGIPMERGQKAWALERLDQISQHRKPLSECSEDELWRGELDMELTELERLREHQNQLHKKLKALAAKDERVQLLQTIPGVGRKTAEVVVAYIDDPHRFKNARQVSSYAGLVPRRYQSGEMDRSGRINKRGPRLLRGALVEAAWMMLRYNPWARSVYDRLCSRQKTRKKKAIVAVARKLLVRCWIMLLRKEPWNKEAGLPKPAAVTLVP

SEQ ID NO: 411476 - protein, 355 aa, unidentified
MNDAKYIGMDVHQATISVAVRDSRGNLVMEAILETKAETILQFIRGLRGSLYVAFEEGTWAAWLHDLLQPHVARVLASDPRKNALLKAGNKSDRIDARKLSELLYLNKLSPVYHDEQGIRALKELARSYITITRDLTRVMSRLKAIYRGWGIPCAGQQVYAPRYRAEWLAKISEAGVRRRAELYYQQFDALAALRQGTRRELLAEARKHPAMRLLRQIPAIGPIRAALLIALIQTPNRFRTKRQLWAYCGLALRTYTSGEYRFVGGQLKRSKKVLAVRGLNINHNHELKNIFKGAATRAAASAGPSQDFYQATVARGVKPHLARLTLARKIASITLLVWKKGARFDAEHLKQQAA

SEQ ID NO: 411477 - protein, 447 aa, unidentified
MASPNKKKKKYNQGLPVINEHAAGIDVGDTFHAAAFSNGEGSLEVSECLSFTTDLNGLVKSLKEKGITTAAMESTGVYWLNLYLLLEEAGIEPYLVNAKHVKNVTGRKKDDTDAIWLQKLHSCGLLQKSFQPDTEIRTLRTYVRQRKNLIGLSSDSVRRMQKALELMNLKIHVVISDILGKTGLAIVADILGGQRDVNELIKHKDRRIKASDEEIKKSLEGIWKDEYLFTLQQAYDGYLFYQSQIKSCDEKIKECLLQGAVKVLEGDISSLDISIKKKPKKNQFSFNAEILLSTMVGVNVCEVNGLSEVSVVELISEIGTDMTKWKSHKHFAAWLNVAPNTKITGGKVISSKMQKKKNSAGQTLRMSASSLSSSKSPLGNYYRKMKARLGKKGGVVATAHKIARIVYVMLSTKQPYNESIIENEQEKWKKQRIKYLENQLSQLKKAS

SEQ ID NO: 411478 - protein, 414 aa, unidentified
MRRLIDRCAGIDVGQALLVVCVRVVDEKGRLDQQVRSFGATTPDLLDLRDWLARAAVTHVAMESTGVYWKAPYYLLEDEFEVLLVNAAHLKHVPGRKTDVIDAQWIAEVLSYGLLRPSFVPPRPFRELRDLTRYRKALIRARTSEVNRLHKVLEDAGVKLATVATDVMGVSGREMMRALIAGVADPDALAELAKARLRTKLPQLRRALTGQFRAHHGFLLARMLAHVEALEADIEVLSQRIAELVEPWAGQLMILDSITGVGPRAAEVILAEIGPDMSRFPTAGHLASWAGRCPGQRESAGKRGSATPRKGSPWLADVLTECAWAAVKTKGTYLSAYYRQVMRRQGKQKAVMALTHKILVIAWNLLSTGALYDDPGPAAVTKVSEEQQRRRAIRQLEALGLTVTVEPRTDPGAA

SEQ ID NO: 411479 - protein, 339 aa, unidentified
MKHTKYYIGLDVHKEKTSYCVRDKLGNILLENKTATLYSELEPQLKPYLKTAKIGLEASTSYYTLYRSFLTNGYNINVANTIQLRQLISKNDKLDAQRLSEMLRLGAFPCSYIPDEKIQHLRSLVQVRHSLMEEKVRCNARIQAFLDKNGVVMPPQEAFSKHWRQKLMEYLITGAVSGELQYEYDHFLFLEKKQRQVEQEMKHYTRMNWKKEYMLIQSVTGFGPVIACYVIANVCPIERFPSNRKLRRYAGVIPVTKQSGETISKGHIPKGSSRKQLRWALVQAANTAGKTDTPLGRYYRKKKKQKKITAIAKIAVASSMIDILYKVLTTKQPYQELSA

SEQ ID NO: 411480 - protein, 430 aa, unidentified
MKSNTQNAKIEAITEKTLVLGIDVGSETHYARAFDYRGIEYSKKPFKFSNTEAGFVTFKEWILDLKERHEKDKVVSGMESTGHYWFNLGKFLQDNEMKPVLVNPHHVKKSKELDDNNPTKNDRKDPKVIAGLVREGRYMIPYLPDGIDADLRTASNIRFQLQAELTRIQNRISRWFNIYFPEYKTVYGKPDAKSGMLILKAAPLPEDILTLGIDGVNQIWRDAKLRAVGKARAKTLIEAAEHSVGSKEGAVSARMEIRMLLEDYESRNTRLQEVMVLIEELVRKIPMAEKLLEIKGVGIRTVSGFLAEVGDISRFNNPKELQKLAGLALVENSSGKHKGETTISRRGRKRLRYLLFEVAMSLVAKNPEFRELHNYYTTRRLNPLKKMQSLMAIAAKLIRVFYAMLTKGVDYDPKKMVSDIKRPAVYLQAA

SEQ ID NO: 411481 - protein, 323 aa, unidentified
MMGLPNSLCVGIDVSKNSLDIASNQTISPFSVSNDVDGFDAIIAELKQHSIALVLMEATGGLEAAVACSLQAQGFDVAVINPRQARDFARSMGYLAKTDRIDAAMLAQMAEVINRHPGRVRFIRNLPDAEREVLTAMVVRRRQLITMLTAERNRLHPSHPQSRKSISTIIDALKDELKRINKSMEAHISTHFKTLAEILGGVKGIGAATIATLLAEAPEPGHLSRREISALIGLDPFNRDSGNMRGRRTIFGGRANVRSALYMATVVATAHNPVIKQFYGRLVDSGKVKKVALVACMRKLLTILNAMLRKEEEWDPKYHSVNS

SEQ ID NO: 411482 - protein, 309 aa, unidentified
MKQSVVYIGVDVAKEHLDVAWEKQSRRFGNNKSGHAALVAWIKQSATAVQLICEASGGYERGLLESLERSEVKVTLVQANRVRQYARAGGILAKTDKVDARVLSAFGTAMHPKATTPPSAEQKRLREYDAQRRHLTRILLAEQNRLAQLGCAELKSLSRSLISKIKKQIATLDARISSLIAKNEELHIKAQKLTSIVGVGARTAALVLAQVPELGQLNRRQTAALGGLAPFNRDSGTLRGKRLIFGGRRALRTGLYMAALSAARRNQILSAFYRRLRASGKPHKLALTAVMRKLLIVLNHTLKPITAQA

SEQ ID NO: 411483 - protein, 386 aa, unidentified
MQKLNDLSRCLTPLEPDSTLIAVVEMSLSSWLVAGIVPGVERQPLKKLAVDESVLLKLLHRWREEAEKAGYMIKRIAVAFEAGRDGFWLARWLRARDIEVHVIHTSSVAVSREHRRAKTDRLDSELLKRAFLGWLRGERDHCKMVAIPTIKDEDGKRPNRERESLVGEQSRIINRIKATLVRLGIRGFNPKLKKAAERLEGLRTPEGELIPPNTLSELYRDMERRRLVRDQIRQIESARLDRLEHAPGEGAHAMVRLLARVMGIGIETADMLVQEVLSRNLRDRRAVARYAGLTGSPDESGKKRREKGLARSGNPRVRRGMIQLAWRFLLFQKDSALAQWFRARTENARGTRKTMIVALARKLLIALWRLVREGVVPDGVILRPAQ

SEQ ID NO: 411484 - protein, 425 aa, unidentified
MHSKWNNKINQVTEKTLVIGMDIAKRVHYACFVDERGRVIEKAFAVHQSKQGFESLYEKIRQTMKETKKTEVIIGIEPTGHYWMNLAYFLDQYGIPLVMVNPMHVKRSKELDDNLPTKHDKKDALVIARLLKDGRFSYPRLLKDVEAELRIGSTLRSKLTEDLASIKNRIIRWLDRYFPEFTQVFPNFGKMALATLEMTPLPKDIQEKTAEELVSLYRQVKGMRAPQLPKAKLLIEVAQNSIGLTEGTQMAQHEIATLLRQYRLLETEIETINIQLAELAQTTMEYEILASVPGLGDATIVDLLSEVGSFSLYENPRQLIKLAGLTLRESSSGQHRGQKHISKRGRKKLRNILFKVIVPLIRHNEAFKQLHEYYTTRHQNPLRGKQSMVVLCSKLLKVLHGICKKKVYFNENNMMKDLHCLEEAA

SEQ ID NO: 411485 - protein, 309 aa, unidentified
MTTSSYVGIDVSKDKLDIARLGEKQTWQVSNTNDGIEQLVKEMLDLQPELIVVEATGGYQRAVVEALFHGGLTLAVVNPARVRQFARASGLLAKTDKLDAFVLAAYGKTMQPRRYEGKTEAEKQLSALLVRRKQLEEMLKAEQNRLRTSALSLKSSLEQVIACLKEQKKRLDEQIQEFLKQQKSWQEQSEILSSAPGVGPVTTATLLAELPELGKMDRKKIAALVGVAPMNYDSGRKRGYRKTKGGRGNVRSVLYMSTLVATRYNPVIRAQYQQLLKRGKLKKVALTACMRKFLTILNAMARDRQSFRV

SEQ ID NO: 411486 - protein, 348 aa, unidentified
MTMIGGVDLHRAQITFDYVDTDTGEVSTGQIRPATRVTLRAWLAERFAGRQDVTFAVEGCTGWRFMVEEMQRAGVEAHLAEPADTATQRGRKKRAKTDKADARLLRELLRQRRLPESWIPPEHVLEVRTLCRLYVALVDERRAWRQRIHAQLYHQGVPAIVGLLSDAGRSVLTTAELSPAGRQLVETALTAIDALSRQIEPLRAQLQSIGRRQAGARALTAQYGIGALCAAIIWAELGDCRRFSRSDQAIRFAGLDITVWSSAGKRSPGHLARQGPPELRWALFEAAKSSARTRSPDHAYYASVHDRLGGKRAALSVARKLLRRCYHTLRALGDNAWAPLAHPTVEAA

SEQ ID NO: 411487 - protein, 358 aa, unidentified
MTNLAEKLDFSGHTISCGIDVHLKSWTVSLYLGKQYLKSFVESPPSVDGLWNFLSTNYPKARYECAYESGFCGFWIQRAFAVRSISCIAVNAADVPRTDKGTKNKNDRNDSRRIAEALQAGQLAGVYVPDPELEADRQLVRLNERYSNDLTRSKNRIKGLLRLMGIEIPQRFGKANWSGAFVKWLKEVSCGEPSIRIVLDRQLSIMEAIRIQKLDTLREIRKLMGKARYRTILGLLCSIPGIGPITAAVLIVEIGDISRFKKFDRLNSFVGLCPMEHSTGENDRKGSITTRQHRRLRYMLVEAAWVAVRTDPALTLCYSRWAARVGSRRAIIKVGRKLLSRVRHVWNNRTPYVSGLVK

SEQ ID NO: 411488 - protein, 345 aa, unidentified
MPIVGGLDIHRKQLTFDYLDTETGEVKRGQVAPADRAHLRAWLARFAGREDVAFALEGCTGWRYVTEELAAAGVAAHVAEPADTAFARGRKRHAKTDKTDSRHLRQLLAEGRLPECWIPPGHILECRALLELYHDLRAEHTAWVQRIHAVFFHQGAPALGDGALRTGKDLAALRAAAAAHLSPVGQLQVAVSLEVLEALEARMHQVRHQMLAAARHLTGAKVLAARLYGVGPVTALAMTCWLAGKDRFSSSRKAVRFAGLDVTVWSSDRKGPPGRLSRQGPPVLRWAVYEAGKTHARSSAPDHRYYAQVKDRCNGKRAALSEARKILRQAHHILAELGDDALAAA

SEQ ID NO: 411489 - protein, 383 aa, unidentified
MEDRHTKVFPFTVNRPDFERFLLFLQRQGPMEIMVGVEASGPYALTIGHFLLEHSYTVVELNPFQASQFRKAQGKKAKTDRVDARSLAAFLAVGSYKPLTLGDPLYENLRELTRFRVDLVKDRTCQVNRLKETLAIAFPELGTHMASLESPTALTLLTNYPGPQALAEAGAQVVSACIIEASHGRLGSVQAQAIVSAAGTTIGLLRRQQALAIKLEVLASGIISVNMQLQRVEAAIEDLFRQLPYDKSDFPVGGIQSLACILAEIEDVDRFPTLKQFLSHFGWCPQTFQTGGFRQEHPRMSHAGNRYVRRVLWMLAIMAVNNVPEYHDYLQRRTAAGKKKMHTIVAVGRKILSVIYAVLKTGRPYTSAGGASHTDPCPVLTSL

SEQ ID NO: 411490 - protein, 361 aa, unidentified
MIMSFTKPIEHANLITKEGNLMNPLYVGIDVSIVHFMLPNGDKHSNFSVANSHDGSTQLVKRILSALTSESLDTVSIGLEATSVYGDNLVYFLREDASLASFNRKIHVLNPKQVNKFKESYNDLPKNDWIDSFVIADCLRFGRINKEVYIGDYHSKALQNLTRARYFAVCNLTKEEQRFMNVLFKKYSTMTQEKVFSDTFSTTALAVYDEFESTEALAYMDLQELTAFIIKKGKNRFPDPDAVAKAIQKAARSSYRLPKTVNDSVNQVLSISITSMKALESQIKEFDKAIATQMELLPNVLISIPGIGPVYSAGIMAEIGDINRFNNQAALAKYAGLAWTQHQSGGFEAQNTRLIHSGNRF

SEQ ID NO: 411491 - protein, 350 aa, unidentified
MKSRIIAIDLAKAIFELALVDQASRILERRRLNRKQLRTFLQQQPAALVLREACGTAHYWGRYAGERGPAAKLIPAQYVRPYRRRSKTDRADCAALLAAHRCGEIKPVPVRSIEQQQVQQLHRVREQYKRTRTSRINMWRGFLRELGYPVALSPAALMRRVTELLAEECLPPAFTPVFQDCLHEIKQLALHMKAIEQQLHQLSLQQEAMLRVQQIAGIGLLTSTALVAEAGSPHHFKSGRHFAAWLGLTPREYSSGHTRRLGRISKQGDSYLRMLLIHGARSTLVRAKQLNIRQPGQLTRLQRWGLQLEQRAGHNKATVALANKLARIVWATWKHERDFDGNYAQQFAAA

SEQ ID NO: 411492 - protein, 407 aa, unidentified
MSSTAMSVDWMSTKKTVVACIITPDEKEIRTFSTMTDDLLQMVDWIKSKGCTHAAMESTGSYWKPVYNLLETEEIQTLVVNAQHIKHVPGRKTDVKDAEWIASLLWHGLLRGSFIPPRDQRELRELIRYRRSLIEERAREVNRIQKVLEGANIKLSSVASDILGKSARAMIEALIAGNVDPESLSELALRRLKNKKADLQRALKGLIGPHQRLMLQTQLRHVDELDALIQQLDEEIKRRMLPFEEDLERLDTIPGVARWTAEQIVAETGTDMSRFPSAAHLCSWAGVAPGNNESAGKRKSGRTTKGNPKLRSALIEAARAAVRTKHTYLSSLYHRIAARRGANRAAVAVAHRILTIVHHLLKEKQVYNELGPHYYEERRREQMARQAIRKLEMLGYDVMVKEREQTA

SEQ ID NO: 411493 - protein, 426 aa, unidentified
MNYTQNEKILQITNETLIIGVDIASETHYARAFDLRGIELGKLLRFTNDAEGFNIMRAWIKELSIRHEKKHVMVGMEPTGHYWFNFAQYLKNHCMQIVLVNPFHVKRSKELDDNNPTKNDRKDPKTIAMLLKDGRYMVPYIPEGVYSELRTAMQTRWQIVKQLNATRNRVKRWLSIYFPEFTTVFASWEGRAALIALNEFATPAKVLQKDVDGIVASWKKAKIRAVGRKRATLLVYAAQTSVGVIEGLKAAENDLLMLLEDYEMKKQQHERVLALVEQLACQIPGMQEILKIKGVGLITAAGFMAEVGDITRFDHPKQLQKLAGLSLKENSSGKHKGKTTISKRGRKRLRALLFQGILPLVAKNEEFMKLHQYYTTRVENPLKKKQSLILLCCKLIRIFFALLTKQVAYDPQKMMSDIRRPVMAVA

SEQ ID NO: 411494 - protein, 343 aa, unidentified
MQIRSVGIDLGKTTFHLVALGDNGKVLLKKKFTQRQLITFTANLQTTLIGLEACAGAHFLGRALREQGHDVKLIPAQFVKPFVKSNKNDFLDAEAIAEAVDRQNMRFVPIKTDDQLDLQALHRVRDRLVARRTSVINQLRAFLLERGLVFAKSPAKLRERMPEILENAEGGLTPRVRNLLALLWNEWKDLEQQVVDLNHEVELIASSDAACLRLRQIPGIGPLVATAIVASIGNGAAFHKGREFAAWMGLVPKQYSTGGKAKLSGISKRGNRYLRKILIHGARAMVLRCKRERIPMGAWMTALETRAPRNVLIVAAANKLARIAWAVLSSGQDYRAVQEPVAA

SEQ ID NO: 411495 - protein, 359 aa, unidentified
MVHVGVDLHKRSSQLAVLMPDGEVTQQRLENDPRQLERFFAQVPRGARVAIEASGTWWWFVDLVERLGHHAILSNPKQTKAIAAARLKNDRVDAERLALLLRGDLLPTVWIPPAELREARELVRHRVSLVWVRTEIKNRLLALLSRRNLQPTSSKRWLTVRGRRELDGLPLGAIPSTVREDCLALLRVLDEQIRRRDHELVQRWGDDPRVQRLRTIPGVGPFTAILLILELGEIQRFPSAKHLASYVGLTPRVRASANRVRMGHISKEGNRLLRWALVVAATQAARRPGPLRAWFRAVQQRKGMKIARVALARRLAEIVYQMCAPRWPHSHRPSTPAGRRPRRPAHRSAGAPEGRHQAQ

SEQ ID NO: 411496 - protein, 418 aa, unidentified
MQKRMLAVVMSDVEVDGEYEFERHQFGSSPQQLRLLAAWLLEQQVEEVVMESTAQYWKPVWGALERYWKPICQKGEGARPMSGTLHLAQAQSNRGPQGRKKDFPDAERLVKRLVANELTLSFVPDAEQRLWRTVMRRKYQLTRNRVQLRNQLEGLLEEAHIKLSSLVSDLLGASARRMLKALAEGETIPATLAALANRKLRATQEQLRDALGACVELNPVYRRLLKMALEELQLIEEQIGQLDQEMATLLSHHQDAVKRLAEVPGLGVDSAQQIIAEVGATAATFPSQGNLSSWVGACPGDDESAGVNHSHRSPKGNRHMRRILNQTANAAVKAKGTIFEIVYRRYVPRMGHNQAIGVIAHRHCRLIWLILHQGVRYEERGAVVSKRSKQQRTARMIRELRRLGYRVEPATSQPGNPV

SEQ ID NO: 411497 - protein, 362 aa, unidentified
MKTLQRQAKHFKGYTIGLDLHRSFIQVVVLDRHGNDAASERIASSTDVLEKLLTKWQKQGPVQIAFEACGCFVWVFELGVRVLGRGQVHAAHAAKISMIAHSLEKNDHNDAWWLAYLLYERRLPEAYVAEGALRELRIAGRELHYYTDMRSDLVRRVRSSLAQLGRKLPKGWHTSKLKRELSKVLLDSIGGVRGESLQDLYAQIEQLGAVILKWRRQVEKLCELFPEVQIIKEHMPGFKVVLGGLVYGELGSPKRFYGPKAYSNGTGLTPAFRESGGKAQAVSITRQGSRLARWALTRAVIACTRCTKNEAGVQVKKWLAKKVARHMPKRKAIVAAARKLAEGIWRLLAWGEVFDLKRAFPA

SEQ ID NO: 411498 - protein, 381 aa, unidentified
MKIYVGIDIAKLNHFAAAISSDGEIILEPFKFTNDADGFQLLVSKLESFDKNSIIIGLESTAHYGDNLVRYLVAEFYQVCVLNPIKTCQMRKNNVRKTKTDKVDTFVIAKTLMMQDDLRFITFFDLDMMDLKALGRFRQKTIKQRTRLKIQLTTYVDQVFPEIQYFFKSGLHQNAVYALLKEAPSPKEIASMHMTHLANLLKVNSHGHFTKEQSKELRVLAQKSVGANDSAISIQITQTIQQIELLDSQLEKIEAEMTDIMKFNDSVIMTIPGIGYINGGMILGEIGDIHRFSNPNKLLAFAGLDPSVYQSGNFQAKTTRMSKRGSRVLRYALVNAAWNVVRNNATFKAYYDAKRAEGRSHYNAPWSLCRQACQSHLEDAH

SEQ ID NO: 411499 - protein, 433 aa, unidentified
MKVLHERVAGIDVHKDMVKVAIRSPGDKPWTRKTEILEFRTFYGVLRHMAAGLRRRGVSHVVMEASGACTEPVYYALAEEDFEEIAVINPAHARALKGHKTDAKDCARLAELSGCGLLRGSYIPAPELKEVRDLTRYRMKTVQARTSEIQRLAKALESAGIKLGSVASDITGKSATAMIEALIDGERRGQVLADLAIGRMRTAGKLADLSQALAGRFTGHHALLCRLHLDRIAGFGTAVDDLDQRIAGKAGRWQREADLLKTIPGFGDVVAWAWLGEIGPAPHRYFPGHEKLASWVTLCPGNNISARKRKHGRTGDAGTYIKPMLVQAAWAAIRVRGRLQARYSRLVRRFGGDKNPGAKKKAITAIAHTLLKIAYQVLQAGTPYQEPGADFRTRRESPQHRQAFLERQLQKLHPGCTITITISPPQAALPAGA

SEQ ID NO: 411500 - protein, 364 aa, unidentified
MSKVSTYVGLDVHSERIVIATLIGQAREPTILDIPNDPKVIRRTFKRLAAEAYELRCCYEAGPCGFELFRQLTSMGLACEVIAPSLIPVKSGDRIKTDRRDASKLARLYRAGELTTITVPTSDQEAVRDLVRAREDVRKDLTAARHRLGKFLIRHGRIFSEGHNWTDRYWIWLRKQQFERECERLTFEHYAREVQHLQQRRADLDLEIERVARTEPYSAAVGKLASLRGISTLSAMALLAEINDFRRFESPRQLMAFVGLVPSEYSSGGKETRGKITKTGNSHARRILVEAAWGYRHRPSFGPRVKQVLSGQPPEVVEYATKAQHRLHHRYCRLVGKGKKSQLAATAVARELCGFVWGLMTMAA

SEQ ID NO: 411501 - protein, 345 aa, unidentified
MNVTTIGIDLAKVAFQVHGVDNHGKVVLRKQLKRKDVLSFFANLQPCLIGMEACGSAHYWARRLSELGHTVRLMAPQFVKPYVKTNKSDRNDAEAICEAVGRPNMRFVAVKTAPMQAVLALHRARQGFVRARTAQANQIRGLLAEFGMVIAKGIGHISVRLPEILEDGENGLPGMMRELLQRLGENLKDMDRQVGELERQIVLWHRQNEPSRRLEAIAGIGPLTASALVATMGDAKSFKNARQVPAWLGMVPRHEGTGGKVMLGGISKRGDVYLRTLLIHGARAVIAHSERKPDQADAWLKKLLARRNKNVATVALAAKNARIAWALLAHQRSYQHDYVATRKAA

SEQ ID NO: 411502 - protein, 386 aa, unidentified
MSRPSNIPLRAINYDHTLVLAIELSNKSWVLAAQVPGFPQTKAQRTIEPNKNALLATIDGYRARAAAVGYAVDRVITTYEAGWSGFWLARWLVALGVEVHVVQPSSVPVDRRLRRAKSDGIDAELLLRTLLAWLRGEPRVCSMAPIPDEADEDARRSVRERTEVLSDRVGLTNRIGAVLATLGVNDYNPLLQSRRRRLAELRTGLGEPIPPNALAKIERLLARLELVLAQIAELERERDEVAAAEAPDRAGKMIQQLTSLRGIGVQSATVLVREAFVRNFSNGKALGSYAGLTSTPYSSGGIEREQGIGKAGNRRLRTVMVELAWLWQRYQPGAAQVAWFRDRVGSTGRRIRKVMVVALARKLLIALWRFVIDGVMPEGAVMKPSI

SEQ ID NO: 411503 - protein, 429 aa, unidentified
MEEVDDAELVVERVAALDLGKAGLEACVRVPHPQRPGRRMQELRGYGTTTVQLLEMVAWLRQWRVQRVVMESTSTYWKGVYYLLEAEEFDCWLVNAREVKNVPGRAKTDRADAVWLAKVAERGMCRPSLVHPPEIRRLRDLTRYRRALVQDRTREQQRVEKLLEDAQIKISAVLSNLHGVTGRAMMDALIVGERDPRTLAQLAKGQARKKTGALEEALRGFFTDHHATILQMMLDNTDRISAQIAALDARIEEAIDPFSDQAARLAEIPGVDAVAAAELIAEIGVDMTRFPSAAHLVSWAKFCPQTHQSAGKSKAKGRGKGNPWLAGTLGRIAFANSRSDTFLGTRYRRLARRRGGQKAIVATGNSILTVVYHLLSDPDASFIDLGPGYYESRINKHRRARDLAIQLQALTDQHIVIRDGKAVITDTAA

SEQ ID NO: 411504 - protein, 318 aa, unidentified
MSDSVFVGIDVSSQTLEVASSAEVKTWQVANDAAGLEVLVSRLLEMGPALTVLEATGGYEFEAACALQAAGLAVAVVNPRTARDFARAMGALAKTDALDARMLAAFARVLHQHPERERFVKPLADAELQRLQALVLRRRQLVQMITSERQRMRISHVAARPSIERVIEFLKTELADSNADVAAHVQQHHAELAAALTSVPGIGAASVAVLLAELPELGKLDRRRVAALVGVAPLNRDSGQMRGQRTIWGGRADVRRTLYMATLTAVRHNPILKTHYERLLTTGKRKKVALVACMRKLLTMLNAIAKHGSKWNPTLHHA

SEQ ID NO: 411505 - protein, 411 aa, unidentified
MVESILKSCAGLDVHKKEIKACIAHGDLDKPPQYEIKTFSTMTSGLRKLKDWLNSYNVTAVAMESTGVYWKPVFNILEDDFDVILSNPYHIKNVPGRKTDVKDSQWIAMLLRNGLVPRSFIPPREIRELRDLTRTRRKLVGNMVAEKNRIQKVLEDANIKLRSVVSKIDGVSSMRIIHALLEKDDLSREEIAEMTHGRLRSKMDLLVEALDGRVTGHHRFLLKMHLDHIEFLADQIQNLDEEIQIRMVPFHVQSSLIQTIPGISNISAASIIAEIGTDMSQFPDEAHLSSWAGICPGNNESAGVKKNSKIRKGDKFLKATLTEVAWAASRSKDSAYSAVYNNIAKRRGRKRALVALGHRILIDVYKTMKFQVPYKDVGAEVVYQRKTKNREQAMIRSLERSGYVVTKVATA

SEQ ID NO: 411506 - protein, 353 aa, unidentified
MSIVADTHPFVVGVVTHARKHVYTILIAATGAFVESRDFPTTIAGINRAISWVARRTQADADTLWVIEGAASFGSILTGTVASHGYPVAEAPRMEAKQRRGVGKSDVLDAHRIAAAALPLPVDKLRRPRLNEGVRQSIQILVTARDSMTKDRTRSVNALTALLRGNDLGLDARKALSTAQIRQVAAWRTRNEELSLSVARAEAVRLAKHTMELDEQLHTNEAQLAELVAVSEAAPLLDETGFQAISAAKCLAAWSHHGRVRTEAEFASLAGVNPIPASSGNTVRHRLNRGGDRALNSALHLVAVTKMTYDRETRAYVEKRRTEGKTHREIRRCLKRYIARRVFRTFNASHHRL

SEQ ID NO: 411507 - protein, 412 aa, unidentified
MTETNQFAAHVGLDWADKKHDVCVQFKNGERTFHVTEHTPEALDVWLTELHQKVKGRIAIAVELKKGPVVYALQKYPFITVFPVHALSLARYRQAFSPSGAKDDPQDAELALELMLRYPQKIKAIEPDNADIRLLQQLVEQRRQLVEDKRRFVNRLINTLKQYYPQPLEWFSHRGSLLLCELIMRWPSLQQLKRARRDTIRNFLNAKGGRAMALTEQRVVSIDNAIPLTTDPSVIEANALMATALATQIKVVSEIIKTYDERIETLFDTLPDSGLFKSLPGMGPCLGPRMLAALGDNRDRFNSAEEIQNYAGIAPVTERSGQKSWVHWRWQCAKFVRQTFVEWAAKTVNSSYWARLYYRGLREKGKSHQSAIRALAFKWIRIIYRCWKTKTQYDEAKYLLALEARKSPLLKP

SEQ ID NO: 411508 - protein, 408 aa, unidentified
MTVVGIDVSKGKSMVAAMKPGGELVAAPYEVRHSDIELSHLALDVLCMEPDTRVVMEATGRYHEPVAALLHSEGIFVSILNPLLIKQSGAGSLRKVKSDPKDALKIAKYGLDNWSTLREYTPMEAIRQQLKLCARQCDLYNKNIVMLTNNLISLSDKTFPGVNELFSSPEKADGHLKWVDFYRSFWHCDCINRMSPDAFEERYKKWCKRKGYHFSTDATDALYAASCGLYTTLPRDNNAKLLVTVAADQLIALRENQSKLEAEMLNLCKQLPEYETVMAMYGVGKSTGPHLMAELGDIRRFPHRSSIVAFAGVDPGVVGSGKMQLSSVTTSKRGSPQLRKALFQVVSTYVKCKPENEAVYQFYAKKRDEGKPFFVCTTAAANKFLRIYYARVKECLNAAESATQVEEG

SEQ ID NO: 411509 - protein, 667 aa, unidentified
MPASTSAARRLRLGVGIDAARYGHHVTFLGDDLQRVAPDLPVPESRVGYQRLEQQLRRLCEKHPDAELHVRIDAAGQYAANLERFLRSLDLPLPISVGEPKRNKDYHHAHSPKRQDDQTESWAMARYAVVERPAPSRETPPEFAVLRRIASRLEAQVRQTTRLTNQLHELLSAVFPELANLARDITVQWVLKLLERYPTAPRIAAARLDSLQGIPRLSPEKAQQLQTAARNSVGTLRGETCEALVRQLVRELRASLDDESRWKKLLTQAFDALPPGPHRRIATITGIGKVTAAAIVATAVSIDRFQTPEKFVGFYGVFPQAASSGVDKFGRPNPPGKKSMCARGNDLVRGLLWNCARSAALFNPAVRTLYKRLTSPSRPDGKVPLRGDVAFGYCMTKLLRLVFAVWKTDRDFNPRHFPWEPQENAPHLDRSEPATSDAATDDQTSLEETATPGQTKVGDEGESNAADAATPAQEIAKAAGHNEPQSSRDNVVTAATSSLDARTVADQHLPPSAPCASSSGSLQPYRGPLDFAALRRQVTLRQVLQHLGVLHRFRNSAGSAPQLRGPCPLHKSRNERGRTFSVDLQRNIFHCFHPSCAAQGNVLDLWAAYHGLPLHEAALHLAETFGVIPPRLENGSHPLKQRSGCVDFQGVGDGFTRQVLDSSECCF

SEQ ID NO: 411510 - protein, 319 aa, unidentified
MRFYNRQHRHYCGIDLHVKTMYVCILDATGQVLVHRNVPSTPGALLEVVAPYREDLVVAAECMFTWYWLADVCAAEGIAFVLGHALAMKAIHGGKAKNDKIDSHKIASLVRGGLLPQAYVYPAGMRSTRDLIRRRLHLVRKRGQLLAHIQNTRAQYNLPAFARRLAYPANRTGVSAQFADPSVRKSIDVDLALIDQYDTLILDLELTIVREAKRHDAGAFHRLRSVPGIGKVLALTILYEIHDVTRFDRVQAFASYARLVKCVHQSAGKKLGTGGAKMPVDPRPQNRASGVLHAVARDGLLNGQVPRGVAGKGAGEPDV

SEQ ID NO: 411511 - protein, 351 aa, unidentified
MIVLGADTHKRSHTIAAVAAGTGELLASQTIQVGRRGFDVLLQWARGLGEERVWALEDCRHVSASLERLLIERGERVLRIPTHLTAKERKRSRERGKSDAIDALNVARAALQEGLGGFPMARLEGPELDLRLLVDHRERLVRHRVELNSTLLWHLHDLWPELQLPGGALFSKKWSTRIGGRLARAEQTMRVRIARDMLRRLRELTATINQLERDITILVEQIAPQLLTEPGFGPLIAAKLVGEIAGAERFATPAKLARVAGVAPIPASSGNTQRHRLDQGGNRQINAALDRVIVTRARCHQPTRDYLERRRREGKSTREAIRCLKTYLARHVWRLLQPPHPDQRELPLSIS

SEQ ID NO: 411512 - protein, 538 aa, unidentified
MQATEKDVMPVMVTATTTCGLDIHRDKIDACIRINDGTLDGKLFEKTFNTARGALIELRNWILSFKCFKVLMESTGVYWMPIFFLLEEITGMDVGVGNSRHTKNTPGRPKTDKDDARWLSRLCMLGYLLKSFIVAKPFRDLREYTRYHKKLVQEQARHKNRIEKLLQMNGFKLSSVLSDITGVSGIRILSKLCEQGSLTVADISAALDCRVRKSAEEVEYAINGVMKPTSRVLLRKQLTKLAASNKEIEEIYQCMVELSKEHSRAIEIISSIPGLSDLSAIYIIAETGTDMSSFKTSGHLVAWAGLAPKGDQSADKESPKKTKKANRYLKTILVECARAATLARSSRVAMWYWSRVNKLGDKKATVAIARKLLCYVYAMLKNDTLYDASLDRAQEQNNRAKKLDSARKIVDGNKGYSEKKGSSVSLAEKLNASPDNQLQSNIESASENFDTSSVSPVLSQPCDEKQQSVVVMPVKKKRGRPKKNLDISVGNHNKHSMSLSPPGISQPDGENMQDVNIPVSKNNGRTRKNTTDAPVVII

SEQ ID NO: 411513 - protein, 318 aa, unidentified
MGKDYIGVDVSKDTLDVASYTGNKLWRYSNNDEGIRQLIEALKEMEIALVVMEATGGYESPLAYALGKAVIPCAVVNPRETRDFAKATKKLAKTDTIDARVLAHFAAAIKPEPRPLSDEQTQELEAILARRRQVVEMLTAEKNRLHLARKPVTEAINAHIDYLEKELGHINSSLKGRIEDSPVQREKYNLLQSVPGVGPNLAATIVIELPELGNLNCKQVAALVGVAPLNRDSGSKRGKRVTWGGRPQVRSALYMAALVATRFNPVIKEFYARLCALGKAKKVALVACMHKLLTIMNSMLKHHVSWHYTQPELVSNVH

SEQ ID NO: 411514 - protein, 368 aa, unidentified
MKQVTTYVGIDAHKKDLFVAMLIGDEKAPVTWQLANEPTAVRRLVRKLERDAPGLVRVCYEAGPCGYALQRHVTTPRVSCQVIAPALIPRKPGERIKTNRRDARKLAELLRAGLLTEVRPPTPEEEAVRDLCRARDDAREDLQRCHHRLGKLLLRRGLHYRGRNWTRAHRRWIDSVEWTQPAERVVVDDYLLAIDHTEARLIELDARLTEIAQADPYREPVGWLRCFRGIDTLTAILLLAELHDFRRFWSPRALMAYVGLVPGEDSTGEKHRRGRITRTGNALVRRLLVETAWHYQHRAGIGVALARRRTGQPGRVIAIADKAQQRLCRRFRRLAEHHKPAPKIAVAIARELAGFLWAALQPVATPAR

SEQ ID NO: 411515 - protein, 352 aa, unidentified
MSKVKELNFEGKTICCGLDVHKSNWKVNGKMDSMDIVSFCQDPDPKVLRGYFTKNYPGAKVKVAYEAGFCGFGIQRSLTELGIECIVVNAADVPSSDKERKRKDDKIDARKLSRELADGSLKAIYVPDIHMEHVRVLVRQRYRFVQDQTRCKNRIKHMLMCNSIELKSKQHWSGKYVKELEKIECSSALRTALDLAIAEYKQIRTLVKDATLAIKKIAEQPPFIQTQKCIQSIDGIGLINGMVIQTEIQDIKRFKTLDSLCDYAGFVPDISSSDERMVIKGITYRHNEFLRKALIESSWILIRKDPAMLMKYNEYRKRMNKNKAIIRIGKHLLSRIRYVWSKQKEYERGIVG

SEQ ID NO: 411516 - protein, 316 aa, unidentified
METPQLFVGIDVSSQHLDVDSLPASHHFSEPNTEDGIAALVLRLRKLNPQTVLLEATGGYEVPVAYALYEAGLPVVIMNPKALRHFAKAIGKLAKTDKLDAQVLALYAQSIRPPVRPLKDQEQLELANLMTRRRQLQGMIVMEENRRRTCTPRVRGNIELSLAHLRQLLKDLDREIHDSIRRTPLWHENSEILQSFTGIGPKVSASLIAVIPELGTLPGTKASALAGLAPMNRDSGQYRGKRKIQGGRPAVRQALYMAALVAAHHNPVIMEFYQRLRLAGKPAKVALTACMRKILVILNAMLKNRTYWNPQLPLAA

SEQ ID NO: 411517 - protein, 313 aa, unidentified
MKQSPSVTYIGVDVCKDFLDAFSPNWAKPKRYGNSIAGISKLLEALKDTSLPQLGIESTGGYERPLRIAAADSQVTLSMVNPRQVRDFAKASGKLAKTDALDAKILAAFGEALDPKPSLLPSKKLQKLRSFVRRRSSLNDLRIAEQNQLDKTQEPIIAKEIRSLIKILENRIAKLEKLMIQLMDSDIALADKRQRLEEIKGVGPVVSATLLAELPELGSLANPQIASFCGLAPFNRDSGTHKGKRMIIGGRGRIRKTLYMPTLCAIQHNPPLKDLYQRLVDNGKPAKVAITAAMRRLLCLLNRMISDRNFQPQ

SEQ ID NO: 411518 - protein, 335 aa, unidentified
MNPVRIHIGVDVGKDSLDICYPDGTKEKARNIKSCRAKLIKKALKLEAIISFEATGPYEEALADECIARGVRAVRLDAWGTRKYAESQGRIEKTDAIDCEMIRDYAMSLNESKLHFIKPRSQAHKTLKRAVSTRKNLMKARAIIYNQYENLPDAKMRKCLDQTLAKLDKEIARIEGECDAAIASDDRMRELASRFQTVKGVGPCLTRVVLAYCPDIGEFSDGGIAKMCGDAPIDYESCTIKKKAKPKRGRTDLRKAMYMAAVSASRSNHILRPIYQRLVAKGKPRKVALTAIARRIAILLNNIAKYPDFIPAQNPKDVARAALPKRGRGRPRKTE

SEQ ID NO: 411519 - protein, 497 aa, unidentified
MITIPVITERCAGIDVGKRGLAAAVAVGPADKEAEIKTRWFATTMPALRELHTWLREEGCTTVALESTGSWWISIKNELEDDLRMTLVCPRKHHPKKGDKTDFRDAIDLALHHRHGLLTGSFLPERGIVELRDLTRRRKKLLGNLSSEKNRIQKVLDTAGVKMGNVISDVFGVSGQEILQALLKNVPLKAEELADMAKKRLRNRIPQLTEALQDHYMNDHHRWLIGQSVEHAQFLDVQVETLEKKIDAHLEPYRRQYELLQTIPGIKEHTAASILAEMGADMSQFATADKLCKWSRICPGNNRSAGKSRHSHIQRGNKFLLAALVEASWGAIRKEGSAFQRKYRRWLRKGEQKAIIAVCHCLLRVIWSVLKNDRPYVEPDAIVVEGMERQRLIHHHTRKLREMGADEQTIGVLIEQLQVLPADSESKPARVETTKDTQAHLEPKRPLARGVLGFRIRTAPIKKYSDFEDRPDPPTGADASETAASSKKRCRIQKAKT

SEQ ID NO: 411520 - protein, 454 aa, unidentified
MAKKRNKDNKKTSRAVLPVMRPDAAGIDIGATEIFVAVPADRAAENVRSFPTFTQDLYAAADWLKQCGVKTVAMESTGVYWIPLFQILEDRGFEVFLVNARHVKNVPGRRTDVSDCQWLQFLHSVGLLRASYRPEQEICAVRSLLRHRESLVQMAATHVNHMQKALDQMNLQLHHVISDIVGQTGLAIVGAILEGERDPHVLARLRGQRIKASEEVIARSLVGDYRAEHLFTLRQSLDAYRSYWKMIEECDREIGRCLEEFRRPEPSAASAADDFNPSLKYPSSDSVLVKELHRVFGVDPTRIPGIRSGIAQTLFGEIGPDFSKFRSASAFASWMGLCPDNDISGGKVLWVGTRKVKCRAALALRMAAQSLHHSKSALGDFYRRMRAKLGAPKAITAAAHRLARIIFHLVTTGQEFDDSKFAADQLRYQKRQEIKLRAKARARGFELIPLAQAV

SEQ ID NO: 411521 - protein, 403 aa, unidentified
MNAVGIDVSKGKSMVAIMRPFGEIISAPFEIKHTASDINSLVELINSVEGESRIVMEHTGRYYEVLAHQLSEANLFVSAINPKLIKDFDNDSLRKVKSDKADAVKIARYALDKWQNLKQYSVMDELRNQLKTMNRQFGFYMKHKTAMKNNLIGILDQTYPGVNTYFDSPARSDGSQKWVDFASTYWHVDCVRKMSLNAFIDHYQKWCKRKKYNFSQSKAEEIYGKAKELVPVLPKDEITKLIIKQAIDQLNSASVTVEELRSLMNKTASKLPEYPIVMQMKGVGSSLGPQLMAEIGDVSRFTHKGAITAFAGVDPGVNESGSYEQKSVPTSKRGSSGLRKTLFQIMDVLIKTHPQDDPVYQFLDKKRAQGKPYYVYMTAGANKFLRIYYGRVKEYLSSLPESE

SEQ ID NO: 411522 - protein, 438 aa, unidentified
MSNKVIFNLDELFISVGIDVGADFSWMSIALPNQQFVGKPYKILHNSIDSLTTAVSKIKEAEELYSLESRIFLESTGIYHYPLFCYLHDKGFNCSVINPIITKNSTNINIRKVHNDRFDSKKAALVGLKPDLKVSLMPSDLALNCRNLCREYYDLMDNRSAYVNKLQGELRMAFPQYLGIFSKVTINTSLTLLETYTSPSAFLKADKQEIIDIIKSTARFGLTYAQNKYNAIIQAATDANQFGYIIDSNIKRIRLYISFIRKYDEEINSILESLHELVDANEDSDFVKQIHLIETFKGAGFLSAVSIMGEIGDFSAFSKPKQLFAYFGLDPAVKQSGKFEGTKVQMSKRGSAIARRVIHTLTLQSISISRNREAKNPVLREYYLKKCDSKPKLVAMGTVSHKVCNMIFAILRDNKPFKIIAPQEHIKQYNSAKCDIAA

SEQ ID NO: 411523 - protein, 337 aa, unidentified
MIVMGLDQHRAQITAEWIDTDTGEVERARISPAHREPVRRFLRRFRGCELEVALEATTGWRFVVEELRGVGAGVHLAEPAETAGLRGPKKRAKSDRADARHLRELLMVSRVPESWIPPDHVLDLRARVRLRHTLSEQRGEWQQRIQAVLYHHGLPQRRALMTGEGRAWLAGQPLPETAREQVTVAIAMIDALDVQLAPIEKELRAYARRQPGCRALMAHYGIGELTAVTILAELGDCRRFSSSRHAVRYSGLDITVHESDRRRAPGHLSRQGPPALRWALFEAAQVARRTGSPDRDYYAQAADRLGSNRACLSIARKLLKRSYHTLRELGEEALQPA

SEQ ID NO: 411524 - protein, 315 aa, unidentified
MSDVPCFVGIDVAKAQLDIALRPSGERWAVPNDASGVATLVDRLQGLHPALIVLEATGGLERLVTSALATVGLPVVVVNPRQARDFARATGQLAKTDALDARALAHFADVIRPTPRPLPDTQTQELRALLGRRQQLIGMRTAEQNRLAGTSGRLTQDIEAHIAWLNTRIATLDDALETLLRASPLWRANDDLLQSVPGIGPVCARTLLLELPELGTLTRQQIAALVGVAPLNCDSGTLRGRRMIGGGRAHVRTVLYMGTLVATRFNPQIKAFYQRLLAAGKLKKVALTACMRKLLTMLNAMLKHRTSWQAQEVQN

SEQ ID NO: 411525 - protein, 318 aa, unidentified
MAQITKIVGLDIAKDKIDACIRSASAERTFANTAEGHRELLCWLSEHTVGRAVMEATGGYEQSWAELLERAGVEVVIVDPRRVRHFAKSAGQRAKNDPIDARMIAWFGETFANLTGKSRDKERQVLEHLVKARQGLTGMKDRIDNRGVLKQPTEVGKAYRAVTKAHATQIAKLEAVIAGKIKSSAELSKRADIIQSVPGLADVATAGLIALMPELGHVDNQAAAALLGVAPYDDDSGDRRGQRHIAGGRHKLRRLLYMPIVGAATQHNPVLKAYYKRLLARGKPEKVALVACMRKLITILNTMLKRGEKWDPARHAQA

SEQ ID NO: 411526 - protein, 399 aa, unidentified
MDHCTAGLDWASEAHAICIVDAHGATRESFEVAHDASGLGDLLRRLRRYPELRLAIERPDGLLIDTLVDAGITVVPIHPNKLKAARERYSSSGAKSDGGDAYVLADLLRTDGHRFRALAPLSEETRALRALVRTRDDLVKARTALTNQLNAQLAAFWPGAAVLFQRVDSHIAIAFLERYPSPESAVHLGERRLQAFLRRNAYCGRKPAAELLGRLEAAPRGLVGAAESEARSECVKALVAALKTLLPKISELEGAIAVALDEHADGAIFKSFPRAGEVNAAQLLAEIGDVRERFQSDDVLAMEGGVVPVTKRSGKARGVGFRWACNKRLRRALTTWADNTRHASLWAAGIYARARERGADHPHATRILARAWLRVLWRCWQDRVAYEPQRHLGAIRLAA

SEQ ID NO: 411527 - protein, 370 aa, unidentified
MKTEPTPSVVPTATSAIVVPGGFTLGLDLGDRCHHVCVLDATGQIVREAALPNTRPALAQLLAEFPHATVAIEAGTHSPWISRYLTELGAHVIVANPRKLHAISRSERKCDRRDAQMLARLARVDRALLHPIQHGSAQAQHDLLGLKLRDALVRTRVNLINAVRFTLKSLGHSVRNPSSESFHKMVLADVPTDCLPVVQPLLTVLAHVTEQIKGMERDLVQCSKRDYPATQRLQQIAGVGPLTALCFVLKIGDPQRFSRGRDVGAYLGLCPRRDQSGSTDKQLRISKCGDGLMRRLLVSAAHYVLGPFGPPCALREHGQRLTGTGSAREKKRAVIAVARKLAVLLLSLWKHGTDYEPRVTTSPALVLTPA

SEQ ID NO: 411528 - protein, 374 aa, unidentified
MKKKVRFLGLDVHAQTIAVAIAEPEGDVRSLGTIANHAESIRKMVKKLGPTEQLRACYEAGPTGYVLYWQLAELGVACEVIAPTLAPMKAGDRVKTDRRDAERLARSYRSGDLTAVWVPDEGSEALRDLVRARESAKLDQLRARHRLSKFLLRSGQRPAMGVKAWTLAYMAWVRQLRFQQVAQESTRLDYLHEVEHMGKRVVRLEQAITEAVKLASPAIQEVVKGLQALRGIAQISAVTIAAELGNITRFESARQLIGYSGAVPSEDSSGKRMKRGSITKTGNAHLRRIAIEAAWSYRLRPGVGPALRKRQEGVPEEIKEIAWKAQQRLHKRYSRLAAAGKDQRKIITAVGRELLGFAWAIGIKTESAVIRISD

SEQ ID NO: 411529 - protein, 400 aa, unidentified
MRTVFGIDVSKASSEVAILVNGERVHGYTMPNDIIGFSRLMEDLKTVSNPEIIFEATGVYSRRLQAFLEENSYDYTRLNPLEAKKQLDGLRVRKTDKIDAEKLASSQFVLNRKPTYVQEEVYQNLHDLSRFYQNLTEDIVRTKNRLHKVLQVAFPEIENLLSTPTGEQYWNLVSIFPTKHWVLELSEVELKEAIRNSTSKRISENRVGNLTEKLVGLAKQSYAGISKTSPMVEEVKYDAQELIRLTNRREQVLQQLIALAEPLPEYKILLSIPGIAETTATSIIGELGDIRRFKSANQINAFIGIDLKHYESGDFLGQEHITKRGNPYARKILYKCIHNIASASHTNPCHIADFYEKRKRQSTIASTKPHTIASIHRLIRTIYYLITHNKLYDYSLSQNR

SEQ ID NO: 411530 - protein, 467 aa, unidentified
MSPRSGKQFRTSDQLGDLTVTQRHAAGIDIHAAIDFVSVDPADVPSGFVPTNRKLPPGVRSFGTNTGELEALAAWLKDCGVTTVAMESTGNYWVTLYDLLASQGFEVYLVDPRQTKHAPGRPKSDVLDCQWIRRLHSYGLLTASFRPGDDIVRWRGFQRQREMLIRYAAQHVQHMQKALEEMNVKLTEVVSDIVGGTGLKIIKDIVGGERDPLQLAKHRHSACKASEAEIASALYGNWRSELLFILEQTLKLYEFYQKQLHVCEKRIEECLRGMKDRSNGAPLPASLRTRKAEKNEVRFGARALLFKIAGIDLTAIEGISETTGLVLLSEIGPDLSRFPHEKNFVSWLGLCPQHRGSGGKIYKRRTRRGANRAARALRMAAQGCHHAKNALGAFYRRIQARAGGAKAIVATARKIAERVYRLLKYGQEYVRQSVDAYETAYQLRLTKSLAKKAASLGYKLVAETVAP

SEQ ID NO: 411531 - protein, 348 aa, unidentified
MYPFYLGLDLHNRKTYAVLMDQHGELVDQREFPNEETTTYLEKVVPHETYAVLEATRNWPFMYDLLTEHVARVELAHPKELKAISTAAVKTDQIDARVLAHLARLNFLPTAYAAPVETRDLRLYVRHREKRVQDRTQSKNRIHAVLASYNLRSPFTNLFGKAGRQWLQEILDSDLLRPAAKRVIRDHLAQIDQLDEQIASLENDLVLTPEQHAAVKLLKSMPGVGPIIATTIVAEIGDVRRFNSPKALCNWAGLTPRIRSSAGITRHGHISKEGSPFLRTAMTQATMIASRISPRWRLVYENLSKRCGKKGARVAVARRLLTVAYYMLKRNQPYQEDYSQPSAGDRGA

SEQ ID NO: 411532 - protein, 347 aa, unidentified
MLHAGLDLSRRKLDVCLLSESGEQLDQLAAPPDADALRTLARRIDEAYREPVAAVIESMTGARLVHDTLEQEGWDVEIADAQKVKGLAPLACKTDKIDSRVLAVLSHRDLVPAIWLPDPRIREERELARFRLHLVKHKSALKNRVHSTLINFGKPCPVTDLFGVEGRALLARLQVPQPWRGNITASVELIDDLEGQIAEINRKLRERHADHPYIPLLLSAPGIGWVLAFTIAAEIGEIERFPSPEKLAGYTGLCPRVNQSGDKDRRGPLTKHGPTYLRWALLEATMHALKHPAYAQRYQRNKRRLGKQRGAKVAQVDIARRLAHAIWHMLSRNQQFAPRGAAVRLAA

SEQ ID NO: 411533 - protein, 355 aa, unidentified
MSQEKYIGMDVHQATVSAAVRDRNGNLLMECILETKADTLLEFVQGLHGTLSLAFEEGTLAAWSHDLLKPHVNRVVVCDSRKAARLRDGNKSDRIDARNLSELLRTNQLKPVYHGEHGLRTLKELGRSYLTVSKEMTRTMNRIKSLYRSWAIPCAGTTVYAPRHRRQWLAKIAEPGARVRAEHLYEQLDHLQPILVRARRELLQESNQHDAVKRLRQIPSIGQIRAALLVALLQTPHRFRSKRQIWAYSGFAIETHDSGEYRYVRGKLQRNRERITVRGLNRNHNPDLKNIFKGAAISASSRPGPLQDFYETRVAMGMRPTMARLTLARKIAAITLTLWKKGANFDPQQLSRQAA

SEQ ID NO: 411534 - protein, 458 aa, unidentified
MKKAGVSKGAIKKGAVMTHVIEANAAGIDVGSTEMFVAVPVDRDPQPVRRFSTFTNDLVRLADWLKQCSITSVAMESTGVFWIPLFQLLEDRGFRVCLVNARHVKNVPGRKTDVADCQWLQYLHSVGLLRASHRPTQTICAIRSLWRHRESLVQIAAHHTQHMQKALDQMNIQLHHVISDITGVTGLAIIDAILSGERDPDKLAQLRNARIKASERTVAEALVGDYRSEHLFVLRLSLEAYRQYQRWITDCDREIEQQLSRIESKIDPVQHPLIRTKDDRRKPRGNEARFDLRNDLYRIFGVDLTDVPGVSSLTAHLLLTEVGADLSKFPSAAAFASWLGLCPDNRISGGKILSVRTRHVVSRLAIALRLAAQSLHGSRSYLGDYFRRMRARLGPPAAITAAAHKIARILYHLITTRQRYDESVFAVMEQRAKQRQISILKKRASVLGFALTPAGCVP

SEQ ID NO: 411535 - protein, 356 aa, unidentified
MSHDVKYIGMDVHKEAIVIAVLNGSGKLVMETILETKASSILEFLHGLRGELHVSWEEGTWAAWLYDLLQPQVQEVLVCNPRRNALLKEGSKSDKVDARKLADLLRTGMLRSVYHGENGLRTLRELARSYQTIGKDLTRVMNRLKALYRGWGIACAGTQVYAPRYREEWLSKIAQAGVRRRAELLYQQLDGLQALRRNLRPELLAESRKHKAAKLLRQIPCIGPIRAARLIALMQTPHRFRSKRQLWTYSGLGIETHDSAQYRYIGGQLQRSKKPQQLRGLNQNHNHEMKEIFKSTATRASCGAGPFHDFYAALLAKGMKPEMARLTLARKIAAITLTLWKRGERFDAEQLKTQAA

SEQ ID NO: 411536 - protein, 404 aa, unidentified
MFDIEGVGVFLGMDVGKTAHHGHGLTPAGKKVFDKPMPNSEPKLRAVFDKLKAKFGTVLVIVDQPASIGALPLTVARDAGCEVAYLPGLAMRRIADLYPGEAKTDAKDAAVIADAARTMPHTLRSLELTDEITAELTVLTGFDQDLAAEATRTSNRIRGLLTQFHPSLERVLGPRLDHPAATWLLERHGSPAALRKAGRRRLVELIRPKAPRMAARLIDDVFDALDEQTVIVPGTGTLDIVIPSLAASLAAVHDQRRALEAQINSLLEAHPLHPVLTSMPGVGVRTAAVLLVTVGDGTGFPSAAHLASYAGLAPTTRSSGTSIHGEHAPRGGNRQLKRAMFLSAFACMNADAASRTYYDRQRARGKTHTQALLRLARQRISVLFAMLRDATFYESRTPTVTLTA

SEQ ID NO: 411537 - protein, 387 aa, unidentified
MSRNARVPVPATTLDQDSTLVVVLELSARSWLVGARVPGIGRMSRYALAPSAEALAAWLDTAKARAGTAGRMVVRVVLAYEAGRDGFWLARYLEARGVEVYVIQPSSVLVDRRARRAKTDALDVEMLMRTLLAWLRGEPGVCSMVPIPDVAEEDGRRPVRERQGLIGERLALLNEIDGLLATLGITGYRPLRRDRRAQLAALRTPEGDPLATNAAARIGRILDRLELVMQQIAELEQVRDAVLAKEVASGEAETMIRGLARLKGIGAELATVLVWGAFVRSFPSRKALGAYAGLTGTPFASGSTTREQGISKAGNRRLRSSLVELAWLWLRYQPDSKLAAWFRSRTGSAGSRMRKVMIVALARKLLVALWRFCRDGVLPEGAALKAT

SEQ ID NO: 411538 - protein, 460 aa, unidentified
MPRAKPRVASFPTLQPHAAGIDVHAAQHWVAVPPGSAPPHRRPPRRDLLPPHVRAFGACTADLHALADWLGECGVTAVAMEATGVYWIPLFELLERRGFAVILVDPRQTRQVTGRPKSDRLDCQWIQRLHSCGLLAASFRPADDIVVLRGFLRQRQRLVQDAGRQVQHVQKALEEMNVKLTEVVSDIVGVTGLAILQAIRRGERDPAALARLRHPRCRASEADIARALGGTWRAEHLFALDQALAVYETYQRLLGACDERIAACLRGFTDRSGGRPLPAKRAHSRKATALHVDARSLCHRLAGVDLTAIEGIDEATALVVLSEVGPEMAKFPTAKHFASWLGLCPSHRGSAGKIASRHVRRGCNRAAKALRLAAQGCHHAKNAMGGFYRRIQARCGGPKAVVATARKIAERVWRLLTYGADYVRLGEAEYAARYRRKQEKNLAKRAAELGYTLVPTAAPA

SEQ ID NO: 411539 - protein, 363 aa, unidentified
MQNSITWVGMDVHAENIVLAALRDSSDAVLFRAEFPNTPKGRERLAGRLAENAPVRCVYEAGPCGYELRRFLESKGIECDVAAPALIPRKPGDRVKTDRKDAEKLARLHRLGELATVFVPTPAQEALRDLLRTREDAREDLLRRRHRLSKFLLRLGRRYTEGARWTTRHWDWIREQTFTDHNAETVFHEYIVAIEQEVERIRRIEQQIVEESRSPEVGKAIARLRALRGVDTITAMTIVTEAIDLNRFRSPRELMAFIGVVPRERSSGGRERRGSITKTGNAHIRRVLIESAWHYQRLPAETPKTILVRREGQPPEVIETARKAELRLHRKFMKLLGRGKPKGIAAVAVARELAGFIWALGRG

SEQ ID NO: 411540 - protein, 441 aa, unidentified
MRRCFGLDVHREFAQIAVWEDGLVRQVGRVPATPEGFRLFADSLAATDEVALEATCNTHAIAKLLESRVARVVVSNPQRTRAIAEAKVKTDKVDAQVLAQLLAADYLPGVWLADEETHALRRQVARRANIVRQRTRLKNQVQAILHRNLVPRCPATDLFGLKGRAWLGEQELPADERQAVEALLRQLDFHGQELAIIDAQLSQIALSSDDVKRLMTIPGVDATVALSIVAAVGNFGRFHSPGQLVSYLGLNPRVRQSGGLPAAHGRITKQGRAHARGMLVEAAWSAAKIPGPLRAFFERVRSRRGMQIAIVATARKLTCLCWHLATKAEDYAFARPSLTAQKLRRLELRAGMPSQRGRKGTAGAYSVKEVRRRELELAAQAEHAYRQLVADWQAKAPNNKVGAAAANGARLLGHQTGQAARQDQAPDPALRSGVGHAHIPA

SEQ ID NO: 411541 - protein, 318 aa, unidentified
MQTSIVFIGVDVGKFELQVAAFDGEIVTGVLPNNRSSIVGWLKRLPATSVIAMEATGGYQELLARTAHERGFEVYVLNPTHVHHYAISLGNRGKTDRLDAAVIAQYIAQHHKKLHRYEPISPELQEVRALQALRSTVVRVGTSLRLSAQRHGCVSSHQKKALASLTAWSEQLEREMIAKIKAQSDWAKTYGLLTGICGIGPITGVALTSLFSRIDFASSDAAVAFCGLDPRPNESGRKVGRRRLSKQGDKAARTLLYNAASSAARTEQFKDYYAMLRVRGLASTAALVIIARKLLRIAYGVWRTGHPFDPEKLRPTTA

SEQ ID NO: 411542 - protein, 392 aa, unidentified
MIYVGIDVASDKHDCCIIADSGEILRDTFTISNNREGFESLSKAIVSFSSDKKFEDVRIGLEATGHYSTNLINFLKSKGFQMTVFNPLHVNLFRKARSLRKTKTDKTDARFIAAMLFSDDSKSYTPVSYQISELKSLVRNRFRLISFRSKLKVSVSRLITVLFPELHTAVWSVNQSSSYALLLEFPTAQAIAECHLTRLTNILSDGSNGHYGKTKAVKIKELASNSIGTNSRAMGFELQQTIRLIDNLQAEIDAVDKQIKEVMKEINSPILSIPGISYTLGSIIIAEIGDISNFGNPAKLLAFAGLEPSIYQSGKFTAGNTPMVKRGSTYLRWAFLTAARLVVMRDNTFKDYYKKKISEGKHHFVAISHVGKKLLRVVFQLLKTNSSFIPQI

SEQ ID NO: 411543 - protein, 527 aa, unidentified
MWWRVARLKRAELDPDGEFVCMSPTEPSLANPTIEVKFAMAKRKLSTFARLQRGQKLSRRERKDIERQFQREDPGWEVVHEKVAGIDVGNESHFVAVDPQLDTHPVREFGSWTAALRETAEWLKGLGIKRVVMQSTGVYWIPLQDVLERAGLEVAVVDARGTKNLPGRKSDVQECQWIRKLDLYGLLRDCFQLPQTLRAVQTLWRLRQRWVMEAGRAIQQMQKALIRMNVQLANALNDITGKTGLAIIRAIVQGERNPWKLAALRDVRVRATEEEIANSLAGNWRPDVLFELQQVLAAYDFLQQQIRECDLQLQKEMQAQPTRPPQGEAAIPLETVAGAGRAKNGRRAKPKKAKKNQPAFDLQVELKRVMGVDLTRIDGINVMTAQTVYAELGPDLAAAFPTEGHFSSWLMLAPKKDVSGGKVIRHYSMHARNRVAQALRMAAESLHDSHSYLGARYRSLRGRLRYGLKAVKAMARYLACLIYRMLAQGEAWVDRGAAYFEQKRQERELHHLQHRAAAIGMQLVAAK

SEQ ID NO: 411544 - protein, 353 aa, unidentified
MVAEGRGLVVVAFLFDLVNPNSCVGFEPEFARRGEGSMKDEAGAVVVGIDVSKAFLDVSVLPLKKAWRVSNDTAGVEGLVKDLTEAAPALVILEATGGLEAFVVGRLAEASMPVVIANPRQVRDFARATGRLAKTDRLDAEVLAEFGRAVRPSPRPLRNGEQEQLRALMVRRQQLVDMLVAEKNRLRTASALVRPSIESHIEWLEKQQRDLNRDLNQFIKGSPLWQAKAKLLTSAPGVGPTMSAGLLAWLPELGNLNRHEIAALAGVAPFNRDSGTLRGKRMVWGGRSELRALLYMATLTAVRYNPPLAAFYRRLRLAGKPGKVALTAAMRKLLVILNTMVKTNAPWRLSTET

SEQ ID NO: 411545 - protein, 425 aa, unidentified
MTRPQLTPPAGVLVAIDVAKARNEVLIEVPGSSRRRRVSVLNTRGEYDRLIALLSELGQPVTCGFEATGNYHRPIAWRLLQAGFAVRLISSVGLARTREALHNGWDKNDPKDAQVMLHMIRIGASQVYHDPLAAGINDVQELSKTHDAVSRAKTEVLHRILTHYLPLYFPEVDRFRHNSRSDWFFAFLDRFPTPASITALSKEAFIDAAWDVVGRKVAKAQLLGDIYETARSSIGLPVPPDAPAVSMFRLVIGEVRGLIRQRDAIEAAAETLLSESADYKLLRCIPGIGPINALTILAEAGDLRRFSHHRQFLKFCGLDLATQQSGTFRGQTKLSKYGNARLRRTLWLAGQVAIRQRENGFRDKFERTIARDRHDADLRRKALTAITAKMARVVHAVIKTGADYRPFVEGPVPGGRTPLSRAVRA

SEQ ID NO: 411546 - protein, 416 aa, unidentified
MFAVGVDVANGRSMVAVLDGMRNMVAKPFEVAHTAQGFAALVEKLRQLDGEVRIVMEHTGRYYESFAMTMHRAGFFVSAVNPLLIKNYQGSINVRKVKTDKADAQKIAQFALDKWTILPHYTPMDTIRYNLKTLHRQFQLASKTKTALSNNLIALLEQSYPGANRYFDSPVRTDGSQKWVDFVDTFWHVDCVAMSSEHAFVERYRKWCKRHGYVFSEQKAIQLHADARQKIPLVPKSDTCKLLVREAVSQLNAVSRTVETYRAEMDRLASQLPEYETVMGMTGVGKSMGPQLMAEIGDLRCFAHQKSLVGFAGTDPIKEESGDKVSQSAPSSKRGSPYLRKTLFVIMTILLQLQPQEDPVYQFLDKKRSEGKPYYVYMTAGGTKFLRVYYGKVRDCLKAKGLWEVPASASQEVNPG

SEQ ID NO: 411547 - protein, 370 aa, unidentified
MKVTTVGIDLAKNVFQIHGVDAHGKAVLKKQIRRDQLMLFFTNLPACLIGMEACASAHYWARRVQECGHTVRLMAPQFVKPYVKTNKNDAADAEAICEAVARPNMRFVPIKTESQQAVLAVHRARQSFVKARTAQANQIRGLLAEFGLVIPQGIAHIAQRVPELLDSDTCALPGPFRLLVLRLMEHLKLLDQHVRELETQIQTWHRDNPASRKLAEIPGVGPITASALVASIGDAKNFENGRQLAAWLGLVPRQHSSGGKSTLLGMSKRGDSYLRTLLIHGARSAILAAQRKPDTDSWLSRLLGRRHPNIAAVALASNAHMTRAFLLARATAAMLGWRRPSRRLSQLSVSGFRCAARMADRAPWMSSVRR

SEQ ID NO: 411548 - protein, 421 aa, unidentified
MNQLTDTVYTAYVGIDWADTKHDICVQAAEGGLREFDCISSQPQGIESWALDLYRRYGGPIAVALELSKGPLVTALQKYDFMVLYPINPLQLARYREAFTPSGAKDDPTDAELAVDLITRHPERFAALKPQSVSMRKLIGWVEKRDKFSADQGRVVNRLGHALKQYYPQVLEWFNQHNTVVFCDFLNRWPTLMQVKRARKASLERFFKSHHVHSAPLIEKRITAIKAAMSLTLDPAVIEPHRLQVEILIEQLRITIKALKRFDDEIAATAQKLPDYELLFSPLPGAGHILAPRLLAAFGEDRKRYPHADALQMYSGIAPVTKRSGKKTWVHWRWQCPTFVRQTFVDWAAQTINKSAWAGAYYRQQRAKGCTYQVAVRALAFKWIRILHRCWQNRTPYDESKYLETLRRKGSPLLSYLAETV

SEQ ID NO: 411549 - protein, 316 aa, unidentified
MTEDAICVGVDVAKSTLDLAISNSKETRQFDNDHKGIIKAVRYISGLKPTIIILEATGHFEMPLAAELQTKRLPVVIVNPRQVRDFARATGELAKTDRIDARILALFGLQIKPEVRLLPDQKAREMSSLLARRRQLVEMLTAEHNRVLQADDSIRQGIRVHIKWLKDALSTINDDLDRQIRSSPSWREKDDLLKSVPGVGKVVSTTLLIELPELGQLNRRQIAALVGVAPLNRDSGTLRGRRTVWGGRAKLRAVLYMAALVGIQRNPVITAFYQRLLKAGKAKKVALVACMRKLLTILNAMIRSRSVWQNILVEAK

SEQ ID NO: 411550 - protein, 339 aa, unidentified
MGEVSTIGLDLAKSVFQVHGVDRHGAVVVRRSLRRPQVLDWFAKLPPCLVGIEACATAHYWARELRRLGHDVRLIPPAYAKAYVRRNKNDPADAAAICEAVGRPSMRFVAIKTERQQAAAGLHKVREMLVKQRTMLTNQIRGLMAEFGIVAATGTRHFGELVAQLAIPDDQRVPAPLRQALLGMAEVLRAVTKKIACIEQEIVAAGRDDATYRHLITAPGYGPILSSAMAAMVVDPAVFRGAGDFSASLGLVPRQEGTGGRIKLGRISKRGNGYLRRLLVNGAMAVLSSRRARQDPWLAKLLASKPRKVVAVALANKMARIGWALMMRQEDFRARPAAA

SEQ ID NO: 411551 - protein, 412 aa, unidentified
MNQDKLYVGIDVSSKNNVCYLMYSDGSKHISFSVPNNRNGAKIIVDRVTSVLLLQDIPKVVIGMEATSVYGDNLMRFLRESGSLGRFERSLHMLNPKQVKKFRDAYSDLPKNDYVDSFVIADHLRFGRINKEVYMDDYKYQALKMYTRARHQLVQELTREKQHLLNTVFISFSGLTQEKIFSDKFGATSMALIEVFSSLDELAYMNTDELADFIRKHGKNHFENPEEIAEAVQRAAKNSYRPPQVIADAAKQMIVISMNTIRLLQKQIKEYDKAIEKMLEMIPQTLTSIKGIGNVYAAGIIAEIGDINRFPSQASVAKYAGLVWTQHQSSDFEAEDKRMIQGGNHHLKYYLCEAANALRRCDPEFKRFYSLKYKEANKHNHKRALALTARKLVRLVYTLLKTNRLYIPPEEY

SEQ ID NO: 411552 - protein, 373 aa, unidentified
MPRYSTAFGMDVHLRSTTVCALDAETGEAVARRFRGNPWGEVAEWMSGFPGPSLAAYESGYLGFAPQRELSALGVDCVVAAVSKVPRSAADLSSKNDRNDAARMAKAILSHDITPVWVPSPEIEGLRDLAAAHDAATARLAAAKQRLLAFLARRGYVYGGTTPAGNPRKYWTYGFLRWLDGIHPADDGGIRALAALRNEVEAADETREALLAEYRAAVAAGPLSAEVEALQSIKGCGFALAAAFAAEVGDFSRFRSGRQVTAYFGLAPKQRSSADSVRLGGISGAGNALVRRLAVEGSWRYAQAGHQPKLMPKGSGVPLEIRMHGRKGSERLLRRREEMLERGMPQAKANAATAAELVRWLWALGMMCREAGE

SEQ ID NO: 411553 - protein, 357 aa, unidentified
MDESKQLDFSGQDIYVGLDTHLKSWRVSIMVGETVYKTFSQDPNTKLLNRYLVKNFPNANYFSAYEASFSGFKTHRDLLALGIKNMVVNPADIPTTDKERKQKEDSRDSRKIAKQLSQNDLTAIYVHDIEVEGDRQLIRFRKTLTKEIARTKNRIKSQLYYFGVEIPTQFSETKYWSKRFTNWIQDVELPSESAKLSLIGYLEMAEEFRKKQYSVTKEIRKLADKQKYKENYNLLVSIPGIANITAMILLTEIGDITRFTNLDKLCSYIGLVPTTNSSGEKERTGNITVRRNKILRTAIVESSWIAIRNDPALMLAYQKLIKRMEPQKAIIRISKKLVNRILYVLKNKKAYVYAVVK

SEQ ID NO: 411554 - protein, 382 aa, unidentified
MQPINTVNPTIYLAIELSASTWLIAARLPGSEKPHLHRIEGGDTAALFALISSLRARVARRLDAAIGVVCCFEAGRDGFWLHRLLTAHGVANYVLEPTSILINRRARRAKTDRLDAIGMLRVLAAYLRGDRQSCSMVRVPTPEDEDAKRIHRERENLVQDKLRIENRIEALLFTQGIRKRPSLRSWERDLAVLRTGDGREMPRHLRAELDRLRRRLVTILELIREVEAERDEVVTTNPEHQTSRKIVALCRIRGLGENFAGVLTREVFYRSFDNRRQIASYVGITPMPYQSGSMDRDRRISRAGNPRARTTMIQLAWLWLRYQPGSELAEWFRKRVGTLAGRTRRIAIVAMARKLLIALWRYVETGVLPAGAEIRPESVAAA

SEQ ID NO: 411555 - protein, 490 aa, unidentified
MARLLEHSPRPESTYRPTWAVVFGKAEKMQDSDKRKDNADSSKQIAGLPVVRHKVAGIDLGSERHWVCAATVEGSGREVADFGATTCELIRMAKWLNARKVESVAMESTGVYWIAPHEVLEAEGLEVMLVDTRQLARVPGRDKKSDPFDCEWIQRLHSCGLLMGSFRPKEAVCMLRTLVRDKGNLVAEAGDWLRRMQKSLDQMNVRVHRAVSDIDGVTGMAILRAIVDGERDARQLAKLRNPRCHKSEEEIAEQLSGHWREDHLFSLRQGLKMYDAIQERITDYEKEILQKLAKMEREECRGQEVPKSKKPQKGRAIQSRGAEPMRQALYRMSGVDLTGIDAIGVETVQVVLSEYGPDLSRFPTEKQFVSHVTLAPHKPTSAGKPVKKKKRNSASTRVAAALRMAASSLRHSETALGAYYRHIARRIGGDVAVFATARKLATIIYRLLRWGQPYVDEGAQTYEQRYRENRIKSLTARAKELGYQLTPTTA

SEQ ID NO: 411556 - protein, 412 aa, unidentified
MLFIGDDWAEGHHDVVVQDEAGKMLARRRLPEGVEGIARLHELIASCCGEDSDPDPAQVVIVIETGRGPWVKALAASGYRVYPVNPKQAARHKETIAVSGKKDDFFDAAGLADMGRTRRHQIRELAADSDIAEAVKIAARAHQKLVWERTRHLLRMRSALREYFPAALEAYAALTLAGADTLELLGRAPDPASAAKLTIPQITAALKRARRHGSLTQRARDIQAALRTPHLAQPKVIAEAYAAAVKAGAAVIMILNEQVKVMEAKVSEIFRRHPDAGIYLSQPGIGDITGARILGEFGDAPGRYATAKARKNYAGTSPLTIESGKKRTVHARYIRNRHLIDALHAQAFTALTASPGARAYYDELRARDVDHDDALRRVASRLTGILHGCVKAGREYDEAIAWSHRTGLTQAA

SEQ ID NO: 411557 - protein, 407 aa, unidentified
MNAVGIDVSKGKSMMMALQPMNQVVLKPREYSHTKAGLGQMAHDILRLGEETRVIMEATGRYHEPVAAALHEYGIRVTVMNPLFIKQSGGGSIRKVKTDKADAKKIAKYGLDNWMDLREYAPVETIREQLKLVSRQFNLYMKNVVALQNNLISLTDKVFPGVNEVFSSKDRADGSQKWVDFITTFWHCECIALVSEAVFTERYRKWCKRKGYHFSGTKAAELYIGSIGHITTLPKNSNTKLIITTAAKELASAKSTLAVLRTEMNRLARQLPEYDTVRAMYGVGEKTAPQLMAEIGDVRRFPRRSSIVSFAGVDPAVDESGKHISKSNPITKRGSPHLRKTLYQIVCTYLKKSPTDEPVYQFLDKKRAEGKPYFVYMTAAQNKFLRIYYARVKECLIMASVQESSES

SEQ ID NO: 411558 - protein, 318 aa, unidentified
MNIIGLDISKDTIDATLHKTNGSIHYIKFKNNDDGLKQFRLWIKGNRIRKAYIGMEATGIYYEKAADMLSSYYTVYVINPLKIKDYGKSRFNRTKTDKADSNLIADYIKRHQDTLIPYQIPKNKALQKLINLKNQLQQQQKQIKNRLHSTEEDFIRNIHQDLIDTIQDKMEQVKIAISEQIKKQTDYNHYRNLQTIPSIGKDTALVLYAQLTEKHFKTANQFVSYAGLSPAIIQSGTSVRGRGRLSRYGNRRLKSTLYMPALCAYRFNAFPKLINNLKKAGKPKMVIIVAIMRKLAKLAYYIVKTGQPYDAERHRLNQ

SEQ ID NO: 411559 - protein, 357 aa, unidentified
MNNSNTNRPRLSIGLDLGDKRSRFCLMSDTEEILVENSVAMTRHAVSRVFSKFERARVVIEASTHSAWVQEVIQDSGHEVIVANPREVGRKYLSKTKKNDRTDARTLAHLGHVSEFFLSPIKHRSRDCQVDLTLIRSRDALMKTRTLLINHVRSTVKIFGERLPSCTADAFSRKVLPDIPSYLTETLVPMLKQIGAITQQIKKFNKKVEELCETKYPETKVLRRIPGVGPLTSLAFVLTLEDPKRFQKSRQIGAFLGLVPRQHDSGDVSPQLRITKAGNEHLRRLLVSAGQYILGHFGEDCDLKRFGERLSARGGKAAKKRAVVAVARKLSVLLHMLWSTGQVYEPFHSTTQRKKAS

SEQ ID NO: 411560 - protein, 313 aa, unidentified
METAPLYIGIDVAKEQLDIAIGAEGETWSVPNNETGIETLLRDLRSRNCALVVLEATGGFEIPVVSALAAAGIPVVVANPRQVRSFARATGQLAKTDRLDARILALFAERIRPEVRALPDDAARLLDALITRRRQITGMIVAEHNRLGFTPAPLKKSIDKHIRWLQRELDGVDGDLSKAIQASPVWRAKEALYRGVPGIGPVISRTLIADLPELGRLTRREIASLVGLAPFTHDSGAMKGKRRIFGGRASVRSVLYMAAVVGIRHNPVVRAFYCRLREGGKPPKVALIACAHKLLTILNAMARTSESWRGQHA

SEQ ID NO: 411561 - protein, 457 aa, unidentified
MVREARVIVGPGVREHPLLLPEVGFHLGARLLDFDDVNSTPTTQPGGGMEVLYGKCAGLDVHKDSVVACIRMQEGPQASYRIETFGTTTQALLKLSEWLIEYSVTHVAMEATGVYWKPVWHILDGEFELVLANAMHIQNVPGRKTDVKDAQWIADLLAHGLIRSSFVPPTTIQDMRLLMRTRKQLVRERGQHVQRIQKTLEDANIKIASVVSDITGVSGQAILRAIVKGETDPDQLVAVTTGRLKASAATLREALRGRIRQPHRLLLKLHLDQIESIEKSIADVDREVGALLEPFRAKSKRLTTIPGVSDVVAQVIISEIGTDMSRFPTAAHLISWAGLCPRNDESAGRRRSNRLRPGARWLKTTLIQAGWAAARGKTAGYLPAQFRRIQSRRGPQKAVVAVAASILTAAYYMLRDDVDYRDLGPAHFDSADREKVAARLVKRLATLGVKVQIVEAA

SEQ ID NO: 411562 - protein, 415 aa, unidentified
MALKIVYKICCGIDVHKTFVVACIASTNDKGVTSYESHRFSTYTSGLKTLLQWLLDRNCKDVCMESTGKYWIPVYNILEKDCSIVLAHPKYVKAIRGKKTDKKDAKWIADLFKHDLVSGSFMPPADIRQLRDLMRYRFKLTCFKSSEKNRLQNCLTVSNIQLGNVVSDTFGKSAQAILDKILEDPADTSFDLEPLVFKSLKKKLPELRDAIDGYITPEQAGKLKVIKAHYENLEARKAELEELILALAAPYQQEFAILQTAPGISSDFTAIGIISEIGTNMEAFPSAKHLCSWAGLTPTNNESAGKKKSVRVSKAGCYIKPLLVQCANAVVKSSKHPEMRNRYLRLKKRRGHKKAIIAIARMLLTALYHMLKNGENYNAELYRKSDLPPVDREITVEQAILIARNQGYKIKSATA

SEQ ID NO: 411563 - protein, 409 aa, unidentified
MVSDFRKGRYNLMKIYVGIDIAKLNHFAAAISSDGEIIIEPFKFTNDADGFQLLVSKLESFDKNSLIIGLESTAHYGDNLVRYLVTELYQVCVLNPIKTCQMRKNNVRKTKTDKVDTYVIAKTLMMQDNLRFVSFFDLDMMDLKALGRFRQKTIKQRTRLKIQLTTYVDQVFPEIQYFFKSGLHQHAVYALLKEAPSPKEIASMHMTHLANLLKVNSHGHFTKEQAKELRVLAQKSVGANDSAISIQITQTIQQIELLDSQLEKIEAEMTDIMKFNDSVIMTIPGIGYINGGMILGEIGDIHRFSNPNKLLAFAGLDPSVYQSGNFQAKTTRMSKRGSRVLRYALVNAAWNVVRNNATFKAYYDAKRLKAGLTTMHLGIVPANLSESSGRCSPTMSNLTSNKRSVYQYR

SEQ ID NO: 411564 - protein, 453 aa, unidentified
MKRCFSLNLKTKKMKTKKAKSNAFPIIYPNAAGIDISSKEHYVAVNPSSCDTPIKAFGSFTEDLHSIASFLKECNVDTVAMEATGIYWVSLFLVLEDAGFDVVLVTAKHVKNVRGKKTDVSDSDWIRQLHSCGLLSASFQPDTFTRKLRAYMRHRKNLIEMSATHIRMMHKALEQMNIKLQHVIADITGKSGQAIIEAIIRGERNPTELYAYCDGRIKAEKKESIIKSLNGVWKEEHIFELEQSYSIFNFYHAKIKECDANIEKHLREKSGIDTFEEVKLKAKSNKNNLNFNAKEILQELTGTDLSEIFGITESNAIEIISEVGLDMNKWPTVKHFTSWLNLAPNNKISGGKILSSRIPKKKNHAGQIFKMAAFAIQRSKNWLAMFYHRIKAKKGAPKAIVATARKIAAIFYKLVKEKLKFNPLPIEKYMDGFKEQQIKKLKRQAQTLGFQLV

SEQ ID NO: 411565 - protein, 345 aa, unidentified
MIIGCDFHPSWQQIAWLDTETGETGEQRLVHAGGDAERFYRQLAAPALIGMEATGNSHWLVDLLSELGHEVWVGDAGQIRASYVRQQKTDKRDAAHILKLLAEGRFPRIWVPSSAVRDLRQLLLHRHKLVVIRARVKNELQHLCLNKGVQRQRKLWTKAGQKVLRELPLKRWAGRRRDDLLGLMTMLDEQIEPLDEAVKAEAQRDKMALLLQTQPGVGPITALAYVLTMGDITRFPRGKQVASYLGLIPREHSSGGRQHLGAISKQGNRMLRMLLVEAAQTAVRLDPGFRKEYQHRCHQKPKAVAKVAAARKLAVRLYWMLRTRQGYPEVVRIESSPRVRLVGEN

SEQ ID NO: 411566 - protein, 354 aa, unidentified
MTIVAHSRPFVVGVDTHAKNHVYAIVATGTGELLETRDFPTTSAGINRSIAWIARRTGADLDTLWVIEGAGSYGALLAGAVGAAGYQVAEAARMDARHGVGKSDPLDAHRIAAAVLPLEEQQLRRPRLNEGVRAALQVLVTARESMTTERTRSVNALTALLRANDLGLDARKPLTGTQIADVTRWRARREPLALSVARSEAVRLAKHITGLDSDIKTNTSRISGLVEISEAAPLLQETGFGPVTAAICLTVWSHHGRVHSEAAFASLAGVSPIPASSGNTVRHRLNRGGDRTLNKALHLIAMSRMTFDTETIGYVEKRQAEGRTKKEIRRCVKRYLARRIYRTLNALNPRHCHP

SEQ ID NO: 411567 - protein, 314 aa, unidentified
MILPLRCVGIDVSKHTLDIFDDAAGKPERIANAPRPITAQVARWRCGNVFVVFEATGVYDRELAEALHRAGVRFARINPARARDFARAQGRLAKTDEIDAHMLASFARTMAPACEPAPDPARNALSLRAKRRDQLVHIRAQEKNRRSEARDPAMIESIARLIDFLDGEVKAIETRIKALIKTEPTISDDARLIRSAPGVGPVACMQLIALMPELGHVGPKQVAALAGLAPLNVDSGQYRGKRAIGGGRKRVRDAVYMAALNAVRRDPSLKAFYQKLRTAGKPAKLALIAAARKLLITLNAMMRDRKTYLAPRPS

SEQ ID NO: 411568 - protein, 449 aa, unidentified
MMVPQEIEDAEYEQVLERVAAVDVAKATGMVCTRVPHPARPGRRQTKVWEVDADTGSVMELADHLAGERIGKVTLESTSDYWRIWFYLLEAAGLDVQLVNSRDVANVPGRPKSDKLDCVWQAKLTERGMLRPSFVPPAEIRRLRDYTRLRTDLTRERTRHWSRLEKLLEDALIKVTAVASKTGSKSVRDMLEALIAGERDPEVLAGLARGKMRAKHDRLVEALTGRFDDHHGELARVLLDQIDSLTTHIDKITSRAGELIAAMPGAWGVDADGVTGPGAGLGSGAPVLPAVARLDEVTGIGAAAAQVIIAEVGLNMGVFPTPGHLVSWAKVSPRTIQSGAKNQSGRTGKGNPYLKGVLGEAAAAAGRTATFLGERYRRIARRRGKLRALVAVARSILVIVWHLLADPAARFRELGTGYYASHIDKNRKTRSHVRQLEALGYTVTLAQAA

SEQ ID NO: 411569 - protein, 433 aa, unidentified
MPTNHPYDLVIGLDRSDRKADLHLIDTRTGTVQKQTVATSPEALHDWLAQLRQDHLQDRVAICLEQPAANLIVFLETYSWITLYAINPISLQKFRETFVTSRAKDDGKDAQYLAELLLSHHDKLKPWQPDDSQTRQLQQLVLHRRAVVDQRTGLTNRLKALLKQYFPQALELCGEDLWRPLATAFLLKWPTLQSLQKARKESLKQFYYRQGSRSQTLIEQRLERIEKAVPLTEEIALLQSYTLRVQLLCKELQLLLKTLEQFDQQTAQVFQQHTDRQIFEALPGAGPVLAPRLLASMGSERERFARPENLQSFSGVAPVTKQSGGKCYIHRRYCCPKFLRQSFHEYAKESILHSRWAAAYYGQQRNKGCGHHTAVRALAYKWQRIIWKCWQTRTVYKEAIYEAALKKNKSPLVGLLDQIELGKSPVKTRAKKS

SEQ ID NO: 411570 - protein, 337 aa, unidentified
MRQIKFFIGTDVSKEWLDMCIILEGEVIHRLQIKNTVAAIHKWFKQTQKQYGYLVENSLFTMEYTGIYNHHLLEVLHQAGANIWLVPGLEINASRGLQRSKDDKEDAKLIAEYATKNLKKVRLWKKPRTVLKQLAALLMIREKLMTSKHQYETTLKEYKSFSAKEEYLIIKDYSGVMLKTIRQELKTIEHQIKETIKGDERLKELNEYITSVDGVGIITSANTIVETNEFLDISEAKKFSNHSGVVPHKDDSGKKIKKPKVSHKANKKMKKLLHLAAMSVIRKKGELKDYYERKIAEGKNKMSVLNAIRNKLVLRIFACVNNKKKYEKNYVYSLVKP

SEQ ID NO: 411571 - protein, 366 aa, unidentified
MEQSTEIFIGIDVSKARNAVAVASGGRSGEVRFVGEVDSSVESMRRLIKRITAKHAHAHFCYEAGPTGYGLHRLIVSMGFSCSVVAPSLIPRKAGDRVKTNRRDAVALARLLRADELTAVWVPDESHEAMRDLVRARAAAVETLCVHRQQVSAFMLRHGRIFPRKTAWGARHLRWLQEQKFDHPAHQIALQEMVEGVRISKERVERLEAAIKEFIPDWSLAPVVQALQALRGIDLIVAVTCATELGDLSRFHNPRQLMGYLGLTPSERSTGDTVRRGGITKAGNGRVRHLLIESAWTYRHRSPHSPARPNPRVNCLTVRFCLRGLLASAFSQRANCSANASRSLGRSGALNFGYRSNPKAQRIHDL

SEQ ID NO: 411572 - protein, 439 aa, unidentified
MARKRRERPLLVRNQACLPRSLPVSEQEGDFVAAVMIGVDPHKGSHTAVVAGAAGEQLGRLRVRASAEQAQQLLAWAAAWPERTWAVEGARGLGHMLAQQLVAAGERVLDVQPKLGARVRLLASGDTNKNDPDDARSVAIAAPRSPACRQVQPDDHAAVLKVRAERHRDLGRLRTQVACRLHAVLCELVPGGVRKEITAAHAARLLEAAEPSGAAAVARRELAGDFLEDLRRLDAQMSQTKKKLAAAVKESGTTLTGLSGMGPVIAAIVIAEAQDVSRFSGRDAFAACNGTAPIEVSSGKRKVHRLSRRGNRRLNHAVRMAAITQIRYGHSEGRAYYHKKLAEGKTPKEALRALKRRISDALYRRLRADARRSAAGSAQVTGPGGQPGNDTDASAAGSHPGHRLFGTATPGPGPTLRPAPAAQPEKRSSRASKKMPRTT

SEQ ID NO: 411573 - protein, 371 aa, unidentified
MKKHNSCTRSPKGRAKARPGSITIGMDLGDKASRYCEVNGGGETIQEASVGTTKKAMTQVFGSRPRCRVAIEVGTHSPWVSRLLKSLGHEVIVANARQVKLISQSSRKDDRLDAQTLARLARVDPQLLRPIQHRSEKAQGDLMRIRVRAALVDTRTGLVNTARGLAKAMGERLVVCDPDALNMERLEELPAGLRDALEPLVKMVEALTAQIKHSEAEIGQIARDRYPETALLRQVSGVGTLIALTFVLTLEDPQRFRKSRDVGCYVGLRPKRSESGESQPQLRITKEGDRYLRKMLVQGAHYILGWRGPDTDLRRWGLKLAERGGKNAKKRALIAVARKLAVLLHRLWTTAEVYEPLRNSQAREGRRKAAA

SEQ ID NO: 411574 - protein, 352 aa, unidentified
MIIIGVDFHPGFQQIASVDADTGEFQEKRLGHREEAETFYRALASQKVRVGMEASGHARWFERLLAELQIELWIGDAAEIRTRRVRKQKTDRQDAQLILKLMLKDDFPQIWVPGWENRDLRQLLWHRHRMVQARTRIMNQLQAVALNEGLRCKKRLWREHGRQQLEAFRLAPWASRRRRDLLELMDRLNPTIAELSQAIEQEVEKCPEARRLMTHPGVGALTALAFVLILGKAERFGSGKQVASYLGLVPLEDSSGNRRRLGHITKQGSSMMRFLLVEAAQVTVRSVPEWRSKYLHLMMRRGRKTAKVAMARKLAVRLYWMMRKGWDYEQWKKFGSHAGQPGNRDGVQSNTE

SEQ ID NO: 411575 - protein, 394 aa, unidentified
MNQDKLYVGIDVSSKNNVCYLMYSDGSKHSSFSVPNNRNGAKFIVDRVISVLLSQDIPQVVIGMEATSVYGDNLMRFLRESGSLGRFERSLHMLNPKQVKKFRDAYSDLPKNDHVDSYVIADHLRFGRINKEVYMDDYKYQALKMYTRARHQLVQELTQEKIFSDKFGATSTALIEEFSSLDELAYMSTDELVDFIRKKGKNHFDDLEGIAEAVQRAAKNSYRPPQVIADAAKQMLAISMNTIRLLQKQIKEYDKAIEKMLEAFPQTLTSIKGIGNIYAAGITAEIGDINRFPSQASLAKYAGLVWTQHQSSDFEAEDKRMIQVGNHHLKYYLCEAANALRRCDPEFKRFYALKYKEANKHNHKRALALSARKLVRLVYTLLKTNRLYIPPEEY

SEQ ID NO: 411576 - protein, 345 aa, unidentified
MEIHTIGIDLGKTVFHLVGINAAGETVMRKKCSRQQLLHFTANLHVRLIGMEACCGAHFLGRALREQGHEVRLMPAQYVKPYVKTNKNDYIDADAIAEAVGRPKMRFVPIKSDAQLEMQSLHRVRESWVGRRTSVINQIRGLLLERGITIRKGRRHAESTLPQILEDADANLSGRLRMLLAQLQQELRQLQSQIDEIDVDIVQACGEQEACQRLMAIPGIGPITATAIVSAIGNGADFKKGRGFSAWLGLIPGQYSTGGKQRLLGISKRGNSYLRKLLVNGSRAVLQSREKQSSGLRVWLGKLVSRAHSSVVTVALANKLARMAWAVLAKGETYRPPLLAEAVAV

SEQ ID NO: 411577 - protein, 358 aa, unidentified
MEYGAIDLHKKESQIRIVMESGEIVDRRIATTRERFTAVFWGRPRMRILLEASTESEWVAQHLETLGHEAIVADPNFTPMYSHRSRRIKTDRRDVAALAEACQRGFYRAAHRRSAPQRTVQSQLNVRRELTDSRTRAISLARAIIRGAGFRMRSGSTGSFLDRVAALDLPPSITETLLPVRTLIAVLSEELTSADDRFAKLVMEDPVVSRLTTLPSIGPITASAYVAALDDASRFGRAAQVASYLGLVPREHSSGELQRRGRVLRSAHPAVQSLLVQAAWRMSRSKDPRTAGLRAWAQSVARRRGKKVAMVAMARRIARILFAMWRDKAPYDAARIRPTRAMLATPNVHDATRLVVNG

SEQ ID NO: 411578 - protein, 348 aa, unidentified
MTVYIGVDFHARQQTISYLTSETGEIQQLILLHQDPAVVRAFYAQFAGQRVVVGFESSGYAAWFEELLEELGCEIWIGHAFYIRQFAKRRQKNDRRDADLILELLVKGDFPRIHRYSQGTREMLQQLRYRQRLVKMRTMAMNMLLFMASSRGVSLRTQLSSKRGQARLAQLPLPQPLSSQRDELLQLLRDLDEKIKVVERWLEQATKADVAVQRLQTHPGIGLLTSICVRYTLEQVDRFTTSRKVSAFAGFDPMQDQTDERNRMGAISKQGSRWLRFYLVEAGQIAIRTDADLARVYKRICMRGGHAKAKVAIGRRLLVRAFIMLRDEIDYDEFLRRGVAARSSRGTA

SEQ ID NO: 411579 - protein, 348 aa, unidentified
MYPFYLGIDLHNKKTYAVLIDKAGAVIDEREFSNDETTKYLDKVVPSETYAVLEATRNWPFMYDLLSQHVERVELAHPKELKAISSAAVKTDRIDAKVLAQLARMNYLPTAYAAPPETRDLRLYVRHREILVQERTQSKNRIHAVLAGYNLRAQVTDLFGETGREWLQGMLDGELLRFVARRVIEDHLSIIDHLDRHIEALSKDLKYTTEQKKAVKLLKTIPGVGQIIATIIVAEIGDIQRFHSPKALCNWVGLTPRIRSSGGITRHGRISKEGSPILRGAMTRAASVASRRSKRWYLVHEKLIKRCGKKGAKVAIARRLLTIAYCMLKRNQPYQENYGQQVPVARGA

SEQ ID NO: 411580 - protein, 310 aa, unidentified
MQDTIGIDISKDTFDAYRLSDRRHERFGNDRAGLKALLRWIGKAPVRVVYEATGRYHRDLEAVLGRAGHSLVKVNPTRARRFAQATSQGAKTDRVDAAMLARMGAVLDLDATPVRSETMHEIRELHIARLALNKDRTACRNRLEAARNKVVLAQLRARLRQVDSQLEQIDAELARLVAEDPALARRQAILRSIPGIGAVTAIAMIVEMPELGTMEPKEAASLAGLAPITRESGKWKGRSKIGGGRRGVRNALYMPALVAIRHNLHLAETYRKLVDAGKPAKLAIAAIMRKLVILANALIRDDRKWTETAP

SEQ ID NO: 411581 - protein, 304 aa, unidentified
MNGIGIDVSKRRLDVGTSDGQTLQVSNDPSGFAELDLWLRERPSNQIVLEATGGYEQPVLDFLYKAGHPVVRANALRARKLAQGLGQRAKTDRLDAYALAQMATLVKLPAYQPLEPWQQKLREFVRARRQMIQALAVARQQQEMVGDRELRRLLQANITHLKTLVKRLGNQIAEQLAQQPQLTVLKSMKGVGPVVQAVLASYLPELGHISGKAIASLVGVAPMSHDSGTMRGKRSIHGGRAEIRQVLYMAGMSALQHEPRIRDFYRSLRARGKEAKVAIVAVMRKMLVILNARVRDAQSGPIPA

SEQ ID NO: 411582 - protein, 487 aa, unidentified
MTNQKVFANTGKWNQKQRKEWARRLKADDAGLEVVHRDAAGIDVGNEMHYVAVPPDRDANAVQSFGCFTEDLRRMAQWLKQCGIRTVAMQSTGVYWIPVYDMLEAEGLEVYLVNARHTKNLPGRKSDVQESQWLMKLHTYGLLNNSYRPPSQVLVLRAYWRQRAEHVQGAAQSIQRMQKVLTEMNLQLANVISDISGVTGQAIIRAILAGERDPHELAKLRDFRIKASPEQIAKSLEGNWRRELLFLLGQHVEMLDAYQRRIAECDRELEAELKNWAARESGQQNPAAETVAGVERKEPESKARGRKNKKKSTANAPRFDLGSELQRINGVDLTKIDGIHVMAAQTVLSEVGYDLSRWKTEAHFVSWLGLCPNNEISGGRVLKRRTRHVVHPLATALRLAAWGLFRSQSYLGAQYRRLRTRLGAPKAITAMAAKLARLIYRMLKFGEEYVDKGMQYYEQKYRAQQIQFVQKKAAQLGLQVVEYKATA

SEQ ID NO: 411583 - protein, 355 aa, unidentified
MRTRIWKTVGLDVGDRRSFVYALDAEAELAWKGTISTTKAGMERHLGGRPRLRVVMEAGTHCHWLSWCLEGLGHEVVVADPRRVRQAVRHERKSDERDARFLAELAASGVAPKLLRPVQPKTAEQVADRALLMARRALVRARAGLIHNLRGLVKAVGHRLPSKSPGSMHKLDLSALPKGIASLVAEVMPVLQRMTEQIRQFDRKMEAIAETRYPETQLFRQVHGVGPITSLAYRLTLGDPKRFPKSREVGAYVGLAPGRHQSGDSDPQLRITKAGNPMLRSLLVQCAHYILGPHGQDSDLRRFGERIIERGGRFPKRRAVVAVARKLAILLHRLWITGEVYDPLRNTQAAAASSR

SEQ ID NO: 411584 - protein, 314 aa, unidentified
MAEDKVYVGIDVSKAWLDIAFHPGQESWRIENTQKGIRTLIKRFQGLQIEQIVVEATGGYEAQLVEKLSLAALPVSRVNPLRVRKFAQGLNWFAKTDKIDAKVLALFGEKAQLRQVVLPSVAEKRLSALLKRRKQVLDMLTAEQNRRELAEKDVQTYIEKVIQVLKKQLEDLDTQIRDLIDQTPELKQKQDLLQSVPGVGKVLSATLVSQVPELGCCDRKQIAALVGVAPFNHDSGKKRGKRMIRGGRPFIRNVLYMATLSATRFNPIIQVMYQRLLKAGKQKKVAIVACMRKLLTILNAIIRTRTAWQPAFNS

SEQ ID NO: 411585 - protein, 430 aa, unidentified
MNLKPIAGIDVSKYFSEMVVISPANEILARLTIHHNNPSDFDRAIEILKKVEEDFAARPTIVMEATGHYHKILSRFFTSNGWDVAIINPIQSNSIKNAGVRKVKNDKIDALWIALTFRLTNSTLAQPSSEILGCLKNLCRQYYNLSDELTSYKYRLTSCVDQIMLNFKEVFPDICSKTSLAILENYPTPNDILSADSEKLISIIQQTSKKSYQWAKEKYELLIEKAKQFKPFSISDLANVTMLKVYINMVLTLQQNIDKIFEAINQLVQQSLQTQPSISENINLLQSIPGIGFLTAATILAEIGDFEKFSKPNKLVAFFGIDPSVNQSGQFVGTKNKMSKRGSKILRRILFTIALANIRTKRDSKPCNPVLLEYYQKKCQQKPKKVALGAVMRKIVCIIFAVMRDKKPFELRTPEEHIQKCFNKTAVCCV

SEQ ID NO: 411586 - protein, 363 aa, unidentified
MPQPAGLPHPSPDYDRTLVLAIELSSKSWVLAAQVPGLAQVKAKRTIEPTKEALLEALASYRARAAAAGHQIERVVSIYEAGWSGFWLARWLITQGVQVHVVQPSSVLTDRRMRRAKSDGIDAELLLRTLLAWLRGEPRVCSMVPIPDQTDEDARRAVRERGELVAERVGLVNRIGAVLATLGAGDYNPLLQSRRRRLNELRTGLGEPLPAHARAKIERLLARLELVLAHITELERERDAVAETAAPDHAARMIQQLAGLRGIGVQSATVLVREAFVRRFANGKALGAYAGLTATPYSSGELEREQGIGRAGNRRLRSVMVELAWLWQRYQPGAAQVVWFANASARQEGGFARSWSWRSHASS

SEQ ID NO: 411587 - protein, 453 aa, unidentified
MTKRKTGGHPDLKMVNPNAAAIDIGSTMHMAAVNSDSDIMPVRAFGTFTQDLHDLAAWFRSCGVTSVAMESTGVYWIPAFEILEAHGFEVILVNARYAKNVPGRKTDVSDAGWLRQLHSYGLLRGSFRPAAEIATLRAYMRQRERLTEYAAAHIQHMQKALMEMNLQLHHVVSDITGATGMRIIRAIVDGERDPEVLAAFRDIRCHSSLDTIKAALVGNDREEHVFALTQSLELYDFYQEQIEACDRRLEAAVGALTARADGELAPLPKARIKGRLHNAPSFDVRAALYGVLGTDLTQIHGLGPSLALKLVAECGTDLRAWKSAKHFTSWLCLAPGNKISGGKLLSSRTRRSSSRAAALLRLAATSIGRSDTALGAFYRRLSSRIGKQKAVTATARKIAVLFYNAVRHSMTYQDQGAAAYDERHRQRVLSNLQRRAKTLGFALAPIPKPVAVS

SEQ ID NO: 411588 - protein, 342 aa, unidentified
MQITTIGLDIAKNVFQVHGIDAAEKVVVRKQLRRGQVMKFFAALPPCLVGMEACATAHYWARELTKLGHEVRLMPAKDVKAYVKRNKNDAADAEAICEAVRRPTMRFVRAKSAEQQGRLMQHRTRDLLLRQQTQAINALRAHLAELGIVAAQGREGLKQLLTIIADEKDARLPIDARASLIVLAAQLQALQTMIGSIEKRLMAQHRASEESQRVETIPGIGIIGATAITATVTDPTAFRSGRDFAAWIGLVPCQDSTGGKHKLGPISKQGDRYLRRILVVGAHSVLRRAKQNPEKYPWLTQLLARRPFKVVAVALANKMARMAWALLAHGGTYRAPQLTAAA

SEQ ID NO: 411589 - protein, 343 aa, unidentified
MNINVLGIDIAKNVFQLHGADGSGKKVLKKRIERNNLSEYIATLPSCTIVMEACGGSNYWARTFQRHGHTVKLISPQFVKPFVKTNKNDANDAEAIVEAGTRPSMHFVPIKQVEQQDIQSIHRVRSRLMKNKTALINEIRGLNLEYGITIPQGEAKVKRCLRSIIDDNKNELTILSRGLMQDLYDELIEIEIKLKKLEKNIQIICKENDQCRRILSIPGVGPLTSTAIVAAVPNANEFKNGRHMSAWLGLVPRQVSSGNKQVLLGISKRGDKYLRTLLIHGARSALSFTKHKDDPYGNWLIAKKESLTFNKAAVALANKNARIIWSLLKTGDEFNRDKKMVAA

SEQ ID NO: 411590 - protein, 347 aa, unidentified
MQMIGCDLHARQQTLAVLDTETGVLEERVLEHTGNNVRDFYRSLPRPARVGIEATGSMHWFLEMMEELGIECRVGHPAKIRACEPRKQKHDRRDALLLLTLLSEDRFPSIWMPSLDQRDVRALLTYRHQWVRIRVRVQNALQSIALSHGLRRGRAMWSKAGLAAIRSLPLPPYSTERRDALVDLYLQLQEEIDELDKTVAECAAERERARLLMTYPGVGPITALATESILGDPARFADGKAVASYVGLIPSEFSSGGRRQILGRLTKQGSPMLRFLWCEAVGHAIRKDEQLKRFYRRKLAQKGFAKAKCAAGRKLGIRLWIMLRDNISYQEFCRRARQQTDVPCGDA

SEQ ID NO: 411591 - protein, 420 aa, unidentified
MSPLSDQPFTAYVGIDWADIKHDICLQAAGGTRREFDCIAHQVAHIDEWASGLYRRFGGPIAVALELASGPIVAALQKYDFFVLFPINPLTLARYREAFQPSGAKDDPTDAELALDLLLRHPERFSRLRPQSAGMRSLMSLVVQRRQLVGDKTRFANRLCDTLKQYYPQALEWFDDRDTVLFCDFLARWPTLAAVRHASRKTLETFFHAHNCRRARLIGTRLESIHAATPLTEDPGIVAPCRLHVLALVEQLRTVLTAIGRFDREIAALACTLPDYALFHSLPGAGPQLAPRLLAAFGEQRDRFHGADEVQKYSGIAPVTQRSGKKSWVHWRWQCPKFLRQTFVEWAAQTINKSFWAGAYYRQQRAKGSSHQVAVRALAFKWIRIVYRCWQTRTPYDETTYLNALRKRGSPLLENVGLPG

SEQ ID NO: 411592 - protein, 349 aa, unidentified
MANLNQFCDFTKLIGIDIAKSVFQIYSCDTQTGEITNVQIKRDKVLESLANCGKCLIGMEACGSSQYWARKLQTLGHTVRLMDSKLVKPFVRHNKSDKADAEGVYHALVSGVRAVAVKTETERDIQTLLTMRALLVKQRTARINHVRGLLAEYGHVMPKSVDQFDKKVDECINSLEGDAVQLVIDMLRDTVKSIRDEHDRIKTLQREISRLANQTRNAKHFLTVPGIGETIMAYMCVLLADPTQFSSGRQFAAYLGLVPMHTGSGGKTVTTKIPGRCDKALRALLVQGQVEIPDRLGEKHFGKETQEGGNGCHRQPHGTPVLGGGKQGTGLEKDARYGSIGERGNARRD

SEQ ID NO: 411593 - protein, 423 aa, unidentified
MKVVYPICCGVDVHKRFFVATIIISDGLTPHYQKRRFSTFNNQILAFKAWLLENNCLDVCMESTGKYWIPVFNLLEDSINVTIANPKWVKAVKGNKDDAKDSKWIGDLFRLGLVPGSFIPCKDIRILREFTRYRFKLVSNKTGEKNRYQNVFTVCNIALDSVVSDMFGVSASSITDYIVNSDTVDLEHCVSLLKRSLKKKADEVVEAIDGFQMTDSQKVRARMVKEHYDFLLNQIAKIDVAIDELAAPFEPAIDLLCTNPGFDRQSAITVLSEIGTDMSQFGSSKRLCCWGGLTPGNNESAGKKKSVRITRAGVYLKPMLVQVAHAAVKSKKTPYYRIKYEQISKRRGKKRAIIAIARMILTATFHMLSTGEVWNPVDLQQIDMPPEMRERELQKSLRKAAKLLVAHGVVDPKDFYIPETVPA

SEQ ID NO: 411594 - protein, 425 aa, unidentified
MKNNILSTLFVGIDVSSKTNVLCALDFQGNKLLNLKASNNNPGAESMLKSILECLNSNNLKYAVIALESTSIYSVHVANFLSSHENLALFEPKVYCLNPKTIVNYRKSFVDMDKTDPLDAYVIADFARCGRITSSPWRGSQFLALQRLTRHRLHLVECITREKTYMISNIYLKFSQLAVLDKEDKPFSDKYGATSAAVLTEFLSLDDITYSSIEDLVAFIKEKGKNRFSNPNKTAKLLQKAARDSYRLDKVLYEPLNVSIASSFNLIKAFEREVKTIDKAIEKNIKGINTTEYQSLKSIPGIGPVLASGILAEIGSISVFGSHNALAKYAGLTWRVNQSGDYTSDNTSMTKTGNKYLRYYLIESANSVKNNVPEYNKYYLKKFGEVTTHQHKRALALTSRKLVRLIFGLLTKNQIYSSDKVGETQ

SEQ ID NO: 411595 - protein, 422 aa, unidentified
MLEETHDRDQVIQRVAALDVGKAELVCCVRVPGEGKRGRRLQEVRTYQTMTRSLLVMVDRLAELGVTRVVMEATSDYWRGAFYLLEAHGFETWLVNARDVKHLPGRPKTDTLDAVWLCKLAERQLLRPSFVPPRPIRQLRQVTRYRADLVAARTAEKQRVEKLLEDAQIKLSVVASDIFGVSGRAMLAALLAGERDPKVLAQLARTRLRAKLGPLAEAFTGFFTDQHAFLLAKMLARVDGLDADLADLDAKLAELIVPLAGAVDRLDEIPGVGQTAAHLLIAEIGADMTRFPTAGHLVSWAKFAPGVKESAGKPKGNGSTGHGNPYLARVLGEAAVAASKTDTFLGERYRRIARRRGKKRAIVAVGRSILVIAWHLLSDPEAHFHDLGAGFYDTRIGPERAKRNHIRQLEALGYKVILEPAA

SEQ ID NO: 411596 - protein, 371 aa, unidentified
MNSIVYVGMDVHKEQYTICCYSYETDKVEYKQTIPSDYKLVLKYMEQVRSRYDGEVTFVCGYEAGCLGYSLYHQLKDHAVDCKILAPSTMAVTNTHHVKTDKRDAANIARCLAFHTYSEVYVPDNDDNDVKEYIRMRDDQKLYLKKVKQQILAFVLRQGKRFEGGKTYWTIAYLKWLKTLELSDLQRETLNEYLMTYEYLTEKISRFDERIEELASVERYEEKVKHMSCLLGIKTHTALSMIVEVGDFERFEKAPKFASFLGLVPSEDSSDTRVNRYSITKAGNSHLRRLLVEAAQSYTRGNVGHKSVALKQRQKGNPPEVIAYADKANERLRRRFYKMTLNKGVNRNVAATAIARELACFIWGMMTEHVS

SEQ ID NO: 411597 - protein, 345 aa, unidentified
MNVTTVGIDLAKNVFSVHGVDLHGKVVLKKTLSRSKLLECFANLPPAVIGMEACSGAHHWARALRSLGHDARIIASRFVIPYRKSGKNDGNDAEAICEAVSRPAMRFVPVKSVEQQAVLSLHRIRSAVVAERTAQINQIRGLLSEFGLIMPKGRYPAQHHIPDILEDAENGLPGLARRLLHDIYQRIQALNRQILAYDREIENLARHSEPAQRLMTLPGVGAVTATALVASIADPAQFNNGRQLAAWLGLVPRQYSTGGKTRLGRITKQGDKYLRTLLIHGTRAVLAALRDKQDRTSCWLRELIARRGYKRAAVALAAKNARIVWAMLTRGEAYRTQPASQAVAT

SEQ ID NO: 411598 - protein, 426 aa, unidentified
MPNKLVAGIDISKAFSDICILSPENEIIVHTKINNDYEGMKSIDLTFKKLETDYNTQLVVIMEATAHYHQLLANFFRKLDYEIIVINPIQSNAIKNINIRKVKSDKTDAYNIALLYRLKNYSETETHADIIISIKKLCRQHKELTDEIVEHINRLTGFLDTSFPDFRKVFTDLQGKTALTILAEYPTVTAILDPELDKAKIINQIKTISHKSESYAIKKYDKLYQAARNSSEICISNLSTSILIQTTIAVIFSLQEALRAIDDEISRLSIVDEQFQINVKLLQTIPGIGEYTACVLLSEIGNIENFSKPKQLVAFFGLDPGVSQSGSYNRKNNKISKRGSPYVRTILHMLAKANVYSNRNREYPNPVMRDYFEKKIVDKPYKVVMCAVMRKMVQIIFAVLRDQKPFELRTPDDHQKMIRLNNKQAA

SEQ ID NO: 411599 - protein, 429 aa, unidentified
MICAAVERCAGIDVGKTFLAVCRMSGPLEGEARVEKQRFGTIRGELEKLRDWLKEGGITHVVMESTGSYWKPVFNVLEGSVKVYLANPQEVKTRKGHKTDDKDGWWLAHLLRHAMIHPSFIPPRPIRELRDLTRRRKRLLSNATAEKNRIQKILEDANVKLGNVLSDVFGMSGQLMLEALLKGDTAPGQIALLAQGSAKKKIPEILAALEGHQMSDHHRRMIRYSLEHLKFLEEQLQQMDRDIAEQIRAAGLEEQWRRLQTVPGIQDRSAANVLAETGADMQQFPTPKHLSSWAGLCPGNNRSAGKNKSSRTTGGNPWLRGTLTESAWAAAATKNCFLKDKFWRLTSKSGGKKPPALIAVAHNILNLVYQVLSTGQPYQERGAPPLQENQRQRMIRHHFHRLGKLGIAIPRYVADSFEPKSKTCMPRTQ

SEQ ID NO: 411600 - protein, 412 aa, unidentified
MKKKLIFATGNEGKMKEIREILGDLDYEILSMKEAGVDVDIVEDGTTFEENAIIKAKTVMEATGRYHEPVAALLHSEGIFVSILNPLLIKQSGAGSLRKVKSDPKDALKIAKYGLDNWSTLREYTPMEAIRQQLKLCARQCDLYNKNIVMLTNNLISLSDKTFPRVNELFSSPEKADGHLKWVDFYRSFWHCDCINRMSPDAFEERYKKWCKRKGYHFSTDAADALYAASCGSYTTLPRDNNAKLLVTVAADQLIALRENQSKLEAEMLNLCKQLPEYETVMAMYGVGKSTGPHLMAELGDVRRFPHRSSIVAFAGVDPGVVGSGKMQLSSVTTSKRGSPQLRKALFQVVSTYVKCKPENEAVYQFYAKKRDEGKPFFVCTTAAANKFLRIYYARVKECLNAVESATQVEEG

SEQ ID NO: 411601 - protein, 416 aa, unidentified
MDVLHPRCAGLDVHKRTVVTAARLVEDGKVNMEVRTFETSTAGLMALAEWLSSRAVTSVAMEATGVYWKPVWHILSSVGGFELVLANALHVKAVPGRKRDVSDAAWIADLQAHGLIRASFVPPREVGELRSLMRTRKQLVRERTSHTQRIQKTLEEANIKLDSVISDVLGQSGRAMLEAMIAGESDAKRLARLASPRIKAAPETLERALDGRLAEVQRLLLRVHLAQIDAVEASIATIDRHVETHLDPFRTAVEQVVTVPGMGVRSAMAVLAETGIDMSRFPSQGQFLSWACLVPRSDESAGKRRSSRLRPGGNWLKTMMVQCAWAAVRKKGSRFAALFERLSAKRGARRAICAVAAEMLRTIYHMLKDGTCYEHNRVSLHRQATPQEEAKRLIRRLARIGYAADIKPIPTPAPSV

SEQ ID NO: 411602 - protein, 495 aa, unidentified
MAVDLEREKRDKARTPLERLQVFLQTGPDLAINSSRENYMSKRRGKAKRVQKASNQEPENLPVLNRDAAAIDIGSEQHCVAVPPGRDTESVRSFGAFTIDLHAMAHWLKQCGIKSVVMESTGVYWIAPFQVLEQYGLEVLLIDARLAKNLPGRKSDVLDCQWHQQLHTFGLLRGCFLPVAEIMPLRSYLRLRDELVKASTQAVQHIQKALFEMNVQLANVISDITGETGLAIIEAILAGECDGKKLAELKHRRIVASKETIAKSLEGNWRPELLFALQTALDRYKFYQQQLAQCDDQIAQALAQLPTRELKVQTEPEKKTETSVRGQKLTPLEAELKRIAGVDLTSIDGIGEQIAQIILSELGPDLERSFQSEKHFSSYLGLCPGTKISGGKVLKRRSRKVKHRVATALRLAARSLHSSDSALGANFRRLKARLGAPKAITAMANKLAKLVYRLLVYGKDYFDRGSQMYEQKFRLQQIRRLQKQAKMLNLKLVPA

SEQ ID NO: 411603 - protein, 371 aa, unidentified
MKDTIKYVGLDVSKEKIAIAVADEGRDSARYWGMIPHNEYQILKVLKKLGEPHELSICYEAGPTGYPLVRLLTAHGYHCIVIAPSLMPSRPGERVKTDRRDALRLAQLLRAGELTSVHVPTSEEEALRDLVRMREDIKEDRTRIRQRIGKFLLRHNIAPKEPTRRWTVKYRLWLGRISLESASQRLVLQEMLHQMDEDEERLKRIETAIHEEATEGHSAPLIQALQTLRGVAEATATGIVAEVCSFARFGNAKAFMGYTGLVPREYSSGQSRWQGKITKSGNTHLRKLLVEAAWSYRYKPALQGEIKKRQQGQQPEIQSISWKAQHRLHRKYTKMLSKGKPSGKAVVAVARELSGFIWSIAREIEETRLHR

SEQ ID NO: 411604 - protein, 412 aa, unidentified
MDVFCGIDWAEDHHDIAIAGADGTLLARKRIGDNAAGLAALLELLAAHGDTPEDPVPVAIETPRGLLVACLRATRRPVYPVNPMAVARYRDRHSVAGRKSDPGDAEVLANVLRTDMHAHRPLPADSELAQAIAVLARAQQDAVWNRTTAHNKLRSHLREYFPGFLAAFAGTRDGILRPEARVILAAAPAPAAAGSLTLAQLRALLKKAGRTRGIDAEARRLREAFREQQMRQLPLVEQAMGRQALALLRQLDAACTSAGDLEHAAVESFNQHPDAGIITSFPGLGPLTGARVLAEIGDDRSRFSDAKGLKAYAGAAPITRASGKHKAVLHRKVKNNRLAAAGYIWAFAALTASPGARRHYDRRRDAGDGHAAAQRNLFSRLLGCLHHCLLTGTRYDEATAFPAAAASPNAAA

SEQ ID NO: 411605 - protein, 414 aa, unidentified
MSAEGGGGMEVVYPRCAGLDVHKNSVVAHVKVPEGSEARTFGTTTDAVLALADWPGKKGVTHVAMESTGVYWRPIYNVLEDAGDLELLVVNAQHIKAVPGRKTDVKDSEWICDLLRHGLLKASFIPSREQRERRDLVRYRTTLIRERADEVNRVQKMLETANIKLSSVATDIMGKSGRQMLEAMVAGVDDPAALAAMARGRLKDKHDALEEALVGLAGPHLRLLLKEQLGHIDELDRRINRLSEELEARLRPFEEALGRLDAIPGVARAIAQMILCEMGDDMSRFRTAAHLSAWAGLCPGNNESASKRKSGRSRRGDVWLKQALVEAAWGVVHTKDSYLGSMYHRIAARRGAKRAIVAVAHALLVIIYHMLRDGTDYQDLGRDYHDERSREAIARRLSRRLNALGYRITIEAAA

SEQ ID NO: 411606 - protein, 386 aa, unidentified
MQKLNDLSRSPSPLDPDGTLIAVIELSLSSWLVAGIVPGVERQPLKKLAVDESALLKLLHRWREEAAKAGHRIKRIAVAFEAGRDGFWLARWLSARDIEAHVIHASSVAVSREHRRAKTDRLDTELLKRSFLGWLRGERDHCKMVAIPTTKDEDAKRPNRERESLVGEQNRIVNRMKATLIRLGIRGFNPKLKKAAERLEGLRTPEGEPIPLNTLAELHRDMVRRRLVSDQIRQIENVRLEHLKQAPSDGPHAMVRLLARVIGVGIETADMLVQEVLSRNLRDRRAVARYAGLTGAPDESGAKRREKGLARSGNARVRRGMIQLAWRFLMFQKDSALVQWYRARTENAAGSRKTMVVALARKLLIALWRLVRDGIVPDGVVLRPAQ

SEQ ID NO: 411607 - protein, 315 aa, unidentified
MNQFSSSVYIGIDVSGSTLDVAIHDTTEHFSVDNEAVAIDQLVQRLIALRPTLIVMEATGKLELAVLKALCQAGLPAVAVNPRQVRDFARATGRRAKTDRIDAFAIAHFAAVIKPVVRPLNDVQTEQLQALLLRRAQLIDMLVAEKARLERAHVAAKESLNDHIKWLKQQLAVADKDIDSFMRSSPAWQQKEDLLRSVPGIGPGAAATLIAFMPQLGSLNRRQIAALTGVAPFNCDSGKHVGKRRIQGGRAIVRRALYMACIPALRFNPTIRAFYDRLRKAGKPFKVAITACIRKLIVTLNAMVHDSTPWRPSAD

SEQ ID NO: 411608 - protein, 419 aa, unidentified
MSFKIFKFNCCGLDVHKTWIYACIGITDSNNRTEYKQARFSSFSKGLHQLCVWLAKYNCNDVCMESTGKYWIPVFNILEQHKIRVTLSHPKYTKPMKGNKTDRKDAKWICDLYMCGMVKPSFIPPADIRELRDLVRYRFKLTCMITGEKNRAQNCLTVSNLKLDDVFSDVFGKSSRSITEQILQHPGEKFDVSPFVDSRCKTPIEEIQAVVDGNISKEQDVKLRQCLDHIDELQKHISEVEQEILRLSDKYEAALNLIRTVPGFDKNPMTAIQVLSEIGGDMPVFLTAKHLVSWAGCCPRNDKSDRKIKSTRISCTGSYFKPVLVQIANALIKSKKHFEFTTRYKRIKTRRGHKKAIIARCRMILTAIWHILTDLKPYTSDGFLESRPVKKEKVLTTSQALNLLRQRGYLIKDEPSPVS

SEQ ID NO: 411609 - protein, 394 aa, unidentified
MHKDTHCAVVIDCWMNKLGEVSFENRPSKFPAFVEDVRRICGTKEFVFGLEDTRGFGRNLAAYLVGRRFEVKHVNPAYTSAVRLANPIIYKDDSYDAYCVARVLRDMVDSLQDARHEDIFWTIRQIVKRRDLIVKSNVMNKNQLHSQLSYSYPSYRKFFALIDAKSAMCFWENYPSPEHVKATTPEKIYETIKPVHQALKLQRIHEILAMIEKDGDTRKDYQTERDFIVRNIVKEIRHNKELIAEIDDELRKLLPLTGYKLQTMPGIDLATEAQLISEIGDITRFPDSDKLARFMGLAPVQFSSAGKGKDQRCRNGNRALNAIFHFLAIQMVAISPSGKPRHPVFREYFEQKVKEGKNKPQALVCVARRLVRIIYGMMKTKTEYRPFEKADGKN

SEQ ID NO: 411610 - protein, 412 aa, unidentified
MDTLYPCCAGLDLHKDTVVVCVRRLADNGRLHKEVRTFGTVTRDLLALSDWLAAEGVTHAAMESTGVYWKPVFNILEGQVQLLLVNAQHIKQVPGRKTDVKDCEWIAQLLQCGLLKASFIPPQPIRDLRELTRQRTQLVGEKSAVANRIQKVLEDAHIKLGSVASDVLGVSGRDMLEAIIASEEDPQKLADLDRRRLRTKIPELQLALCGRVTDHHRFLVRLLLEHVHHLEGLLAQLSTRIEMVLAPFEEAAAHLDTIPGVDRRTAEILIAEVGTDMGPFPTADHLASWAGMCPGNNENAGKRQSGKTTRGSRWLRTTLVQAAWAASHTKGTYLAGQYRRLTPRRGKKRALVAVGHTILVIAYHLLKNGTDYQELGGDFFERLDPERLTHNLVRRLEKLGHKVTLEPKETAA

SEQ ID NO: 411611 - protein, 408 aa, unidentified
MDVLYPRCAGLDLGKDSLMACVRIHGHPVKQECRSFGTTTRELLALAEWLTSYGVTHVAMEATGTYWKGVWHVLEPEFTLLLANAGHIKGVPGRKSDVNDAMWIADLLAHGLMRGSFVPPTPIQEVRDLTRTRKQLVREIAQHTQRIQKTLDSANLKITGLISDVLGVTGRSVLRALIAGETDPERLAELARGTLKAKRPALRDALTGCVTAHHQRLLKLHLTLIEQLEAAVADLDRQLGDALAPFYEAVKRLDAIPGINTTVAQAVLGEIGLDMTRFPTHEALVSWACLCRRLDESAGKRRSTRTRKGACWLKTVLVQAAWAAVRTKDSYLRAQFLRLRARRGPKKAIVAVAASMLTGIYYVLRDGVEYRDLGANYFQTLDRSKVTKNLVRRLQNLGYRVELHKAAA

SEQ ID NO: 411612 - protein, 355 aa, unidentified
MYDLKHQKEKRSMDHFAGLDVSVKETSVCIVDEAGKVVREVKVASEPEALLSVLKNPAYRFKRIGLEAGPLSQWLFSALAEAELPVVCVETRHMQAVLKAQINKTDRNDARGIAQMMRVGLYRPVHVKTLRSQKLRMLLTHRKLLQSKAIAIENDLRGTLRNFGLKVGMVGTVKFEARIKELVENLPDLAVLVEPLLVVRRVLREQFVILHRRLLAIVRDDEVCRRLMTTPGVGPVVALTYRATVDVPARFRKSKAVGAVFGLTCSKYQSGEIDWSGRISRCGDEMMRVMLYEAAQSMLHSKKWSWLKAWAMQIARRRGKKKAIVALARRLAVIMHRIWVDGTEFRWTREQAVTA

SEQ ID NO: 411613 - protein, 388 aa, unidentified
MNYMGIDISKYKHDCFIMSDFGEIVNEGFSFANDAEGFKKLEQELALCGKGNVRIGLEATGNYGLNLKLFLEKIGFDFMEINPVLIKEHIKSTTLRRTKTDKLDAKAIAGYLLSKEYRSHQTEFYNTFALKQLTRFRSRLISIRSSYLVRMTNVLDCIFPEFKPLFENKFSVTALYILAHYPTPQAMANMNACSYDILRRKSRGRFSMDKFVTLKALAKNTVGVYNKCYGSQLKTLLDLHSQIDCKINEIETEITQIINELNPPTLSIKGIGEISAAVIISEFGDISRFENPNKMLSFAGLEPGYFQSGTQEHNGHMVKRGSPHLRSTLLNCCRALRLHNEIFAAYYRKKVSEGKPESVALSHMAKKLIRLIFALETTGQPFNPDKLR

SEQ ID NO: 411614 - protein, 392 aa, unidentified
MEVMVIHCCGLDVHQKSITACVLVGKLTSSRPKKTQKTFGTTTFDLRSLSEWLKELEVSHVLMESTGQYWKPVWNILEPEDFHLILANPQHIKNVPGRKTDMKDAEWIALLGRCGLVNASYVPDKETQELRYLTRQRSSVKQEKTKRVNEIHNILQRANIKLTSYLSNIFGKTGKALLTLFINGEKITEEVVAREIHGKVKASIAELVRAMDGCLSKCDRAFLNLHLQTILRLEEEISELNQLIDEYTEKFSDVYLRLIEIPGISKLTAEVILAEIGCTVNAFQTAENLASWAGLCPGNYESAGIKKRSNATKGNKYLKVALCRAGISAGRSKSGTFHSFFVKLSQRMPKAKAAVATAHKLLRIVYVLLKTGQRYDELIINKEKGSITTGMA

SEQ ID NO: 411615 - protein, 341 aa, unidentified
MNIITVGIDLAKNVFAVHGVNDSGKAALVKPKVQRADLLPLIAQLPPCLIGMEACSGAHHWARLFRQHGHTVKLMVPKFVAPYRMTGKRGKNDAADAAAICEAVTRPNMLFVPVKEEHQQIILCLHRTRQGFVEERTASYNRLRGLIAEFGIVLPQKVVCLRREIGAHLEELPGYANLCVGDLLAHADELDKKIDEYDRAIAKAAREDARSKRLMQRPGIGPVTASALLASMGSGHDFSSGRQVAAWIGLVPGQYSSGGKARLGRITKAGDGYLRSLLVMGARAVLNSLGDKQDRFSRWARSLQERRGYWRAVIAIAAKNARLAWAVLKYGEDFKLESGKD

SEQ ID NO: 411616 - protein, 341 aa, unidentified
MATIALFGLDIGKHSFHLVGQDANGKPVFKRQFTRSSLIHYLAQHPACRIVMEACCGAHWLARQLAGFGHQVQLIAPQYVRPFVTGNKNDFLDAHAICEAASRPSMRYVGVKTPEQQASSALHRLREARIADRVQTANQIHALLLEFGIVLPLGARGIMQAPDIVMNASADLPHAARRVLSAQYEHYRYLAELIAGLDSQIGAQAKADALTSRLMTIPGIGPITASQLAADAGNAQSYGSARHFAASLGLVPRQHSTGGKSKLLGISKRGDKSLRRLLVQCARVVMQNAAKWQSAVAQWTQQLMTRRHSNVVACALANKLARIVWAVLVKGKEYRPNPNAA

SEQ ID NO: 411617 - protein, 407 aa, unidentified
MIFVGVDWAEAHHDVYVQDEDGKRLGGGRLPEGVDGIARFHELVGAHAEDPGEVIIGIETDRGLFVAALVAAGYEVFAVNPMSTSRYRDRHSTSGAKSDPGDAKVLADMVRTDRHNHRPVAGDSEGVEAVKVLARAHQSMIWSKGRQTNLLRSTLREFYPAALVAFDDLASGDALEVLKVAPTPTLGAGLSRSKIAAALRRGGRQRRVDERASEIQAALRSPQLQASAVVATAMGSSASASVAVIATMVAQIAELAGELDSGFDQHPDAEVVRSLPGLGTILGARVLGEFGDDPNRYATAKCRKNYAGTSPITRASGTKRVVLARYARNQRLADAIYLWAFATLTASPGARAFYDSHRDAGDTHHAALRALGNRLVGILHGCLTHQSAYDETIAWGHRSEKDLTAAA

SEQ ID NO: 411618 - protein, 338 aa, unidentified
MKKRSSSQQSQKVRAKTKSAQGRVTIGMDLGDKTSRYCMLDNDGEILREGQVATTKAGIVEAFGSLGRVRIAIEVGTHSPWVSRLLQKLGHEVIVANPRQVKLITESSRKDDRLDAQTLARLARIDPQLLRPIQHRSEKAQGALMIIRVRAALIAVRTSLVNTVRGLAKSMGERLPQCDADQMGVARAVSLPPQLRQTLGPLLKEVESLTEKIKNSDREIEQIARKDYPETALLQQVGGVGTLIALTFILTIEDKDRFQKSRDVGCYVGLRPRRSDSGQSQPQLRITKEGDPYLRTMLVQGAHYIISRRGPDTDLKEESSCGGCAKVRDPASSAVGNG

SEQ ID NO: 411619 - protein, 316 aa, unidentified
MEVAPVFIGIDVSKARLDIAVRPSGARESIANDPSSIAELVERLGAIDPTLIVLEATGGVERQVVRALVGAELPIIVANPRQVRDFAKATGQLAKTDQIDAAVLAHFADSVRPALRPLPDEVSLQLRALVARRRQITEVITAETNRLSRTSKAVCKRIEAHIRWLKAELERVDTELDKTIRQSPIWREREDLLKSVPGIGPVISRTIVAELPELGTLNRRQIAALVGVAPLNWDSGTLRGHRGIWGGRATVRAALYMAALVASRHNPVIRDFYRRLRAAGKAPKLALVACMRKLLTILNAMLKHRLCWSPVVVGAH

SEQ ID NO: 411620 - protein, 357 aa, unidentified
MKEYIAFDCHKRYTLMEREQIKTGQRKQVRVEHCPGAIRQCLRGREPGTPVAVEATGNWYWIADEIEQAGLEPKLVHPRKAKLMMGMINKTDKLDVHGLNRLQRNGTLPTVWIPPRELRDQREITRARMVMTAHRTRLKNRILATLSKYGWAGTEASDAFGKKARKQLNEAVKQLPAETARVTEALLQQLDFVQDQIEDFEQRMRELVRDTPEMNQLKTLPGIGRILSAVIGLEIGVIGRFASAERYASYSGTTPRVHASGDKIRYGRLRPDVNHYLKWAYVEAAHSVCMHRRTYPERHVSQLYERICKKKGHPKAIGAVARHLAEASFHVLTRKEPYRDPGLKQGQSREVSARTTS

SEQ ID NO: 411621 - protein, 431 aa, unidentified
MSTDTSYEKRLYVAMDMGKNVHWLAAYEGPSLQVVQEPVKLRSHQAGLAQVRQWLDGWLGSGGYEQVVLGHEPSGIYHENWARALQQRYAEQPALEYRFLNPLLVKRQRDTRDSGRRRKTDALDLVAIAHCLRDGLGYPATLPTGAELCLASWTHQHRQLSRRQRHLALALLALLDHLWPGLLADVRRFQQSHAGLEPPVPLVHSKPLTRRRIQAILHHCPNPHEFLALGPAGIQAFFRQQVGRCGPDTATHAYRLVATAVLPPPEVAALLAAQLQQQAQAYQALTEQLADLAAQVQQFVPHTSAAVLTSIPGVSPLLAARYLGYLQHHRRFDRPQQVWAFAGFDPVLQESGDYRRRGRITRRGHPGLRDTLFLIGYHTAHHVPAIQQVYQQARQRGLGPVKATIHAARKANRLCHRLLYDQCLFDPQRSR

SEQ ID NO: 411622 - protein, 340 aa, unidentified
MTITTVGIDLAKNVFAVHCVDPHGKTVLVKPKVPRAALPELIASLPPCVIGMEACSGAHYWARLFRQYGHEPRLMAAKFVSPYRMAGKSGKNDAADAQAICEAVHRPHMRFVPVKDESQQAMQCLHRTRQGFIEEKTATYNRLRGLISEFGVIATQSTDALRHMVSEQKKSLPLQVQQCVDDLLEHAVRIEANIAEYDRILSHMAKTDHRSQRLMELKGVGPTTACALVASIGNAHDFKNGRQLAAWLGLTPSQYISGGKSKLGRITKAGDSFLRTLLVQGARSVLIGAEKRSDSFSRWVCSLVERRGYWRAVVAISARNARLCWASLHYGDDFRLHSVS

SEQ ID NO: 411623 - protein, 372 aa, unidentified
MSSYEIVGIDVAARTLVAIGERVTLAAAYDNTPASRSSLIQTLGRSRRPVRVVLEATGIYFVDLACELVAAGIAVMVVNPKAAHHFAEAILQRRKTDPVDAAMLREYGRRMDFVPWQPPRPELFGFRALTREVQALSKAVAAAKNRLHAVTATRLTPAALIRALERQIAHNQTLIDELVAAALAQTETDPELARLFARTDSVPGFADKAAVLVIGELAVLPPMTARQWVAQAGLDVREESSGTSLARRPRLSKRGNKRLRQTLFYPALTAARCCPAAGAFVERLVAHGKTRLQAIVALMRKLLHGLHAMWRNKNHPFVRSNGAIPSSRPEDRKSSARRASQGWPQATAGGGAQRPVCRTCPTVLGVKVPCAT

SEQ ID NO: 411624 - protein, 460 aa, unidentified
MAKRKESAVKIPALDIMGQVNPNAAGLDVGAEEIYACVPPERDPRSVRVFPTFTVDLYALADWLEACGIETVAMESTGVYWIPIYEILVSRGFEVCLVNARHLKNVPGRKSDILDCQWIQQLHSYGLLRASFRPPEDICALRALAHHRDNLIRYRAAHIQHMQKALQMMNVKLTMVVSDITGVTGLSIIRAIVAGERDPHELACLRQPGCAKTEEEIAKALEGNYRAEHLFVLKQALAQYDFYLGQIEACDTEMEAMYADLPPCDPDEIGSPPPKPRSRKTRKNQTHFDLSTSLYRVVGVDLTAIDGLDALTVHSIITRIGTDVTSWPTVKHFTSWLCLSPNNDKSGGKVLRSRTQKTQNRANLAFRLAAQSLSRSDSALGAYYRRMRARHGPAKATTATAHKLARIVYSMLKNRTAYADPGADYYEQQHRDRAIRNLKLKAAKLGLELAPVPAQSMAVS

SEQ ID NO: 411625 - protein, 407 aa, unidentified
MAAVMIGVDPHKGSHTAVAIGVAEEPLGELRVRSSASQADQLVAWAAAWPERTWAVEGAGGLGHLLAQQLVTAGERVLDVQPKLGARVRLLSTGATNKNDPNDAWSVAVAALRSATRREVTADDHATVLKVWSKRHRDLGRARNQVACRLHAVLCELVPGGISKEITAAKATAVLEQAEPSGAVEAARCELAAEFLEDLRRFDVQMRDTKKKLAVVVRAAGTTVTEIFGVGPVVAATVIGVVVDVSRFPGRDHFAAYNGTAPIEVSSGNRKIYRLSRRGNWRLNHAIHMAAVTQIRHRHSDGRACYDRKLAEGKTHKEALRSLKRRVSDAIFARLQADARRAAAAAAVEGPGGQPGNDSVASAAGLHPEHRLFGQATPGPESTLRPATVRRRPVAPKRISKNTPSTP

SEQ ID NO: 411626 - protein, 411 aa, unidentified
MELLYARCAGLDVHAKTVVACARIASGGAVMYHHRTVATTTQGLLELAEWLTAQGCTHVVLESTGVYWKPVWHMLEGQFELTLANAMHVRNVPGRKSDMNDARWLADLLAMGLIRSSFVPPAPIQELRDLTRTRKQLVREVARHTQRIQKTLEDANVKLTEAISDIRGTSGRAILKALTTGETDPERLVDLTTGRLNASRAQLVEVLRGRVTAHHRFMITRHLTQIEALEPAVTTIEARIGDALAPFRAAVNLLTTMPGLSETAAAVILAEIGDTVSPFPTAGHLVSWAGLCPRLDESAGKRRSTRTRQGAPWLKTTLVQAAWAATRRKNSYFHAQFMRLKSRRGPKKAILAVAASMLTDVYYMLHDGVEFHDLGAQYFVQRDHDKERLTTRLLRRLRELGVDIEVKEKAA

SEQ ID NO: 411627 - protein, 343 aa, unidentified
MKIIRIGIDLAKNVFQVHGVDRDEKPVWRKKLTRENWLKAVLAATEPDCEIGMEACGGAHQWAREFQKHGYTVKLIAPQFVKPYVKSNKNDANDAEAICEAMSRPNMRFVRPKSVENQDLQAVHRVRAEVSSHRKAKANQIRGLVSEYGLVAPRELLHLRKAIPCWLEDAENGLTGRFRRLLDGLWQDLLAMDKRMAELDAEILEIAKTDPVAQRLQQLRGVGPLIATAMVATIGDANQFTNGRQMAASIGLTPRQNSSGGKDRLLGISKRGDVYLRSLLIHGARSMMFASRSKDDRLSLWVKAIAARSHPNKAAVALANKTVRIAWAMMKNGTDYEPKLASG

SEQ ID NO: 411628 - protein, 365 aa, unidentified
MEWSAPSFIMGHPINRLEIATVENQITIIGIDLGKNWYHVVGIDQRGQPILRKKLNRTQLGTLAASTTKCIVAMESCPGSQYWGRRFAAHGHELKIMPAQFVKPYLKSNKNDFNDAEAIAEAASRATMRCVPLKNPEQLELQATHRVRQRFIVERTAVVNQMRALLLEHGIVIPVGRALFARRMPEILEDAENGLSVRMRSLIHRLRQRWLILDTEIAEVTTLLTDHAKESPLCQRAVTVPGVGPIVSTALVAAVGNAQAFRRGRDMAAWLGLVPRQYSTGGKSTLGRISKRGNIYLRSLFIQGAQALYIHMKRDRSRLGEWLRDIEKRSHRNVAIVALANKIVRICWKVLATGADYEPYPVRVV

SEQ ID NO: 411629 - protein, 352 aa, unidentified
MIVLGADTHKRSHTVAAVAAATGELLGEQTVQVGRRGFGALLRWARGLDGDRVWALEDCRHVSGSLERFLIERGERVLRIPTHLTAKARNSARQRGKSDPIDALNVARAALQEGLDAFPAAHLDGPELDVRLLVDHRERLVRHRVELNSTLLWHLHDLWPELRLPGGALFSKKWSTRIGRRLARAQQTMRVRIARDELRRLRELTQAINQLEREISELVGRIAPQLLGEPGFGPLIAAKLVGEIAGAQRFATPARLARAAGVAPIPASSGNTQRWRLDRGGNRQINAALHRVIVTRARCHPQTRDYIARRRAEGKTTREATRCLKRYLARRVWRLLQPPTPAQDMHTIKLLT

SEQ ID NO: 411630 - protein, 407 aa, unidentified
MTITCGIDWAEGHHDVAVLDDAGRVLARARIDTGVTGFSELMSLLAEHAEDPVLVPVAIETDKNLIVVALQAAGLAVFAINPRAVARYRERHGQSGKKSDPGDAALLADVLRTDRHQHRQLPAISPAGLAVKALARQHQEAIWALHQTTSRLRSVLLEFYPQALKAFPKLKHKAALTVLAAASTPELGAKMTRRKLVALLHRCGRRNDTALVEQIIADLTTPALRQPGPVETALGQTVVTLLGVLTAMHAAVEQLESALDVQFSQHQLAPILRSAPGLGPVLAARVLAEVGDDPNRFATANGLRAFAGTAPVTKASGRSRRVFARRVRNKRLGDACHWWAFAMLTKSPGARAHYDRRRAAGDNHNAALRNLANKLIARLWWCLQNNSPWDEIAAWNGNTKTATPVAG

SEQ ID NO: 411631 - protein, 448 aa, unidentified
MEIVYERCAGLDVHKKNVKACFTGPGRTGRRTKETRTYLTMTEDLLQLRDWLKEQGCTHIALEATGVYWRPIYNLLEGDFEVLVVNAHHIKVVPGRKTDVKDAEWIADLLSHGLLSASFIPAPPQRELRELTRYRTSLVEERAREVNRLQKTLEDTNLKLGDVVSDVLGKASRLILRAIVEGETDARQLASLAVGRVRADQQTLERALTGKVTAHHRFMLSQHLTLIENLDAAIRRVEEEIARRFTPQEPPTGAEDQSAPEPAVGAESASSEPSSEPLSWREAVQLIEQVTGISERVAQGLLAEIGIQMSQFPSAKHLASWAGICPGNHESAGKRLSGKPRKGNPYARRLLIQAAHAAAHSKNTYLSAQYRRIAARRGPKRAAVAVGHSILVIIYHLLRDRTPYQDLGGNYFDEHDRQMVQKHLVRRLERLGYQVELQPRAQDEEFLA

SEQ ID NO: 411632 - protein, 413 aa, unidentified
MRNLLEVCCGLDVHKEILIACLLRGGIDEEPEPIIKEFSTLLCGLDEFKRWIMENGCNNVAMESTGVYWFPIYNALESILYEDGQINIIVANPHHMKNVPGKKTDIKDAHWIATLLRAGLLAPSYIPPKEIRELRDWTRYRDTMIKELVGHKNRIEKYLQQCGFKLSTILSDIFGTSGRMLIHNLCQKGKLTDMDVKACLQGTLRNKSTEVQQAVAGKLSKHDQVFLTNLVKVMENCQKEIEEIERQITDCAEQYEPALCLLETIPSLQRRSSTIIISELGIDLSMFPTAGHLCKWAGLCPGDNESAGKKKSTRITKGNPRIKSVMVQCAWAATKCKNYFLRDWFYRLRARRGTKKALIAVARKLLSIVWHILTSGEVYAEERYEETRKNEEERRKQKLKAEATKLGYKLVPA

SEQ ID NO: 411633 - protein, 395 aa, unidentified
MRRDTKEVLAELVGKLKEKLDPKKVAATSAGERDQRGELRPNLDRLTVGVDLGDQWSHYCILGLEGETLVEGQLRTTQEDIAEFFQALNAARVVFEVGTHSPWVQEVICSCRHEVLVANPRLMEGSKRRKRKNDRIDAHKLARLGRVDPQSLHPMQHRSREVRQDLVVLRARDALVAARTELINATRGLVKSMGSRLPKCSSPSFAQKVEETVPVELRDALLPLVRMVATLSDCIQGYDEKIEKLGREKYGHTALLQQVKGVGPITALAYVLTLEDPNRFVKSRDVGPYLGLVPKQEDSGESQPQLGISKTGDTMLRRLLVGSAHYILGPFGPDTDLRRYGLRLCERGGKNAKKRAAVAVARKLAVLLHSLWVSREVYEPLRQGMSAMMTPAAAA

SEQ ID NO: 411634 - protein, 401 aa, unidentified
MWVRYSQKKISACLITVDSSGKAKQEVKNFGTFTKDIKKLKKWLLENNCPIVAMESTGIYWRPIYNILENDLKLILVNARHIKNVPGRKTDISDSKWLASLLRHGLLKGSFIPKAEIREYRDLTRLRKNYTESLGDFERRVHKLFETANIKIGSVVSDLFGATGRNLINLLCDENAKISINDVANCARGSLKKKVDELFISIEGFFKDHHRFQLKALMETITNLEQQISLITARLDEIMSIHQDLLDRLDEIPGIDRVSAQAILSEIGVTLDEFIVMEALACWGGLCPGNNESAGKRKGGKSPVRKHHFKTILIEVAWAAIKKKGSYYKAKYYKLKARRGAKRAIVAIAHRISKAIYRIIKYGERYKELGEDYLKNKMTNAAKINKIKQQAKELGFDLVAC

SEQ ID NO: 411635 - protein, 373 aa, unidentified
MDQHSRAFIGIDTSKLRNAVAVGEEGRGGEVRYLGEIDTTEAATRKLVTKLAAKYRQLTFCYEAGPTGYGLYRLIRKLGHDCIVAAPSLIPKKPGERVKTNRRDAIGLAKVLRAGDLTAVWVPDERHEAMRDLSRAREAARKDLKGKRQQVSSFMLRLGRHFPGKKTWGPAHMNWLMLQKLEHREQRIVLEELLGAVRQESERVARLEQAIRDAVPEWSLAEVVTALQAMRGIDLVSAVTVMAEIGDLSRFQNPRELMGYLGLVPSESSTGDTVNRGGITKAGNGRARRILVEAAWSYRYPPRVSREKQIKVAAAPRAVREIAWKAQMRLCGRFRSLTRKGKRPTVVATAIARELAAFIWAINREVMAHATAS

SEQ ID NO: 411636 - protein, 328 aa, unidentified
MTMNPAQKTFNHAVAFDVGKENLAVHILPGDERQSIANKPKAIRKLLMAQMRRNAGLNLGPLLVVCEATGGYERHVLEICVELGLAVHKAHGSRVRHFAKYMGLIAKTDPIDARVLALYGLKTEGLRLYAPLTPEVTALIDLKRRRDQIQDMLLAETNRLEHVRHASVSRSLKVHIASLRKDLAALDAAIAAHLKASETLTRKAGLMRTLKGIGPATAATLLAYMPELGAFSKGQAACIAGLAPINNDSGKTMAPRHIEAGRACVRKVLYMAALTAIRHNPIMRSFADKLKRNGKPAKVAITAVMRKLIVTLNAMLRAGEPWAHAKTA

SEQ ID NO: 411637 - protein, 371 aa, unidentified
MEKSVLYVGLDVHKMSVDIAIAEAGTAGEIRYYGRIGGDLDSLDRISRKLKAQGAELRFAYEAGPCGYQIYRHLTGKGYECLVAAPALIPRRPGDRVKTDRRDAASLARLFRAGELTPVRVPDAGDEAMRDLVRAREDAKAVERRAKQRTAALLLRHGHRFPGRTTWGRGYWRWLRQLAMPYPAQQIVLQEYLDAVQEAEARVQRLTAQIRELLPQWRWHPVVQGLMALRGVSLIVATTVLAEVGDLSRFTNPGELMAYLGLVPSEHSSGSQVRRGAITKTGNGHARRVLVEAAWAYRLKARVSRHLWRRLTGLPKPVCDLAWKAQIRLCGRYRRLLARGKHQNTVITAIARELAGFIWAIGQQVEPVTVK

SEQ ID NO: 411638 - protein, 351 aa, unidentified
MPRATSSTNVIATIGIDIGKNTFHVIGLDDKGAIILRHKLSRGQVYARLANIPPCLIGMEACVGAHHLGRQLSALGHDTRLMPARYVRPYSKGQKNDFRDAEAIAEAVQRPTMKFVAIKTVEQLDLQGLHRIRERLVCQRTSVINQIRAFLLERGIAIRQGLRTLRTEMPIVLAKTDKLSQRMIHMIEDLCTDWRHLDRRIEAVSKEIETLSEQDDGAKRLMTVPGIGPIISTATVAAIGTGEVFSKGRDFGAWLGLVPKQMSTGGRTILGPISKRGNRYLRMLFVQAARAVLLRPQSWEKHGLKLWIEAAARRLNRFKLAIALANKIARIAWGVLHGGRNFEVRPMNQAA

SEQ ID NO: 411639 - protein, 436 aa, unidentified
MRGCRCSMIMGFTKPIEHFNLQRKKVITMNTLYVGIDVSSKSNVVYLMLPNGDKHSNFSVANSHEGSNQLVKRILSALTSYSLDTVLIGLEATSVYGDNLVYFLREDATLAPFNRKIHVLNPKQVKKFHDAYNDLSKNDYVDSFVIADCLRFGRINKEVYMGDYRYKALQNLTRARFFAVQNLVKEKQRFMNVLFKKYSTMTQEKVFSDTFSTTALAVYDEFESAEALANMDLHELTDFIIGKGKNRFPDPDAVAKAIQKAARSSYRLPKTVNDSVNQVLSISITSMKALESQIKEFDKAIKAQMELLPNVLISIPGIGPVYSAGIIAEIGDINRFNSQAALAKYAGLAWKQHQSGGFESEVTRLIPSGNRFLKYYLCEAAFSLVRCDKEYSDFYHLKYKEVNRCQHKRALALTARKFVRLVFRLLKGNRLYCPAK

SEQ ID NO: 411640 - protein, 390 aa, unidentified
MFYLGIDIGKFHHAAALMNQRGKVIATLPSFSNTRSGFQRLLGLISSHLPPAEELSIGMEATGPYWIPLAEWLKTHGRIPVILNPIKTASLRNYGVRGSKTDNIDSVLIANTLRIEGEQPQPRSPKHSEELRHFTRLRTDMVKDRTRLALRVTSLLDRLFPELLSSFSKTISPSCLALLSQAPTPSKVLAMGEEKLAALLHKASGGNLKPTRAKEIMTKAANSVGVPSQAMEEAVTLLLDQINLIDSQLTTLARRITELYEEAGLYFTTIAGVGTLSAASILAEFGSITRFAQAKQMVAFAGIDPKLRNSGRHQGQVHISKRGARYLRRALYLACQVVVRNDDYFHSVYQRHRDNGKSHKQAIIAVMNRFIHVLYAIWRDNRPYYPLTQT

SEQ ID NO: 411641 - protein, 416 aa, unidentified
MELIVERAAGLDVGKDEVVACIRVPDPAGAGRGRRRRRQEVRTYPTFTSGLEALADWLQAEGVTQVVMEATGQYWKPIWYVLEERGLELLLVNARHVRILPGRKTDVGDAAWLCELLECGLLRGSFVPPPQIRELRDLVRYRKRLIQAHGAECQRVQKTLEDAGIKLDSVAADVLGVSGRAMLAALVRGERDPQVLAELAKGKLRKKLPQLRQALRGRFREHHALLIGLALGHLEHLEAAIARLDARVDEVIAPFAVARDRLDTITGVGKRAAEAIIAEIGVDMSVFPTAGHLASWAGRCPGNNITGGKRRSGKPTKGNHWLADVLTECAWAAARSRDTYLAAQYWRLARRIGKKKAAMAVGHSILVIAWHLLTEDCDYHDLGGDFFIRRDTDRTRQRAVAQLQALGYHVTLQPAA

SEQ ID NO: 411642 - protein, 348 aa, unidentified
MLHAGLDLSRKKIDVCLLSQAGEIVEEWASPPDADGVRGLARRAGAHGLPVRGVIESMTGARFVHDQLEELGWEVLIADAAKVKGLAPLACKTDKIDARVLAVLSQRDLVPEIWLPDPSIRRERELARFRLHLVKHRSMLKHRVHATLITFGHPCPVTDLFGVAGRQLLQRLDVPQPWRATVDASLRLMDDLEAQIETINKQLRALGPDHRYMPLLMTVPGIGWVLAFTIAAEIGDIGRFASPKKLCGYTGLCPRVNQSGDRDRRGPLTKQGPKYLRWAMLEATMHALRHPAYRERYQRNKRRLGRQRGAKVAQIDVARKLTEAIWHMLTNNQPFAPAPGGSTFRLAA

SEQ ID NO: 411643 - protein, 336 aa, unidentified
MSNVPVFVGLDYHQDSIQVCVLNQQGDVLLNRSAGNDCQELGRLVAPLGVVQRVGIEACCGAADLGEELVEHLGWNVSLGHPAYIARMKSSPDKSDYSDGRLLADLTRVGYLPRVWLAPAKIRELRQLVNHRQRCVDHARSLKLQVGAILREQRVKIDKDRGSRWSKAWTASVRDNDLLSEQARWIVNDLLDDIIYSQGKIVAVQARLRQVTAADEVVARLMKQDGIGEVTAWVLRAFIGDFSRFKTAKQMSRYCGMSPCNASSGNKIADAGLIDGCNELLRMTVVQAAHRLIRTVQRWSRLAASLKARGNPRCVIVGAVGNRWLRNLHHAMKDDN

SEQ ID NO: 411644 - protein, 359 aa, unidentified
MRYVGIDYHKRYSVLCATDERGQELKRRRINGNWPAGFAQFFADLGESSKVVMECCWNWGWLYDVLKEIEQVEEVVLAHPYKTRLIAEAQIKNDRIDAQMLAKLLRGDLVARSHAPSAAARARKQLLRQRLFWARVRTMLRNRIHALLDRQHELEQPQLKDLFGSRGQRWLKSLQLAGAEDQALLEQDLEVAQVLESKIKQLEQRIGHTQSEEEKLLETIPGIGPIFSSLIATEIDQVRRFSSSAKLCAYAGVVPTTHASGGRVFNGQLLWQCNKWLRWALIEASWSAIQFSGYFAGIYRHARLRGKNKNIAITHVAHRLAQIIWLLLTQKRPYTETLPDRSSDEVTVVVRASSAHSRV

SEQ ID NO: 411645 - protein, 356 aa, unidentified
MSNATTTHTLPATIGLDVSDKLTHFCFIGADGDLLDEGRVRTREADLVNRLRPFSPCRMVLEVGQHSPWLSRLLRVLGNEVIIANPRQFQLIRQSAHKTDHSDAEMLARAGRADPVLLNPVEHRSAQYQADLALLRARGALVASRTMLINHVRGAVKGTGSFLPRCDADSFHRHARPLIPSALAPSLLPDLEVIAFQTLKIREMEKTMDRVIAERYPEVAILRQVNGVGPITAFAFVLTLGDPFRFTKSRHVGPYIGLTPRQRQSGDRAPQLRITKAGDTLLRSLLVQSAHYILGPFGKDCTLRRWGLARIERGGQNQKKRVIIAVARKLGVLLHHLLVTGEVYDPFYMQGAAIAA

SEQ ID NO: 411646 - protein, 320 aa, unidentified
MTISNSQVVVGVDVAKDEIVVYRADQQKTQVVTNERAALKQWLKKLPANSAIALEATNTYHLDATEMAHEMGHDVYVIDGSRLNRYRDGIGIRAKTDALDAVLLARYLSKESDRLRIWNPPPKAYTQLKSVLRRRAELVQHRVALKQSWKDEPLLKEALANYLANIEQTEKDIQSLLRSIISEAGMDAQVKRCQAVEGVGVLTATAAVTAFMRGEFSDSDGYVAFLGMDPRVRQSGKKDQRRCLSKRGDSEFRRLFHNSAMAASRSATWKPYYQSYLARGLKGTEALVILARKLARVLFALMKNQSEYKPNSMLGGSPQT

SEQ ID NO: 411647 - protein, 350 aa, unidentified
MNVNHYIGFDVHKKSVSYCVRTADGRIAEEGKLPATHQALRQWAQKRKEPWFGAMEATLFSGWIYDTLKPFAAELQMGHPAMMKAIGASKKKNDKLDARKVADLVRCNLLPACYVAPVEIRELRRMLRYRNLVVGQAVRMKNKMSGLLMEVGAKYNKQQLHGKKYFTGLLETVEEVPESVKDMLRLSRGALEMFETVQHQLLMRLQTDSRLARRVTLLKSIRGVGEVTALTWVLEVGDPQRFSSVAHAVSYCGLTSALVSSADKQQRGPISKQRNAHLQTVLVEAAKLAPRWNPQLAAVHARELERGNRNRATLAVARKLVAYLLAVDKSGQPFQLRSQPAATQETVRAA

SEQ ID NO: 411648 - protein, 458 aa, unidentified
MTQRSQKNRRRKFTVQNLPKQLQHINVNAAGIDIGAEQHLVSVPEGRAEVSVRQFGTFTAELQALADWLAACGVTSVAMESTGVYWIPLFELLERRGFEVKLVDARHVKNVSGRKSDVLDCQWLQQLHTYGLLSGAFRPPDEICVLRSYLRQKEMLTQASAQHIQHMQKALQQMNLLLHNVVSDITGVTGMRIIKGILGGERSPQALARNRHGCCQNSEETIAQSLVGNYRDEHLFALRQAVELYETYQAKIADCEAAIIKQLNSYPDTTDGPPPPTTKQINARTRIRDGVDVRDLLFKKSGVDLFAIPGLGADTLLTVTSEVGFDMNPWKTVKHFTSWLNLCPSTRISGGKVLTKKFKHHANRAAQAFRMAAATLGRSQTALGAFYRRIKARSGGQHAVTATAHKLARIYYTMLTKGSVYVELGHQAYEQKYQERRLAHLKRHAKTLGFQLVPCAVT

SEQ ID NO: 411649 - protein, 354 aa, unidentified
MTSTKYIGMDVHKESISIAVMNAAGKIVMECVIETKANTILQCIDGLRGDLHVTFEEGTSAAWLYDLLKPHVSELIVCDPRKNASMREDSQNDKIDARRLAELLRIDHLHPVYHGEHGLRTLKELVRSYLTVTKDLARVKTRVKAIYRSWAIPCNGKEVYAACHRAEWLEKIKEPGVRRRGEFYYQQLDALRVLRQGVRRELLVESKKQKAWKRLCQIPAIGPIRAAVLLGILQTPHRFRAKRPLWKYSGLAIETCSSADHRSINGQLQRSKKNSVRGLNRNCNHDLKNLFKGAAVIASSKAGPFQEFYAALLAKGMRPEMARLTLARKIATIVLIVWKKGVCFDAQHLKPQTA

SEQ ID NO: 411650 - protein, 342 aa, unidentified
MTIVMIGIDLGKNSCSAAALDERGAVVLRRRMRPGSIVEFAAKYAPCTVAMEACCGAHYLGRQLLAQGHAVKLMPPKYVRPYVKAQKNDDRDAEAIAEAATRPTMRFVELKSQEKLDVQSLHRVRSRLVGARTTLINQMRAILLERGITIAQGRRKFEKALDEMLADEASLVPGRLRDLLLDMRAEWSALDRRIDVLDQEFAQLARTDEVARRLTSIPGIGALNATALVAAVGRAEAFEQARDLGAWLGLVPRQHTTGGKPRLLGISKRGNTYLRTLLIHGARAALPSLAKADTALGAWLRGLQARCHPNTVVVALANKLARIAWVLMRRETLFSAQRAATA

SEQ ID NO: 411651 - protein, 309 aa, unidentified
MEAIAVGIDVSKEQLDVHVHPAGTVLKFSRDSVGIETLIGALDGVAPQLVAVEATGGFETVVVAALAAAALPVVVVNPARVRAFATALGRRAKTDPIDAQMIAQFAAATKPQVRTLPDAGTQALADLVARRRQIIQMIVAEGQRDKRATPRTKRSIARLLKTLRRELSEIDADIDETVRGSPVWCEKEDLLASVPGVGPVTVRTMLAELPELGHLARRQIAALAGLAPYTRQSGRWRGQSFIGGGRASVRSALFMAAMSAMRWNPVLRAFHQRLRAAGKPKMTALIAVARKLLTILNAILRNKTKWQNA

SEQ ID NO: 411652 - protein, 319 aa, unidentified
MEGSITSFVGIDVSKASLDIHRLPEERWQKVSNDKPGIQELLGTLPAVGSCLIVVEATGVYHRRLVTDLVDAGHQVAVVNPRQARDFAHGLGIVAKTDPIDARCLAHFAKHVRPRAVAQNSQKQAELQELVTRRRQLVDLRRVELNHKESASSKIVRKNVQRMVDLLRKQIEQLDKEILHLIEEDDDWNQKAKLLDTAPGIGRINIVTLLGQVPELGQLNRQKISALVGVAPFNRDSGRFHGKRSIWGGRASVRSVLYMAAITARTHNPVIRNFAKRLEAAGKPFKVVITACMRKLLVILNAMLKNKTEWSPKKCLANA

SEQ ID NO: 411653 - protein, 408 aa, unidentified
MNAVGIDVSKGTSTVAILRPLGEVVRTPFDVKHNQGELETLAYTLKGLEGETRVIMEYTGRYYEPVARVLHNYGVYVSMVNPMLIHNYGNNSLRNVATDKEESVKIARYGLDNWAYLREYTPMEAVRQELKTANRQFQFYSKKVAAFKNNLISLLDQTWPGINTFFDSPVRKDGHQKWVDFAYDFWHADCVCNLNEDVFVEKYRKWCKRKRYNFSVDKARDLYIESRGRSCAWPKNAATKVLIRETITALNAVSKTAEFFKAEMQRFAATLPEYEIVMAMYGVGDILGPTLMAEIGDVRRFESRRALIAYAGVDPQPSQSGTYKRKSDPISRKGSGHIRKAVFQVMDCLIKTMPADEPVYQFLDKKRSEGKPYHVYMTAASNKFLRIYYARVKEYLAEHDTQQGPLEV

SEQ ID NO: 411654 - protein, 453 aa, unidentified
MKEEKQKNSPTETVKTKRFSQGLPVFNPYAAGIDVGDTMNDVAISDGATGHEVREYKTFTEDLTNLVEWLVSEGITTVAMESTGVYWLNLYLMLEEAGIEPYLVNARHVKNVTGRKKDDTDAIWIQKLHSCGLLQKSFQPESEIRVLRTYVRQRKNLINISSDSVRRMQKALELMNIKLHTVISDILGKTGLQMVNAILQGERDQDELIKLKDPRIKASEEDIKKSLVGIWKDEYLFTLQQAYDEYVFYQSQISACEERIKEQLLNQAASILDGDLTDVFVKKKPKKNQFSVEIGPLLKIIAGVDLTKVEGISEISTLELLSEIGTDMSKWQNGKHFSAWLNVAPNTKITGGKIISSKMLKKKNHAGQTMRMSASCLSNSKSSMGDYARKMKSKLGKKGGVVATAHRLARIVYTMIKEKKEYDPQIIATNNEIWKAKKIKYYEKQILQLRKTG

SEQ ID NO: 411655 - protein, 420 aa, unidentified
MVYLERGYNLKELPWSKTVSNSFLFKEACMILVGVDVAKDKHDCYIMTSEGEVLFKSFTIANNMEGFNQLYEKILSVIDNFDNVKIGLEATGHYSYNILGYLLDKGLTPYVINPLHSNLYRKSLSLRKTKTDKVDSRIIASMLMSDVSLKPYSNTLYHNEELKSLTRYRFTKVQERAKLKISISRLVTILFPELEKLVPTLQMNSIYALLYEFPSAHAISKAHLTRLTNLLNTTSKGHYTKDKAVLIREAAKNSIGSNMPAKSLELKHTIKLIKELTSEINKIEEEIKIIMNKINSPILTIPGIGLSTGAQILAEIGDFKNFSSPDKLLAFAGLSPSTYQSGNMYSSNTKMEKRGSKYLRFALFNAAIYVSYWEPTFSQYLKKKRVEGKHYYVAISHVVKKLVRLIFHLEKTNERYSTVV

SEQ ID NO: 411656 - protein, 348 aa, unidentified
MVLIGCDFHPSWQQVSWLNQETGETGDRELVHAPGEVEKFYRQFAAGTIIGMEATGNCQWFVDVVTGLGHEVWIGDAAKIRACDTRQQKHDKRDARLLLQLLAERRFPRIWTPSREQRDLRQLLIHRHKLVRIRVQVQNGLQHLAMNQGLLKKHKLWSKAGQQALRELPLAPWASRRREDLLKLKNELDEKIRLLDQAAEEAAAQNEQARLLMTQPGVGPITSLAFVLTIGDASRFPRGKQVASYLGLIPREHSSGGHQKCRSISKQGNIFLRMLLVEAAQSVVRCDPEFRNEYLHRCYGMKKGIAKVAAARKLAVRLYWMLRSNTAYPEIVRIESSSRVPLVVRHGG

SEQ ID NO: 411657 - protein, 444 aa, unidentified
MARKNQKKRFEIVHHHCAGIDVGSREHWVAVDPSSCADSVRSFTTFTDDLIALADWLESLKISVVAMEATGVYWIPAFEILDARGFDVYLVNSRATRQVSGRKSDVLDCQWIWQLMTHGLLSGAFRPSDEICAMRSLVRQRANKVRDQAKSINRMQKALSQMNIQLANVISDITGVTGMKIIRAILAGERNPNVLATHRDGRIKVDQSTIARSLHGNWRVEHLHALRQEVECQDFLDQQIEACDIAIGQLLARLPTLSEDVKAPAKVLRSPHRSSADQLMLHKALNQIMGVDLTAIPTIGVDTALVLASETGPDLNRFPTSQHFCSWLGLAPPTRISGGKQLASKPSKVLNRSAQALKQAASNARNDKSFIGASHRSRLARMDASCAIKATAHQLARLIYAMLTKGQPYVEQGIEAYEAKSHDRQLRALERKARKLGYQLAPAA

SEQ ID NO: 411658 - protein, 361 aa, unidentified
MIVIGTDTHKASHTAAGVNRATGQVLADRTVRAKRRSFEDLLRWARRLGGERVWALEDCRHVSGALERFLIARGERVVRVAPKLTAGARDSARERGKSDAIDAVAIARAAIRHGLETLPLAQLAGIELDIRLLVDHRERLVGTRTRLINDLRWQLHDLWPELEIPTGGLIAVHWPERLASRLTRAEQTTRVQIARDELRRIRELTRTINALEAQLAPLVAQAAPHLLAERGCGVLVAGKLIGEIAGIHRFATDSKLARIAGSAPIPASSGSTIRYRLDRGGNRQINAALHRLALCKGLHDPDTAAYLARKQAEGKTHREAMRCLKRHLARRVWHLLQDAPSSPQHATTIHCNTPYNRFHLT

SEQ ID NO: 411659 - protein, 375 aa, unidentified
MKEKLRFLGLDVHAETIAVAVSEPEGEVRSLGTIPNRAESIRKLIKKLGPAAKLRACYEAGPTGYVVYWQLAELGVECEVVAPTLVPVKAGDRVKTDRRDAEKLARCYRSGDLTAVWVPDEGSEALRDLVRAREAAKQDQTRARHRLSKFLLRSGQRPPSGVRPWTRPYLIWVAQVRFPQIAQEATRQDYLHEVEHMRERVARLEQAITEAVKLASPALQQVINDLQALRGIADISAVTIAAELGQLSRFESARQLMGYCGAVPSEDSSGKRIRRGGITKTGNAHLRRIVVEAAWSYRRPPGVWYGLRRRQESISEEVKEIAWKAQHRLHKRYMKLGAAGKDQRKIVTAVARELLGFIWAIGTRAETLANQQAAA

SEQ ID NO: 411660 - protein, 337 aa, unidentified
MIHVGVDLHQRFCYVTVMDARGKILQQRVVGNEAGELKRWARSLPGPAQVVMEACSFWPAFQKNLSGEVEKMVLVHPVRVKAIASAGLKNDRVDSEMLAHLSRCDLLPEAWMADEATRQARQRVRLRVALGQQRARSKNLLQSVLHQEGQRKPVTDLFGKRGRAWLEQVELSAAGRESVDTYCEMIEHYDRVIAERQQKLEQAASQSAEARWLATIPGIGPYLAMVIVAEIGDIARFSDKKALCNYAGLVPRVRESAGQRHDGGLTYQGSKLLRWAMIQAAHGATRGSPAVRQWYETRRQRKRPQVARVALARKLLTCVWALLRHGVGFEETVFATR

SEQ ID NO: 411661 - protein, 330 aa, unidentified
MTHQLAFARKGLCMTNHNTIYVGIDVSKDKLDVAFSNVTSVQTIPYTKQGLKQLLSSLKKSPVAIICLEATGGIERELVTVLHQQELPVSVVNPRQIRDFARASNQLAKTDQIDARVIAQFAQVMQPRLTTPLSESQQKLRDLTARKRQVTKQLIQEKNRLRTTSDREIQKMIQQAITFYENQLETLQAQLEEIIQADELAQAKARIIDSVPGLGPATVATLISELPELGQLNRQQIARLVGVAPTNRDSGTMRGKRTTGGGRVDVRNALYMPTIVAKQYNPTIKAFYDRLVDNGKPKMVALIAAMRKLLTILNVMIRDGKTWNQIPIQP

SEQ ID NO: 411662 - protein, 414 aa, unidentified
MKVTCGIDWAEGHHDIALVDADAQLVAKRRIDDSAEGFAELLALLADAGDSPDAPIPVAIETSRGLLVAALRATGRPVYAINPMAVARYRERHSVSRGKSDHVDAMTLANILRTDAHAHRQLPDDTDLARAIAVLARSAQDAIWRRSRATQELRAILREFYPSFLQAFAGNVHTNLATNDARAVLAIAPTPAEAAKLPKTRIITALRRAGRQRRVNETATEIRNALRKPQLRQPELVEQAMGRQALALLATLNAECASVTNLTDATTAAFHKHPDYEIITSFPGLGDVTGARVLGEIGDDRARFADPRGLKAFAGAAPITRASGRSISITHRRVKNNRLAAAGFVWAFATTPRPGPAKDLYNARRARGDRHPAALRIVFNRLLGQLWYCLQTNQPYDETRAFPNHTDPSETAVA

SEQ ID NO: 411663 - protein, 407 aa, unidentified
MRRRNRWEKNRSPKGWAGIDVGKGHHWVCLIDDSGKTLWSSKVVNDEAAILDAIGEVLGRAQQVSWAVDITGTSSALLLALLTAHGQPATYVPGRTVNQMSTAYAGEAKTDARDAYVIAETVRHRGDLTPVEVSTALVTELRLLVTHRTDLVADRVRMINRLRDVLSGYFPALEREFDYSTSRGAVVLLTGYQTPAAIRARGRSRLKSWLTARKVRSAEHIAAAALEAANAQHTTVPGQDVAASIVAEIAAALLELDQRIRALDGRIAQTFHAHPQAEILESMPGIGTILGAELIAAAGDLSRYADAGHLASAAGLVPVPRDSGRRTGNLHRPMRYSRKLRRVFYLSAQTAMMREGPNRDFYLKKRGQGLKHVQALIALARRRVDVLWALLRDNRVFTPAKPEAKVA

SEQ ID NO: 411664 - protein, 367 aa, unidentified
MKKVSTAAAKQMRNFSEPKLTIGLDLGDRSSWYCVLDERGEVRREQKLGTTPKAMKEMFGAMPRSRIALETGMHSPWVSRALSELGHEVIVAHARNVRLIGESRKKDDRLDAQTLARLARIDPQLLSPVKHRSAKAQADLTVIRARAGLVRARTALVNTARGLAKSYGERLRGCNVRNMNPEKAEGLSPELQTALEPLLAAIESLSERIRECNQRIEGLAQESYPQVALLKQVKGVGTLIALTFLLTLEDAHRFRKSRDVGCYLGLQPGRRNSGQSEPQMRISKEGDPYLRTLLVQGAHHILGPFGADSDLRRWGLKLAERGGRNGKKRAIIATARKLAVLLHRLWVSGEVYEPLRNNSRATMPAAA

SEQ ID NO: 411665 - protein, 429 aa, unidentified
MRTESTPGARGPVFCGVDTHADSHWLCVLDWRGRKVLSRQFPADAAGYEALAGAIAAAGEPACVAMEGTSSYGAGLTRHLASLGMPVREALSPARTQRRRPGQGKCDESDAERAARAAMSGSRLGTPKSQDGWVDGVRCMLAARSGAVKARTSAVNTARSLLTTAPEGPRSRFRGMAGPRLMEELPSVRAEGALGAALGALADLWAAARDAALDMERAIEASLEENCPALLAMYGCGPVSAAKLAVAAGDNPGRLRSEASFAAICGACPIPASSGKTVRHRLNRGGDRQANSALHEIARQRVMRDPETAEYAERARGRGKSDREVMRCLKRYVAREAYRALMHPHEVRRPEDASELVAARRAARVSQVRAASILGTSEKYISMLERGQRELKPIRRAYEAWVEAGLPLDWDRQAFEAERKMDSKKHLAK

SEQ ID NO: 411666 - protein, 335 aa, unidentified
MTYSNYVGIDISKNTVDIALITLEGEVVEHQWLNNREVLKEEFERLFTDNDIEKAQTLICAEHTGHFGNKLIDVSIDLELNFWLESPYAILHSQGLTRGKNDKIDALRIAMYAKRFVDKVKLVKNNSKVMNQIKHLHTERNLLLQDLTKYKAQLKQEDDFLDQDYFKDKKKRVAKLSLSLEKVINEVEKKIYDLIDSDESIRSSFSKITSIEGIGKQTAIATIVATDNFKKFDNPRKFACHVGCAPFKYDSGTSIRSRNKVSHKANKNLKKLYHMAAMSILSTKGELRQYYDRKVKEGKNKMSVLNAIRSKLIHRIFAVIRDDRKYDKNYIHLLV

SEQ ID NO: 411667 - protein, 369 aa, unidentified
MNYPISVGLDVHKRSISAYSYNILTDERRVGTFGSDTTPLIAWLKEHREPYRVVYESGHSGFSLKRTLEAAHITCEIAATSKIDKAKGDRIKTDARNAEDLARLLAAGKLSFVYMPPIDYEGMRDVNRAYVATRDALAAEKQRISKMCDRYGICCEADMKAWTPEHLTWLNGVTLPSRGASLAMAHYLDERERLFDEKTRILQLIKTFCADDELRPTIDALRCLKGIAEYTAFCLLVEIVDFTRFDPPSAFGAFLGMVPSEYSSGETRALGKITKTGNSLVRKAIVESAWSSYRAKRAYKRPVDGVAPEIARAANKANKRLFDKVQGLKAAKKKPCVAVVATARELALWVAAISSACQTGCIDELEGCL

SEQ ID NO: 411668 - protein, 338 aa, unidentified
MEKIIHFVGIDMSKKTFDCSVIINNQRGNTKHKQFSKTAMGLERFQAWLIGFGVMLNEQTLICMEFTGLYNRMVLDFLSKSDAVVWVEMAVHIKKSLGLQRDKSDKLDAGRIALFAWRNNDEIKPWHSPDPDVQKIKDLLSQRDRLVDTKTRLLVPLKEMEQEGLVVEANELKKLQKPVITQLEKSIKNIEKTITKIVSSNVELKKKSELVRSVKGIGNVISWYLIALTNGFKQISSGKSLACYCGVVPFSKTSGTSIKSKPRVSHIANKKLKALMHLAAVCAVTHDRELKSYYDRKIAEGKHKMSVLNAVRNKIILRVAAVLREDRKYEDNYVRKAA

SEQ ID NO: 411669 - protein, 341 aa, unidentified
MVSIINHFYYLQISECSILSQISFKITMGVDIAKKKFDVASLIEGKYKHKTFTNDKLGFIAFVAWLLPLCGDVNPLICMEATGAYSLPLADFLAKQGHSVSLVNPAKIHAFGKSELSRAKTDKADAKLIARYALMMQPPLWIPAPINIRELQSLIRRVEHLLEMIQMERNRQETAEDNVVGSINTVLATLEAELKATRKAIHDHINADPDLKQRGDLLDSIPGIGDAAIAYLLIALSAHHNFNHAKQVVAFAGLAPAPRESGQWRGNTHIAKNGDSALRKALYMPALVAWRYNPLIRVFCERLKANGKNGKAVACAAMRKLIHIAFGVLKSGKPFDPNYAV

SEQ ID NO: 411670 - protein, 394 aa, unidentified
MVQSGRVVIGMDPHKRSVTIEVMAGDETILGGGRFATDPDGFTTLREYVRAWPDRVWAIEGCNGIGHHVALRLLAEAQEVVDVPPKMSARARVFATGQGRKTDATDAHSIALVGTRMAGLRPVVDDEQLAVLRTLADRRRALGQEHTRMVAQLHHLLLELVPGGAKKFLSAAQAKEILSKVRPRDAAGKVRRRVAAELVGDLERTYKRKKAADKELTELVRATGTSLLDLTGIGPSGAARLLVEVGDITRFPDRAHFASWTGTAPIDASSGDHVRHRLSRGGNRQINRVLHIMATVQLRSPGIGRDYYDRKKADGKTSMEAMRCLKRRLSDVAYRAMLDDAVAHTTGARTGPGGHRGTSLTSSATGSHPHTGTSDQSLPGPVTHDPRTALPAAS

SEQ ID NO: 411671 - protein, 412 aa, unidentified
MLYIGVDLSDKFFDSCITNQYGDVLDRNRFDFDHDGFCSLMKLIQKLHQELQTDQCECVVGLENPRSGLVDFLIQRGCTVVLTQPNAISNYRKSRTSSGAKSDQADAQLIADYVREHHRNLRSISIADEAIKELSLLLEDRDRLVRQKVRFSNQLTSTLKEYFPQVLEAFGSIDNKSTIQFLKVTNTFDQVKGTPRKKLEKLLDESGVTRKDSRERFHQAMKKPGYRVSPGLIKAKVRLKNALVAHLELLVNQIQEYEKQIKALMDDSTDGNIFRSLPGADYILGGKLLVLYSTRDFHNASEAQQLFGTAPYTSASGQSRHVGFRKGANKMGRNTFQQLARGSVRTSHWANIQYFKKRDQGKSVHHAFRCLANTWVKITFAMWRSKTPYDEDIYLASITRHLINQPAFANND

SEQ ID NO: 411672 - protein, 401 aa, unidentified
MWFAGIDWADRHHDAVVIDEAGRRVAQLRVEHTPEGLTKLVTFLREIAPLDQIACILETNHGLLITTLLEAGLALYPVNPKTIDRKRSASGAKTDLIDAYLLAKHGRAEWADLRRLDPDSPAIAELKALTRDQDALIQMQTRLVNQLTACLKAYYPVALQLFTKLQQRSTLAFLQTYPTPQAAKEATVGQIEETLRRGHHTNPTTVAPRIYEVLHQPHLTADEMTTRTKARLMLALVAQLLPLLEQVAAYDKEITERFLMHADSQIFESLPGAGKRLAPRLLAEWGEDRKRYADPSSIQALAGTSPVPFESGNYATVHQRFACIKPLRNAFHQFAWQSTQQEAWAKDYYDRKRKEGKSHTMAVRALANVWVRIVFAMWRKREAYQRTTFETAQRMHARRVA

SEQ ID NO: 411673 - protein, 354 aa, unidentified
MSQTLKTSVAVIGVDIGKNSFHLVGQDRRGAIVLRQKWSRGQIEARLANLPPCLIGMEACVGAHHLSRKLQMLGHDARLMPAKYVRPYSKGQKNDFRDAEAIAEAVQRPTMKFVATKTTEQLDLQALHRVRERLVSQRTGIINQIRAFLLERGVAVRQGLRFLRGELPGILATRTDVLSPRMLRIIEDLAGDWRQLDERIEGLSNEIETLARHDQACARLMTVPGIGPIISSAMVAAIGSGDVFSKGRDFGAWLGLVPKQISTGDRTILGSISRRGNRYLRVLFVQAAWVVLVRLKQWERYGLKSWIEAAKKRLHHNVLAIALANKLARIAWAVLNKGRAFECVKTDAMASRPA

SEQ ID NO: 411674 - protein, 366 aa, unidentified
MEKSSTAVERERENFLGQKLTIGLDLGDRSSHYCVLDEAGRVILERKISTTPKAWKEVFGGMPRSRVALETGMHSPWVSRLLSELGHEVIVAHARNVRLIGESRRKDDRLDARTLARLARIDPHLLAPVQHRSATAQAHLMVIRARAGLVRARTSLINTARGLTKSYGQRLPGGSTRQMNVEKIQGLSPELRTALEPLLGAVESLSERIGECDQRIEATASASYPEVALLKQVKGVGTLVALTFLLTLEDPHRFRKSRDVGCYLGLRPGRRNSGQSEPQLHISKEGDPYLRTLLVQSAHRILGPFGEDSDLRRWGLKLAERGGRNGKKRAIVAVARKLAVLLHHLWVSGEVYEPLRNSSQAISAVA

SEQ ID NO: 411675 - protein, 341 aa, unidentified
MQNDTRIAVDLAKTVFEIAVSNRPGRVSQRERLPRAQFLKFFALQQRATVVMEACGSAHYWGRRIEGLGHRVVLLPPHHVKPYIRRNKTDSTDAKGILEAGRNEDIRAVPVKTVAQQVLTSLHRLRSSWMKERTARINTLRGLLREFGIFIPLGAREVVPAVRAFIEDAHADVPDALRPFFAELCHEIRAIEDRIRQVERQLTAISKQLPVIDQLRTIPGVGLLTATALLAFIGDVRRFPSARHLGSYLGLTPREYSSGLKRRLGRISKRGDGYLRTLLIHGARSVLVHARKSRPDRLREWAHSLAQTHVHNKAAVAVANKMARIVWAVWMRSQPYQPVAA

SEQ ID NO: 411676 - protein, 341 aa, unidentified
MGEVITIGLDLAKSVFQAHGADEAGAVVFRKKLRRGQILAFFAGQPRCLVAMEACAGAHYWAREIGALGHETRLIAPAYVKPFVKRQKNDAADAEAICEAAQRPTMRFVTPKTAEAQAAGTVFRARDLLVRQRTQLINALRGHLAEYGMVVRQGAENAPKLIDLVVDPASDLPEEARSTLQVLTQALAFLQTRIAVLDVEIARRAKTNALAKRLMTIPGVGPVVATALVALAPAPQTFRRGRDFAAWLGLTPLQHSSGGKERLGRTSKMGERTLRRLLIIGASSAAKAAAAKGAPTDTWLGRMLSRKPRMLVVVALANKMARIAWALMAHGGLYKAPAAAA

SEQ ID NO: 411677 - protein, 341 aa, unidentified
MKRDMSVVGIDIAKRVFHLVGMDERGKIVMRKRCSRGEVLPLLANLGPTTIGMEACGGAHYWARCLREQGHEVKLMAPQFVKPYVKSNKNDMRDAEAIAEAVTRPSMRFVPVKDVAQQDIQALHRVRERLVTARTALVNEMRGLLAEYGIVLPQGLAKFRQALMSTLEAEHTKLTPLGQELFHKLFGELGKLDAELAYYQDKLEALAQAHPVCQRLLTIPGIGPLTATALIAAVGDAGVFKNGRQFAAWLGLVPKQYSTGGQTRLLGISKRGDSYIRKLLIHGARATLRWARTKADRRSQWIRGLLDRRGWNRTAVAVANKNARIVWTLLSRGGIYEANAS

SEQ ID NO: 411678 - protein, 334 aa, unidentified
MSNVTTCGIDLAKNVFSLHAVDGRGVVVLRKTVPRARLAAVVAQLPACVIGLEACSGAHEWARRFGQHGHTVKLMAPKFVAPYRKSGKNDGNDAEAICEAVSRPSMRFVPVKSVEQQAVLTLHRVRLGFVEERTATINRIRGLLAEFGVVLPQRVVEVRRGAAATLDQLPTMAQRALNDLLGHLRVLDERIGEYERELEQHARRDERAKRIQKLSGIGPISASAIVASVAEGHEFKNGRQFAAWLGLTPKQYSTGGKTRLGRITAHGDAYLRTLLIMGARSMLQTALRRTDRLARWALGVRARRGYHRACVAIAAKHARIIWAMLAKNEALQLA

SEQ ID NO: 411679 - protein, 393 aa, unidentified
MDERVWIGVDAGKGFHWAVVVDAEGEVLLSRRVENDEADLSALVEEALSHGPELTWATDQPGGSAALLLAVLWERDQRVLYVPGIAVDRARDAHRGESKTDARDARLIAEQARVRRDLSALEPGEELLAELKLLVAHRRDLVLDQARAIVRLRETLVSLFPGMERALDFRTTGPLVLVSRYQTPQAVRRAGRKRIEAYLRSRGVRNASRLAEAALRVAGGQRARMPAEGVAAGIVRELAERALALKERTAELEGEIEERFSSHPLAEILVSLPGMGTILGAEFLAAVGDPRGAFESAGHLAAYAGLVPVARDSGKRVGNNRRMRGGNKTLKMVLYRSAFSCLRHHGASRAYYDRKRAEGKRHRQAVVALARRRIDVLWAMMRDGRRFDPAQAA

SEQ ID NO: 411680 - protein, 312 aa, unidentified
MELFVGIDVAKETLAVALSTGEQWDCANDANGIARLRERLVAARPALVVLEATGGYEGELLAALIAAGLEARRVNPRQVRHFAQAGGQLAKTDRIDARVLAQFAECIRPQARALPDPERAQLKALVTRRSQLVQMLTAERNRRAQAPRWLGKSLERTIRALARELEVIDRELAERLSRSITLKPLRDLITSMPSAGPVLGATLIARVPELGQLSRRQIAALIGVAPFTRQSGQWRGHDMIFGGRAPVRAALYMAALSAVRYNPPLRAFYHRLRERGKPTKVALTAVMRKLLTILNAMLKHHTPWSAPCPTPA

SEQ ID NO: 411681 - protein, 355 aa, unidentified
MNVKKYIGMDVHQETISIAGMTPDGKLVMESIVETKASTILQFVQGLHGDLHVTLEEGTWAAWLYDLLKPHVTELVVCDPRKNALLKEGNKSDKIDARKLADLLRGGYLRSVYHGENGLRTLKELARSYLTISQDLTRVMNRVKALYRGWGIACGGQQVYAPRHRSEWLNKIGEAGVRRRAEFFYQQLDAVRTLRQAVRRDLLAESRKHGATKLLRQIPYIGAIRAALLIALIQTPHRFRTKRQLWTYSGLAIETRDSAQYRYVAGQLQRSKKPQQLRGLNENHNHDMKAIFKSAAAMASRREGPFQDFYLELLTKGMRPAMARLTLARKIAAITLILWKKGAHFDAEQLKPQAA

SEQ ID NO: 411682 - protein, 412 aa, unidentified
MEVMIPRCCGIDVHKSTLVACLLLTKPNGQTGKTVKTFSTMTADLLALKDWLEANECTHAAIESTGVYWKPVFNILEGSVKVILANARDIKNVPGHKTDVKDCEWIADLLRFGLIKASFIPPEPIRQLRDLTRYRTKLGQEMTAEKNRVQKVLEDANIKLSSVATDIFGVSGREMLGALIKGESTPEEIANLARKKLRKKIPELVEALKGNVCEHHRYLISMSLRHLESLAELISDLNERIDAAMEPYRKQESELSTITGVDKKSAQCMIAELGVDMSQFPTAGHVSSWAGICPGNNESAGKRRSGKINKGNGWLMPILIQVAHAAARARNTYLKDKYHRIAARRGNKRAAVAVGHKILIFAYYILKNGVTYHELGERYLDNLNKTLIEKRLIRRLQKLGNKVTIEPALQMT

SEQ ID NO: 411683 - protein, 354 aa, unidentified
MDIKYIGMDVHKETISIAVMKDDGRLVMESIIETKASTILQFFHGVRGDLHVTFEEGTWAAWLYDLLKPHVTELVVCDPRKNAVMKQGNKSDKIDARKLADLLRGGYLRSVYHGENGLRILKELARSYLTISKDLTRVMNRVKALYRSWGIPCGGQQVYAPRHRAEWLNKIGEAGVRRRAEFFYQQLDALRALRQEVRRDLLAESRKHGATKLLRQIPYIGPIWAALLIALIQTPYRFRTKRQLWTYSGLAIETRDSAQHRYVAGQLQHSKKPQQVRGLNQNHNHDMKTIFKSAATMASSREGPFHDFYQGLLTKGMEPAMARLTLARKIAAITLILWKKGAHFDAEQLKPQAA

SEQ ID NO: 411684 - protein, 370 aa, unidentified
MKKHSKTLSDAGKRKMIEQGMNVVAGLDLGDKHSHVCLIDLDGRIVESRKIRTSGPALEKYFSAWAEMRVVFEAGTHANWIYRLLERLGHQPLMADTHRLALITQSLTKDDRNDAERLATLGLRMPEMLNAVTPCSVETQHDRAVIKARDVLVATRTKLINSMRGTLKSIGYRLPACDSDAFVRKAGPDVPDELRDTLRPLLLLVQHVTDEIRRYDKRIEQLCKKYPATRRLRSIRGVGPITALAFVLNLDNDARRLANSRDAGARMGLCPKRRESGARSPELSITKSGDRMLRRLLVQCSQYILGRHGEDSALRRWGLRLAERGGKSAKRKAVVAVARKLSVLLHTLWKRDMDFDPFYGTAMETAAETA

SEQ ID NO: 411685 - protein, 402 aa, unidentified
MLAVVAAHPGQEREWDWERRKFGASVQELKHLRAWLAERRVEVVVMESTAQYWKPVWIALEGRFVLQLAQARSNQGPRGRKSDFADARRLVKRWLAQDLTLSYVPEAEQRRWRSLTHFQVQARCQRGRLQNQIEALLEEGQIKLSCVVSDLLGVSARRILRALAEGETEVQKLAAMRDQRMAAREAEWVAALEGQPHPVHRHLLGMYLEQVELIDQQLERAGKELGEALQAHQAAVQRLCAMPGLGVDSAQQVIAQIGPRAEAFPSPEQLVSWVGVCPGRQESAGVSVSQRSPKGNRPLRRLLVQLAWAAVRTKGSLMQLLFRRWVPRLGVKGAIWAVAHRLLRLIWKVLHQGARYQERGPLGLNPKAIERRKRPLVRRLRELGYRVKLEAVEPPEPAGVTA

SEQ ID NO: 411686 - protein, 406 aa, unidentified
MRYYVGVDWADAEHAVWVEDEAGGKVMSRSLAQTAEGFAEWGRWLDERRAEGSELWAAIEKPDGRIVDFLLDHGVVVFAVNPKALDRARDRFRMSGAKSDPFDARVLAGFLRTDHGHLRALQPSSEAAQELKGLTRDYARQVRQQTRLLNQLTVTLKEYYPRALEVVDDLKSRWGRAFLRAYPTPAAVGALTERQWRRWARTQHLSVERGAELWTIVQRPQLAVPAHVVRVKARPLVSLLDQLEVTRGAVDTYRGAVEDFFASMPAAEWAASLPGGQSGTVVPALWAELGDAPGRWQTAQHLQGHGGTVPVTEKSGKAHVVKFRFACNTHLRAVIHQLAFLSLRHSEWARVYYDRCRQRGHSHHHALRALAAKWLKIIFAMWSRQAPYQEQYHLASIARHQLRQPA

SEQ ID NO: 411687 - protein, 340 aa, unidentified
MDLGDQWSRYCVLDEEGEIAEEGRFKTTRGALTKHCADSERMRIALEAGTHSLWVSEHLRQFGHEVLVANAREIRAITHSDSKSDQLDAEKLARYARVDPKILHPITHRSIEMQRFLNVIRARDVLVRMRTMAVNAVRGLVKPCGHRLPICSTESFAGRCRADLPEELLAIVEPLLKQIELATAQIALCDKRIEELADGIYRETKALRKSPGVGALTALTYVLTVADKRRFPHSRDVGCYLGLRPRRSQSGGSDPQLRITKAGDQYLRKLLVQSAHYVLGHYGPDSALRQWGQRIYERGGKNAKKRAIIAVARKLSILLHRLWVTQAEYVPFYEVEKQVA

SEQ ID NO: 411688 - protein, 351 aa, unidentified
MMIIGCDFHTRFQQIAMLDPSTGEMIERRLEHESGEAEKFYATLPGSARVGMEATINAPWFERVLHAHHHELWVGDAARIRAARVRKQKTDSRDALHILDLLLTNRFPRIWIPTSAERDARQMLRHRHKLVRFRTSVMNQLHGLAISQGLCRKSRLWSQVGRKELEALVLDPWASRRRQGLLQLLDQLNPWIADLDRAVLQEAQSCPEAVHLMKQPGVGPVTALAFVLTIGPVGRFQRSKQVVSYLGLNPSEQSSGGKQRLGSISKQGNSMMRHLLVEAAQTASKYDPELRRYYQRLQFRRGVSGVAKVAIARKLAVRLYWKLREAAQPVPLARMQGSPTKPMVEETPSQS

SEQ ID NO: 411689 - protein, 356 aa, unidentified
MSEAGPTDIIVGIDTHKHTHAAVAITRLGARLGELTIQVGSDGYRELEAWARSLGPVRTFGIEGTGSYGAGLARFLREAGHVVREVSRPDRGQRRRHGKTDHLDAEAAARAVLGGQATALPKSGTSEVEMIRHLKVARDTAVKARTQAMLALKAIIVGAPAALREQLDKIRGTMALVRHLASLRPGPLTTTTASAKASLRAIARRWLDLDAEVRSHDTHLHRLAEGCAPEMVAAHGMGTVTAAEMLVLVGDNPERIRSEAAFAKLCGACPIPASSGKTSRHRLNRGGHRQANAALHRVVVVRMRTHQPTLGYLQRRTAEGKSKREIIRCLKRFVAREIFGYLCRTPKATNPAQAPA

SEQ ID NO: 411690 - protein, 343 aa, unidentified
MQISTIGLDLAKHWFQVHGVDAYGRVVVRRRLWRSGVIAYLRSLEPCLVGIEACATAHYWARELMALGHTVKLMPPAYVKAYVKRNKNDAADAEAICEAVTRPSMRFVPIKEAEQQAVLMLHRARSLLVRQRTMLVNALRAHLAEFGIVAPQGLRYVEILTKTIAHQQARLPELARSILQTIVDQLNGTMARIQEIEGRLARWHRQSRVSRLLATVPGVGIMGASAIAATVTDPSLFRSGREFAAWLGMTPRQNSSGGKERLGRTSKRGDKYIRSLLTAGAVAVLRHARNRPTRDGEWVRALVARKPTKLAAVALANKTARIVWAVMMRADGYQPREVFRQPA

SEQ ID NO: 411691 - protein, 364 aa, unidentified
MGVGSRHRPRLDWKPAAASADRPRMSLALQSFLPFPNSCQGTSPHQQGRGTKMTEHCYCGIDVAKDRLDAQVLPHRQRFSVDNNATGWAELVAQLHALPIAAVGIEPSGGYERGIIRTLLAAGLSVRRINPNKLRQFARARGILAKNDRIDAQLIAEYVSIMPTRVVQRNTATERLTEVVTMRRQLCDEHVTIENQAAHVEDAILRRLNKRRLARLKADIHLLDKRLAEIVAADVILAQRYELLTSMRGVGPTLAFTLIALLPELGQISRKQIAALVGLAPYDFDSGKLKGHRCIYGGRMPVRNILYMAALSAARYNPALKVFHNRLAAINKKPKVIIVAVMRKMITTLNAMVRDNAAWQPRAA

SEQ ID NO: 411692 - protein, 363 aa, unidentified
MKETKRRFVGIDLGKREYTMAIIGKNGKMNIHQGKTSIQGRTALYKKLEAEDKVALEAGNLAFIMAREIMEQIGSEVRVLNSAKLPFIWDAPTKTDKEDAMKLAHLVEERRDEKLPIVPLPSEKELERRKILASYGREMRNRTRHLNTLHAVFVHQGHTTIVKKNLITAKRREEAIQLLIGLEREEAEWLLKYLEIHELRIKELKRKIEEEAKTDKDMKNLQTIPGVGPVVAYAFTAHVGDGSRFSKGAQVSNYIGFVPRLDYSGTIQRNGHITKQGNSYLRGLLVQAAWTTVRSKKGGALRTRYTYYTLCQGASKKKTVVSIARKLTEHMYSILRSKSAYEIQRWNGPEDKKIVLSNLKNCA

SEQ ID NO: 411693 - protein, 414 aa, unidentified
MKLFVGIDVSSEELEACFMDPEGDTLETLKVENNLHGASHLRDRIVAAADKLPASEIHIGLEATSVYSWHPAMYLHEDASLQERKTKVFTINPKLINKFREAYADMDKTDRIDAWIIADRLRFGRLTTTIVMQEQYIALQRLTRMRYHLVHNLTREKQYFLQNLFYKCNAFRSEVDSSVFGHAIMEMLSEKFSLDEIADMEVADLADYLKEKGKNRFPDPEHVARCIQKAARASYRLSKVVEDSIDLVLGTSIQAIRSIQSQLKELDKAIERILAGIPGAQCLRSIPGIDRVYAAGILAEIGDIERFSDQAAVAKYAGLTWRKHQSGGFEAENTKRIRSGNRFLRYYLVEAANSVKNRDPEFGEYYRKKYNEVPKHQHKRALVLTARKLVRLVDVLLRNGQLYTPGRKVTTAKD

SEQ ID NO: 411694 - protein, 341 aa, unidentified
MSIIGAFDVHRRQLTFEYLDTVTGELRRGRIAPADRAHLRAWLARFAGHGEVEFALEGCTGWRYVVEELLAAGVVPHLAEPADTAALRGRKRHAKTDKTDARHLRVHLLAGDLPECWIPPAHVLEARAVVRLYKDLLDERGAWHQRIAATLFHQGVPAIGSMATPEGRAAVGQVELSPAGQQAVETGLRQIDRLTAELDPLRRQLGMLSRRQPGCAALRATQFGIGAVTAVAIWAELGDVRRFANSDNVVRHTGLDITVYSSDTKRSAGHLSRQGPELLRWALYESAKCAARPAAPDYGYYTAARDRRTAGLATLSVARKLARRCYHTLRELGEEAMAPAA

SEQ ID NO: 411695 - protein, 343 aa, unidentified
MERYYYIGLDIHKKIIAYCVKAIDGSLIDQGKITADRQSLEIWVKGLPGPWMGAMEATIFTGWVYDFLKPHAIVLKVAHPAMLKAITAAKKKNDRADAEKIADLLRVNLLPECHMLSEEIRELRRILRYRNHIVRTAVKMQNKMSGLLMEVGVTYSKKRLHGKKYFRELLERVDEIPPSVKDLLQLSRSSYEMFRSFQKRLVETLRTNQLVRDRVHRLMTIPGVGEITALTWTLEIGDPGRFSSIRKAVSYCGLCSAQKESAGKEQRGPISKKRNKHLQTMLIEAAKLAPHWNEQLAIVHERELKKGNRNRATLAVARKLVAYMLAVDKKQTDFKLPAETQAA

SEQ ID NO: 411696 - protein, 315 aa, unidentified
MVDVPCCVGIDVAKAQWDIALRPAGERWAVPNDASGIAPLVDRRQALQPTLIVLEATGGLERAATAALAAAGLPVVGVNPRPARDFARATGPLAKTDALDARTLAHCADVIRPTPRPLPDAQTHELRALLGRRQPLIVMRTAERNRLAGTSERLTKDITAHMTWLNARLATLDDDLETLLRASPLWRENDDLLQRAKGIGPVSAHTLLLELPALGTLTRQQIAALVGVAPLNCDSGTMRGKRTIWGGRAHVRTVLSMRTLVATRFHPQIKAFYERLLAAGKVKKVAWTACMHKFLTILNAMLKHRTPWQPQEVQS

SEQ ID NO: 411697 - protein, 421 aa, unidentified
MLGAGIDWAEEFHVVALGRPGEGVIEVLRVEHRPQAVAALMARIAGLEADPAEVRVVLETRHGLLVEALVEAGYTVLPVNPQLVSRRRGPARKKDDAEDARICCLIALDRHAGLRRLIPHGELAGELRSIARDDERACRDERRLLNRLRADLLVTFPAALAIAGEDLGATRILRLLERWPTAAALAAASREEIIEFGRAQRTGYLARFADRIAAALAEDHFTAPGHLVRAKAGTIRLTARQLLLLDAQRRAWEKRMGELLLGTPGQPAEDQPGQAFPGGEIYLSFPGLGRRLAARIAGEAGAHIEQFTTPNSLQCYAGRAPVTRRSGKRDLVVAHRLACNRYLADAVHKWAFASLRRSAWARDFYDTQRARGKNHHAALRALGNRWLEVLWHCLTHDVPCDEAVHAANRNRALAAVTSSAA

SEQ ID NO: 411698 - protein, 408 aa, unidentified
MEQLYVGIDVSSTKHAAYLMKPDGDKFSSFPMQNDRSGAKMISEKIVSALTKLGLHDVVIGMEATSVYGDNLVYALREDGNLGRFHRKIHVLNPKQVRNFKKSYPELPKNDPVDAFVIADQLRFGRIGKEVYMDDYRYKALQTLTRARFYAVQNLTREKERFANYLFLKCSGIAQSKDIPNTSATTLALMEHFGTVDELANANLDELTAFVNKAGHGRFADPEATAKAVQAAASGSYRLPKTVNDSINQVMSASIAAMRALESQIKTLEKAIEQQFEIIPNTLISIPGIGKVYSAGIIAEIGDIRRFAGQASVAKYAGLVWTQYKSNEFEAEDTHLIKSGNRYLRYYLLEAANSVRRCDSEFRRYYDLKFKEVNKHQHKRALALTARKLVRLVFRLLKDNRLYIPPES

SEQ ID NO: 411699 - protein, 349 aa, unidentified
MVILGIDAHKRTHTVVVIDERGRELATKTTKTTTTAAHLELLRWAEQFGPEREWAVEDCRHLSRRLEADLLSAGERIRRVPPKLMAKARDSARTYGKSDPIDALAVARAALREPDLPLAQLDGPARELRLLVDHREDLVKDRTGHINRLRWHLHELDPSWDPPARSMTSYKTLDAIAEQLKGDDRMVVRIAADLVERIRALTVAERALEREITERIVAMAPCLLAVIGVGPLIAAKIVAEVADVRRFKHKDAFARHNGTAPLPAWSGNPNRHRLSRTGNRQLNAAIHRIAITQLAHNPDARAFRDRRIASADTGTEALRALKRRLSDVVFRALLADAEPARPARLAHAA

SEQ ID NO: 411700 - protein, 340 aa, unidentified
MSLVLQPLLPFPDSCQGMSPHQQGRGTKMTEHCYGGIDVSKDRLDVMVLPDRKSFSVDNNAAGYSELVKRLRGLSIAAIGIEPSGGYERAVIRALLAADLSVRRINPNKLRQFGRARGVLAKNDRLDARLIAEYVAIMPTRVVQRDPATEQLAEVVTMRRQLCDEHVAVENQTAHLEDAMLQRLNKRRLARLEADILLLDRRMAQIVASNANLTRRYELLTSMQGVGPTLAFTLIALLPELGQISRKQIAALVGLAPYDFDSGRLKGHRCIYGGRLPVRNVLYMAALSACRYNPALKVFHRRLAATNKKPKVIIVAVMRKMITTLNAMLRDNVAWQLKSA

SEQ ID NO: 411701 - protein, 337 aa, unidentified
MRFCGIDLHSNNSVVVVTDETDKLLVSRRCPNDLQKILALLAPHRAELAGVVVESTYNWYWLVDGLMAEGYAVRLANTVAMKRYDGLKHSDDETDAAHLAHLLRLGILPTGYIHPPTERALRDLARKRIQLVRDRTRHVLAVQNILARQTGGCVASNAIKRWTAGDVDALGLATDVCLAVQSNVAVIAALNLEIGRIEARLLEGAKLRPDYARLKSIPGIGEVLAIVIMLETGDVSRFAQVGNFASYARCVDSARYSNGKKKGEGNTKNGNAYLVWAFIEAANFARRFNEEARRFFDRKKARTNGVVATKALAHKLARASYHVLKTKQPFDVKRCFV

SEQ ID NO: 411702 - protein, 440 aa, unidentified
MIDTNQKQEIEFATFVGIDWADQKHAWALQIPGHLDVEHGELDHTPEAVDAWAADLARRFGGRPIAVALEQSRGALLFMLTKYAHLVLFPVHPTTLSDYRKGFRPSGAKSDPSDAGLLVDLLVRHREKLRRLNPDTEQTRTLQFLVEARRKFVSDKTRYSNRLTAYLKMYFPQVLDWFSEVTSPIAGDFLERWPSLQKVQKARPETLRKFFIQRHSCKPDNIDRRLDEIRRAVPATHDAAVTCSCSAAVLALVRIVRAVRDAILSYDQQIETLARQHPDFAIMDSLPGAGPALVPRLIAALGTQRDRYHSASELQCYSGIAPVLASSGKQYWVHWRWACPKFVRQTFHEWAAHSIGSSAWAKAYYEQQRAKGKPRNTVVRALAFKWIRILFRCWKDRKLYSEEIYRQALVRRHQLAGKNSPVQLQWKTCAGFSKIAAITP

SEQ ID NO: 411703 - protein, 458 aa, unidentified
MGRNRSTDKSRRAMPMVHPNAAAIDIGATMHMAAVSADRTPEPVRSFGTFTTDLHRLVDWFAECGVDTVVMESTSVYWIPIFELLDARGFAVFLINARDAKHVPGRKTDVSDAQWLQRLHSFGLLRASFRPKGQIAELRAYLRQRERLLEYGASHIQHMQKALTEMNVQLHHVVTDITGATGLRIIRAILGGERNPAVLARMRDRRCHATVETIEKALAGNYRAEHLFALEQALALYDTYQQKASACDARIEAVLKELSARRGHEVGPLPSPRQNRSRQQNSLLFDVRTALFALLGKDLTQINGLGPYLALKLIAECGDDLSAWPSAKHFTSWLCLAPSNKISGGKVLSSRTRRSRSRAAALLRLAAVTVGRTDTALGAFYRRLSARIGKAKAVTATARKIAVLFYNAVRHGMDYVDPGASSYEIRYRARVIDNLHRRAKAFGFMLQPMAPTPGMAVS

SEQ ID NO: 411704 - protein, 310 aa, unidentified
MYYIGLDVHKKTISYCVKDAAGRVCQEGKVGSTRYELDGWIKTLPQPRMIAMEATIFTGWIYDHLLPHAEKVKVAHPLMLRAIAAAKRKNDTIDARKIADCLRCDLLPECHMASTEIRDRRRTLRYRGLVLRQAVQMKNRVSGLLMETGVSYNKLRLHRMGYFAELMSTNEEVSESIRPLLRLCREHIDRSIRMNTVLLNSLEQDPLIADRLRRLRTVPGVGPITALTWALEVGDTSRFHNIKQAISYCGLCSAERSSADKVMRTPISKQRNKHIQQVLVEAARLAPRYSDELASLYERERQEATAIGRL

SEQ ID NO: 411705 - protein, 383 aa, unidentified
MPSETTVHVAIELSSSSWLVATRLPGAEKSRVRRLDGGDTTGLLALLADVRRQASTKLGAGVDVACCFEAGRDGFWLHRLLTAQGFASYVLEPTSILVNRRARRAKTDRLDAEGMLRVLAAWLGGDRQVCGMVQVPTPEDEDAKRPHREREHLVQEKLRVENRLEALLFTQGIRGRPSLRSWERDMADLRTGDGRPLPSLLRAELNRLRRRLVLALELIRELEAERAAALTAATEAAAADNARARKIIALQRIRGIGENFSAVLVREVLYRSFGNRRQLASYVGIAPMPYQSGGLDRDRSISRAGNPRARTTLIQLAWLWLRYQPGSALAAWFRERVGTLQGRTRRIAIVAMARKLLIALWRYVESGLLPEGIEIRDPAVAKA

SEQ ID NO: 411706 - protein, 317 aa, unidentified
MHSESVFVGIDVSKDQLDIAIRPGEVRFRESNNDSGIQALIARLLSLKPQLILLEATGGYEILAAASLRQAGLPAHIINPRQVRDFARSSGRLAKTDKIDAAVLAHFAEALKPDLRPWPDEQQQELAALMSRRRQLVEMMVMEKNRLSMTFSPRVRRSLQTNLQYLKEQLKELEQDLDDFIRQSPIWLEKDQLLQSVPGVGPLTSQSLLAWVPELGTLNRKKIAALVGLAPFNRDSGQMRGKRTVWGGRARVRPPLYMATLAACRVNPAIRAFYLRLLAVGKSKKLALTACMRKLLTILNAILKQQQPWCPQAPVNP

SEQ ID NO: 411707 - protein, 408 aa, unidentified
MNTLYVGIDVSSRSNVVYLMLPNGNKHSNFSVANSHEGSVQLVKRIHSALTSHSLGTVLIGLEATSVYGDNLVYFLREDTTLAPFNRKIHVLNPKQVKKFHDAYNDLPKNDYVDSFVIADCLRFGRINKEVYLGNYRYKALQNLTRARYFAVQNLTKEKQRFINVLFKKYSTLTQEKVFSNTFSTTALAVYDEFESAEVLANMDLHELTAFIIEKGKNRFSNPDAVAKAIQKAARSSYRLPKTVNDSVNQVLSISITSMKTLEAQIKEFDKAIKSQMELLSNVLISVPGIGPVYSAGIMAEIGDINRFNNQAALAKYAGLAWKQHQSGGFEAETTRLIPSGNRFLKYYLCEAAFSLVRCDKEYSDFYHLKYKEVNRYQHKRALALTARKFVRLVFRLLKDNRLYCLAK

SEQ ID NO: 411708 - protein, 347 aa, unidentified
MIIIGCDLHTRSQQIAGLDMETGEVEERRLEHANGEARAFYAGLREPALVGIESTGYTQWFEELRVEFGHELVVGDAAKIRKMEVRKQKHDRRDVEHLLNLLVKGDFPRLWLPSAAERDVRVWLEHRHQLVQMRTRALNGLQAVALNQGLGLRQKLWTKRGQAELQKLPLREGRARRRADLLALRAQLDRWIAELDERIAQEVAQRPDAQRLLTHPGVGPLTALGTVLILGPVERFPDAKHVTSYVGLIPQEESSGGRQRFGHLTKQGNGLLRFLLVEAGQTASRLDPGLRRAYRRLTFRKGRASAKVAVARKLAIRLYIMLRDKIDYEEFCRRGSHAGMLGEVALA

SEQ ID NO: 411709 - protein, 382 aa, unidentified
MQDILTCAMGLDVHRDVIVACLARGELGTEPEIEIRSFSTLIPEMRKLRDWVLEVECRHVAMESTGIYWQPIYEMLEPCFDGQINILVVNARHMKNVPGRKTDMRDAQWIATLLRAGLLNGSFIPDKTFRELRHLTRYRKSIVHDITAQKNRIDKFLQSSGFRFTAFLSDAFGASGRNIIRHLMEYGDISREALDKCLKTQTRKRIDEILVALNGSLSEHQRSFLRMIFEHLESLERHRHTVEDAISEEIVKHEAALSLLCSIPGIDVTAAASIIAEIGTDMSAFPDSQHICSWAGLSPGNNESAGKRKSAHINKGDPYLKSMLCEVGWVISGKRTLYLSGWYWRVKQRKGAKRATIALARKLLVRYLHDAEDRNPLQRRMF

SEQ ID NO: 411710 - protein, 354 aa, unidentified
MKKIFIGIDFSKEKFDATLIKAEGLKECAPSVHEVFDNKTSGYRRLVKWVKAHTEGFAADAWLFCGENTGGYSIGLSNYLYASGYDMWLECAYKIKHSAGIQRVKNDKADSRAIAEYAMRNYDKMIPYKPQSASLTCLREVFLYRHSLVRQKVALQVRRDEKRLTQEKSEARAFVSFTSKHLITEVNKAIAKCDQKIKDIIASDDELREVFDIITSMSGIGIQNATCLMVYTDNFRKFDLNSRKIGCYYGIAPFGRQSGTSVNSRPQVSPFANRMIKSLLSQAALAAIKFDMNVHNYYQRLIERGKHPLLVHNNIKNKMLYILVAMVRDRVKYNPDNVYRKSNEVSLDPQVLNI

SEQ ID NO: 411711 - protein, 523 aa, unidentified
MSAIRVRQRYRSRHQEVLQKPAGVIHPRVQKVGPEHFGIVSVDCAKARSKWMLCDFFGNILIPAAVVEHNRADLDAAVERLREANQKYALHDLIVAVERTGRYHHVVRQAFAAAGFEVRIVHPFTTKRYRQVSDPGNKTDDTDLAAIQRAAVNGFALLERPVDLIWRELQLLIRHRRDLVFKSSAVATQIREHLEAVLPGYAACFDKLWESAAAWTFVRHFESPRAIHEAGIVKLIEVLQGDKVRFQRPTVERVLAWAGQAAPSDQAAAWHRRIALALHDDHIRKTHEILERERDIAGYLTQTPYVLLLSFPGINVVSAADFAGEMGPIANYANSRCITGRAGIRPSRHQSDQVDLPNGPLVRCANRKLRAAILSIADNLAVCNHHFSAMAVKWRAAGKDPRHTRIKIAARFCRIAFQMVAGGQVFRHPALQQRHYILDKLLAFHREHHTPMPQTLIGLETALGHIPSSAHADEAKPLAAELLRIHAGRRRGPQLLGDILPLVLARLGVAALQSEESGERDST

SEQ ID NO: 411712 - protein, 316 aa, unidentified
MEISPIFIGIDVSKARLDVAVRPSGESESVSNDEDGIKALVKRLGEIQPALIVLEATGGVERLVARALSSAELPVVVVNPRQVRDFAKATGQLAKTDSIDAGVLARFGEAVRPALRPFPDEVTLELRALIARRRQITEMIVAERNRLSGASKSVRKRIDAHIRWLEAELARADKDLDQSIRQSPIWRENEDLLRSVPSIGPVVSRTLLAELPELGRLNRKQIAALVGIAPLNRDSGTLRGRRAIWGGRASVRAALYMAALVASRRNAAIRAFYKRLRHAGKAPKVALVACMRKLLTILNSMIKHKTRWSEITLQTT

SEQ ID NO: 411713 - protein, 319 aa, unidentified
MEKKIYVGIDVSKDTLDVAVHGDKQRWSFPNNETGITKAVSKFKELSPELVVLEATGGFEVFLATELVVAKIPTAVVNPRQIRDFAKSVGMLAKTDILDARIIARFAATVQPNPHPMPDIEAQELGALTARRRQIINMITAEKNRLSTAGETVKPGISAHINWLEKELSEINRNIKQKVKDSPIWREKDELLQSVPGVGPNLSATILAELPELGTLNRKQIAALVGVAPLNRDSGTLRGKRTTWGGRATVRTALYMATLVATRCNPVIRHFYERLREAGKAAKVALTACMRKLLTVLNAMLKYHTSWNFGVSQIFGPCH

SEQ ID NO: 411714 - protein, 355 aa, unidentified
MKYYTSTTEFNCGIDLHARQMYVCLMDRQGKKLVHTNVKDNDFTYFLKLIKPYQHSLTVCCECMFGWYWLADACQAAGLTFVLAHALYVRAIHGGKNKNDRIDSEKLTHLLRSNLIPPAYVYPTQMRPLRALLRQRIFYVWRRSELLARIHCHQLAHNRIPAKQSRWTRDDWEEALLKAEVDPLRQLALSNDLAMIRHFDHQIYEVEKELYRQTKQVAAREYALLQTVPGIGENLGLTILYEIGDISRFPTVKDFLSYCRLVKGTVASAGKIKGLRGAKLGNPYLRWAFGEAAVIAKRDHFRIRPLAQRLEARMAGNKFKANTVVAIKLARAVYFMLKNKTVFEPERLVAALARN

SEQ ID NO: 411715 - protein, 427 aa, unidentified
MEVIHPRCAGIDVSKKDAKVCVRVQGRGRKATSSEVTTWTSMTSSILALREHLIAERVTCVVIESTAAYWKPFYFLLDDALNVMLVNARHARNVPGRKTDVSDAAWLAELGAHGLVRASFVPPEPIRVLRDLTRARTTIAGARTKEIGRLETLLEDAGIKLSSVACEITGVSGRAMLEALIGGQRDPAVLADLAKRQLRKKIPALTEALQGRFNDHHAFMVRLYLDRIDAHEADIARLDARIEEEIQPFQPARDLLVSIPGWSHVVADVFISETGADMRVFPTAAHLASWAGVSPGSDESAGRIKSAKTLPGNRHLKAALGVAALSASRSTNTYFGARFRRIVGRRPARPATKKSRRQSAAGQTAVVALEHKMLTCAWHMLVNGTFYQDPGPDYYTRHHPAKNKARAIKQLQALGYNVTLQPRTQTA

SEQ ID NO: 411716 - protein, 366 aa, unidentified
MDTIYIGVDFHARQQTICYLKTETGELVTCELKHQDKQKVLAFYAQFRGSVIVGLEASGYSPWFERMLEELGCEVWLGHATEIRRRARWRQKNDRRDAELILDLMLHDEFPRLHRPAVQSREVLRMLRYRQKLIKIRTMSKNSLQAIALQSGLAQGSRLFTKDGQQQLGAAEMSPVMRWQRDHWLQLMAPLNQQLLETMVWFKAQSKGDVYITRLRTHPGIGLLTSLCLVHTLQPVSRFRNTRKVAAYAGFDPVERSSAERKCFLGISKAGSRLLRYLLVEAAQTAVRKDEDLKRFYQRLADRRGRPKAKVAAARKLLIRAYIMLRDEIDYAEFRHRAVAARLARRGQGPSKVPEVLIGQPASPEP

SEQ ID NO: 411717 - protein, 400 aa, unidentified
MSAYWAGIDSGKREHHCVVIDQTGAVLLSKRVENDESALLDLIATVAEIAAGGEVCWATDLNAGGAALLIELLAAHAQQLLYIPGRIVHHAAATYRGDGKTDAKDARIIADQARMRRDLQPVRGADQISVDLRLLTARRTDLICDRVRAINRLRATLLEYFPALERAFDYSKKAPLLLLGGYQTPEGIRRIGLTRLTGWLKKRGCRNSAKMAEKALIAANSQHTVLPTQATGSALVVRLAEQISTLDAEIGDVDAQITELFRQHESANVLLTMPGFGPVLAATFLANIGGNLNAFDSVDRLASVAGLAPVPRDSGRISGNLHRPRRFNRRLLRTCYLAALSSLKNSPASRTYYDRKRGEGKSHKQALIALARRRINVLWAMLRDHTIYQEPMPRITAQAA

SEQ ID NO: 411718 - protein, 397 aa, unidentified
MDSNYAVYCGIDVGKGEHHAVGLTAAGKKIYDKALPNDEAKLRAVFDRLASHGSVLVVVDQPNTIGALPVTVARVGGHEVGYLPGLAMRRIADLYPGQAKTDARDAFIIADTARTMPHTLRRVDTGDEALAELEVLVGFDDDLAGGATRVSNRIRGLLTSIHPALERVLGPRITHPAVLEILSRCGGPAGIRQAGKRKLTAIAVKHAPRMGARLATDILAALDEQAVVVPGTAAAETVLPKLADSLKETLLQRKAVAADVERALDDHPLSPVLTSMPGIGVRTAARILIEVGDGSAFPSAAHLAAYAGIAPVTRKSGSSIRGEHPARSGNKKLKRALFLSAFAALHDPTSRAYYDKKRDEKKKHNAALICLARRRCDVLYAMLKNKELYRNPTPSAA

SEQ ID NO: 411719 - protein, 368 aa, unidentified
MRTDVAGFTTFIGVDLHKCTVTLRAVRADGELLGQLTCNTKCVERIAEWITNLPGPKWMAVEACPFVEWFIDRYTPCVDRMDIADATELSLRRGKRRKNDPNDALDIALRLARGECPLGYIADPQLMQLRKFGRHWRQLSRSLAKAKQGMKSMLNAANIRGPQFDGPRAHRWFLTFGGLLHPAQRLAFGNYLDQILLIERQREILRREMLTAARSPQFTSNEQLLRSVPGIGPIWALIIASEVGSFDRFPNADALEFWAGMTADLKESAGRTQSGNITKAGSATLRWALCQAAVTLCQSDTKQEATRQRFIARMPRAKANVVMGRRLLRTLYAMVRDQKPYQGGERRDRTKAANKAKAKRKDRALQQA

SEQ ID NO: 411720 - protein, 355 aa, unidentified
MSMLAEQYEFVIGGDPGRDTVDLAVVDSATGALRAHLADRADGAGYARMLAWADSHAPGRRVWALEGTGSFAAGLAVFLAEVGEDVVEIGGVKRQRGAKNDQIDAARAARQALAREHQTKVRAHGLREALRMIVTTRQAILVSRTKAINELKGLIVAAPEQLRSGLRGCSLARQLDRIQAMRTQPEGAVEHRMAVLTLQSIAARVRFLSAQVDELDPELMTLLKQHPAGPALLAEPGVGPVVAAQLLVSWSHRGRVRSEAAFAALSGTAPLQASSGQRTRHRLNRGGDRDLNRALHTVAITRMRCHPETRAYHAKRTAQGKTHRDIRRCLKRALARRLYRRIQAATQQQQVPAAA

SEQ ID NO: 411721 - protein, 370 aa, unidentified
MKPRVGVKVGKMNSIVAGIDLGDRESLATILSPIGDVADRFSFPMNEEGYAFFASRVPKEARVAFESTIMAYPISRALRMHGYNDITVAHPKTLAWIVRSKKKNDKADSLKIAKLHMVGMLPESHLLDRDEQIARDLLVQRVKLGVEIGRLKNSLIGYLKREGVYDSLPKTEDNFSIKRRRAIHSLRFHDKRDLVLGTMMDRLEFLEQQCVPLEDSVREKASASDDVKLLMSIRGVDYYLASLLSSFIRDVNRFPSDDHLASFFGIVPTSRDSANIKRRGKMTKDGSSIARWALSVMVDTVMQHNPPIREYYLSVRKRTGSGKLAHVSTMRKLTRMLYRMLKTKQHWKWENPLLTERKIAKLELEGGDVS

SEQ ID NO: 411722 - protein, 320 aa, unidentified
MSQNTTAIMNDKTPPVYAGLDIAKASLQLHLQSKSYDLPNTTQGHAQLIKRLAAIAGVHVICEATGGYERAVVAALHAATIPVSVINPARVRQFARASGELAKTDPIDAAVLTAFGQAFTPEPTPARTATELKLAALVTRRVQLLELRVAEAQRADTCADADLRKLFTPWLAQMEKQIAKVEALIEALLQAQAPLADQVQRLDDIMGVGRLTAVMVLATLPELGTLNRRQAAALAGLCPYNRDSGQWAGKRCISGGRAEVRRALYMAALSASRSNHLLKPFYDRLIAAGKPAKLALTAVMRKLIVLMNHLLKNPNFSLAH

SEQ ID NO: 411723 - protein, 340 aa, unidentified
MKLYGAIDLHSTNSVVVVVDEEDKIVYQKRLPNDLALILKELCVYQSRLEGIVVESTYNWYWLVDGLMAEGYKVHLANTAAIQQYEGLKYSNDDSDARWLAHLLRLGILPQGYIYPKAERAVRDLLRKRSQLVRQRTMNLLSIQNLMTRNTGSSMTANQIKGLDKAQVDGLLPNADLSLAVKANWSVMCSADEQVELLEQRVTERVKLRAQFSFLKTVPGIGQILALTIMLETEDIGRFATVGNYASYCRCVGSQKISNGKRKGSGNTKNGNKYLAWAFVEAANFAIRFNSKIKSFYQRKKAKTKAVVAIKAVGHKLCRACYYIMKDRVAFDVTKAFGQK

SEQ ID NO: 411724 - protein, 380 aa, unidentified
MSSIAARGLTYLGLDVHRDTISVAVLGPGREAPTVDRIANDEPSVRRLVAQFPNRRGLRACYEAGPTGYELARLLDRLDVRCQVIAPALIPKAPGDKIKTDSRDCRRLVRLHRAGELTPIRVPTVAEEAVRDLCRARADMLADRSRARLGLGGFLLRHGRVWRGGSTWTFAHERWLLAQRFDDPALATTYAHYRATLTARDAALDAIEADLATWYDQPPFAAAVARLSAYRGVTRLGALTLASEVGDWRRFASAPQFMGFCGLTPSEYSSGERTRRGHITKTGNGHLRAQLVESAWPTSIGPRPPWSCAAARKACHPRSSPALGPRSCGCAAGSAACTPANSADRWWSSPSLASWPASCGPRWSPSMPNPKRSLHQSAVG

SEQ ID NO: 411725 - protein, 407 aa, unidentified
MVAVMIGVDPHKGSHTAVAIGAAEEPLGELRVRASAAQAERLMAWAAAWPERTWAVEGAGGLGHLLAQQLVAAGERVLDVQPKLGARVRLLAAGDTNKNDPNDARSVAVAALRSTARREVAADDHAVVLKVWSKRHRDLGRTRTQVACRLHAVLCELVPGGISKEITAAHAARVLESAKPSGAVELARCELAAEFLDDLRRIDTQMRDTKKKLTVAVRASGTTTTEIFGVGPVVAAIVIGCVVDVSRFASRDHFAAYNGTAPIEVSSGNRKIHRLSRRGNRRLNYAIHMAAITQIRYRHSGGRAYYDKKMAEGKTHKEALRSLKRRISDAIFARLHADARRVAAAARTAGPGGQPGNDSVASAAGSHPGHRLFGQATPGPESTLRPRPDPQTAKTHPRAKRKTARTP

SEQ ID NO: 411726 - protein, 408 aa, unidentified
MYNAVGIEASKLKSTITIIQPAWVVIRNPFDVLHTSDKLNTLVTYLKSLEGETRAVIECTGRYHEPVVKSLSEAGIFISAVNPKLIKGQKQNTLRKVKSDPADARKIAKYALDNWAELREYSSMDTTREQLKTLNSQFTFFMKQKVAAKPNLISLLDNTYPGVNKLFDSPTRDDGSEKWVDYAYSFGHVDCVHKIGLKAFTERYEAFCKKHHYNYQKNKPALLFEESKQLVAVFPKEKSYKLLIQQSIQQLRLVSEHIEIIRKEMNGLASTLPEYETVMSMYGVGETYGPQLIAEIGDVSRFTHREAITAFAGVDPGVNESGQFMQRSNRASKNGSTRLRKTLFQVMSTYLKNKPVNEPVYQFLDRKRAEGKPYLVYMTAGANKFLRIYYGKVKECLRNLEQSQIEEF

SEQ ID NO: 411727 - protein, 358 aa, unidentified
MMTTTCRHESTAPSTTTITLLLAFELGERRWKLGFTTGLGQRPRIRSVPAGAVDQVLEEIARAKRRLKVSEETAVMSCYEAGRDGFWLHRYLVAHGVTNHVVDSSSIEVNRRARRAKTDKLDLAGLLNLLARYLIGDRRVWRVVRVPSVAEEDARQLHRTWESVQQDRSRLLCRLQGLLVTQGVRLRIGEDFLQRLDGARLWDGRAVPGLKHRVQRAWAQLVLVNTQLEELEAARTTLVPDHETATGRYVEVLPTLRGIGPIGAWVLATEIFGWREIRNRRELGALVGLVPAPYQSGDTDHDQGITRAGNKHVRRLMVQLAWSWVHYQQASALTRWYQGRFGSGSKRVRRIGIVALAC

SEQ ID NO: 411728 - protein, 407 aa, unidentified
MDSLKTVFGIDVSSRKSNVCIMVNGQKVNDYAISNDMVGFNQLLDDLKQVTNPQIIFEATGVYSRRLQAFLDMHELRYVMMNPLEAKRKTKDDLHQNKTDKLDAMYLAKMQSEHPQRLAYVQSEEYQELMANNRIYEQASHDLITNKNRLHKAIQLTFPEIEHLMANPRGKNYWSIVLKFPHPNIVLETKEADIIDFLKSLSGIGEKRANDLAQRLIRLAKLACPAVKKSSAHIRGLEMAINNILSAEETCQTALKEMAKLAPKRDLEILKSIPGIAENTALRIISELGDIRRFNNPNQLNAFVGVDPQVYESGNLTAHLSISKRGTAIGRKVLYLAINQIQSAKKVGNPCHIADYYEKRKRSSETASHKKAAIASIHKLLRTIFALITNDQLYSYDIAKHNQRLLS

SEQ ID NO: 411729 - protein, 354 aa, unidentified
MDVAKDSIAVAVLSPDRDAADVDKIFHDTDSVRRLIKRLGKPRGIWACYEAGPTGYDLQRLLTSMGVRCDVVAPSLIPKSSGDRVKTDRRDARRLAGLHRAGELTPVAIPTPAQEGVRDLCRTRGDMVQDLTRARNRLSGFLLRHSVVWRGGSPWTERHRRWLATLSFDDPAIAATYSHYLATVKLRDTGLESVEADLVPWCTKDPFGDQVQRLAAYRGVTRVGALCLAAEVFDWRRFPRARPFMSFTGLVPGENSTGLTQRRGSITRAGNAHLRGQLCEAAWAYQHSPNVGAGIRERQVGVPPETVARSWAAQIRLYRRFRQLAAHKNVRSVVAAAIARELAGFLWAEMVAEV

SEQ ID NO: 411730 - protein, 357 aa, unidentified
MNEGSWVGLDVHARSVVAGVLDAGSGELSTSRVPPGCEETVGWLQSLPGPVRVAYEAGPTGYGLARACLEAGISCTVAAPSRIRRAAGDRVKTDRRDAERLARLLRMGELVAVRVPEPYEEAARDLVRAREDARGDLMRARHRLSKLLLRQGLVYEGSAWTVAHDAWLRRHRFESGPLTLAFDECYGTMLYAKTRRDALDRAIVELAATPPFVDIVGRLCCLRGVSTLTALALTVELGDWARFRPQSLGPFLGLTPSEDSSGEKRRLGAITKTGNRHARRLLVEAAWHQRRPLRPSVTLKRRRHGQPAAVQAQADSSARRLHTRWQALERRGKRRTIVAVAVARELASHCWALATME

SEQ ID NO: 411731 - protein, 340 aa, unidentified
MTSLYAGIDLHSNNSHLAILDQDDKRVFHKKLPNMEDVLLAELKPFQDELSAVVVESTFNWYWLVDCLMEQRYEVLLANPAAMLQYKGLKHVDDKHDAFWLAHMARLGILPQGYIYPKEERPFRDLLRKRGHLVRLRTSVINSLQGIISRNCGCSLSGNKMKRMRENHVAPLLTANEDLAFSGEVSREVIDFLGQQISRIEPLVLEKVQLRKPFQCLQSIPGVGKILSLTIMLETGPITRFKKVGNFTSYCRKVPTTWTSNSKKKGKGNSKNGNKYLAWTFSEAAEYSRRHSDQARAFFNRKAARTNKSVAYSALAHKLARASYYMMRDQVCFNPNKLFT

SEQ ID NO: 411732 - protein, 289 aa, unidentified
MSYSTTVGVDLAKNVIQISVVSSRGKELSNRSLTRKKFAEFLGKQSQSLVAFEACASAHYWARAAKRHGHSARIIPAKAVAPFRQGHKTDSNDALAVAEAARRPNIKDAPMKTVEQQGLQSIQRSRYLLIQECIALSNHMRGILLEFGVTIPQGFASLLRKLPEVLEDGDNDLPDLYRPTLHRLYGRMLELRIDIEAMTKEIDGLVKQHPVCSKLTALEGVGPIGALSLYAALGSGAAFTRSREFAAYLGLTPRQHSSGGKTNIVVLSKKIGNRRLRSPTRMYERPGLL

SEQ ID NO: 411733 - protein, 344 aa, unidentified
MSEVIIIGLDIAKHVFHAHGADGKGRAIFSKRISRGKLLDFFAAQPSCTVALEACGGAHRWARQLAQLGHEVRLIPPAYVKPFVKRQKNDAIDAEAICEAAQRPSMRFVAVKSEQQQAAGLVFRTRDLLVRQRTQLINAIRGHLTEYGWIAPKGPSHVAMLTDLIEEEEMASSLPKAAHAMFRLMLDLLTDLNGKIADLDKEIARRAREDEVSRRLMTVPGIGPISATAIAALAPPAETFAKGRDFAAWLGLTPLQRSTGGKQKLGATSKMGERTLRRLLIIGSSAVVQQASKRDAPRGSWLEQMLARKPRMLVTIALANKMARIVWALLVKQEKYRAPVAAKA

SEQ ID NO: 411734 - protein, 379 aa, unidentified
MSKVRFVGLDVHADTIAVAVAEPDGEVRSLGTIPNRLESVRKLMVKLGPAKELKACYEAGPTGYVLYWQLTALGVVCEVVAPSLVPVKPGDRVKTDRRDAAKLARSYRAGDLTPVWVPDEAHEALRDLVRTREDARQDQLRARHRLSKFLLRHGRRPPEDVKKAWTLKHMTWIQEHVHFDQPALEATLLDYVHEVEHMAGRIQRLETAITEAIQKAPPEIRAVVEALQALRGVAQLTAVTVVAELGSLSRFQNPRQLMGYSGLVSSEYSSGNRVQRGGITKSGNAHLRRVVIESAWAYQHRPWIGGFLLRRQRDLQLAPEVKEIAWKAQWRLHTRYKKLASAGKKKPQIVTAVGRELLGFIWAIAVQTEANFKPDRKAA

SEQ ID NO: 411735 - protein, 361 aa, unidentified
MCQSRSLEKEKEEPIVQNDTLAAVDIAKEVFEVGVSDRPGHVARRRRLARYEFLEFFAQLPPATVVMEACGSAHYWARRIEELGHVVVLLPPQYVRPYVVRNKTDRKDVDGLLEAFRNDRIKQVPIKSVTQQVLGTLHRLRSGWLADRTRAINALRGLLRELGFFIPEGRKHVLPDAWEIIQDPKSGLPDALKPSLGSLCEEIVSLSTRIEEIEAQLEALAKQIPVVARLRSVPGVGLLTATALYAFVGDALRFPSGRHMASFLGLTPREYSTGLHRRLGRISKRGDVYLRMLLIHGARSILWHAKRMKQPDRLRAWALRLERKLGHNKAAVALANKLARISWAVWKNDRNFAPMPEVQAA

SEQ ID NO: 411736 - protein, 417 aa, unidentified
MEPNRYRRYIGIDWATAAHRICLLDQEGQVLGKISVPHSGTGLAQLLEWLAHHGVVPAQAAVAIETPCGAVVETLVERGYAVFAINPKQLERFRERYSTAGAKDDDRDAWVGASALRTDPVAFHRVNLDAAEVIQVRELYRTHDELQGDAQRFANRLSEQLRRYYPQMLALCPAGDQPLLWDLLELAPLPEVAHQVSAGQIATVLRRRRIRRLTAEQVLTQFCTTPLHVAPGAAAAASAHALVLIAQLRAVHELRKQTLKQLILALRQMRTRRTDPLRPSDAEIVDSLPGAGTLTVAAMISEASQAVAERNGTALRTHSGVAPVTRQTGKHRGVGMRYACSQRLRNAFYHFAMTSLQADPLARHHYDELRQQGHTHARALRGVADRWIAVLMAMLRAGELYDPTRRKAWRAAPEQTP

SEQ ID NO: 411737 - protein, 469 aa, unidentified
MAYSLFNHIQGKNGSRWAEFVRETGTENLLMVAIDAAKFTQKALIGTFYGDILVKPFEFDASMTGFEYLKKVIQLEKEKYKLKEVVVGIETTGHYYEDLVRRCHSSGYHVRTLNAATTAQERQALLNWSKTDNLDLMAILQSMIHGRGTSNELSSGAVLTLQKLTRARRELVGERTTTQNLILMHMDHIFREFQGKSVWENGKRKHVQPFSKLFGKAPLYLMRHYPHPTDILTLGEKGLRELSIRENLKLRDSTIQILIEFARNSISQPKEFVDGDIFLLSQKLDRLELLKNQINVLEHKIEDLFVETEGAVILSVPGIGVVTGAELYAEMGDISDFEHAGQLIKMAGTNPIVKQSGGKKPSYFCISKQGRRTFRNITYQVGKSLAVNNPEMKLRYLALKDRGKHTRQAYVALGNRMIRLAFSMIRNHSLYRTNQENYVLVSEISKKLRAPNVKRFYELHVSSNLCLSA

SEQ ID NO: 411738 - protein, 328 aa, unidentified
MTDQHKYILGIDISKKHFDAALLLPNEKRKNKKFINDQSGFVQLSKWLEKNNVGELHACLEATNIYGHALAEHLFDEGFSVSIVNPARIKGFAQSELLRTKTDKQDASLIARFCQAMKPSLWTPEPKNVRELKALVRRLDAMIEMKQQEVNRLDVAEAIVREDIEGHIELLTANITKLQDTIQKHIDDDPDLRSKKELLLSIPGIGEKTVGVLLSYFATIENFGSAKQLACFCGVTPKVSQSGTSVNRYGRMSKVGPGNLRKALFFPAMVALRYNPPMMLLKERLTAAGKPKMLIIGAAMRKLVHIIYGVLTSKAAFDPNILPKRLVV

SEQ ID NO: 411739 - protein, 358 aa, unidentified
MKIIGCDLHARQQTIAMLDTDTGEFVEKTLEHDGEELRKFYSGLSRPVLVGIEATGSMHWFLEMMEELGIECRVGHPAKIRQAETRKQKHDRRDARLLLTLLAENRFPTIWMPSTEQRDLRALLRHRHQWVRLRSRVQHTLQSMALNHGLRRGHALWNQAGQHALRALPLAPYASERRAALLTLYPRLQESIEELDKEVCEEVQQHPQARRLLTHPGVGPITALATEVFLGDPMRFSDGKALASYIGMIPSEHSSGGRQRLGAMSKQGNTLLRYLWCEAAMHAVERDPELKRFYRRKLVQKGLGKARVAAARKLGIRLWIMMRDQIDYQEFCRRGKARQESGSVRAGMPAINSGPAEA

SEQ ID NO: 411740 - protein, 362 aa, unidentified
MNTLARVTSAAQIEVAGGVDTHQDTHTAGVVDHAGRMLGHRTFPTTEAGYRQLLAWLGGFGTLRVVGVEGTGAYGAGLARYLMAQGQAIVEVDRPDRKTRRAAGKSDPIDAESAARAALNRVRTGLPKQRDGMVEALRNLRVARRSAVSQRADCMRQIKTLIITAPQELRERLRDLSNTQLLRLCTGFRPNLCLVGEPEQAAKVALRALGHRHAALSEEIAELEALIAPLVEQINPALLALNGVGPDSAGQLLITAGQNTERLHSEGAFAMLCGVAPIPASSGKTNRHRLNRGGDRQANAALYRVVLSRMRWDPRTREYVARRTTEGLSKKEIIRCLQRLIAREIYYVLRQPAATLVSAHAR

SEQ ID NO: 411741 - protein, 343 aa, unidentified
MEHTTIAVDLAKSVFQVAVSHRPGHVDEERRLSRDRFLGFFAQRPPATVLLEACGSAHDWARQLQPFGHSVRLLAPHDVTPYVRRNKTDRTDAKGLLEANRNEEIHPVPVKTIEHQAIASLHRLRSTWLATRTARLNTLRGLLREFGIFLPTGARHVVPRVRELLGDPAAAVPVLLHTTLASACDELDVLEVNMGALDRQLTALVRQLPDVTLLQTVPGVGVLTATALVALVGDIRRFRSGRHFASFLGLTPKEDSSAGRRHLGGISKQGDVYVRMLLTHGARSFVWHAKAATPRTSLQQWAVHTEQRRGHTVATVAVANKLARIVWAVWAQQRPFAADHRPR

SEQ ID NO: 411742 - protein, 323 aa, unidentified
MSQFSVFVGIDVSKDHLDVHVLPEGQAWRVANDATGCAELSERLSGLTGSVLVVMEATNVFWRLAATKLASAGLSAAVVNPRQVRDFAKATGQLAKTDAIDAQMLARFAEAIKPPVRALPSEQCQVAGELLARRAQLMGMLVAEKNRLSTARATKVRKDISATIAFLEKRLAALDEEIDQWLKSTPIDQSRVNLLKSFVGIGERTAKSLLISLPELGSLTSKQIGALAGLAPFARDSGHKRGQRHIGGGRSIVRAALYMPAITAIRCNAVIRALYERLIDAGKHHYVAITACMRKMLVILNAMLKSNSRGKANRNFALNAVAS

SEQ ID NO: 411743 - protein, 349 aa, unidentified
MGIIGGLDVHRSQITYDWVDPDTGQRQRGQLAPAHREHLRVWLEQFAGRQAAFAVEGCTGWRYVVEELQRVGIQAHLAEPADTSAARGPKRRAKTDQLDARHLRELLACGRLPESWIPPAQVLEVRTQVRCYKALADEHTAWLQRVQATLFHHGVPAQRNLLAPDRRARLERGSGLSPAASQQVTVALRTLDHLDGELDRLRGELVGLARRQPGCRALDALYGIGPVTAVAIWVELGEVGRFTSSRHAVRHTGLDVTVYASDGKRTPGHLARQGPPVLCWALFEAATCAARASSPDHAYYTQVKQRLGGNRATLSVARKLTRRCYHTLGALGEQAYAPPCHPHDLEQVA

SEQ ID NO: 411744 - protein, 403 aa, unidentified
MNMNAVGIDVSKGKSMVAILRPYGEIVSSPFEIKHTSSNIQSLIERIKSIEGNSRIVMEHTGRYYEPLARQLSLAGLFVTAVNPKLIKDFGNNSLRKVKSDKADAVKIARYTLDNWIDLKQYSLMDELRNQLKTMNRQFGFYMKHKTAMKNNLIGILDQTYPCVNTFFDSPAREDGSQKWVDFATTYWHVDCVRKLSLNAFVGHYQKWCKRRMYNFSKDKAEEIYGAAKELVPVLPKDDLTKLIVKQAIEQLNTASKTVEELRALMNETASKLPEYPVVMEMKGVGPSLGPQLMAEIGDVTRFTHKGAITAFAGVDPGVNESGTYEQKSVPISKRGSSSLRKTLFQVMDCLVKTKPQDDPVYAFIDKKRAQGKPYYVYMTAGANKFLRIYYGRVKEYLMSLPE

SEQ ID NO: 411745 - protein, 372 aa, unidentified
MNYNTVYVGMDVHKESFSLCAYTIEAEKASHYQRTEADYKKVLNYLEFLRTIYGDDANFICGYEAGCFGYTLYHQLTANNVKCIILAPTTMLEQRSKKRIKTDRRDAEIIAKCLAQHNYSPVHIPTAKDEETKEFLRMRDDHKLALKKEKQQILAFCLRHNYRYDGKSHWTAAHLKWLKALTPEALYKEILDEYLLTYQTLSDKIERLDKRIEELATQDEYKEAVKKLCCFIGVKTHTALSVLVEVGDFKRFASAQHFASYLGLVPGEDSSGDDQNRLGITKAGNRHVRLLLTEASQCYARGQVGFKSKELKSRQSGNTPAVIAYADKANERLRRRYYKMVLNKYKKHNVAKTAIARELACFMWGMMTDNIA

SEQ ID NO: 411746 - protein, 422 aa, unidentified
MKKIQTKKLKVVNDKTLLATVDIGKGLNMGYARCPDRSEVKPFEFTNNRAGFDSFWSHLVEARDAKELDDIVVGFESTGAYGEPLQDFLKNKPVKLVQVNPMHTKRIKELQGNSPNKTDRKDPKIIADIIELGHALTVVIPEGAAAELRRLTHARERTIKRRTALYNQLQDLIFISFPEFLQVVKDVKTKTARHLLQSYPDPQDIMALGLDSLGAIVKRVSRGKLGAAKAKNLFEAARVSAGITEGRFSISLEIQATLEAITACDDFIIRLEEEMPRRLEEIPYSRLLLSMKGIGRITAAGLIGEVGDFNSFDTQRELLKYAGFDLFEISSGKLRGSRRISKRGRPLLRKLLFFAALNTVRKGGIMHEHYRRHLQKGMKRIKALVAIARKLLGVIFALVRTGREYQLKYQDIKPHAHMAEAA

SEQ ID NO: 411747 - protein, 291 aa, unidentified
MDKEERILWKGELPTSKESISATLATLKLQGKDIEACIEPVEQWGWYAEALEDAGILVHLVNPLSAKDRVTARKKSDRVDSEKLSGLLIHDYLPTSYLAPRRTRDLRELVRTRSYFVQIRTRIKNRIHSILGKHGLIFPYSNVLGKRKAIRWYEACQIREVFRESLNHFLLIGWQLESHISKFDSLVKHEDAKDKDVPLLRTIPGIGEFRALAIKAEVGDFARFPSAPALASYAGLVSSSNSSGDRNRLGHITKAGSRYLRWVMVETVTKVDESWGELFDFFKRIREKKGF

SEQ ID NO: 411748 - protein, 360 aa, unidentified
MTGTMTWAAMDVHARSVHAAALDVETGELCRRRFGSGRVEPVVEWLAGLPGPVRACYEAGPTGFGLYRAAAAAGVCCEVIAPSKTPRAAGDRDKNDRKDTEHLLRQLMAGALTPVTVPTPTFEAARDLARAREQVRVDLMRTRHRLSKLLLRHGRVWDASTWTQAHQRWLGAQRFEHVNTELAFIDALAACQGLVARRDALDERLSRVAREDEFWPLVRRLRAFRGIDTLSALIVVLEVGDFHRFDRAVALGSWVGLTPCRHQSGEQDTHGPITKTGSRYARRILVEAAWHYSRTPRIGAALAARHEGLPDHVLQIAWRAQHRLHRVHRRMHAHKKPMNVANVACARELSCFLWAAATAP

SEQ ID NO: 411749 - protein, 429 aa, unidentified
MPQSQGHKECSMNREQNARVSEKRYVGLDVHKHYITVGGMNGQQEIVLRPRDVEMERFKTWAESNLRKTDEVVLEATTNTWDVYDTIAPLVKRVVVAHPAEVKQIANSRVKTDHQDVIRLIRLLIADIVPEVWVPPVEVRELRALISYRWRLVKMSTAIQNRMHSLLHRHNIQAPQGKIDTGENREWWQKLKLSELENLRLKQEIKTLRLIRENIVEVERELGRLSNSERWGDQAVYLMQIPGVGIIVTMTILSAIGDIRRFESPKKLVGYAGLGAGVHDSGQKHRGKGITKFGRKELRWALVEAAWQAIRSNPRWRAEYEALCKRKHQNQAIVVIAHKLLVTIWYLLNKQETYHHSNEEDLAYKMLTWAWHMDKSALNGMTNQQFAKYGLIRLGKGEELTRIVRGGLPRRIASKEEVLVLKPELCLKQ

SEQ ID NO: 411750 - protein, 330 aa, unidentified
MNSIAHTRQVIVTRIICGVDVASESLEARIGPQGAADSFPNHPEGIAALEAFCRAHQVELVAMEATGGYEQQAFAQLSEQGLPTAILNPRAVRQFAQSMGRLEKTDRIDAGMIAWYAEVKNSPPTCLAPQSQQHLRALVTRLRQLTEIRTAQLNQQRLVIDRSVQASFTKLLAFVERQIRALEQDIAKLIEQDPLWRELNQAFRTIKGVADRTVARLMAEMPEIGTLPNKTISKLAGVAPMACDSGQYHGKRKVRGGRPAVREILFIVASVVGRHEPDFMAFQQRLKQAGKPPKVIRIALAHKLLVRLNAKAREVRQPQLPAPALLRTAS

SEQ ID NO: 411751 - protein, 415 aa, unidentified
MKVVFPTCCGVDVHKTFVVATIITTPADSLQPHYQKKRFSTFNSDLNRFADWLLEHNCLDVCMESTGKYWVPVFNILEKRGIRVVIANPKWVKAVKGNKDDTKDSKWIGDLFRIGLVKSSFIPELNIRILREFLRYRYKLVSMKSSEKNRFQNAFTVCNVALDSVVSDMFGKSATAITDYLTSDESFDPDHCVSLLQRSLKKKAEKVLESIEGYSISDEQKARIKIIREHYDFIEKLIAKVDTCVNEMVEKYEGEINLLCTIPGIDRNSAITIISEIGTDMSQFGSSKRLCCWAGLTPGNNESAGKKKSVRISRAGVYLKPALVQVAHAAVKNKANPYYALKYERIAKRRGKKRAIIAIARMILTAIYTMLCTGEVWNPVDLFKIDIPEHLKEQQLAKAIKQATRFLEKQGLTVA

SEQ ID NO: 411752 - protein, 405 aa, unidentified
MATVWAGIDAGKRAHHCVVINQAGTILLSQKVENDETALLELIARVLDLADESNGRADGDVCWATDLNAGGAALLIALLAGHGQHLLYIPGRIVHHAAATYRGDGKTDAKDARIIADQARMRTDLQPVRGADQISVDLSLLTSRRTDLVYDRVRSINRLRATMLEYFPALERAFDYSKKAPLILLSRCQTAEGIRRIGLVRLTNWLKKHRCRNSAAMAQKAMEAADSQHTVLPAQSMGSALVARLAEQISALDAEIAEVDAQITDLFRQHADADVLLSMPGFGPILAATFLANIGGNLKAFDTVDRLACVAGLAPVPRDSGRISGNLHRPRRFNRRLLRTCYLAALSSLKNSPASRTFYDRKRAEGKSHKQALIALARRRINVIWAMLRDHTPYQEPIPATLQAA

SEQ ID NO: 411753 - protein, 335 aa, unidentified
MENSLPALSLLILFVGIDVSKAKLDVACRAGQQLSQRVFANSAVGYQQLCDWLAGFAAKAVHICLEATGSYSPPVATFLEQAGYAVSVLNPAVLVDYRRSLNLRRKSDALDASLLARFAQERQPPLWHPLSQAVQVLRHWLRQRRQLLALHTQLTNFLEDPQLLAPIRQQWHEQREQIRQLQVISEVQVVRHLHQQPELLLLWQRLQTIPGIGWLSAAQLIAAVGSLSRFSHVGALVSFVGLAVSQQQSGSSVHRRPHLDHHGQRPLRALFYLAALNAMRSDPALAAWAQRLRERGKPEAIVHAAVMRKLVHIVYGVWKTGCDYDPQRAFPLQAA

SEQ ID NO: 411754 - protein, 404 aa, unidentified
MLTSLSAERFVALDVHKHYVVAGAVTAQQQIVLAPRRVDLDDLPDWSQHHLRPTDAVVLEATTNAWHLCDQLRPLVASVTVAHPLLVKLITSARVKTDARDTLHLARLLAAGLIPAVWIPPQDVRELRALVAHHTRLIRQRTQAKNRLHSTLHRYNIVPPAGGLFAAAQRSWWEALALSAVEKLRIRQDLSVLASLEPLIAEVEEELTRLSGTEPWLSQVVFVLQVPGIGMINALVLLAAIGDITRFPTAKQLVGYAGLGASVHASGQTYQTGHITRQGRKEMRAALVESAWMAVEHHPYWKAQFERLSARIGKKKAIVAIARKLLVVVWHVLSKQEADRHADQALVTRTMMEWARNKSTATRQGLTRVEFVRRELDRLGIGAEMDSFVFNGRTYHLPASASAR

SEQ ID NO: 411755 - protein, 330 aa, unidentified
MFYLGIDVAKAKLDCVLLNAENQKRKRKTVENSKEGLAALLKTLQGWGLEVASLHVVMEPTASYHELAALTLVEAGCIVSLVNPAHLRRYAQALGVRSKTDAADSALLARYGAAQNPVAWQPPSAAARALKALLTRRDAVAEDLQRERNRCEKMAQTEVPDSVRQSLGEVMGFLERQLETLQREIAQHIDDDPDLRDKRELLLSIPGVGDRVAQHMTALLTSHRFKTAEQLAAYLGLVPVEWQSGSSIKGRPHMSKAGPAHLRKLLYLPAIVAAQHNPHVRALYLRLLERGKTKMAAIGAAMRKLAHLCFGVVSSRLPYNPSVTPKNPCA

SEQ ID NO: 411756 - protein, 408 aa, unidentified
MTAECDKTGKSFAIQYLNRFTSGRRRHVSQSMEHDSILYVGLDVHKDSITAAYAPGTDEVQLLGKIGTTQTDIDRLCKRLQSKARHIHIVYEAGPCGYGLYRQLVQKEFDCMVCAPSLIPKKPGERVKTDRRDAVKLVRSLRAGDLSAVYVPTVDDEAFRDLSRAWVTAKDDLKRARQRLKAFLLSHGVRYTGRADWGPAHRRWLSAFSFPSAWQQFAFDELRRTIEDRLAQCDRLEAALREAVVNWRFYPAVLALQTMRGVKFTTAVGMLAELGDLSRFAHPSELMAWLGVTPSEHSSGDKRRQGSITKHGNSYARKLLVEAAWSYQYPARVSPEIQRRHEGIPKPIVDRAWDAQVRLCRRYRKLVARGKQKNIAVVAVARELAGFIWDISRLAMSLAVPREVPTTA

SEQ ID NO: 411757 - protein, 311 aa, unidentified
MEHSLFVGIDVAKEHLDVHLRPTGEAFRVGHDDTGLAALTARLAQLGPALVALEATGGYEVTVAAALASARLPVAVVNPRQIRDFARATGQLAKTDALDARVIALFAEAVRPPARPLPDAQAQALGELVARRRQLVDMLGAEANRRRLVRDPQLQRRIAAHIRWLERALEDLETDLHDTIRASPVWRETEDLLRSVPGIGPITAFTLIADLPELGRLTRRKIAALVGVAPFNRDSGTLRGRRMVTGGRAPVRRVLYMATVTATRRNPAIAAFYQRLRAAGRPAKVALTAAMRKLLTILNAILRDHRSWQSA

SEQ ID NO: 411758 - protein, 362 aa, unidentified
MTINAGVDLHKTQFTVFVKQSGNQFEQYSTEEDGYKKFLTRIQRWKKSGMTVRIGVESTGNTRYFKTRMEQAGAEVVVINTLKFKVVNESVKKTDRHDAATIAEFLEKDMLPESRLCSEESEQIRRLLKVRTTLVRTMVTVKNQIHALLTGLGMKDSRATLQSKRGRQKILDTLRKADNELVVQPLFETIEQLEKSVKSIESELEKLTEGDRTVELLMTIPGCGKIGAWTIRAFTDDISRFASAKKYSSYAGLVPWVQNSNETIHHGKITKRGPEELRTALVQVVMGMRRCRSTVSWRLMERYSEMKRNKGSGKSIIATARKLSTIIWCMLNTDQEFDPSLMIDRQLIRKADSMRTTASQSA

SEQ ID NO: 411759 - protein, 424 aa, unidentified
MDAKNQNSWEQHRYYMGLDWAKQEHAIAVVDGHGRIMVETKIEHTAEGWHRLREKLVDLAGPDLSFVAATIETNRGPAVERLLELGCAVYPINPNAAQCYRGRKAPSGSKTDRLDALSFADALRTDGHGWRQLNPEDPKTQELRLLCRDETSLIEQQTTLVNQLQQALHEYYPAALEAFDDWTSPSSWAFVERFPTPQALKKAGKRHWEKFLHTHRLYRPKTYAKRLEIFTSATEFCGSQAVTNAKSMLAVSLAKQLRLLEQQLQAYRERINALFHDHCDYSIFASLPGIGQKLGPRLLSEFSDDRDRFPAYEGLQCYAGTAPVSFQSGQIHRVRFRYACNKNLRAAVHLWADLSRKKCAWAQVYYNQKRLEGKSHACALRCLGQRWLKILWKMWQTKMPYDEQMHTRNQIKHGSWVLALTSSK

SEQ ID NO: 411760 - protein, 351 aa, unidentified
MKYYTTTTEYNCGIDLHARQMYACVMDRQGKVLLHCNIEGNDFAYFLKRVAPWRHDLTVVCECTFNWYWLADACDAAGITFVLAHALYAAHIHGGKNKNDRIDSEKLAHLLRSNLIPPAYRYPAEKRPVRSLLRQRMSYVWSRAELMTKLSMNQTAEGLVPAAKGGHNRDVWQERILAQITNPYHQLSVRCDMDAIRVYDKLIQTLDGTITLHAREHQSRDYNLLLSVPGIGPVLAMTILYEMDTVARFPTVKDFASYCRLVKGSVASAGRLKGLTGGKMGNAYLRWAFGEVAVICKRAHRIITPYAEKLVSKHGTFKGNAILANQIARAVYFMLQSGQAFDAERMVARRS

SEQ ID NO: 411761 - protein, 419 aa, unidentified
MAFKIFRKNCCGLDVHKTWIYACIGITDTNGRTEYKQARFSSFTKGLQELADWLAKYDCTDVCMESSGKFWIPVFNILEKTCWVTLAHPKYTKPQKGNKTDRKDAKWICDLYMCDMVKPSFIPPPDIRQLRDLMRYRMKLTNIVTSEKNRALNCLTVSNLKLDDVFSDVFGKSSRSIIHHILEHPGEAFDVAPFIDRRCKHPVEEVQAAVDGAVSHEQAVKLRECLQHLDELETHKSNVEKEIRRLAQQYPHQLELLQTVPGFSGNVMTAIALISEIGADMSVFPSAKHLVSWAGCCPRNDQSSKKVKSTRISRAGVYLKPLLVQVANAVIKSDKYPECKERYRRIKARRGHKKAIVAICRMLLTAIWNILSKLEPYSAAGYLEDKLTEHSVVITKSQGLELLRKRGYIFKDEVDPAPA

SEQ ID NO: 411762 - protein, 344 aa, unidentified
MIIIGIDPHKSSLTAVAIDNSATTLATRRFVVNAGTAAALAKWSRRWASRRFAIEGANGLGRGIAQVLVAADEDVVDVPSTLAMKVRVLSTGGGRKTDPDDAYAVALSALHHKGLHAVHSEDQTTILRLLSERRDDLAHERTRTLNRLHQLLRELTPGGVPLGLSADKAAAALRRIKPTTATEACRRDLTKELLADLRRIDTNIKINEGQTRDALAATNTTLPEVHGIGIILAAKLLGHIGDITRFPTVDHFASYTGAAPLDASSGEQIRHRLNTGGNRQLNTVLHTIAVCQIRDPGPGKLYYLRKLSEGKTPAEARRALKRRLANVIYRHVLRDHNHPNNAAA

SEQ ID NO: 411763 - protein, 325 aa, unidentified
MTVIVGIDIAKDKFDVCLLNEAGKAQQATFANSKQGINQLHHWMKKQGAKQAQVCLEATGIYGDLVAETLYSRKYQVSVVNPARIKAYADSQMRRNKTDALDAALIADFCRTQQPTLWTPPPPELKELRALIRHLDDLKQEKQRASNRLDVQTSAQAVIQHLEAQIELLEEQIQHTLHLIHDHIDRYPDLKHQRDLLDSIPGIGDLTASYLIAELGDISRFQDVGEVVAFVGLNPCQHQSGKRKATHGISRMGRAALRAALYMPAIVAKRCNPRLQAWANQLSQRGLTGKQVIVALMRKLIHLVYGILKSGRAFDPHFADLRLNA

SEQ ID NO: 411764 - protein, 390 aa, unidentified
MAQVRSWVGLYVHRASVVASTMDRDTGEMRTRRLPGATEEVVAFCAGLPGPTRVAYEAGPTGFGLARALAGAGVQCVIAAPGKIERPSSDRVKTDERDAQRLLRLLMIDALHAVRVPSIEEEALRDLVRAREDIRGDLMRARHRMSKLLLRHDVRFDGTASAWTTHHRAWLAKVDLGERGAQVTLRDYLGAIDALIIRRDTLEHTIGELVPSSPWADTVARLRCLRGIDTLSAVGLCAEIGDWTRFPRPAHLMSYLGLVPSEHTSGQTRRLGAITKTGSGHGRRLLVEAAWHYRRAPAKGQALKRRQAGQPAHVIAISWQAQQRLHRHPGSAWTRSAASAARSSPSPSHASSPASAGPPRTPTDPARTTSVKEAAGTIRHPRARASAIAL

SEQ ID NO: 411765 - protein, 356 aa, unidentified
MNDIKYIGMDVHQGSIVIAVLDTSGKLVMESIIETRGETILQFIRGLRGTLHVTFEEGVSADWLHELLVPYVARVLVCDPRKNALLKSGNKNDRIDAHKLAGLLRAGLLTAVYHGESRGRLLKELARSYRALTKDTTRVMNRLKSLYHSQAIRCGGTQVYTQRHRQRWLEQLQETGARRRAERLYQQLDLLQPLRRQARQELVTEACKSVAAARLRGIPFLGPVRVAVLLAIVETPFRFRTKRQFWSYVGLAIETRISGEYQMAGGRVQRTRKRVALRGLNPNHNCELKRLFKSMAVEASTRLGPWHDWFTAKVNQGVRPEMVRLTLARKLAAITLAVWKKGRKYDDGEPLKSRAA

SEQ ID NO: 411766 - protein, 361 aa, unidentified
MLYLAIDQHRKQLTVNLRDENGEVVLRRQVSTQPARVRAFVAEVAQRAAAHGGCVAVVEVCGFNDWLLELLDEHGIRVLLVQPQRRNRHKTDRRDSNDLGELLWVNRHRLLAGQKVHGVRVVQRPTRRDAEDRQLTALRQRLGQLRTRTLNKIQRLLLKHNLHHHCPTKGLQTKAARKWLETVALPEIDRLEMDLLLAQWNLWDAQLDRAEEQLTRRHADSREAQIVATVPGAGIFGSLALASRIGSIDRFARPGSLANYWGLVPGCRNSGEATQRLGSITKEGSALARFVLGQMVLHVLRRDASMKAWYLRIKRRRGAKIARVAVMRRLVSVLWHMLRQGLAYEVCRQTGKLRREAQPAA

SEQ ID NO: 411767 - protein, 364 aa, unidentified
MEHIAIDLGARESQVCVRSAGGEILEERRIATRPEKLRCYLAQRPKSRVIVETGAEAFWVAEIACECGHEARVVPSMLAPSLGVGRRGQKSDQRDARVLSETSCRIEVPTVHIPAVETRRLQSRLGMREALVRSRTKLTNVTKAYLRTIGERAPIRSAKKLVVQLREKQAQAAQHLEPLLRTVEELNHSIEQFDEELEKLAADNDVAQRLQTVPGVGVVTSLRYMATLDVASRFRNGAAVGSYIGLVPSEHSSGQKQRKGGITKAGSPSMRGVLVQAAWAALRSRRHHNDPMVCWARGIAQRRGKKIAVVALARKLAGILFAIWRDGTRYDAPRAASEELPAPPRRWAPSKGPRRPLRLESATV

SEQ ID NO: 411768 - protein, 391 aa, unidentified
MTYFIGIDIAKFKHVCFIKNHNDEVIQNSFSFSNDKTGFNHFYSVINGLDPNQQKRIGLEATGHYGMNLKVFLEDNNLSFMEINPILINKFSKGSTLRKTKTDKIDAALIAEYISKNIYVTYPQKHYLINSLKSLTRTRDSLIRQRSLQLVKITNVLDLIFPEFKPFFNNSLKSSTVLYLLRNYSSPSKMANMNSESYKKMSWKLKRTISYAKFCKLKVLAKNTIGSDDDYLVYQLQMFIDIYDCLDSKIKELEDNITQLYLCSNSHIHTIKGISIISAACIYSEYSGVQPFHNPNQMLAFAGLDPSKDESGEGGKSGFMVKRGSSYLRYILLNVSQMVIIHNSKLYDYYLKKRNQGKHHRVALSHVARKLIRIIFHLEKNNIDFDPNKVR

SEQ ID NO: 411769 - protein, 347 aa, unidentified
MTLVADGLVVGVDTHKDVHVAVVLDRLGRRLAVREFPATDAGNTQLVRWLAGLGPVTDAGVEGTGSYGYRLARLLTGRGLQVWEINCPDRSRRRCKGKSDPVDAENAARSVLAGEATAVPKDRRGFVGELRLLMLTRRSAVKARTQTSNQIKAFLIDGDDALRARLHGLRKARFGRACAALEPGDGLRRALAVLGRRWLALDAEARDLEKQLAALIGAHAPQLLARHGVGAVTAAQLLVTAGANPGRLRGDAALAALCGASPVEASSGKTSRHRLNRGGDRAANNALWVIAHVRTISDPRTRAFVAKRTATGNSRKEIMRMLQRYIARELYPLIIDALGTAATVSLT

SEQ ID NO: 411770 - protein, 357 aa, unidentified
MKQSNELNFKGQNIYIGLDVHLKSWTVTVLSEVSVLKTFSQESNPDKLYRYLCNNYPNAEYYSVYEAGFCGFWIHHRLTQLGIHNIVVNPADVPTMTSERLRKTDAVDSKKLAVGLRAKQLRGIYTPDDEAIEVRSLIRLKSTITKDITRQKNRIKSHLRYLGIDIPQEFTGPSFHWPMRFIDWLRDVSIKTTSGRQALDMHIRRLEDLHSQNLEITREIRELSRTDRFNQIHSLLMTIPGIGRTVSLILMGEIIDIKRFNSSEQLAAYIGMIPMCHSSGEHIGRGNITVRRQAELRSVVIEAAWAAIRQDPALQLCYANNCKRMPPGKAIIKVARKLINRIYFVLKRHQPYVQAVA

SEQ ID NO: 411771 - protein, 468 aa, unidentified
MVKSTKSVAQHLGGIKGNLFTERLESANLEKTMIVPIDIGKNSHKAMIANYFGSVLHSPFEFDNSMPGVSLFHKRLSSLAAHLGTERILVAMEATGHYYQNLSLHLQGLGYETYILNPISTKRCREAGLTWSKTDEKDLVAIGQALISAYATPLHLQEPVWASLKIIERQRRYQIKHQTALKNKVHAILDSLCPGISEVDIFKEGHLWNNASMDFFMNYSTPTQIIRLGSQRALNFFRRRGRRLNKLHADQLIQWARNALSHKQPETPTMQYILSLLLHQLCRVNEDIRLLEIEVIKNLVQIPPVLLLTIDYIGPVTAGEFGGEISPLSQYRCARSVIKGAGLDPVSYQSSKYEAPEHPISRKGSSPLRYISIDIGDRLMKNNEHFRFFANRLIGRGKSENCACVAVTGKFIRIAYSMLKELKPFRPSTGLGIAKDPLRKIEQFLIQRKAPELIDSCIQSAKHYLKGA

SEQ ID NO: 411772 - protein, 371 aa, unidentified
MKYEIKILKYAVGIDISKADFKACFVSIDNNQHIKIIASRSFSNSNAGFKKLDQWINQKRKDNAIGLVLVLEATGVYYENLAFFLQDKQYALSVVLPNKAKKYLEYLGLKSKTDKIDAQGLAQMAAQQQLRLWQPATKFWYELRALTRHYQNLQEQKTAVGNQLEAATHSANSSNFVLKSLKLQIKRLNLEVKKAAIAIKAQVQKDEKVYAKILGICKLKGLAILSVTTVLAETFGFELFENYKQLISYAGYDVVENQSGKRSGKTKISKKGNSRIRRILYMPAFVAVEYQQTVFCNLYNRIYEKSGIKMKGYVAVQKKLLVTIFAMWKNNTAYDNDYHKINIRRNGSVGVSLSGTSSSEAAIITNEPMIV

SEQ ID NO: 411773 - protein, 364 aa, unidentified
MNKCHSNTELSSYEGTRCQFNGGTGAIKLGIDVHQDFYVVAMQQGGANPKPPQRFAKAAFLHWAAKLKQGATEVHAVYEACGFGFTLQRNLSALGIHCYVVCPQKLDEHNKRVKTDGLDAKALCLKLDRFVQGNRCALALVRVPTEEEEQKRAIHRQREQLVKARKQLEAQGRSLMVNHGYEPVQNWWKPRTFAALDVPQWMRELLCNWQPILLALQEKIAALTVQLQCAAGPDQPRGLGLMTSVIIDREIGDWNRFHNRRQIASYTGLCPGEYSSGNTRLQSCVTKHGNPRLRAALVELSWRLVRFQPNYKAILKWKRLLAKGALSTGAARKKAIVAVARQLAVDLWRVRTGRCKPQALGLVI

SEQ ID NO: 411774 - protein, 360 aa, unidentified
MRHLSAKLLSDRISSEWEPSMGKVTTIGLDLAKHVFQVHGVDAEGATVLRKQLRRAQVLAFFSRLPPCLVGLEACATAHYWARELRALGHEVRLMPAQYVKAYIKRNKHDAADAEAICEAVQRPTMRFVPVKTAEQQAAVLLHRGRERLVRQRTGLVNALRGHLAEFGVIAPQGLRNVGKLIAIVRDEGDARLPHLARQVLQVLAAQIEQLEAAVAAIEKQLMAWHKSNPVSQRLASVPGIGPIIATAIAATVVEPSGFRSGREFAAWLGLVPRQNSTGGKHRLGGISKRGNQYLRRLLINGASANLLRSKATKADPWVIGLRRRRPPLVVAVALANKTARIAWAVMLREKEYQPRAMAA

SEQ ID NO: 411775 - protein, 415 aa, unidentified
MSDPKRWYAGVDWGSQSHCVFLTDGEGRKLGQKFFKHSGEGLAEMADWLLKTSGAEAAGQVFVAIEVPHGPVVEALIERGFAVHAINPKQMDRFRDRFSMSGAKDDSRDAEVMASSVRTDPRCFRKLVAGDPVVVELREWSRIADELGAERNRLANRLREQLWRYFPALLELEEDCGAEWLLDFLVVAPTPAKAARLREARVTQFLKQRRIRRFDAAAILKAGRATPPTLAPGSVEAASAHVASIIPRLKLVNRQIKEADRRIAALIVSLAANEESEPGQEKQHDAAILASLPGVGRTVLATLLAEAWEPLQRRDYPALRSLGGVAPVTKRSGKSCIVVRRQACDNRLANALYHWARVAVQHDPRSRAKYAELRKRGHSHGRALRSVADRNLNVACAMLRTGTLFNPSLAAQKPA

SEQ ID NO: 411776 - protein, 370 aa, unidentified
MQSTTKFIGLDVSKEKIAVAIAEAGREEPRWYGTIPHTAEALRKLIKQLGGKETLAFCYEAGPTGYEAYRWITSMGAQCCVIAPTLIPKRAGDRIKTDRRDALQLARLFRAGELTSIYVPTREDEALRDLIRARSDAREDLHRARQRLIKFLLRQQIHPPVTIKRRWTQKYRNWLDTLKFETQPAHQAMWKEYKYAVHEAEQRQKRLEASIMEEASKGAKASVIHVLQSLRGIALLTAVTIAAEIGSFKRFRSPAQLMAYLGLVPREHSSGQTVRRGSMTKAGNTHLRRAIIEASWSYRYSPAVKGELAERLSGQSAEVQAISWKAQERLHGKYKRLVYGKGRPANIAIGAVARELTGFIWAVAHTLEEA

SEQ ID NO: 411777 - protein, 325 aa, unidentified
MSSPSPAINIGIDVSKETLDLAVHETNTHWTSKHEFTEFSKLVKVLRSLTPTRIIVEASGGLENLLVSYLAVAGLPVIIVNPRQVRDFARATGQLAKTDRLDAFVLARLGATLQPVVRPLKSAETQELEALVNRRLQLVEMLTAERLRLQQAQQQRRQAIIKDLKAHISWLQKRLDQCENDLSQLLRSSPIWRETDRRLQSVPGVGPITSLVLIAELPELGHLANKQLVALCGLAPHARDSGKWHGKRTTRGGRARVRTALYMAALVATKHNLVIKTFYRRLLRAGKEKKVALTACMRKLLVILNAMLRNQTSWQPPRLVSGAQL

SEQ ID NO: 411778 - protein, 331 aa, unidentified
MNQVGIDISNKTFDASMQSSANVYRRQFVNTPSGRRKFIKWALKNSDSARVCLEATGIYHLQLALVLHDQAAIELMVLNPCAARRFTQARMVRAKTDPVDADGMLLYLQSMPFRPWIAPSDDALQLQCLSHRLDQLTKERKRECCRLHACQRAGDHTRVVQRDIKAHIKQLQRRIDNIQYHAIELIQHDSQLADDLRIIDSIPGFAELSAMKVMAELAPLAKDMKPAQWVAQAGLDPRPFESGTSVHPPRRISKQGNARLRTALFMPALSAARHDPNVKAFYESLLGRGKAKMQANAAVMRKLLHAIWGMLQHREEWDGNKFFRLEPKNMA

SEQ ID NO: 411779 - protein, 341 aa, unidentified
MKSVYYVGLDVHKKTISYCVKEASGEIVDQGRIDATRTSLDAWAEALPGPWNGALEATLFSAWIYDHLQPLAEDLAVAHPAMLEAITRAKKKNDRADAEKICDLLRCNLLPRCWMAPGWIRDLRRVLRFRNLLVRQAVRMKNRISGLLMECGEEHVKSKLHGKNYFYELLDSLASTPESAIELLVYSRGMYELFVELETSLRRGLLRHPRLEQRVALLRTIPGVGEVTALTWALEIGEVERFSSIGRAVSYCGLSARQDESAGQSKRGPLSKQRNAHLQTILIEASKLAPRYNPWLKEVHEKALESGSRNRATVAVGRKLVAFLMGVDRSGRPFTPRSQAA

SEQ ID NO: 411780 - protein, 449 aa, unidentified
MQEPQEIQDEEHEQLVARVAAIDVAKASGMVCTRVPHASAQGRRVTKVWEVPATTGAIIELGGHLVGLGIERVTLESTSDYWRGFFYLLEAAGLEVQLVNAHHVKNVPGRPKTDKLDAVWLAKLTERGMLRPSFVPPAEIRQLRDDTRLRLDLPRDRSRHAQRIEKLLEDALIKLSTVATDIMGKSGRAMLEALIAGQRDPGVLAGLASGRMKAKHAALVQALTGRFDDHHAELARLLLDQYDALTAQIDRLTTRIEALIAASPAAQGVSADGTTGPDAGTGPDAAVLAAIQRLDEIPGIARHTAQVILAELGLDMGVFPTPAQLVSWAKLCPRTIQSGAKHRVGTTGKGNPYLKGILGEAAAAAAKTDTFLGERYRRIVKRRGKLKALVAVARSILVIIWHLLADPAARSHDLGAGYWADRIDNTKKTRNHIRQLQALGFTVTLTPAA

SEQ ID NO: 411781 - protein, 355 aa, unidentified
MKRTPKYAGLDVHQATTVIVVREESARVIARAILPTDAMALTEFFRSMRGSVHVTFEEGTQAQWLYDLLVPLVERVVVCNRRETRRQGNKSDWHDAEDLAELLRRNAVRPVYHDRAPHGAELKELARTYVNLVEDSTRVMARLKALYRARAIPTRGHAVYSPRQRAKWMAQLPAGAVAFRADALYAELDVLQRVRGTAKAALIRAARRHPAWAVLRAIPFLGPVRVALLLGFLGTPWRFRTKRNLWAYAGLAVTTRITAEYQLEGRIPVRRRRTPLTRGLNRNHHRLVKAIFKSAATAATVRPGGLQEFYHRLVAGGMREELARVTLTRKLAALTLRLWKTGEAYDPAKLTRQAC

SEQ ID NO: 411782 - protein, 411 aa, unidentified
MENIFPCCAGLDVHKDSVEACVRRIEPNGRWHQQTRHWGTMTRDLLAMADWMAAQGVTQVAMESTGVFWKPIYNILESRFTMLLVNARHLKQVPGRKSDVRDCQWIAQLLQYGLLKGSFIPPRSQRELRDLTRHRTQLVEEKTRTANRIHKVLQDTNIKLSSVATDVLGVSGRAMLEALITGEEDPVKLAHLAQRKLRSKIPELEKALEGHLTEHHRFMLQLLWKQLAQQEELIAELDRKIEEQTRPFAAEIDRLDAVPGVDRRVAEVVLAEVGADMKPFSAHENLASWAGMCPGNEESAGKRRRRRITPGNPWLKPTLAQAAWAASHTKNSYLASQYRRLAGRRGRKRALIAVGHSILVIFYHMLKAGTSYTDLGGDFFDRLQPERLTRYYVKRLERLGHKVTLESRAAA

SEQ ID NO: 411783 - protein, 386 aa, unidentified
MQASTVVTPTGGYYGTIFISIELSQRSWLVTLHSPDKDKISRHKLESGDHAGLLALIGRVRERAARALGAVPAVMSCYEAGYDGFWLHRLLLAAGISNYVFDPASISVDQRARRVKTDRIDGEKMLRTLMAYLRGEPRVVRIVRVPTPEQEDVRRASRERDRLTKEQTAHTTRIKALLRLLGMAVGNPRRRDWLTWLAAQRDWLGQAVPARMLAEIKHEHARLMLVREQLEALTRPPAAADLTPAAAQMAERSEFLLRLKCLGPAFATTLTNEVFYKDFRNRREIASYFGLTPSPWQSGGIDRDQGISKAGNPRARCAAIEMAWLWLRHQPDSKLTQEYRRRTLNASKRIKRIAIVALARKLMIALWRYLTTGLVPEGARLKTVEM

SEQ ID NO: 411784 - protein, 347 aa, unidentified
MRYVGVDIGKWKCRAAVMNPEGVLIDEFTFNNDHQGIEDLASRLTTEDRVVMESTGSVWETLYNHLDERHIPVVLANPLKTKAIASARIKTDKVDARILAHLLRGDLVAECYVPPRELREIRALVRHRASLVRARTTVKNRVHAIVDQHGLRCGYSDLFGKRSLEWLRGLELGALDRLMLDNHLGEVESLNGQIRRVDEMIRSRGSLDEDVRLLLSLTGVDVYTALLIRSEIGSISRFPGYKRLVSWAGLAPSLHQSGTVEYSGGITRQGSRMLRWAMVESARTAVRHDERMRVFYERVKRRRGDGKAVVAVACKMLKVIWFMLSRREVYQSRNEGRYGVKLKSLVR

SEQ ID NO: 411785 - protein, 320 aa, unidentified
MMAQVDLVVVGIDVAKDKVDACIRSLPLRQTCPSTAQGQRKLVAWLRKHKVNKAVMEASGGYEREWVRVLHQAGIEVRIVDPKRVRSFALSAGRLAKNDAIDAEMIAWFAETFSEAPSPTHDAAHEELQALVKARKGLLDLKIRLQNQNEHAAPGPVQRAYARILKSLAAEIAKLEAAIAVKIKATPDFAERAEIIESVPGLAETTSATIIAGMPELGQVSNKISPALLGAAPYDDDSGHRRGERHIKGGRRWLRNAIYMPCLGAATQNNPVLKAFYHRLIAKGKEPKVALIACMRRLIVIINTMIARRQKWDPSRYALN

SEQ ID NO: 411786 - protein, 343 aa, unidentified
MDHFAGLDVSVKETSVCIVDDTGRIAREVKVASEPDSLLQVLTNPAYHFKRIGLEAGPLSQWLFSTLAEAGLPVICVETRHMRAALKAQVNKTDRNDARGIAQMMRAGLYRPVHVKTLRSQKLRMLLTHRKLLQSKAIAIENDLRATLRNFGLKVGMVGTVKFETRIKELVDNLPELAVLVEPLLIVRRVLREQIGILHRRLLAVVRDDDVCRRLMTVPGVGPVVALTYRATVDVPARFRNSKAVGAVFGLTPSRYQSGESDRTGGISRCGDEMMRAMLYEAAQILLVRSAKWSWLKAWAMKIARHRGLKKAIVALARRLAVIMHRIWVDGTEFRWTREVAAT

SEQ ID NO: 411787 - protein, 392 aa, unidentified
MFYLGIDIAKVNHVASLIGEDGSVLLKAIKFTNSNDGLQKLIDSISVYDLSQIYCAMEATGDFWLSLFSALTDKDFNVSVFNPYQIKSFRGAYSNRKQKNDVIDSIIIADFLRFNGVNQTCLPNDDLLALKNLTRYRSNLVNNIAKIKTQIKGILHKVFPEYSDIFSDVFGNSSKQILLNCPTPNEVANFNTRKLANLLKKASKGRHGSDTVRKIKDLAKNSFGIKFTGDACSFEIKQLVSQIIFLEDQVDELDLKIKEIYSNLDSHLESIPGIGKTIAPIILAEIGDINNFSTTSKLTAFAGIDPSENQSGNKKSTNEKTSKRGSPYLRHAIYQAAFIATNNDPVMHDYYIKKRAEGKHHYVALAGVERKLLGIIYHVLKENRDYRPPKSS

SEQ ID NO: 411788 - protein, 346 aa, unidentified
MALATISVLGVDLGKNVCSVVGLDVSGAVVMRRKVRRETLIGLAEKLPPCVVGMEACCGAHHLGRLFAAHGHDVRLMSPEYVRPYVKAQKNDDRDAEGIAEAATRPTMRFVELKSQDQLDMQTLHRSRDRLVGERTALINQLRAILLERGMVAPQGKRKLEQFLAVLMDERSGAGLSPRMILLVGDARVQWAELDRRISAFDAEFVRWVKENEEARRLTTIPGVGAIVASALIAAVGRAESFDRGRDLAAWLGLVPRQFSTGGKPKLLGISKRGNKYLRRQLIHGARAALPYVAERDTPLGRWAKGLMSRAHRNVAVVAFANKLARIAWAVLRRRLRFAEGLPMAA

SEQ ID NO: 411789 - protein, 355 aa, unidentified
MNQEKYIGMDVHAATISAAVMNAEGKVLMECVLETKAATILEFIQGLRGTLALTFEEGTMATWLHDLLKPHVSRLVVCDPRKNALMRDGNQNDRVDARNLAELLRTHHVHGVYHEKHGTRALKELGRSYLTLTKDSTRVMNRIKSVYRSWAIPCAGTSVYSRRHRAEWLAKLVEPGVRMRAEHLYEQLDSLQPVRQAARRELLRESRKHAAVKLLRQIPAIGPIRSALLVAILQTPHRFRTKRQLWAYSGFAVQTYDSGEYRFVRGKLQRNRERITVRGLNHNHNHDLKNLLKGAAITAIERPGPLQDFYAALVDKGIRPSMARLTLARKIAAITLTIWKKGVSFDPKQLQRQAA

SEQ ID NO: 411790 - protein, 343 aa, unidentified
MEAYAGRQFVGIDLHRRRTVIVRTTEGGEVLETVRIVNDVERLASVMARAGECPEVVLEATYGWYWAVDALQAGGASVHLAHPLGVKAFEYRRVKNDVRDASDLADLLRMGRLPEAWIAPPATRELRELVRHRAKLVGLRSHCKAEVHAVLAKCGVQVLMSDLFGLAGTELLDRLDLPAPYAARIASLRRLMDDLDFEIDLFAGMVRGRMVREPGYTAVQKIPGIGPTLGAVFVAEIGDITRFASAPKLTCWAGLTPKHHESDTHVHRGRITKQGSRLVRWAAIESVKRIPASSPAGVLRERVADRRGRNIGSVAAARRQLEFVFYALRDGHVRALQHRPRVA

SEQ ID NO: 411791 - protein, 389 aa, unidentified
MKIYVGIDIAKLNHFAAAISSDGEILIEPFKFTNDADGFQLLVSKLESFDKNSIIIGLESTAHYGDNLVRYLVAEFYQVCVLNPIKTCQMRKNNVRKTKTDKVDTFVIAKTLMMQDDLRFITFFDLDMMDLKALGRFRQKTIKQRTRLKIQLTTYVDQVFPEIQYFFKSGLHQNAVYALLKEAPSPKEIASMHMTHLANLLKVNSHGHFTKEQAKELRVLAQKSVGANDSAISIQITQTIQQIELLDSQLEKIEAEMTDIMKFNDSVIMTIPGIGYINGGMILGEIGDIHRFSNPNKLLAFAGLDPSVYQSGNFQAKTTRMSKRGSRVLRYALVNAAWNVVRNNATFKAYYDAKRAEGRSHYNALGHCAGKLVRVIWKMLTDEVEFNLE

SEQ ID NO: 411792 - protein, 335 aa, unidentified
MQIYGIDLAKEKFDVSFFDLTSKKVSNQPSHKVVTNNLKGIGKFFKGLPSDAVLVAEHTGVYGDTLLKCCMDSNVKIAFVGGYVIHRYRTTPDRAKTDVLDCALLRDFGERYPDKLKYKTFPEEALYELRQLARHREMLVEQRKQLITADRSEDCRPIRSLAVKRSMDHIKEMLDTEIAETEKEMLKVINGHESIHHNYELVKSVDGVGLITAVELLVKTENFTKITTARQYAAYAGTAPYEKSSGKMDKGAHISKIGNRRSKTLLYICAESARLHNKEIKLYYERRTLIDKKPRHYVLNAIANKLLRIIFTLVEKGEYYDANFIRQDPRVVKYN

SEQ ID NO: 411793 - protein, 357 aa, unidentified
MYLENAQNNFNNQVFYIGIDVHKKNWAVTIRANQMELNTLSMNPSPKELFNYMHKRYPKGTYISAYEAGFCGFWIHHDLEQYGFHNYVVNAADIPTTHKEKSHKTDKFDSRKIARELENNSLTSIYIPDTSMQQLRSLCRLRDKAVRHQTRLKNRIKGHLHIYGKTIPSQNEMPHWSDRFIKWLYSLTFEHEPARDYLLFCLEELEQQRLRIVNITKQLKRNIREYGFEPTIKLLTSVPGIGTVLSITFFCEVMDIHRFKKFDHLKSFVGLTPSVESSGETTIEYGLTKRRNRILRYLIIEAAWVAIRKDPALLQAYSRLTQRMKGQDAIIRIAKKLLNRIYYVWKNQTYYVPAIIK

SEQ ID NO: 411794 - protein, 384 aa, unidentified
MSKHNILFIGLDTHKTFTEVAYIEEQRGAKPIHLGKILSNKAAFKKLARQLQSKYPDATLHFVYEAGPCGYWIYRLLTSLNHCCFVIAPSLIPKKPGEKIKTDKRDAIKLAKLLKSEDLTPIYVPEPEDEAVRDLSRARETGMKDLKDAKYQLKALLLRNNINSKVKDNWSIQHLRWLAELILPHPCQQIVLQEAVSTITERLKRLKRLDNELTHQVKKWRFYPVVKAIQALRGVRLLVATGVIAELGDLSRFDHPRKLMSYLGLVPSEHSSGDKRHLGAITKCGNSRARRLLVEGAHSYKHNANISKEMQLRQEGLSKEIVDMAWQAQLRLCRRYNRLMHKGKHRNVVVTAIAREMIAYIWAISREVVLPKVDVKLRMSRMPA

SEQ ID NO: 411795 - protein, 356 aa, unidentified
MSQKLNSVIAVIGIDIGKNSFHLIGQNKRGAIVLRQKWSRGQVEARLANMQPCLIGMEACVGAHHLSRKLQALGHDARLMPAKYVRPYSKGQKNDFRDAEAIAEAVQRPTMKFVAIKTADQLDLQALHRVRERLVGQRTGIINQIRAFLLERGVAVRQGLGFLRAELPAILAKRTDVLSPRMLHLIEGLLDDWHRLDARIEALSNEIGALACQDPACDRLMSVPGIGPIIASAMVAAIGDGSAFSKGRDFGAWLGLVPKQISTGDRTILGSISKRGNRYLRVLFVQAAWVVLTRVRPENWERYGLKSWIEAAHQRLHHNVLAIALANKLARIAWAVLNKGRAFECVKSHASASQSA

SEQ ID NO: 411796 - protein, 345 aa, unidentified
MPIVGGLDIHRKQITFDYLDTVTGEVKRGQIAPAGRSHLRAWLARFASWDDVAFAVEGCAGWRYVTGELAAAGIAAHLGEPADTAALRGRKRHAKTDKTDARHLRTLLAEGRLPECWIPPAQILEYRALLETYHDLRAEHTAWVQRIHAVFFHQGAPALSEGALRTGQGLAALRAAAAAHLSPAGQLQVATALDMLTATEARLGPLRHQLRDAAAHLTGAKVLAARLYGVGPVTALALTCWLAGAGRFSSSRKAVRFTGLDITVHSSDRKGPPGRLSRQGPPVLRWAVYEAGKTHARTSAPDHAYYAAVKDRKNSKRAALSEARKIVRQACHILTELGDDALTAA

SEQ ID NO: 411797 - protein, 363 aa, unidentified
MATITMGVDLAKQLFSVVELDAGGRVRQRRDLKREAFAAWLVQLPPGTVVAMEACSGAHHWARRCVEHGLVPRLMAAQFVKPFRKSQGNKNDRNDAEAIATAARQGNMRFVAVKTVDQQARLAWHRVREGYKAEGLAISNRIRGLMAEFGVVVARGDRALLRVLGDPAVRQRLPTMLLGLLDDLQQHWQQVRERVAACDARIAAHASLDVRSQRARQLTGVGPLTADAVVATIGDGREFTHGRQFSAWLGLTPTQHSSGGKQRLGQISRRGDSYLRTLLIQGARSSLQRANAVAPDKATAEQIWIRSLAQRMPFGKVLVAIANKHARQLWAMLARDEDYDAEAWLRHPMVQRPAKHKTHAMAA

SEQ ID NO: 411798 - protein, 435 aa, unidentified
MDEVTDEPLYRDRVCGIDIGKAGLVATIRVPSERNPARRAAETRSFGTTRREVLTLADWLRCWQVPAVVMEATGDYWKGPFYRLEAEGLECVLADAKQVKNLPGRPKRDPADSRWLAACFERGAITPCFVATPEFRIIRLHTRYRRDLTEERTREKQRAEKLLESAAIKISSVVTDLHGVTGRDIMDRLIAGERNPKILAQLARRRARRKISQLEEALDGAEFFTTAHAVLLAKVLERIDRLAADIDQLTVVIERLLAPYEEQLQQAESMPGWGRRAAQDTLAETGPDMGRFATGAHLASWAGRAPLDHQSGARAGRAKAKKGNRYLGAVTGETAVAAGRTQTREGVRHRRLARRRGAAKACVATGNTQLKVYHKLLSNPGMRYVDLGPDYYERQRGIRRQVAHHIGKLGALGFEVTLCRIPEPEGPMGSQSSMI

SEQ ID NO: 411799 - protein, 371 aa, unidentified
MSVISKAPDSVVIAIDPHKASWTAAAVDASSQSVATIRVPVSRGGYRALLQFASRWPDPTWAIEGATGLGAPLTARLRADGMDVVDVPAKLAARVRMLSTGHGRKNDDADAFSVGVAARSARTLTSVTVEGTVTALRAIVEHRDDLVKTRTQTVNRLHVVLTNLVPAGAQRELTANKAAELLRGTRPRDAAGKTLRGLAADLVTEIRHLDRRITKAATDIETAVTASGTTLAELSGIGALTAGTILGRVGSISRFRSAAAFATYTGTAPIDVSSGDVVRHRLSRAGDRQLNRCLHVMALTQIRLDTPGRTYYLRKRTDGKGHKEAMRCLKRRLSDVVYRQLRSDANRREAGPGGHSGAALKSSAASSNPAR

SEQ ID NO: 411800 - protein, 428 aa, unidentified
MKSNTQNAKIAAITEKTLVIGIDVGSEMHYARAFDWRGYEYSRKPLAFKNDEEGFETFMTWIDEMKARFDKTDVIPGMEPTGHYWFSLGRFLQENGMKPVLVNPHHVKKSKEMDDNNPSKNDRKDPKVIAGLVNEGRFSYPYIPEGVYAEIRTLSSLRQQAQSQITRIKNRIARWFSIYFPNYKDVYGDAWAISGIMVLKQAPLPEDIAELGIEGINRIWRDAKIRAVGLKRARTLVDAAEHSVGSREAKEAARIEIRMLLADYEMYVEREAELMKLIEDKIREIPNIDNVLAIKGIGLKTITGFMAEVGDIRRFDDPKQIQKLAGYAIVKNSSGKHKGQSRISYRGRKHLRYVLYEAAVSVVAHSPEFKGIHHYYTTRTQNPLKKMQSMIAIACKLVRLFYMLLTTGREYDPSKMMGDIKRPALMGA

SEQ ID NO: 411801 - protein, 461 aa, unidentified
MARSHSQHKQPKPAPPGALPAMNTNAAGIDVGATAHFVAVPADRDAKSVREFGPFTNDLYRLAEWLRACGIETVAMESTGVYWIPLFQVLEERGFEVKLVDARQLKRVPGRKSDVLDCQWLQQLHTFGLLAGAFRPDDQICVLRSYMRQRAMLATYAGQHVQHLQKALVQMNLQLQVVLDDITGATGMRIIHAVLAGERDPERLAALRHGKCKHSEATIAEALRGDWREEHLFALEQAVELVEAYQAKIAACDARIQAHLQRFEDRGTGEPPPPGPKPRADRHDLSFEATAELYRLTGVDLTAIDGLQAHSVLKIVSEIGLDMTRWPTAKHFGAWLGLAPNNRVSGGKILSRRTTPSANRAAIAFRVAAQSLHHSKSALGAFLRRKAAHLGMPKAITATAYKLARILYAMLSTGAAYVDLGQDAYERAHTARVVRSLSRRANDLGYALVKHDPAHALSPSG

SEQ ID NO: 411802 - protein, 366 aa, unidentified
MLQRAELSGQADSENNLGGSSETMYYIGLDVHKRTISYCVKDAAGHVHSEGKIGSMRRELDGWIRTLPQPRMIAMEATIFTGWIYDHLLPHAEKVKVAHPLMLRAIAAAKKKNDRIDAGKIADCLRCDFLPECHMATREIRDRRRTLRYRNLVIKQMVQMKNRVSGLLMETGVSYNKQRLHKVGYFGELMTTNKEVQQSIRPLLKLSRDMISRSQKLEYALVSSLERDPLLQERLRRLRTVPGVGPITALTWALEIGDYTRFSSIKQAISYCGLCGEEKSSADKVMRMPISKQRNKHIQQVLIEAAKLAPRQSHELALIHARELERGHRNRATLAVARKMVCYMLAVERRQQDFVPAEEFSRTVAA

SEQ ID NO: 411803 - protein, 401 aa, unidentified
MQDTQQHGAVDVFIGVDVGKGQHHAVALDRNGKRLYNKALPNDEVKLRALIAELKTHGRLLFVVDQPSTIGALPVAVARAEGVLVAYLPGLAMRRIADLHAGEAKTDARDAAIIAEAARSMPHTLRSLRLADEQLAELTMLCGFDDDLAAQVTQTSNRIRGLLTQIHPALERVLGPRLDHPAVLDLLERYPSPAALAATSEKTLANRLTKLAPRMGKGLAAEIVQALSEQAVTVPGTQAATIVMPRLAQQLAALRQQRDEVAAEVERLVLAHPLWPVLTSMPGVGVRTAARLLTEVAHKAFASAAHLAAYAGLAPVTRRSGSSIRGEHPSRRGNKVLKRALFLSAFAALRDPVSRAYYSRKIQQGKRHNQALIALARRRCDVLFAMLRDGTIYQPKSAPNA

SEQ ID NO: 411804 - protein, 341 aa, unidentified
MEEYIGLDVSMKETAVSIRREGKRIWRGKCASDPRIIAELIRKRAPAVKRVVFETGPLSVWFYHALRAEGVPAICIDARHAKAALDMAPNKTDANDADGLAHLAEVGFFREVRVKGFDSMLTRTLVAARTRLVRITTELSNQIRGLMKTFGLLVPAGKGSTFEKNVRSLLVDQEGLASIALPMLEAWRSMRIRAAELGRQLVAGARQSQACQILMSIPGVGAITATSFVTAIEDPDNFKKSRSVSAWLGLTTRRYQSGEVDYDGHISRRGDRHLRGLLYEAATVILTRSSADSGLRTWGLELRERVGFKRAAVAVARKLAVTMHALLKTGAFFDRTAGAVA

SEQ ID NO: 411805 - protein, 332 aa, unidentified
MVAGTHGSLNKAGSTKMTQISTTAGIDTSRAKLDIAVHGGVEHWQVENTSVGWRRLAVGLSQAGVTRVGIEASGGYERGVVGYLRDKGLTVLVLQPIQVKAYARVHLRRAKNDKLDAVLIAACAATIDQPRIEPDERLAKLAQHLTFVEQIEEDIARFKVRLEHIDNPRLRRMVLADIARLKTRRSAELSRIVMALRAHEDLGRRLDLVLSIPGLGERTAIALIVRMPELGRVSREEAAALAGLAPYDDDSGKHKGQRHIAGGRGRLRRSLFAAALPAAFRWNKALIELYTRLTARGKAHNAALIACARKLLIYANTVVHRGKPWVERPATI

SEQ ID NO: 411806 - protein, 411 aa, unidentified
MKQQKATDVTILPQLDKACGIDIHKDKIVCFISCKDGSGQELKEFGTFTYELQKVKEWLQSNQVEHCLMESTGIYWMSLYTILTDCGISVIVANPTHIKQIPKRKTDRKDARWLCMLLMHGLVRASFMPTSEQRVLRDYCRSRLFYSRQQNKIQNRLWKILESNNIKLRSVISSINTKTAMSIIRLLSQGVIDREQLAECSLGRARKNKENMLLALEGTLAAHHLTQLQLLLQDFDHIQQQIKTLNSLIDESIAKHYSVAFECLDTITGIAQRSAEIILSEAGKDMSRFPTADHFTAWCGLAPGNNESAGRQGNTSIKKGNTYLKTAIVSAAWAAVRVKNSYWHALFERMRKRMKAQKAIVAIARRMLKVVYNTMETLTHYKEKGVDHYYEMQEKATAYRQAGKLWPSADV

SEQ ID NO: 411807 - protein, 427 aa, unidentified
MNYTQNQKISQITPSTLIVGIDVAKEKHVARFQDDRGLEFGKRLIFENRIHGFQTLLDCVKRLQKDNHKDHVIFGMEPTGHYWLNLAYFLKAKGYDVVLVNPMHVKKSKELDDNSPTKNDTKDARVIAQLIKDGRYSVPNLIEGVYAELREGVKLRDQLIKQLMMIEGRIENVIQRYFPEFFDVFGDWKGKAAFHTLRMFPFPSDIQKLTPEEVLQKWKPHVQRGVGIKRATKLVEVANKSVGIEVGIQFAKRELDCLLDQYQLYKTQLAQLDEELEGVVESIPGAKQMTNIPGLSHTTIALFFAEVGDLTKYNHPQQLVNLAGLSLREHSSGKYKGQTRITKRGRRRLRKALYLAIRPLVAHNPVFKALHHYYTNRPDRPLKKQQSLIALCCKLLRVLFAIGKKQCEFDGLKLLKGLPQLKALQAA

SEQ ID NO: 411808 - protein, 454 aa, unidentified
MDEADLEVAFHDRDNHPVRPGRRYDNTPEGIALLRGDICAAASLVGKHPEIWVGFEATSNFHKNLERALRSARPRRMSVFVLNPRSVKMFKKMYLQVGKTDEQDARAIAHFLLKEKPAPNPEPAEGQAELQELVRMRRTLQEENTMNKNRLCRLLRQHFPGYKRILNGKLNLKTLVAFSNFASPDDILAAAPGELENASVAFRHRIGAPFAARLRKLAAAAPVQSLNQGIVFIIKSTARRILDLYDTIKTLDSQIESALDKYFPDSVLHSVPGLGRVSIAAIIAETGDISRFATLEDYIGFIGLYPVRWQSGKTDFTSRMTGKGNKLLKMTFLVASAPARIYNPVIRAMYDRLRARGKSKKAAGGAIARKLAAIVYTLLKNNEQWNPDKAMRGMEKSEKMIADIERKKAEMKKDGSSSGRATIEKTCRPASFPVKGIVAQTRKSRKKDAVPRRR

SEQ ID NO: 411809 - protein, 385 aa, unidentified
MQIIVGQSRFAPFGLSFPGFDELKEGVQNVTARYDYHIGVDYHKSYSHLVVQDSAGKTLRSGRVKNDRQALGSFLERYRNNSHAVMEATRNWMVMYDWLDDICEDVVLAHPLKVKAIADARIKTDKIDATVLAHLLRADLVPQAWAPGDRVRELRLALRERMFYVRLRTMTRNRVVTVFDRYPEQTAQLKKLGDLFGKTGRQQLVGLNVSEIDRIQIDRGLEFIGDINERIKQSEATIRAMTKTNGNVKLLKTIPGIGEFFARLIDAEIDDISRFRNPKKLAAYAGLVPSTYSSGGKTYHGKIIRQGNKWLRWAFVEAVQPAIATDPQLRAQYEHLKFRGVNKARVAIARKLLAITFQILRDQRPYERRSDNSVEGSSSTKSRLS

SEQ ID NO: 411810 - protein, 402 aa, unidentified [sequence omitted]

SEQ ID NO: 411811 - protein, 345 aa, unidentified
MEIRTIGIDLGKTVFHLVGLNVRGEVVVRKKCSRTQLLRFTSNLRACLIGMEACGGSHFLSRALREQGHDVRLMPAQYVKPYVKTNKNDYIDAEAIAEAVTRPTMRFVPIKSDDQLDLQSLHRVRERWVVRRTAVINQIRGLLLERGITMRKGRKHLEASLPHILEDAENKLSGALRALLTQLQIEMQYLHRQIEECDQLIVHIASELEPCRRLVAIPGIGPVIATATIAAIGNGAAFKKGRGFAAWLGVVPGEHSSGGKQQLTGTSRRGNKYLRKLFVLGAHTVLLQRTKQASGLSTWLASLIARKRKQVATVALANKMARIVWAVLFKGEAYRPPLVPQLDAA

SEQ ID NO: 411812 - protein, 427 aa, unidentified
MNHSAYQPILCIGADVHLDEIVLRAVDKTLGHEVVERFRVTNNLPGAQLAAATIAGVATELGYSRIAIGWEATGMLWIPFHRFLSTEPLLQPFELDLVCFNPKLVSNFKDGLLLRSPKNDDRDALDVAERLRFGELPVSYVPGDFWQGLRRLTRYRYRLSKALSREKMRFQSQAFLKCSDWKRVKVFSDIFGATSIALLTQFTVAELHEMTLDQLTDLISHRGHGRFGDPAATARAVRQALLTSYPIDPLMDEMLTAALAAGWEHIRYLQRSMKHLDQLIARHIDLVPNPLITIKGLGSIITAGTLAEIVDILRFPEERHLAQYMGLTWHKNSSGRFISQNTRLTKVGNVYLRYYFIMGANLLRQHNLEYKAYYWRKYQEVSKYQHKRALVLTARKLVRLVHALLTKNEPYVRPRTTRQDREEYSLQ

SEQ ID NO: 411813 - protein, 414 aa, unidentified
MEKQWNIVCGADIHKKFLIATILSRSGTKKTKRFGMTLNELLNFKNWVIENGCEQVAVESTGTYWTPIHAVLEGSVGFIVGNAYKIKHTPGNKNDLADADWIAELCLNGMIEPSRIFPKADRDIRRLTRIREGYVNDMTREKNRIHHALDSCGMKLSSVLSDIFGKTGQSILDGLLEGRNIDDILKGINLKRIKATAEEIKNAIKGSLDFTQILLIRGSLEQMGAIQKRIDELRKEIKERIAYRKDDLKVAMSIPGVGFTSASTLLAEIGDINDFKKPEQLAAWAGLVPSVYQSAGKLITGSITKHGSRHIRWILVQVARVIARGRNSKLKRFFLRVKAKKGSNVTVVALARKVLCILHHLLINKEMYKEDGIDKKVKIDVGKEFSQQEMNLEEMITYIVRAGYEVRKGSGGGG

SEQ ID NO: 411814 - protein, 407 aa, unidentified
MYYLGIDISKKSFTISVLDEEGEAITKSLTYPCTRKGFEKLVDKISSLKLKKSEVMIGIEATGNLWENLYSFLEGYKVMVLNPYQTRKYHQVLSKKAKTNKVDSLVIAGLLRSKEALASYVPEEEVQVLRELVRLCHHLQKDKKNYLRKAYTLLNLVFPEYTNLIKNPFRKVSSMILKKYPTAVDMARARKTNLVKMARRIQGNNYSFELAEKLIQVAKESIYSGKASEVRGMALRILIDEIESLKNKIKEIEDKIEEILSSNQPSSPQKRLLGVPGVGPKTIAAFLGEVGNDVTRFSSANKLIGFIGWHPRISESGESKNLHPKMSKKGPSALRASLYMAAVASLKHNPYLRSLYHRKISEGKESKQALICVGKKIISIMYSMLKYEADYDPQRIFFQFDKEQVLI

SEQ ID NO: 411815 - protein, 360 aa, unidentified
MQTQRTELNFKGQKLFIGIDVHLKSWTVTILTEYLFYKTFTQPASVEALFNYLNRNFPGATYYSVYEAGFSGFWAHYKLMGMGIQNIVVNAADVPTSQKEHLQKDDPTDSRKLARSLRSGDLKAIYIPSPSTLGDRSLVRMRATLIKDMIRFKQRIKSFLYFYGIAYPPEFERSGTHWSKRFMKWLGEVVSLQHETGDQALKILLQEAAQQRKLLLEVTRKIRLLAGSEKYSKNMALLRTIPGIGFITSITFLTEIEEIKRFENTDHFAGFVGLIPNRHSSGEKDNNGEMTFRGQDALRKMLIESSWMAARFDPALMMSYHNYIKRMEPNKAIIRIARKVLNRMYFVLKNREEYVSAVVK

SEQ ID NO: 411816 - protein, 353 aa, unidentified
MPRSTQPTIAVMGIDLGKYSFHVVGLDRKGAIVLRQKWTRGQVEARLANMPPCLIGMEACVGAHHLSRKLHSLGHDSRLMPARYVRPYSKGQKNDFRDAEAIAEAVQRPTMKFVATKTADQLDLQALHRVRERLVRQRTGIINQIRAFLLERGIAVRQGQRFLRAELPLVLAKRTDVLSVGMVHVIEDLATDWHRLDERIEGLSSEIEALARHDAGCARLMTVPGVGPIISSAMVAAIGDGAVFAKGRDFGAWLGLVPRQISTGDRTILGKISKRGNRYLRVLFVQAAWVVLIKPQTWERYGLKQWIVAAKKRLHHNVLAIALANKLARIAWAVLHKDRDFHCVRAEAAPGCA

SEQ ID NO: 411817 - protein, 351 aa, unidentified
MGEVTRIGLDLAKNVFQVHGVDAAGNTVLCKRLTRSRLLAFFEELPHCLVGMETCSGSHHWARELAKLGHEVRVIPARYVKPYVKTNKTDARDAAAICEAVSRPDMRFVPVKNTEQQAVVVIHRTREILGRQRVMLINALRTHCAEFGIVAPQGARHVGELVARLTDPDDTRIPDLAKQALRVLVEQLEACGERLSTIEAQLLAWHQSDADSQRLATIPGVGPITATALAANLGAGTQFRSGRDMAAWLGLVPRQHSSGDKVWLGAISKRGNSYLRRLLIHGARSVLRWQAPESRPGTPWVKKLIKTKHANVVATAMANKNARIAWSVLTRKEVYDPHRQADVDATAALRG

SEQ ID NO: 411818 - protein, 430 aa, unidentified
MKQSELLHSLFVGIDVSMKENVVHAMPFSPEDHPGHAHLRFSAPNTPAGSVGIVEKVSDFLKFYPDVIQVVIALEATSVYSFHLATFLSVAHFNGHIPAIVYSVNPKEIHAYKKTFTDVGKDDYVDAMVIADYARSNKIRSRPWKGPELLGLRVLTRLRFRIAKLMGIVKNSTGNSIYLECSGLMTGENPFCNVWTTTCQELLTTFQGPDEILSLPDEELLNFITEKGHGRFSHPLDVVEKVKKAARNSYRLDKRVYEPLTSGLSVSFFIIHSLEAAIKKLDKSIETMAKSFSSDSYQILLSIDGVGPVIAGGLLAEIGDIKRFKTDDALAKYIGLTWRGKQSGQSESPVKHLSKAGDVYLRYYVLLATGQIINYSAKYREAYERIRSRKTLCPYRAALNLVARKIVRLIFTLLDKHQLYSDNKVMVTLE

SEQ ID NO: 411819 - protein, 371 aa, unidentified
MQSILYVGMDVHKESYTLCCYNFDEDKLQYQQVITPDFKMVLKYLEQIRSQNEGEVEFVCGYEAGCLGYVLYHQLNDSRVKCVILAPTTMAITTRNRVRTDKRDAGNIARCLAFRTYSEVYVPTDEDNSVKEYIRMRDDQKKALKIIKQQILALVLRHGQRFEDGKSYWTIKHVTWLKSLKLGGVLEEALSEYLVTYTYLTDKIERMDRRIEELGDGERYREKVKKLSCLIGIKTHTALSVIVEIGDFNRFGKPDKLASYLGLVPSEDSSGEKRRRGGITKAGNSHVRRLLVESAQSYTRGAIGYKSKDLKRRQNGNTTQVIAYADKANERLRRKFYKMTLKNNINRNVAATAIARELVCFMWGMMTDNVA

SEQ ID NO: 411820 - protein, 409 aa, unidentified
MSHNIAGIDVHKKLLMVVIAEVARPEQILAGRRFGTGHAALAELGHWLLEWKVTEAVMESTAQYWKPLWLELEPLLRLHLAQARSNRAPRGRKSDLADAKRLLRRFMAGELFLSFVPEPEQRGWRTVTRARLQLVRERVLLQNQIESLLEEARIKLSSVISDLLGASGRRILRALAMGEADPEKLAALGDDRLKCGRAVLADALTGSATAVQRTLLKQHLQRIDLIDEQVEELNRLAAAHLLAHQDVVMRLVEVPGIGAEAAQEILAEIGPTASAFPSAAQLASWVGVCPGSEESAAQNHSGRCAKGNRFLRRLLCQAAQAAVRTKGSHFESVFRRLIVRLGYTKAIWAVAHRLCRIVWKILHQGARFIEQGEAINPRAVRRCISHHLNALRRLGYVIPAASTAVVART

SEQ ID NO: 411821 - protein, 412 aa, unidentified
METVVERPAALDVHKEQVTATVRVPAADGGREQHLAEFPTTVAGLLTLRDWLAALGVQQVTMEATGVFWKPVWAILEDEFECVLVNARHVKQVPGRKTDVSDSAWLCQLAEAGLLRASFVPPKPIRALRNLTRYRKTQIQERAREANRLHKALEDTGIKLDCVATNILGKSGRAMLDALVSGTTDPEVLADLAKGKLRAKLPALREALEGRFDHLHAVWIGAILNHIDFLDEQIAGLTEAIGEQIAPFETAVELLCTIPGVQRRTAEVIVAEIGIDMSVFPTAKHLASWAGLCPGNDKSAGKRRSGKTRNGSKWLDWALEEAALAAVRTNDVYLAAQYQRLRPRRGHKKALGAVKHSILCACWHMLTTGELYNDLGGDYFQRRDPERITKRLIAQLERLGHKVTLEDLPQAA

SEQ ID NO: 411822 - protein, 403 aa, unidentified
MAAVERYVALDVHKHYLMVAAIDAAQQVVLAPRRMSLERFAQWAPDQLTQRDQVVLEATTNAWTLYDQLAPLVLEVKIAHPLLIKLISSARVKTDTRDTLHLARLLAAGLIPEVWVPPPPVRELRILVAHRQRLVRQRTQVRNRLHSVLHAHQLPPPEGRLGSPQQQAWWDTLDLPPLERLRVRQDLVIQQTVDRLITEVDAELGRLSAQGPWKPVMPFLMQLPGFAVVTSMTLLAAIGDISRFPSAKKLVGYSGLGASVHDSGQTHRSGPITKQGRRELRTVLVEAAWSAVLHHPHWHTEFDRLVPALGKGKAIVAIARKLLVVVWHVLTKQLADRHADLPLVTRKLQRWGKHQRLAHQHGLSSSAFARQQLRRLGLDPLLERLAESEPGGETRPALALSGT

SEQ ID NO: 411823 - protein, 323 aa, unidentified
MKKTYVGIDVSNDDFVVAYRIENQTINTKTYENSKKGIKTFLKTIDENCWCIMEATGIYHLSIALAISKKEIKVSVVNPLQIKRFAQTKLSRTKTDKADAILIAEYGYRMKPKLYTAPEEFVMELKQLRSLVRMLKRNNRALLNQMHVLQRRDNTSKSALKICKSVIKFNNKEIKKIEDEMESIVKVHCKDIYDQLCSIPSISKITATEFIIVSNAFKNFDTAKEFACFIGISPCINESGSSVRGYRGISRIGDAHTRSTLYMCSMMAKVCNKGCKETFDRLVDRGKPKKLALIAVMNKLIKQAFAIVKSGNMYNENYQPKIT

SEQ ID NO: 411824 - protein, 424 aa, unidentified
MKVTYQTCCGVDVHKSFLVATIVKTTGGVEPSYQKKRFSTFNNSILAFKQWLLDNDCHDVCMESTGKYWVPVFNLLEDEINVVIANPKWVKAVKGNKDDAKDSKWIGDLFRLGLVRGSYIPCKKVRILREYTRYRYKLVSCRSSEKNRYQNALTVCNVALDSVVSDIFGKSSTSIIDYLLKQSGTSINHEEIASKLLRSLKSKEDAVIESVEGYQMTDAQKYRMRLVRAHMDYITAEINDVDKMIENMISSNPDFENAVQFLCTIPGVKRDSAVTIISEIGTDMTQFSSSKRLCCWAGLTPGSNESAGKKKSVRITRAGVYLKPALAQCAHAAVKSDKSPYYKKKYDSLVKRRGKKRAIIAIARMILTAIYQMLSTGEQWNPSDLYKIDMPVALVEKQKARAIKQAKKLLQREGILPPDEPLAS

SEQ ID NO: 411825 - protein, 426 aa, unidentified
MEVQSGKQEPQFAAFVAIDWADQKHVWCLQAAGSQQRESGELEHTPEAVEVWVGQLCQRFSNRPIAVAVEQSRGALVFMLSKYEPLHLFPVPSTMAANMREALYPSGAKDDPRDADLLLDLLLQHRDKLRHLSADTEATRRVQNLVEERRKLVDEKTAQTNRLTSHLKIYFPQILEWFEHLDSELVCALLERWPTLEELQKVPPAKLRTFFRKHHCRDEALIERRIVAIRQAIPAIRDRAVIEAKRTVVKVIVQVIRSLVEGIADLDEKIEEAAAAHPDFFIFDSLPGAGAVMAPRLLAAFGSQRERYGNAGEVQSYSGIAPVTERSGKKKWVHFRWACPKFLRQSFHEWAGHSIAHSVWARSYYQQQRSKGQDHHAAVRALAFKWIRVVFRCWKDGVVYDESKYLASLVRRGSPLAAVAATAKTL

SEQ ID NO: 411826 - protein, 422 aa, unidentified
MKNSAAKKMKQVPEGFLVIGIDPHKRKHAAVAITQDMTTRAKFKFDNTREGLESMTERARAEMVRSGCRGVMFAIETGGHYWRNIAYFLDEQGIPFRFINQYTLKRRREGKDLNRRKNDYRDSEVAAQLLCTGEFVESTLPQGVYAELRTAHNAYRRLVKERTRITNLIKALLDSLFPEFTHVFKDPCAVTAMTVLTTCSVPSVISAMTEEEFVAAIEARHDGRRLMRRKLKALHKAAKTSIGIAAGARSLSLEMSFLCEKIDLVRRHISVIDKNLAELVHQAEEGKYLLSIRGLNYIAVAGLLAELGSFKSYRSAKQMIKMAGSNPTESESGGKRSAHTPMSKQGRPVLRYCAWTAVIPMLRFNADFRAWAQRTKERPVHANPLNGREVVGAALNRLFRLAFALVKNQTYYEVSRAARSVA

SEQ ID NO: 411827 - protein, 354 aa, unidentified
MSGEKYIGLDVHQATISVAVMDSQGKLIMESILETKASTILEFLAGLRGTLSLTFEEGTWAAWLYDLLKPHVAKLVVCNPRKNALLQQGNKSDKIDARQLADRLRLNDLKSVYHGETGVRMLRELARSYLTVVKDLSRVMNRLKALYRSWAIPCAGRDVYYTRHRSQWLEKIPEAGTRRRAEQLYQQLDMLQHLRQQARRELLAESRKHTITAKLRQIPSLGPIRSALAVALIQTPHRFRSKRQLWTYSGLGLETGDSGEYHFVKGQVQRKKPVWIRGLNKDYNHDLKGLFKAAAMRASIQPGPFQEFYQRSLAKGIKPTMVRLTLARKIAAITLTVWKKGENFDVEKLKSQAA

SEQ ID NO: 411828 - protein, 419 aa, unidentified
MEQITEDDEIVARVAALDVGKATLVACVRVPGEDKPGRLQEVRTFATTTAALLELRDWLVCLGVTLCVMEATSTYWKPPFYLLEDAVGCWVVNARDVKNVPGRAKTDKLDAIWLCKLAERGMLRPSFVPPPWQRELRDLCRYRRTLVQERTREKQRAEKLLEDTQIKLSSVISDIFGKSGRDMLEALISGQRNPAVLAELARGSMRGKKSVLQEALTGQFRDHHGWLLRMMLDRVDALTAQIDALTGRIDEVLAPFAHQVAQLDEIPGVGKTGAQELIAEIGVDMTRFPTSGHLVSWARFAPRARQSAGKAKPGTTGKGSPWIAGMLGEAVPGAGRTKTFLGSRYHRLARKRGKQRAIVATGRSILVIAYQLLSDPGAQFADLGPDWHDRIAPLRRKRQLIAELERLSGKKVTLQEAAA

SEQ ID NO: 411829 - protein, 454 aa, unidentified
MRKPQVIPDEDHEVVYERVAAVDVAKASGVVCMRTPDPARPGRFVNRIWDNVPATRARIAELGRELLSCQVQMVTLESTSDYWRVWYYVLESIGLAVQLVSASQAKNLKGRPKTDKLDAMWLARLTQWGMLRPSFVPPAAIRRVRDFTRARTDLVRERTRVLQRLEKLLEDAMIKITSVARDGLKAKSAVAMVAALTAGERDPRTLADLAKGPLRGKRDQLAEALDGMFDSHHGVIAQMLLDQVAFLDQRIKQMEDQAIAALAQVTESWGVDAAGQTGPGCGTGPDSPVLAAAYRLAEIPGISVWLAIVIIAEIGLNMAVFPTPAHLVSWAGLCRSASQSGTRHGKGKQKKGNSYARAAAGQAALGAAGTATFPGERYARIARRRGGAIAQVAVARSIMIIVWHLLSDPAARYRDLGPDWHARRTNRDKKIRTHIRGLQALGVTVAITDDEHAA

SEQ ID NO: 411830 - protein, 421 aa, unidentified
MRKANTGKVKVVRDDALIVAVDIGMEMNRGYCTTPDGRSSKTFRFDNTRQGMDTLWDMIMINKNRFQCNDVIVGYESTGPYGEPMVHYLMKKLVRIVQINPMHTKRVKEINDNSPLKTDEKDPRVIADIIRWGRALSIVIPEGDAAYLRRLNNSRERHVRERTALVNQLQQLVFLLFPEFMTVIKNIKCKTPLYLLKKYPTPEAMSILDKQFLGEEMRKRSRGKFREHHADMLINLARNTVGIREGAAGLSMDIRHILVQLEMLKNLIAEIEGEMVIALGRIPYSPKLLSIKGLGVISVAGIIGEIGDFKKFETRSEIMKLAGLDLFEISSGKRKGQRRISKRGRSLLRKILYYAAIQTIRKNGILHDYYTRLTDRGMKRMMALIAVSRKLLGIIYAIVRDDSEYSINFESMKKQVIKKAA

SEQ ID NO: 411831 - protein, 309 aa, unidentified
MFVGIDVSKARLDVEFRPEGACFQVSNDEAGIGDCVRRLQALRPELIVVEATGGFETALVAGAAVVGLPIVVVNPKQVRHFAKAIGRLAKTDSIDAGVIARFAEAVRPEVRPIQNEAGELLTALLSRRRQVLEMMVAEKNRLVTMQERHVRQRITHHLHFLKQELRELDKDLDKEVRSTPAWREKEDLLKSVPGVGPVLARTLLAELPELGQLDRKRIASLVGVAPMNNDSGSLRGQRRIQGGRAQVRTVLYMAALVASRFNPRLKRFYDSLRARGKTGKVALVACMRKLLVILNALVRTGERWNAEAT

SEQ ID NO: 411832 - protein, 352 aa, unidentified
MSNPTRWIGVDLHRRRSQIAIIDEHGELTLSRRIVNDPETFKELLGDPDGTHVALEATYGWEWLADLLEEVGYDVHLAHPLRTRAIAAARVKTDAVDAPTLAHLLRTGLLPEAYIAPAELRDLRELLRHRAVLTRMRTAVKNRVHALLARQGIRPEHTDRFGKAGREFLAALELPAGARRRLDSLMSLIGDFDREITATTREIDARAKADDRVPVLCQIRGVGRYTAMLIIAEVGDVKRFPTARHPCAWAGLTPTVRSSDGKARLGHISHQGSPALRWALTEAAQKIPTGGGPLRATFERIAKRRGRNVAKVAVARQILTLCYYGLRDGEIRCLANQPDIDDHDNQDLAEAA

SEQ ID NO: 411833 - protein, 311 aa, unidentified
MRVHRNCCGLDVHKKMIAACLIREDGEGNSVTEKRLFGSMTRELHELAQWLCSAQVTAVAMEATGVYWMPVWNVLEPYGLQLLLINPEHYKAVRGKKTDLKDGTRIAELLQDGRLEGSYVPPVTIRVLRDLTRYRIKLVQYQSSIANRIQKLLEQCNIKLASVASDALGVSAMAMLRALAQGETDAVRMAGMAKKQLRKKIPQLQLALEGCVLPHHRLLLTEMIEDLDHVGAKITRIEDTIERHMRPFQEAVNRWLTVPGIKHRLAWTLVAEVGPTVEAFPSAADIVSWAGICPGNNQTAGKRKSGTTRGG

SEQ ID NO: 411834 - protein, 420 aa, unidentified
MTRRDNSKIIGIVHPICCGLDVHKESISACVIFSDKEGVDQYAVEEFGTFTDELMRLRSWLLKHDCPVVAMESTGIYWRPVHNVLEGSFQIVLVNARDIKNVPGRKTDIGDSKWLAGLLRHGLLKSSFIPPQAVRQWRDLTRLRKKYVQTAGDYRKRTHKLFESANIKIDSVVSDLFGVTGRNLMQLLIKEGESLKLSDIESCVRGKLRGKEMELFRSIQGFFTGHHRVILKTILETITGLESQIAALDRQIRSNMSEHKPMLDRMKKAPGISDVSSCDILAEIGPTLDTFPTDTSLVSWSGLCPGNNESAGKRKSGRSHVRKHHLKTIMIEVAWAAIKKKGSYFKDKYYRLKARRGAKKAIVAIAHRILLGIYHVIKDGVDFRDLGEDYLNLRSKSRKVMSLRKQARALGFDLVPQTES

SEQ ID NO: 411835 - protein, 408 aa, unidentified
MDVLIDRCAGLDVHQATVVATVRVPGPAGRESHTVTFGTMAADLLALREWLQAYGVTHVALESTGVYWKPVYYVLEDGFTLLLINMQRLKHVPGRKTDVQDSAWLAQLLECGLLAASFVPPPPIRELRDLTRYRLQQVRERVREVNRLCKILEDSGLKLTTVISDVMGVSGRAMLTALVQGTTDPVVLADLARGRLRKKLPELRRALTGRFRSHHAFLVEQILAKIDYLDETLERLNGQIETRLVPFAPMMERLDTIPGVNRTVATTIIAETGGDMAHFATAGHLCSWGALCPGHEQSAGKSRTGRTRRGNLYLRGQLIQGALGAIHSRQTALHARYHRVKRHRGHKKAVVAVAHQMLEIAYYVMRDGVTYHELGPDYFVRRDRERTIRRSVKQLEALGYRVTIEQAA

SEQ ID NO: 411836 - protein, 342 aa, unidentified
MGKINEFCAGIDVGKRFLLCCALTGAAQEEPRSQTRRFDVTVQDLVHLRDWLSSKNITHVVMESTGSYWVPIFNILEGHFTIVLANPEEVKNRKGHKTDRKDAEHLADLLRHDHIRASYIPAKPIRDLRDLTRRRLQLTQDASRERNRIEKLLEHVNVKIGNVLSDVFGVSGKSMLLALLDGNMSAERIAQLALGQAKQKIAQLTEALEGHCMRDHERFLIRSSLRHLACLQEETEEMDAEILRRMQTPPFREAFLLLQTIPGIGQLAAASILAETGTDLSTFPTAEKMASWAGLCPGNRESAGTRKGSQTTKGEPILTLHPGPVCVGCRSKTWVHIPIEIS

SEQ ID NO: 411837 - protein, 455 aa, unidentified
MAKKTTIPDPTLKPVNGNAAALDIGSTMHMAAVNPEHSDEPIRAFGTFTHDLHDLADWFASCDVTSVAMESTGVYWIPAYEILEQHGFEVILVNARYAKNVPGRKTDVSDAAWLRQLHSYGLLRGSFRPDAEIATLRAYLRQRERLVEYAAAHIQHMQKAMMEMNLQLHHVVSDITGVTGMRIIRAIVAGERNPDVLAAFRDVRCHSSTEIIRAALVGNDRDEHIFALTQSLEFYDFYQSKMLECDRRLEAVLAGLSVDKSHDATTLPRARTKTKQVNTPSFDVRAALYGVLGTDLTQIHGLGPSLALKLVGECGTDLKAWPSAKHFTSWLCLAPGNKISGGKVLSSRTRRSSSRAAALLRLAAVTIGRSDTALGAFYRRLAARAGKAKAVTATARKIAVLFYNTLRYGMTYKDPGASHYEERYRSRVLGNLQRRAKAFGFVLTEAPDQGELAVS

SEQ ID NO: 411838 - protein, 458 aa, unidentified
MRKSDKKQLQVKRPEKSGLALLNLNAAGIDVGAREHYVAVPADRDPQAVRCFGAFTQDLHRLAQWLVQCGIKTVAMESTGVYWIPLYQMLESYGLAVKLVNARHVKHVPGRKTDVQDCQWLQQLESFGLLSNSFRPEAKICVLRSYMRQREMLIRNAGRYIQQMQKALTQMNLKLQHVISDLSGQTGLRIVRAIVAGERDRLKLAALKDRRVKSDVSTIARALEGDYRAEHLFALKQGLELYDYYQQKIAECDTEICKEMQTLETRSNASAVRKRKPRSRHATGFDSQAELYRVLGVDLTSIDGLNESTAQLIVSELGLDICQKWPTEAQFTSWLGLCPNNEISGGKLLKRGTRKVVNRVANALRMCAQSLLKSKSALGAYARRMRSRKDTPVAITAIAHKLARLIYRTLKYGQEYVDTGSDLYEAKYKATMVKSLQRKAKLLGYQLVSSQTLDAVVP

SEQ ID NO: 411839 - protein, 412 aa, unidentified
MELLHRRCCGLDVHKETVVACLRLVSDGKVTTEVRTFQTTTADLLRLSEWLAANECTHVAMEATGVYWKPVWHILDDGQFKLVLANAAHVKNVPGRKTDVNDAMWLAELLAHGLIRASFVPDTQTQEMRNLLRTRKQLVREQSSHVLRVQKTLEDANIKLDSVLTDLMGKSGRAMIEALIAGETNPVKLAGLADRRVKASPEELREALRGRVTKHHRFLLRLHLNQIDALNAAMATVDAQVEANLGPFRTAVDLIMSIPGIKNLGAQAIASEIGIDMSRFPSDAHLISWAGICPRNDESAGKRRSNRLRKGAPWLKTTLVQCAWAAVKKKDSYLQAQFYRIKARRGPNKAIMAVAASILTAIYHMLKNGTMYQDLGRDHFDRRCKDQQKHSLLKRLADLGYTAEIKPVVATA

SEQ ID NO: 411840 - protein, 344 aa, unidentified
MEHFAGIDVSLKDSSVCVVDAAGRVVREAKVASEPEALIAWFRGLGIEVTLIGLEAGPLSQWLHAGLGEAGFEAVLLETRHVKAALSAMVVKTDRKDARGIAQLLRMGWFRPVHRKSPDAQEVRALLVGRKLLQAKLRDVEQSIRGILRGFGLKVGEVSKGKFAARIRELAAGHEMLEAVTGAMLAAREGLLAEFMRLHRRMLAIARADAVCRRLMTAPGVGALVSIAFRTAVDDPARFRSAKAVGAHFGLTPKRYQSGETDVTGGISKVGDAMVRTALYEAANVMLSRTTRFSALKRWAVDVARRRGLKRAKVALARKLAGVLHRMWADGTEFRWGKEMAAAA

SEQ ID NO: 411841 - protein, 409 aa, unidentified
MDNNEIVVERGCGLDVHKKSTSACIDGKGLKKEIRIYSTMTNELLMLKKWLKENGITHVAMESTGVYWKPVFNILEDSFKVILVNARHIKNVPGRKTDVQDCEWICKLLRSGLLRGSFIPPKDIRQLRDLTRYKRKLIQAISSEKNRVQKILEDANIKLSSVVSNTFGVSGNQIIEELIKGELSVEEMSKLTKGRLIKKQEVLKEALVGQFEEHHKFMIQASIEHIKSMENIIKELDAKIKKKIEPYKEDCERLQTIPGVKEESASSIIAEIGVDMDKFPTEEHLSSWAGMSPGNNESAGKKKSGKTTYGNKCLRSTLTESGWAASKTKNTYLRSKYYSLVGRRGKKRALVAVGHKILIMCYQILKDKVEYKELGLNYLDSRKKDKIVMSYLKRLENLGYSVELQPVVA

SEQ ID NO: 411842 - protein, 391 aa, unidentified
MAKHRADVVNDLSRSLVALDMGTTLIAVVEMSQSSWLVGGIVPGVERQPLKKLGVDQAALLKLLLRWRAEAERKGHKIARIAVAFEVGHDGFWLARWLTLQGVEPHVIHAASVAVTREHRRAKTDRLDTELLRRAFLGWLRGERGHCKMVAVPTLAEEDAKRPNREREALVAEATRLIARLKSAFVRLGIRGFNPKLKTAPERLEALRTPLGEPIPANTLAALKRDMVRHRLVKAQIREIEMARIERLTAAPAAGANAMVRLLARVVGISVVTADMLVHELLSRRLRDRRAVARYAGLTGSPDESGAKRREKGLARAGNARVRLGMIQLAWRFLWLQKDSALAKWYRQRTAAAPATRKTLIVALARKLLIALWRLVHEGIVPEGLQMRPIA

SEQ ID NO: 411843 - protein, 311 aa, unidentified
MTYFVGLDVSVQETAVCVVDDVGKVICERKVPTEPDDIAALLSTIGDDYVRVGIEAGPLSQWLVNGLTETGLPVVCVETRHMKAPQQINKSDRNDARGIAQMMRVGLFKPVHVKTLASQEQRMLLTSRKLLQRKLLDIECDMRGTLRNFGLKVGAVSTKNYDMRIRELVESFPRLAAIVDPLLTVRQVMRQQLASLHKMLLNMVRDDPECRRFMTVPGVGPVVALTYRASIDQPHRFVHSRDVGAHAGLTPKRYQSGEIDYDGGISKCGDAMLRSMLYEAAQSMLTRTKNGHGSRPGPCGLHSDAACGARP

SEQ ID NO: 411844 - protein, 372 aa, unidentified
MEERTKFHVGLDVHKDSISVAAAEPGRGAARLIGKVTHDVNKLLKVLTKVGTAEQLHIVYEAGPTGFGLQRALKARGYVCEIIAPSQTPRRPGDRVKTDGRDCIQLAECSRAGQLSAVWIPEPDDEAIRDLSRAREDAVNSRVRARHQLKGFLLRHDVRYTGKTSWCGAYYRWLATLNFGIGAAQTAFTEYWQAVKSADERVERLTKALQSSITGWRFEPVVGALQALRGVAAISAIGLVAEIGDLGRFAHPRKLMGYLGLVPSEHSSGERTSRGSITKTGNAHARRLLTEAAWNYRFKARIGKEAQVRQQELSETVRLMGWKAQLRLTQRFAALNARGLQANKACVAVARELAGFVWAIGTQAQREKLTTS

SEQ ID NO: 411845 - protein, 415 aa, unidentified
MKVVFPTCCGVDVHKTFVVATIITTPADSVQPHYQKKRFSTFNSDLNRFADWLLEHNCLDVCMESTGKYWVPVFNILEKRGIRVVIANPKWVKAVKGNKDDTKDSKWIGDLFRIGLVKSSFIPELNIRILREFLRYRYKLVSMKSSEKNRFQNAFTVCNVALDSVVSDMFGKSATAITDYLTSDKSFDPDHCVSLLQRSLKKKAEKVLESIEGYSISDEQKARIKIIREHYDFVEKLVAKVDTCVNEMVEKYEGEINLLCTIPGIDRNSAITIISEIGADMSQFGSSKRLCCWAGLTPGNNESAGKKKSVHISRAGVYLKPALVQVAHAAVKDKANPYYALKYERIAKRRGKKRAIIAIARMILTAIYTMLCTGEVWNPADLFKIDIPEHLKEQQLAKAIKQATRFLEKQGLTVA

SEQ ID NO: 411846 - protein, 403 aa, unidentified
MDEIRKRYIGLDVHKHYLIALGVDENLEVVLPARRVELSNLEAWMKKTLTRQDAVVLEMTTNTWQLYDELAEYAGSVTVVHPPHVALITRSQVMNDKIAASILARLLAKGLLVGIWVPPQEIRELRGLVAQRQKMTHLATQAKNRLHAVIQRHHLMPPEGNPFAKSKNGWWQALPLGKLEKMNLQSDLETLQFAEQQEERLRAEMTGIAAENEEIGRLLHLAGFGVITAVTVWAAIGDIRRFAEAKNLVGYAGLGTRVHDSGLTTRTGKITKAGRRDLRVALVEAAHVVANSHPHWKAELARLQPRLGYNKAIVAIARKLLVTVWHVLARKVADRFAEPEKVSQKLLRFAYEVGKENRPGRQTAAQFARERLDVLGIGQELTSIAWGSKKPIPLPPSALLKKK

SEQ ID NO: 411847 - protein, 370 aa, unidentified
MKYVGIDLHTNRFTCCYLSDNSKEKQTETFDLNSSGLNSFYSTIDNNTYILIEATINTFSFVALFKDLVKEVIVANTYQLKSIGICGKKTDKIDAAKLAEKLKVQVVSGVQQIVSVVIPPKEIRDLRALFTTYRTLRKETVRTKNRIHSLLKENLYPFTKEFIFGKKTRKEIRKISTDYLLSFQINLLMDTLEQLEETFERLVNEILKAGAQFIPHIDILTSMTGISVITALAIIADVIDASRFRNSKHFASYLRSAPRVESSNEKTIIKSTTKAGRKLSITLLSQSLNHFRDNNKTLTRFYERASVYKKKGIVRMALCRRVLTQIYQMLKKKEYHYFRNSVLHEKKMSEYIKFLNKEKIIISQKMQIVA

SEQ ID NO: 411848 - protein, 340 aa, unidentified
MKAVTHVITSFVGIDVSKRKLDCAVLINGKVKSKVLSNDRTGLIQLDSWLQERGVVCDSAHLSLEATGPYSEQVALALVDFGWRVSVVNPARIKGFAQSELARNKTDRADAALLARFCAAMCPSLWVPPSPAYRQLCALVERLQALKDMHQQECNRLEAHHASGETTVLPNVKSHIAWLDEQIAQLQRTISDHIDGHPELKQDAELIASIPGIGDTTVAKVLAYAGNVRRFANAKALAAFIGICPRQRQSGSSVRGRTMISRTGHADLRKALYMPGLVALRHNPVLKVFGARMKANGLAPKAVVGAAMRKLAHLIYGVVKSGKPFDAGFAIGRVAIQDGI

SEQ ID NO: 411849 - protein, 320 aa, unidentified
MPQDRFVGIDVSKAWLDIAGRPDPAPYRLANDPGGIAALVADLRALAPALVVLEATGGLELPVVAALQVAGLPVAVVNPRQARDFARATGQLAKTDCLDAALLARFAEAIRPAPQAAVPEAVRHLDALLTRRNQLIGMRVMETNRLGRLADKAVRSEVQKHVAWLAKAIGRADAALAEAVKASPVWRAKDALLQSIPGVGPVATLTLLAGLPELGTTTGGRLAALVGLAPFADDSGSRQGGRHIRGGRAPVRRALYLAALSAVVHNPALRAFKERLAARGKKAKVILTAVARKLLVIANAIIRSGQPWRATGAEKIATTT

SEQ ID NO: 411850 - protein, 340 aa, unidentified
MSEIKRIAIDTSKAVFTLHGVDDAGRPMLRRNVRRRELLPFFEKLPPVEVVLEACGGSHHWGRALSTIGHRVRLLPAQYVKPFVKRSKNDRNDAEAISVAASQPSISSVPIKSLEQQAAAMLLSVRELLVRQRTQLVNALRGHAAELGMVAPLGEKGLAELRTEIAAADERAVPAAAKQALMLLGQETHRIETRLAAIEVKLMQQHRANPVSRRLSGIPGVGPIGALNFALRIDPAQFRSARHLAAWLGLVPRECSTAGRQRLGGISRAGDERLRQLLVLGATAVIRHAKPGRPATSPWLLSLLGRKPRMLAAVALANKMARIIWAMMTSGQAYRSQPAA

SEQ ID NO: 411851 - protein, 460 aa, unidentified
MPLQGAPGHPIDPLDVCLIFERSIPMTNRLQVGIDFSQKKADFCLLFPDGRPLEPHASFSNSCSGYSSAKHLLLDALDTYAFDGVDISGEATGFLWLPFFLQLAADPDLSLRDMDLFLLNPRWVKWFKKCFAEDHKCDEKDAFYIAERTRSHRPNVAWSPPDCLPLRFYTRLRFHIVQNLAREKCYFSAFLFLKASSYRCLKPFSDIFGVTSRLVLTQQPTLDELAELPVEDLAAHLHELSGHHLPNPLHNARKLRRVAQESFPLQESLVLPVQRILALSLDHIRFLEAQVKQVDRWIAAELEAYPVISQLATIPGVGPVFSSGIGAEIGGVQRFLQGQKWDKKRKRYRRRNLRDAEDAVAKIAGLWWPRADSGDFAAQDRHLAKSGNHYLRYYLIQAADKMRKHCTEYAEFYARKYKESSKHHHKRALVMTARKSVGLVVGLLHRDEPYRSREERANQT

SEQ ID NO: 411852 - protein, 350 aa, unidentified
MIIIGCDYHPAFQQIAFVDTDTGELQERRLQHREEAEKFYRDLAAQGMKVRVGMEASGHGRWFERLLAELNFELWIGDAAEIRAKRVRKQKTDRQDAQLILQLLLEDRFPQIWVASWGNRDLRQLLWHRHRMVQARTRIMNQLQGVALNEGLRCKKRLWRAWGREQLEAFRLAPWASRRRHDLLELLDRLTPTIAELTQAIEQEVEKCPEAQRLQTHPGVGALTALAFVLIIGKAERFQCGKQIASYLGLVPLEKSSGNQRRLGHITKQGSSLLRFLLVEAAQVTARSLPEWRSKYYHLTMRRGRKIAKVAMARKLAVRLYWMMRKEWDYGQLTKFGSHAGKLGTGDGVQ

SEQ ID NO: 411853 - protein, 307 aa, unidentified
MPEFIIGCDLSRACLDLHILPDGLASRIDNSPEAIEEWVSSLPPGCRVVFEATSGCDTDLIAGLCANGVAYSRVNPRQAREFARALGVLAKTDQVDARILAEMGLRLDLAITVTPDPSRIQLADYLRRRRQLVDMRKAEKVRRHSAGRRDILKDIDSLIRILDRRIEAMDIKIRTLIEEDEVLADDVRLLAAVPGIGPTVLATLLGELPELGKLDRRKIASLAGLAPHARESGTWRGQRRIWGGRRKVREALYIAALSASRRIPALIAMRQRMKEKGKAPKTILIAVGRQLLVILNAMIRNRTPIAL

SEQ ID NO: 411854 - protein, 414 aa, unidentified
MERVYERCAALDVHKAQVTVCAHVPDRRGERSELCAEFSTMTAELLALRDWLLGLGVTHVAMEATGVYWKPVYYLLEDDFELLLVNAQHVKNVPGRKTDVKDAQWLCQLLEHGLVRSSFVPPKPIRELRDLTRYRKSLVWERAREANRLHKVLEDANIKLDCVASRPFGASGKAMLRGLCEGNNDPVALAELAKGKLRAKLPQLRQALEGRFRDHHALLVSHLLAHIEYLDETIGSLSDEVEERMRPFERKRELLCTIPGVAERTAEVIIAELGPEMDRYPTHRHAASWAAICPGHDESAGKRRTGKTRKGDSWLRTALIEAAQSAAGRTKDTYLHSQYLRVKRRRGHRKAIVAVAHSILVAAYYILRDEVPYGELGGDYFVRREDQERLTRRLVRQLERLGQRVTLEPALEAR

SEQ ID NO: 411855 - protein, 316 aa, unidentified
MESQGPFVGIDVSAQRLDVAVLPHGAHFTVPYTDDGVASLVQRLQELAPQIVLLEATGGYEIQAAYAMSEVSLPVVIMNPKILRHFAKSTGKLAKTDKLDAQVLAHYAQAIQPPVRPLKDPEQHELATLMSRRRQLQGMIVMEQNRRRTSTPKVRHNIDQLLAYLRQLLKDLDREIHDFIRRTPLWHEKQEILRSTVGIGPKVSASLIADLPELGLLSGPKVTALAGLAPMNRDSGQYRGKRMIQGGRPAVRQALYMAALVASRHNPVIREFYQRLRQAGKPAKVALTACMRKLLVILNAMLKNYTHWEDRLPVAA

SEQ ID NO: 411856 - protein, 401 aa, unidentified
MISTPETIPIQRYIALDLHKHYIMVGGQNRDQEWILKPRKVLMPRFRAWAVQNLRAGDEVVIETTGNTWDIYDIVAPLVSKTLVAHAGKVRQIAEARVKTDPEDIRRLLTVLIGNIVPEVWVPPMDVRELRSLISFRWRLGKQITMSKNRLHNVLQRFNLKPPEGNLLADKNQTWWDEQEFSELTGLQVQLDLEIIAQLEAQKARIDQKLAELSDTQPWAGEMVYLMQIPGYGLLTSMIFLAAVGDISRFSDPKKLVGYAGLGAGVHDSGQKHQEKAITKAGRKELRWALVQAAWAAVRSDPYWKAQYQRLTKVKHPNKAIVAIARRLLVSAWYILTKREPYRQANEETLAYKMVIWSQQMDEKALGGLTRQQLVWSSATGRWTRADPHRAQWRSQTNCTR

SEQ ID NO: 411857 - protein, 346 aa, unidentified
MDHYAGIDVSLECSSVCVVDAKGKIVREAKVASEPEALIDWFHSLGFDLARIGLEAGPLSQWLYAAMKKAGLAVELLETRHVSDAFKAMPVKSDRNDARNIAQLMRLGWFRPVHCKSMSAQETRAMLTARKLIQTKLQDIENSLRGILRGFGLKVGKTTKRSFATRISELVAGHPALETIATAMLAVHMVLLREFNSFEKRVRAISLLDAKARLLMSTPAVGPIISLTYACAIDDPARFASSKRAGPLFGLTPKKHQSGETDYSGRISKNGDASVREALYEAAHIILTKPIKGCAQLKSWAMRIAKRAGMNKAKVALARKLAVIMLRMLKDNVPFNSTAKATAAAV

SEQ ID NO: 411858 - protein, 380 aa, unidentified
MEYCTTIGADVSDRTTKICVMTKAKGGERRIVLETTCATTKAGFEEVFAKFDRSWPVAFETGTHCRWMDRLFREMGFKTIVGNPGKIPSITKSNTKNDRNDARELARLAIADPAMLHPVFLRDEVYQQMLRFHHARNVLISQRTQTINQIRGFAKSMGHRIECSSTEKFHDQGKALWPRELEECAWPLMGVLKTINLKIKAYDKLIARLAERPEFKAMVDRVRVVYGVGIIGSTAFIAAIGGRPDRFGHTRDIGAYLGMVPKQDQSGDGDRQLHITHAGAGIVRTALVECAGVAMMEKAKDTDLKLKGLRIAMRGGRIARKKAKVAVARGLAVTMLALLQHPEREYVPLSEEGMKGFERYRAEMEYLAMQKTSRTDKKVA

SEQ ID NO: 411859 - protein, 353 aa, unidentified
MISELTASPKLYIGIDIHKKTWSVSMRTDLFDHKTFSIPPDSHNLFHYVESHFKYHEVYVTYEACCCGFVAARDFLNFGWRVTIVNPADVPTSDKHQYQKTDSIDSRHLCKQLSLGNLRPIYIRTEQEDLLRSLLTQRDQITKQLRKVKTHIKSYLLLHGIQVPEEYDNSNWSKGFISWLKRLEWTHSTGLISLQSKLRSLEFHHKEYLLIGNELRSYCRKYHKKDYYLLKSIPGIGGFLSAAIIAELGDIRRFKNESQLASYIGIIPGIRQSGNSETKLGITPRSRELLRSYLIEAAWIAIRKDPEIQSYYRKHAHKNPKSVIVKVAHKMVRRILSIIKQEKTYEINTNQKD

SEQ ID NO: 411860 - protein, 371 aa, unidentified
MKQQSKSSNITVGLDLGDRRHRFCALDERGEVVEEGSICNERDSLRKLAGRYHGALGVMEAGAHSPWISRFLEALGWRVVVSNPRKVRAIYQHERKSDQRDALMLARIGRMDLALLYPVRHGTEEAQQDLLRIKLRDSLVRARVAVINSVRFTLKSLGYTVRNPSSARFHKVVMEEVPESVREMITPSVQALAELTARIKMLELEINTLAQMKYPQSAQLQQIPGVGPITALYFVLKIEDPNRFAHVRDVGAYAGLCPRRDQSGESDPQLRISKRGDAYLRRLLVSAAHYILGPFGPQSALRAYGLMLAADGTARAKKRATVAVARKLAVLLLSLWKSQQPYQPFPGACLNGEQEDRRSGTIALHRMEATD

SEQ ID NO: 411861 - protein, 343 aa, unidentified
MYYIGLDVHKKTISYCVKDAAGCVHQEGKIGSTRHELDAWIRTLPQPRMIAMEATIFTGWIYDHLLPHAEQVKVAHPLMLRAITAAKRKNDRIDAGKIADCLRCDFLPECHMASTEIRNRRRILRYRGLVLRQAVQMKNRVSGLLMETGVSYNKLRLHRMGYFAELMSTNEEVSESIRPLLRLCREHIDRAIRLDTALLRSLEQDPLLSDRLRRLRTIPGVGPITALTWALEVGDTSRFRSIKQAISYCGLCSAEKSSADKVMRTPISKQRNKHIQQVLVEAARLAPRYSDELALLHEKERQRGNGNRATLAVARKMVALMLAVERRNTDFVPAGEFRRTAAA

SEQ ID NO: 411862 - protein, 405 aa, unidentified
MNAVGIDVSKGKSTVAVLRPYGEVVASPFDVAHTGSDLRALADSIKKLPGETKVVMEATGNYFEPIARCLHEQNIFVSVVNPVLISDFGGNTLRKPKTDKKDSVKIASYALTYWHDSKKYTPQEDLRKSLKLLNRQYQQSIKLKTMMNNNLISLLDLTFPGVNKLFTSPSRESDGHEKWVDFVLEFPHCDIISKLTIRAFARKYKKWCSNNSYHFTESPCEKIYAFSKECVSSVSSDEAIVFSVVQAAKMLVSATENCHAIQTEMNRVASQLPEYDTVMNMYGVGKAVGPQLMAEIGDPRRFHSRKAITAYFGYDSENNDSGQKTTRSNPMTKKGSGALRRTLFIIMKVLLQNKPQDNPVYDFLIRKQSEGKHYYSYMNAAANKFLRIYYAKVKEVLHTTETPLT

SEQ ID NO: 411863 - protein, 324 aa, unidentified
MQGKDTPEAKAEAQVYVGLDVSKAAIDVYLHPLGHVFRVANTNQGLRQLKSRLAGLEVVLVTVEATGKFHRQVQRTLHAAGYPVAVVNPLRSRLFAEAIGKLAKTDPIDARTLAIMGESLKLAASPPPAALIAELQELVLARRAAVAERTVLENRLGAAHSRFLIADIKKLLKAVERHVAHLDTEIDRLIAGDPALARRQEILTSIPGIGRVVASTLIACLAELGMLSSKAIAMLVGLAPVACDSGESKGRRRIRGGREHVRSPLYLAAVSAVRCNPDLKAFYRRLRDEKAKPAKQALTAVARKLIVLANTLVHDNRLWAEKPA

SEQ ID NO: 411864 - protein, 344 aa, unidentified
MSKVSVIGIDLAKNSFQVHGVDSQGKPVLRKTLKRSQVAPFFANLPACIVGMEACASSTYWSRVIESCGHKAKRMHPKFVKPYLMAEKNDSNDAEAICEAVQRPRMRFVPNKTQEQADIQAIHRVRNNFVRARTAAINQVRGLLAENGMILKQGACHVRFHLPGILGDPENGLSGIMRRLLRCQYENITFLDAQIVEQDRLLKDIAREHEACRRLMRIPGVGVMTATMLLTVAGTGQDFKNGRQFAAYLGLVPRQHSTGGKRRLLGISKRGDRYARTLLIHGGRAVLRTLKMNREPLGDGARHAWLVNLLDRRGSNRASVALANRTARIAWSMLVHGTEYANAA

SEQ ID NO: 411865 - protein, 456 aa, unidentified
MSRKKTRLQWVTEAPQVRTGVAGIDISPEVIYVAVDPQKDGRPVRSFGTFTGELYRIANWLQACGTRTVAMESTGVYWIPLFQVLEERGLEVFLVNARHYQNVPGRKTDVCDSAWLQYLHAVGLLQGSFRPAQEVCAFRTLLRHRSGLVQAASEQIQHMQKSLDQMNVQIHRVLSDLTGVSGLAILDAILAGERDAHQLAALRDGRVRASEETILASLAGDYRAEHLFTLRQSLESYRHDQKLIGECDRQIREMLNQFEDRADGQEPPAARKKMRTQADEELRQEFHRVLGVDLTAIPGVNVGTVQVLVGEVGPDLSRFRSAGAFASWLGLCPDNRITGGRVLSSKTRKIENRLAGALRMAAESLCRDQSYLGQHYRRMKSALQGGAPEAITAAAHKLARIAYTLITRKQEYDESRFQAAEKRNAERQRQRIIKQARKWGLVLVPEAPAPVVSTAG

SEQ ID NO: 411866 - protein, 344 aa, unidentified
MEKRPKYYVGIDISSADFTSSIGQGKEKWEILVNPELFTNDNEGFDKYLEWLKKSKLNKNNCVICMENTGVYNEKLVAYLTNLDFRVCVEMPLKVKRAFDVAGSKTDAADSKQIAEYAYRFFDELRLWKTKSEILEQVKILLNVREGMVEEKTSIQCRLHALKRKAIRVDLAEGTLQRQIDQLKADIEVIEAEIERIITEEPELGRQFLNLLTAPGVGMLLSAQMVVLLNGFEQPLTDKKVAAYLGICPYEHRSGSSVRRRTRSTQHGPETIRKLLHLGARSICTHKQPYVDYFKRKLAVGKPKKLIYNNVSNQMVGLLVAMFKSGETYVLGHRSLHPAHLTKS

SEQ ID NO: 411867 - protein, 344 aa, unidentified
MDNHTQYLGFAGVDLAKKVMQIHFVTADGEITDKSAKRAEFLDFFRNRGKCLIGMEACGSSQDWARKLEAMGHEVHLLPPKAVKPFVSGQKNDHNDAIGIYKAMFNGVRRVPGKSTEIRDLQTLRRIRSQVTKDKVKEINHVRGLLAEYGIVMGKSLNAFNKDISSALGILTERGDVSPLVAEELRTTVEAIKAKIERQKKLDQEIEQLARGCKNYENFLKTPGVGPFTAAMLCVLLCDPSIFANGRQFAAYIGLAPRSRGSGGKNYVTGIPSKFNCDSESRAVLVECAQAIARCKNKSLWVEEILRRKPKKVALIAIANKLARQVWAMANKGESFKQMAVLTA

SEQ ID NO: 411868 - protein, 432 aa, unidentified
MAVIATGTGVKTTMNTPVCFSESGQSKIPFVVCVDVSKASLSWYHEEAPRPGAGTLDYTNEAVLGWLQATRRAAGPRPVRIVCESTSGYHQRLLRLARAAGCATALVSGEQVKQMQIVENNDTGKSDWKDPRTMMLLVRMGKTLTDRALDEEWAALRELDAEYTRIESASTCAKNRIQMLLVQLFPDLSFKRDWLFDGQAARVILELYGFDPFALVADARAAQRLRTRKLRPQTIERLLRDAREAIKQPVPILWREVRSRQLRDAYQDLSVAQERRQRIRLEMTGLLEHLRQAGKVQLGPVAGVIGPFLLSRILAQTGPLRDFGSIRQLWRYAGMNLRPRQSGVVRGKERQAKRGRARLRHVLGQAVLKLVTKDGLYGEYYHRKKKLGMLGPVAMTAVARKFLKLLFGLERSRQPFDRTRVFTCESRHTKAA

SEQ ID NO: 411869 - protein, 429 aa, unidentified
MNYTQNEKILQVGEGNLIVGIDVGSKKHYARTFDWRGIECSKKAFVFTNDAEGFAGFLEWTSQMLEKSGKETVIPGMEPTGHYWFDLAKFLQDNGMRPVLVNPLHVKRSKELDDHLPSKNDRKDPKTIAKLVIEGRYTYPYMPEGVYADLRNASNMRFQVEAELTRNKNRIQKWFSVYFPEYNEVYGSFDAISSMMIIKQAALPCDIISLGAEKINQIWREAKLKAVGKKRAQTLVEAAQRSIGYTEGLGTARIEISMLLDDYEKLKVRLGLIMELIEKLVSKIPYAEKLMNIKGIGMKTVSGFIAEVGDISRFTNAKQLQKLAGQAIVENSSGKHKGKSRISKRGRKRLRYLLFEAALSLAATNPEFKELHRYYTSREQNPLKKIQSLMALSNKLIRVFYTILKNGADYDPEKLLNDIRRPEGMSKVA

SEQ ID NO: 411870 - protein, 338 aa, unidentified
MYYTGIDQHKLFSYLTTVDSDGKIVKEAKLNNNSFEILNYFNSIGREHIATVETTGGWYWMNDLLSSLGIPLKLAHAKYLKAISYAKVKTDKVDSHILAQLLRLNFIPEAYKIPDDIRTLRDTLRARLRLSVKRTSCLNFMHRMLEKFNITDPALLNNFYRLQYQQFEIQSKLLKEQMLTLEKSIYPSLIPNEDIQRLLWIPGIGKMNAFTILLEVGDINRFPDVKNFFSYCRLVPSARNSGGKTKQRSSKDGNRYLKIVFSDAAVHAVHYYPVIGNYNNSLIRKKNKQIAKTIIAKEIAEIVYHVLKNKTNFNNKFKGKELEHTKSLQWPRVVSPYA

SEQ ID NO: 411871 - protein, 405 aa, unidentified
MDITPIHRRVIGLDVHQNKITACALIEQADGSVAVEQGEFGGFKRDRRALAAWVHGLAPDIVVMESTGIYWKSPYAALEKVGIAAWVVNARHVKNVPGRKTDISDAQWLATLARAGLVRASFIPPAEIRHLRLIARQRQKLGGMLAAEKNRLHKVLADAGIRLNVLLSDLHGQSARAMVKALLADQPIHAILERAGRLRASREDLFEALQPEELSAKHRFVLNEIMAHIQYLEATMARFEQQLLVGLAPWEPQMSLLETVPGIDRLGAAMLLVEIGTDMDSFGSAERLASWVGICPGNNESAGKRKSARTRKGNAWVRRLLCEFAQAASRTRCALKDKFSALAIRKGHKRSIVALAHKMLRIVYAMLANTTPYQDRSVDYEALMVGRNAPRWLKMLAKHGYIATA

SEQ ID NO: 411872 - protein, 428 aa, unidentified
MKYTQNEKILQVTEKTLVVGVDIAKERHVGRAFDFRGVELGKRIEFENRKEGMEKFLDWANKIMKANGKDNMIVGIEPTGHYWLCFEQYLRENGIKVVLVNPFHVKRSKELDDNTPTKSDIKDPKTIAMLVKDGRYTEPNIPEGIYAEMRVAMNIYERLQKQLNVLKNQIINWLDIYFPEFLEVFSDWEGKVALLTLKEMPLPSDVIEKEVEGIIEYWRDKVDKRAISRRRAMDLVETAKRSIGKKEGRKLARQEIKYLLEEYELLKKQVEEIEGEMAELLKDVPNGDRLLEIKGVGVKTAVGFISEVGDIRRYEDARQIQKLAGLNIIENSSGKYKGQTCISKRGRGRLRSSLFRAMITIVAKNEEFKQLHMYYTTRQNNPLKKKQSLIALCCKLIRIFYAILKKGIRYDGNKMLSDIKRETLARTA

SEQ ID NO: 411873 - protein, 354 aa, unidentified
MIVVNESHQGAIDMQITTIGLDIAKNVFQVHAIGSDEKVVVRKQLRRCQVSQFFQELPPCLVGLEACATSHHWARELTKLGHEVRLMPARDVKAYVKRNKNDAADAEAICEAVRRPTMRFVQVKSAEQQAQLMQHRARDLLMHQRTQLINAMRSHLAELGIIAPQGREGVKELLAIIANDANTQLPNDARASLIVLAAQLQALQTTIGAIEKRITVQHRANKESKRLQTIPGVGVIGASAIAATVTNPKIFRSGRDFAAWIGLVPRQMSTGGKSKLGPISKQGDRYLRRILVVGAVSTLRRAKLNPQRYPWVTRLLARRPFKVVAVALANKMARIAWALLISGKTCRSAWFAAS

SEQ ID NO: 411874 - protein, 355 aa, unidentified
MDEQRVVVGGVDTHKDLHFAAVVDDQDRVLANESFATTRHGYKQMLAWLRSFGELARIGVECTGTYGAGLLRYLQHAGVTVLEVTAPDKQDRRKRGKDDTIDAENAAHAAFAQVRTVTPKTRDGMVESLRVLKVCRKTAVAARRVALQLIQNSIISAPDELRESLRTMTRMQLVRTLAAWRPDLSDYRNLTSAYRIALKSLGRRYLELHDEIADLDVMIAKLVDELAPELIARNSIGYESAAQLLLTAGDNSGRLQSEASFAALCGVSPVPASSGKVCRHRLNRGGDRAANSALHIVAIGRLRTDARTKAYVEKRLSQGHSKLEAIRCLKRYIAREVFYIIQRRQREINSTKIST

SEQ ID NO: 411875 - protein, 347 aa, unidentified
MEYFAGLDVSLEETAICIIDDNGQIVREARIASEPEALVGFFRASGMAMKRVGLEACSLTAWLHQALIEAGIAAICIETRQAKAAMGAMPNKTDRNDARGIAQIMRTGWFRAVHVKDPCCRSWRALLTARRMVLNKRRDLENGIRALLREAGLKVGTPSRRNFAARVIELVADDPVLAALTRSLLSVIAVITEEIDRLTKRVLDEVRTEPTCRRLMTVQGVGPFTALAFRATIDRPDRFRKSRDVGAHLGLTPRRYQSGETDVQGRISRCGDELARTALYEAAHSLLIRSTKWSALRAWGMNVAKRRGMARARVAVARKLAVILHRIWAEGTEFRWTKQAAASVPAA

SEQ ID NO: 411876 - protein, 403 aa, unidentified
MTKYHVGVDVGKDKHHVSVRDLSRDAYCKTFSVTNDRSGFMEFVSSLESLSVDKYDFLIGIEACSYGLNLSYFLMGVGFKLVEVNPFRAGQFRKAQGKKAKTDSIDARTIAAILTLGNHKPLSIPDPILDNLRELTRFRAGLVRERAALLIHLREALSTLFPEYTKVFRQLDSAGSLALLLAFPGPEHLLGAGEEGIAATLSHASPHRMGKGMARRIMEAAQNTIGVIQKQPALGIKISILAKRILSLQSTIKELDEQITTLFNTLPYKPQDFPLGHVSSLAAIISEIGDIQRFPTLKKFLSHLGWCPQSFQTGNFRLEHPRMSHAGNRYVRQLIWMWSVLAIRILPRCREYFERRVREGKAKMHILVAVGRKLLSMLYAILKRGVSYDPNWEENRHLAVARR

SEQ ID NO: 411877 - protein, 320 aa, unidentified
MDAVLGIDIAKAKFDVALLTPDGKIRRKSCANTPAGWEDLTRWLARYGGAAAHVALEATGTYGEALAHYLYDSGHVVSVLNPAVTHAYAASQLARAKTDRIDAELIARYTATQHPGPWTPAPREVRELQALVRRLDALQGMRTQETNRLEAGPAVTAVRTSLETIIATLTAEITAVQRQIRDHLDRHPGLRDQRDLLTSIPGIGEATAAVLIAELFDKHYRSARQAAAFAGVVPRVCESGTLKARGRLAKIGPGRLRKALYFPALAALRFNPTLRALRERLRAAGKPKMVIVGAAMRKLIHLAFGVLKSGRAYDSSYAQP

SEQ ID NO: 411878 - protein, 372 aa, unidentified
MFIESVDRIIPHEFDVFVGLDVDARNYHVTVLNWAGTVHQFTMSAQPKGLVSWRAEHLPEARVAWVYEAGPTGYGVYDALSQSGDVCLVTPPALLPRVPGRRVKPNRLDSLELAIRLRGGELTGLRVPTPRIRSLRHLTHQWRSLAQRGRGVKCQIKSLLLMEGRSLPEVGRGWSRAVGVALAALACDAEVQFVLQQRWRQLTVLHEEQLRLGRRIRAYCRADPDLAESLSYLMSLPGIGWVTGAHILARVGEWRRLKRPQELAKFAGLNPWEHSTGLRIVRGGISRSGDRHLRNLLIEAAWRATRVDPELRAFYERLRRRNPREQGARKAIVAVARKLTERIGRVLMDRRCYRPVAQRVEPRLLRHAPAPA

SEQ ID NO: 411879 - protein, 367 aa, unidentified
MGWMAPLRHLGANVLVGQNQSADKEPSMNEITTVGLDLAKNVFQVHGVDAEGTTVLRKQLRRAQVLAFFSRLPRCLVGMEACATAHYWARELRTLGHEVRLMPAQYVKAYVKRNKNDAADAEAICEAVVRPTMRFVPAKTAEQQAAVLLHRGRERLVRQRTMLVNALRGHLAEFGVIAPQGLRNVGRLIAIIRDEEDARLPGLARQVLQVLAVQIEQLEAAIAALEKQLMGWHKSNPVSQRLATIPGIGPIIATAIAAMVAEPSGFRSGREFAAWLGLVPRQNSTGGKNRLGGISKRGNQYLRRLLINGASANLLRSKATNADPWVIGLRRRRPSLVVAVALANKTARIAWAVMHRQENYQRMATAA

SEQ ID NO: 411880 - protein, 339 aa, unidentified
MQITAIGIDLAKNLFQVHGVDKAGKECLRKQVKRDQMASFFANLSPCLIGMEACGSAHFWARKLEAMGHTVKLMAPQFVKPYVKTNKNDAADAEAICEAVQRPNMRFVPIKNVEQQAILAVHRARQGFVKARTAQGNQIRGMLAEFGLIIPKGLGFVRERVPLLLDEAGDDLPGAFKILIMRLLEQLKELDRQVGELEVQIQTWHRSNALSKRLEKIPGIGPITASALVASVGDAKNFKNGRQLAAWLGLVPKQHSTGGKSNLLGISKRGDTYLRTLLIHGARAVIRYAEGKPKQDWLHRLLGRRSKNVAAVALANKNARVVWALLARDLEFRVDFAAA

SEQ ID NO: 411881 - protein, 344 aa, unidentified
MNYKTKKSKSEHTKSATHGTKYLGVDVSSEYLDIYFEGKYKRVTNNQDGLNEMHDMIKQQKETVIVAYESTGWLSRILAERLLAMGIRHVCLNPTRVRHFARALGANAKTDKIDCEMITRFAAQTKARSSALDGVTQLKLKEYQTVMRYFRQRCTDAKITMTAYKGDPFIREQIQHAIVQDEKQIQIIADEMYKRIEEHEELQERYEFYLSLPGIGPRTASVLLISMPELGRLNRREAASLIGVAPYNWDSGKMKGRRIPRFGRKHVRSILYMSVISSLRLKNSPIKDTYHRLKEHGKPSKVAMIACVRRLIIWLNAETKKWLEKKAQTGIIGGLHKIPWDVKS

SEQ ID NO: 411882 - protein, 438 aa, unidentified
MRAKCNDDLSTVNFSTIGLDVHKNRLVACAVHVQHDAKGREVHEKEYFESTGTYSGRQRLTEWCSSQNADLILMESTGIFWKAPFRDLEKADLHPVLINPRIFNRGSDKRKTDKSDATWLANLARLGLYRASFIPAEPYRSLRLVQSQIKSLVAERQRLKNRLVKVLDDSGFRFTVAFADIGGASSQSLIAGILEDAPREELALMIDPLCKKSIEEILDAVSGELSQINKDIVQSILRLIETHTKEIETLEQTVIRELKKCEKVKQNIRLMTTIPGVSEKSAQLLMSMIGPDFVENFSSPHAFARWLGVCPGNNESAGQIKSGRTPHGQRLIKKVLTECAQAACHTKGSHLAVLFGGWKHKGFCKAVMAVAHKLALLIHWVVVNQKPYIDKEFDYTGVFKQDGQRRPRWIRALRRYGLMTLADVEKEKAARGWIIAKA

SEQ ID NO: 411883 - protein, 337 aa, unidentified
MIIIGCDFHPSFLQIAMLDTETGATEEHKLMHTSGEAESFYRKLASPAIVGIETVGNDQWFVQLLQQLGHEVCVGDAAQIRASYVRKQKTDRRDAKHILRLLVEERFPRIWIPDTEMRDHRQLLTHRHKLVQIRTRVKNELQHLMLNQGMQKKQKLWSTEGRAALASLPLAPWTDRRRKDLLSLLVMLDAQLESLNDAVTRVAQEYPGVPLLMSQPGIGAVTALAFVLTLGDVHRFPRGKQVASYLGLVPREHSSGGKQRMGGISKQGNRLLRFLLVEAANIAVRFDPELRKEYLHRCHQKHFTVAKVATARKLAIRMYWMLRTQTPYPQVLSSRVA

SEQ ID NO: 411884 - protein, 428 aa, unidentified
MAEDTTLTSQTWLVAIDIGKAFHAVLVEGGDGKRQQFRMANHVEDYDRLVVFLRGLPGPARIALEPTGGFHRTLAHRLLREGFSVVSVSSVAGARYREALFNSWDKNDPKDAHVILQLLKHGLVQHYHDPLLAGDHDLQELAKTYHQIVLARKRLADSLLNHYLPLYFPEMGRYWESTRVEWFVAFLEQFPTPAAVQALPKEAFVRAAWSVVGRKVNKQAKLEELYELAQRSIALPVAVDSVAIETFRLQLAQLRRLAELRQTLEARAHALLKDRADFQRLCSLPGVAAILALVILAEGGDLRRFPHHRQFLKYCGLDLAKCQSGQFRGREMLSKRGNARLRMAFWMAAQRAVRMNENSFRDKYERYTRQDPSNPDVRRKALTAVAAKMARVAYAVVKHDQPYHGYHEHALPSGSIPLKRAVGARATP

SEQ ID NO: 411885 - protein, 394 aa, unidentified
MLTQNVLNNVIIIKMMWKKVSKFGSSLVNQTVQNAKPTFFLNLNSTLGKSLYNCDDRFSTSNPFKERKMKLIVGIDVSKKKLDLSVYNGYQHKALFINNDKKDIEKMLRSFVSEKDDCLFVMEATGVYHLRLATLLHEQGFKVGIINSLIIKRFAQMKMIRAKTDAVDAKLIAEYGYEQKVSLFQPRSIERQKIIKILRAIDALIETKEGYYNRLEALAQDPLQVKSVTKSFKQLIRNAEREISKFEAELLQIVKEHYSDVYDRLLSINGVGVKTAVVIIGFFGKFEDFENSKQVASFIGINPSPSESGSSVRGRGRISKKGNSYLRKQLYMTSLSAMQHNKSCKEFYERLVSKGKEHKVCRVAVVNKLIKQIFAILKYERTYNQDYCKNCLAS

SEQ ID NO: 411886 - protein, 376 aa, unidentified
MKKELYLGLDVHKDCIITAVAQEGRKGEVRDTGVISNDLHALEKWVGRLRKAHGSDVILRACYEAGPCGFGIARRLKQLGVECEVVAPSLTPKRAGERVKTDRRDARKLARLLRAGELSPVYIPESTDEAIRDLCRARTDAVDDRCRSRHRLKGFLLRHGYHYQGKSSWSAAHERYLRELVLPHPAMKVILEEYLQGIAAAGERIARCEEAMRALLEKWHLRPAVKALMAMKGFRTVAAMILVSELGEVHRFSHPRQVMAYLGLVPTENTSSDRRRQGHITKCGNAHARWLLVECAQHYATPPKVSKELSRRQEGQPQEVRALSWKAQHRLHARFARLSARRLQRNKALVAIARELCGFIWELLHMQPCYQAQPPS

SEQ ID NO: 411887 - protein, 427 aa, unidentified
MNSTQNIKISQITEDILIVGIDVGCFTHYARAFDWRGIEASYVFKFTNCRDQFERFLRWMRKVAHENGKKKILVGLEPTGHYWFALAQFLEENNIGISMVNPYHVKQTKELDDNNQTKNDRKDPKVIAKLVTEGRYSYPYVPMGVYADLRNFHNMYLDYTKDLIKVKNKLARWFNIWFPEYGEVFKDMGAKSSLLLLEKARTPDTVIALSAEGINAIWREAKLRAVGMKKAQQIVDAAKRSIGKKDGRRSAAFELEMLLADYCKIKTQLDKVMAELEGLCEEIPAAKQMLAIKGIGLKTVVGFLAEVGDIGRFQTPKQIQKLAGLALKENSSGKHKGETSISRRGRKRLRTVLFTAAISLIGKNKAYQKLHQHYTQRLKNPLKKKQSVVAIGCKLIRIFFTLLSKGVAYDEEKMLNDIVWEEEAIAA

SEQ ID NO: 411888 - protein, 376 aa, unidentified
MKNPKANTNDTPSNEFKLFLGLELGKKQWKLCFSDGDKIRFRSVQGGNAKAVIEEIELCKRKFKMPLNTPVWSCFEAGRDGFWLHRYLEQSDIFNKVFDSSSIEVNRRSKQTKTDKVDAEKLVRLLMRIVLWGESKVCAVVRVPTEEQEAQMRTGRERERLVKERVSHLVRIRSLLKLKGIEVGGIKKLDFRKLLDPMSNPLPEEMIVEMEHERDRMKLAEEQIKEVENVQKQTTSEEENLSEVSAKVVKLMSLRGIGPQTAWVLAHEFFWRKFKNRKEVGACAGLTGCPYDSGEMRKEQGISKAGSRRVRTCCVEMAWNWVRFQPESNLTQWFKERCGAKPTSRTKRIGIVAMARKLLIALWKYIEQDQMPEGAI

SEQ ID NO: 411889 - protein, 450 aa, unidentified
MNASLILGIDPGKSFFAATLMHSTGERIWKAQQFDMSRDGFDGLRSSLPDGDLTVGIEASGRIDDNLLAWFGRWKSCCRDRKIKVIRVNPGQSARFGGPKPRRDQTDGSDSDHVGEFTRVYANRLEAFEHDPQAQAMTRLINERQHLVEELVATKNRIHEQLLICFPEFTQMFVDPFAKLARAILRQVPTARHVAKRRPLSLARVKTGRKERSLGVEQAQKLIQLAKRSIGSAGEDNDAAAMIFLLDQLDLLEKRLADIEETLAAYAAQAKHEAGPAGEHGVSAARQIELLDSIPGIATIAASTLVLGTRGLARFDSGSALSAQWASCPERSQTGTSLDKTRLTARGDHKRRAMLYLATQIACVYDPAFAFHKWRMIQRGHCPQQAVCAAMNRMARVAWTLVSKNQAYDVNLMIAQIQIHHAELWKTFVRLHQNNGTLWKKVELKYKKIA

SEQ ID NO: 411890 - protein, 337 aa, unidentified
MNVKTIGIDLAKNVFQIHGVDEHGKRLFNKQLRRAQMASFFANIPPCLIGMEACASAHFWANKLISMGHNVKLMAPQFVKPYVKTNKHDAADAEAICEAVTRPNMRFVPVKTAEQQAVLALHRSRQSFIKQRTAQANQIRGLLAEFGIVVPRGIQQLQRRLPELVEDADNPLPVLFRTQLSLLQHHMAYLFDVIATLDKQIEQCYRQNALCQRIGKIPGIGPVTASALIATIGKANNFENGRQLAAWLGLVPRQHSSGGKQVLLGISKRGDTYLRTLLIHGARAVLQSAKHKQDAVSSWANQLMARRNNNIASVALANKNARTVWALWPKSGSIVHQ

SEQ ID NO: 411891 - protein, 316 aa, unidentified
MASFLGIDVSSLSLDAAVRPQGIKMHLSNDPTGFEALLESLRRLSIKRVLLEATGGYERDVMRFLQDAGYKVIRVNPRRARSFADSLGIKAKTDAIDAEVLAHYAEVIPDQPSLRVSPERALLRELLQQRDRMVQQRDDDLRRLKQVQSTAVANYLNANLKHFKAQIKRVECEIEQQIAMLNDERVAQLIKVKGIGMVTAGKLIALLPELGRVESREIASLVGVAPFNHDSGKFMGKRSISGGRFAVRRSLYMACLVAMKYNPALKARYQSLRERGKLPKVAIVACMRTFIVRLNAMLRTGTSWLDLVLPQPESTT

SEQ ID NO: 411892 - protein, 431 aa, unidentified
MKEVIPVSKRTYRAVAVKSLVLSELESRFRGRRLGIGLDIAKTELKASVIDMSDDSIVAMWSWKAPDETRSFVGLVVSLSKVAQVEVALEPTGTYGDVLRALLVAAGIPVFRVSPKHTIDASELYDGVPSQHDAKCASVVAWLHAQKKSSPWRETTAAHRDLVAAADIMVLYDKQEQACVGRLEAKVARHFPELSGVLELGSATVLALLTQFGDPKSIAAAAAAARELMRRTGGPLLASEKIDRVIELARTTTGVPMTPGEREMMKMLAVETNRNRVNANAAAKHVEKLGANIEAVRRVGDVIGRRTAAVLYAEAGDPGSYAVPAAYVKTLGLNLKIKNSGKPADIGRLKITKRGSSVARVYLYLAVLRLIQSDPCFTAWYKRKADRDGGLKMKAIVALMRKLATALWHVARGQSFTPARLFDTERLGLAA

SEQ ID NO: 411893 - protein, 405 aa, unidentified
MYVGVDWGSQQHTVCVLDQAGGKVAAFSVAHSAAGLGELIARLRRLGDPAERPVAIERPDGRLVDRLLEAGHPVVPIPAHALKAWRRAQSLAGAKSDPGDAALLADYLRCLQHRLRVLEPFSAHTRALRAVVRTRDDLVDQRVAAGNQLRACLEAFWPGAAVIFADVCSPIALAFLERYPTPEAAQRLGEQRLAAFLVKHGYCGRRPAAQLLGRLRAAPAGLIGSVEAEARRNAVWALIRVLSALNTAIKDLDRSVAAHLGEHPDAPVFTSLPRSGKLNAAQVLAEWGDCRQAYDGPEAVACLAGVVPVIRRSGKHTSVSFRWACNKRLRRALCIFADNSRHASPWAAKVYGDARARGLDHPHAIRVLARAWTRVIWRCWQDGVPYDPAKHRAAQRLTETADSAA

SEQ ID NO: 411894 - protein, 394 aa, unidentified
MFFIGIDVAKRSHQAAVTDISGNVIVKPFNFKNSSDGFTKFLSIVESTAIEKNDCTIGLESTGHYWYPLYFFLIENGFDVKVFNPIQTAAFREITIRKVKNDNLDSLLIADFTRFGRYSETYIPDENMLALKNLTRFRLSISDICGSLKKKVIAILDQVFPEYTGVFSDVFGKTSKQLLEQFSTPDEFMDISTTKLTNLLLKVSRGRNGREKAELIKTAAQSSIGISYALDAFSFELKQLLAQIEFMENQLSDGDAEMEKLLSQSEYAVITTISGIGPMLGSVIVSEIGDINRFENSSKLVAYAGLDASVKQSGEFNSSKNKISKRGSPYLRRALWMAAFMSLQCDPALYDYYSKLRARGKTHRCATTAVARKLCIIVWAIMKSKKPYSPVLKN

SEQ ID NO: 411895 - protein, 339 aa, unidentified
MQGTIFGLDLAKRIFQLHWIDAQTGEICRRQLRRGQLVEFFANRAPGVIAMEACGGAHYWGRKLTEMGHEVRLIAAQRVRPFVQGNKNDAADAQGIWEAVQRPKMKFVALKSEAQQAILSLHRMREQLAKMRTMQVNQLRGLLAEFGADLPQGRKRGMERIPAELEQLAERLPAMVIEALRDQVARIASFDTDIAGIEEKLTLWMRENKAAKMLMAIPGVGLLTATAAVATIGDTAVFKNGREFAAFVGLVPRQHGTGGKVKLLGISKRGDVYLRTLLIHGARTVITHAKQREPWLEKLLARRPLNVAVVALANKMARTIWALLFHDRTYLRGYAARAA

SEQ ID NO: 411896 - protein, 370 aa, unidentified
MKKSTMYVGLDVHKNSIEIAIAESGRRSEVRSYGSINGTLAALDKVIRKLEAKGDSLSFVYEAGPCGYEIYRHLQSKGYDCIVVAPSMIPRHSGNRIKNDRRDAQMLARLHRAGELTNIYVPSLEDEAMRDLTRAREDAKAIERKAKQRILMFLLRHGHRYGGKTPWSKAHFNWISTLRFPHPAQHVVLQESLDALSECTARVNRLTEQIQQLLPEWRMYPVVKALQALRGVSLVVSATTVAELGDLTRFDSPVELMPYLGLVPSEHSSGESTRRGSITKTGNGHVRRVLVEAAWSYRLPARISAKLHKRQEGISREVCDISWKAQLRLCTRYKRLLAKGKANQLIITAIARELCGFIWAIANEVEAAKA

SEQ ID NO: 411897 - protein, 482 aa, unidentified
MKSKPQEKNKRATNHPTQHHWHEMNRKQRREMLRKMQSEDLRLEVIHPDAAGIDIGNESHYAAVPPSRDSQPVREFRCTTAELKAMAAWLQQCRIRTVAMQSTGVYWVAVYDILEEAGLEVYLVNARDTKNLPGRKSDVQESQWLMKLHTYGLLRNSFRPPQEIRTMRTYWRQRNDLVQSAGRHILRIQKALTQMNIQLANVLSDVSGVTGQAIIKAILAGERDPHKLAAFRDCRVKASEEQIAQSLEGNWQPDLLFLLKQEQDGYEFCQKQMAECDRQLKQYLQRREDRSHGAPLPEEKRKGRLNKKRANKPQFDLREGLFRMTGTDLTRIDSVDVMTATTVISEAGYDMSKWETENHFVSWLRLCPDNRISGNKVIGKGRLPTNNPLSIALKMAASTLRQSKTYLGAQFRRLRTRLGAPIAIKAMAAKLGRLIYRMLRYGMKYVDQGAAFYELQHRQVQIKQLKWKAAKLGFQIVGAPAA

SEQ ID NO: 411898 - protein, 441 aa, unidentified
MAKGRIVKYQKTENRAVNFLGKRCHFMKKVYDNCCGIDVHKKLMVACFIHGKKQEVREFGATTRELLELADWLAKGECRMIAMESTASYWKPLYNILESSGLNAMVVNARHMKAVPGRKTDVKDSEWIADLLQHGLLQPSYIPDREQRELRELVSYRKSLIQDRTRELNRLQKMLEGANIKISGTITDINGKSARSIIDTILSGTAIDSSKYDEMYNKKVIAHNLKASKEQIIDDLNGFMSPLQRKMMKEVLKHVDELDVHIEHLNDDIDSHMKPEEKQAVDAIQQVTGLGTISAQAIISVIGTDMSRFPTDAHISSWAGLCPGDNESAKKRRTGKTRKGNYLLRTTLIVCAHSAAKVKNSYFRAQFQRINAHRGSKKAYVAVAHSMLIAIYHMLKDGVAFQDLGADYYNQFNKERKINAYLKKLKALGWEMPEAMEAQPA

SEQ ID NO: 411899 - protein, 413 aa, unidentified
MKQIPLTFAAQIGLDWADRKHDFCLKSSDSDDFEYGTFKHTPEAIEEWVLTLQERFHNEPIAICLELKTGPLVYALLKYSFIVLFPIPPKALAKYREAFTQSGAKDDPTDAYLQLDYLISHPKALKALVPDNKETRILQRLVEDRRTLVAEKVHLTNRITAALKSYYPQALQWFDDIDTQVFCDFIQQWSTLKQAKRARQTTFVKFFKAHRCGRLAVIEKHIEAIQAAMPLTEDDGVILPFERLTRALTLQLSQLLITIHDYDLDIAKRFRNHSDYVIFESLPGAGPVFGPRLLTAFGSQRERFQDADEVHRLSGIAPVLERSGTYSWTHWRYSCPKFLRQTFVEWANQSIRYSFWAREFYDEKRAQGKSHQATLRALAFKWIRIIFSCWKNKTPYDESAYLFALKKRKAKVN

SEQ ID NO: 411900 - protein, 360 aa, unidentified
MMKLKYSICCGLDVHKNVIVATIVTTNKDGISEYLQKSFSTINSDIQRFHNWLIENNCYHVCMESTGKYWIPIFNYLENDIDVCLTHPKYVKAIKGKKTDKKDSKWIADLYKFDLVRCSFIPPKDFRQLRELSRYRFKLVCMKSSEKNRIQNCMTISNVGIASVLSDPFGKTATEIISYLLEHTADSMDEKAVRKLIKKGAKSKSDEIIEAIKGYTIETDQAKKLELARGHLEYLDDMITQTEVELYVRIKPYYEFVEFVSTMPGMTELSSTIVLAETGVDMDIFDDAKHLCSWCGLSPANNESAGKKKSVRIAKAGDYLNAVHLRHHNVHQHQMYLFRLHHMHGFFTVKSLQKMIIGVI

SEQ ID NO: 411901 - protein, 351 aa, unidentified
MGETWIGVDLHLRTATACRYEDGRLGVVRLLKLHGPEWERYWQAAPREADVVVEMGRTTWWFARWVQERGLIAHVIDPVRSRAMAAGRPKTDRCDARWLAEMGAKGVLHEVYVIRPETERLRELLRHRSTWVRDRTRVKNRIHYQLAHEQVVCPHRSVFSQRGQRWLDTVHVSAPYNRSLDNHRAHYAFVQTQVDQTTEAVLSHPLDEDLVRRLESIPGIGSLTARTLIAEIETIYRFPTPEHLISYAGLAPRVRQSSTQDRRGPLTKRGSVWLRTALVEAAQVAVRHPNQFQRVFRRVAFRRGRNVGIVAAGRRLAAVIWHVWWKGRSYEEPQGVRPQESAGVTASVATA

SEQ ID NO: 411902 - protein, 383 aa, unidentified
MENSSSDYCPKTSVIVSVELSKRNWLVASLSPGAAKPSLRTIPAGNSAELISHLRNLECKAADRIGEPAAIRLCFEIGYDGFWLARLLRSNDIDTYVLDPASFLVSRRGRRAKTDRIDAEAMIGILKAYLAGDKSVCRVVDVPSPEEEDARRVMRERGDLVHERTRIISRIRGLLALQGIRTVKAIKGGDWSKQLDDTRTGDGRPLPPNLRRQIERCFERLALLNDQIKDIERNRAEVVLHEESTFPCREKAVRLEQLKGIGPNSAAMLVAEVFCRKFESRRHVAAFLGLAPAPFASGDVSRDQGISKAGNRSTRVQMVELAWCWLKYQPSSELTVWYRNRFKGNGARAAKVGIVVLARKLLIALWRFVETGLVPQGAELRAA

SEQ ID NO: 411903 - protein, 411 aa, unidentified
MNRKLTLLYIGVDLHKNHHTAIMMNCLHEKLGELKFDNKPSSFPVFLKEVNKIAKKEGLTPVFGLEDVGGYGRGLAMFLIENKYEVKAVNPALTVSMRRSSPNNKKTDAWDAECVARILISNLDTLPNANPLDLYYAISQLITRRANIVSVMTGIKLQLHQLLGYHYPSYKKFFSQVDGKTALAFWRKYPSPSCLKGGGVDELAHFLYKKSNRYLSTKKAEEILSLVEQDGDTSKGYQEANDFLVKDVVRDIIIREHQLDQIDAELKKHMALLDYKLETMHGISTVTAAELIAEIGDISRFSNADKLANFAGIAPVQHSSGNKQKARKSKLGNRSLYDIFYNLAIRMLGVSRGEKKPNHPLYHAYYEKKLAEGKTKWQAIICVMRKLVNVIYSMMKYKTEYKMPALPERAA

SEQ ID NO: 411904 - protein, 361 aa, unidentified
MVNHIFIGIDLGDKNSVARIAVNREKSERFGFVNNRQGRARLLGEAKKRAQQSGGAKIVMAYEASSCGFVLRDEAKSAGIDCAVLAPTKMDKSVEQRKHKNDDRDAEDCLEKLRAHVLAGNRLPTVWVPDVQTRDDRELMRTRMELTEKQTEVKSQMQMLLKRHGVEKPSGLGAGWTTRYRRWLNGLAESDNLGWGSRQALSSLLRQLKLIESEIDGMEKTIKQLSQDPRHKAIVAELTQEAGVGLMTAMVYRTEIGNAGRFRRSRQVGKFVGLTPTSHESGQQNDRKGHISRQGPPRLRKILCQASWVHVRGDGTSRRIYEQLVKRNPKRKKIALVAVMRRLAVRLWHRMRKIEFQLVNA

SEQ ID NO: 411905 - protein, 313 aa, unidentified
MTQIALHVGIDVAKERLDVAILETGELFAVDNDEAGYAALVERLSGCGIGAIGLEASGGYERAVLKALWQKGLPVRRINPHRLRQFARAAGVNAKNDRLDARVIARFLATLPVHPVEFDPSLELVIELVTVRRQLHAELSRVNNQLEHVRDASLKRLAKRRASRLSADILLLDKRIAQAIEADHALARRDRLLRSTPSVGPVLSATLIALLPELGRLSNRQIAALVGLAPYDHDSGKLKGKRCIWGGREPVRNVLYMAALSAGVHNPVFAAFRQRLRAKGKEAKVAIVAVMRKLITTLNAMIRDDKPWNPASV

SEQ ID NO: 411906 - protein, 316 aa, unidentified
MNKKNHTEVNIGIDTSQTQLDIYVRPCGDYFSVENTPKGAKEAACRLRSYQPTRVLIEATGRLEMLFVCAAHKAKLPVVVCNAGQVRQFAKASGRLAKTDKLDAQDIAHFGEALEPALTELKPEKLRQISDLIAVRSQCLDMSTMQKHRLHRMPKSVHKPIQRILKAVQTEVERIDKQLDKLVEAIPQWRDQRDLLMSAKGVGKVVAYTLMSELPELGKLNRKEIAALAGVAPMNRDSGSYRGKRRIYGGRRKVRTVLYVSMLSAIQYDPKIKSLYERLVAAGKPKKVAIVACMRKQLTILNTMMKNGTHWDEKLA

SEQ ID NO: 411907 - protein, 348 aa, unidentified
MEKLIRIGMDTSKSVFQLHGVDSVEQPILRRKLRRGQVLPFFSDLPPAQVAMEACGASHYWARELQALGHEVVLIPPQYVKPYVQRGKSDAADAEAICEAASRPKLRKNFVPIKSTEQQAAQMLTKLRAQFIGRRTQLANSIRGYAAEFGLTAPKGLSRLRELLADIRADATVPDLAMELVEALAGELTRVDDQIATLDKKLMQLHRGNEMSRRLAGIPGIGPVGATLLSIKVTDAHSFKSGRDFAAWLGLTPKNHSTAGKNRLGVITRAGDEMLRSVLVAGATAVIGDLRRGGNRIWPWLKALIARKPPKLVAIALANKMARIAWKLMISGERYRPIGGSAPMAMPT

SEQ ID NO: 411908 - protein, 407 aa, unidentified
MEVICPRCAGLDVHKQTVVACARIVGGGPALQEVRTFATTTSGLLALADWLESLGVEHVAMEATGVYWKPVWHVLEGHFELVLANAAHVKNVPGRKTDVNDAMWLADLLAHGLIRASFVPPVAVQELRTLTRTRKQFVRERSAHAQRIDKVLEDANLKLGVVLSDILGKSGRAVLQALIDGHTDPERLASCISTRVKASRAELLEALHGHVSAHHRFMLKLHLGHIDALDQAIADIEKEVGLGLEPFRQAAKLLSTMPGLSAVGSNVVIAEIGIDMSRFATPGHLLSWACMCPRNDESAGKRRSTRLRRGGKWLKTTMVQAAWAAVKVKGGYLQAQFHRIRARRGAKKAIIAVAASMLTAAWHMLRDGTEWHDLGAAHFDRADAHKTANRLIRRLQQIGYTVQVTPA

SEQ ID NO: 411909 - protein, 412 aa, unidentified
MKDLLEISCGLDVHKDKIVACILTGPLGKPTNSEIREFTTLIPDMIALRDWIVSQNCHHVAMESTGIYWMPIYEILEEAFGGDITLLVVNARHMKNVPGKKTDMRDSEWISTLLRAGLLNGSFIPEKRIREFRDLNRYRKSVIRDITSQKNRVEKFLQSSGFRLSSFISDIFGASGMNIIRHLTEHGQIDRSALDSCLKTKTRNRIDEILMSVNGTLSEHQKAFLKILMDHYDSLKEHLAEIEKSLEADMAPFALQVEQLSSIYGISTTASCAIIAEIGIDMKPFKTAEHICSWAGLCPGNNESAGKRKSTSVTKGNPYIKSMLCEIAWVIAGKRNTYLSAWYWRIKQKKGAKKAIIALARKLLVIIYTMLKQGTLFDESCFEARRKSCEQKQLSRYIRELEKHGYHVEAQA

SEQ ID NO: 411910 - protein, 424 aa, unidentified
MNLTQNDRLKQVTSDTLIVGVDIGSQTHFCRAFDWRGFELSRRVFKFSNTGTGFLTFLRWTEELMNKTEMKKVIVGCEPTGCYWLTFQKFLQDHDIQLVTVNPFTVNRSMELDDNSPEKSDLKDPKTIALLAKDGRYSTSYLPSGVYAEIREASVCRDQIMKQHVRLSNQIQGWLQKFFPEYFECYADWDSTSGLMLLKEAPLPQDILRIGAGGINQIWRDAKVRAAGIKRAQTLVEAAQNSVGLEAGEAARLEIWVLVNDYILKAEQLKRLDEYLEEKVKEVPNVEKLLAIKGVGMSTVIGFIAEVGDIGRFTDPKQIQKLAGLEIVKKSSGKKKGQPRISKRGRRKLRRTMYESARALMTWNPAFQDVFLYYRNRQRNPLGGMQAKIAVACKAIRVFYVVLQTGCDFDEEKFRRDIIRPEAA

SEQ ID NO: 411911 - protein, 422 aa, unidentified
MLAVGIDWAEEFHDIALGTQEKGVFAQFRIDHGPAGVHGLIGRCLELEPDPAEVRVVLETRHGLLVEALIDAGFTVIPVNPDLVARRRGPARKKDDAEDARICCLLALDRHASLKVLVPHGQIGGELRAIARDDDRAARDQRRLLNRLRADLQSTYPAALAIAGDDLGAPTLLRMLEQWPTQAELAAAAPQQLITFARAARHGWPDRFAARVAAALATPHLDSRDYLVRAKASTIRLAAVQLLALHDARRAWQARMAELLLGGRRTGRDHTVKDPDPGKAFPGGEIYLSMPGLGDLLAARVAGEIGEHIHQFDTPAGLQCYAGTAPVTRRSGKSDFSVARRLAHNRYLGVAVHQWAFCSLIRSGWAREFYDQKIAAGKRHNTALRALANRWLEILWHCLQRGQLYDENLHVANRNRALGRAA

SEQ ID NO: 411912 - protein, 345 aa, unidentified
MDIMYYIGLDVHKKTISYCVKDASGQVHQEGKVGATRWELDGWMKTLPQPWTVAMEATIFTGWIYDHLLPYAQQVRVAHPLMLRAIAAAKKKNDQIDASKIADCLRCDFLPECHMASTQIRDRRRTLRYRHLLVRQMVQMKNRISGLLMETGVNYNKQRLHKVGYFRELLSTNEDVHESIRPLLRLSRDSIVRLQKTEYAIVSSLQRDPLLAERIRRLRTVPGVGPITALTWALEIGDVARFRSIRQAISYCGLCGAEKSSADKVMRTPLSKQRNKHIQRVLVEAAKLAPRQDHDLALVYETEKQKGNANRATLAVARKMVAYLLAVDRGERDFVPAENYQRAAA

SEQ ID NO: 411913 - protein, 341 aa, unidentified
MNTKRVGIDLAKQVFQVHGVDYQDKVVLRKQLRRNQMLSFFATLPPCLIGMEACGGAHYWARELQKLGHTVKLMAPQFVKPYVKSNKNDANDAEAICEAVGRPTMRFVSVKTIAQQDLQAIHRIRSEVVRQRTAKVNQIRGLLAEYGIVVGRHVATLRRALPELLENAENGLSFDFRTLLDELRQDLIRLDEREEEMSQKIHTLANSIPAAKRLQSIPGIGPMSATAIVCAVGDGKQFKRGRDLAAWLGLTPRQQSSGGKDRLLGISKRGDSYLRTLLIQGAKSVIKVVGNKTDPRSLWLQNLCTRKHKNTVAVALANKNARIAWALLSNDTSYLPEGKPA

SEQ ID NO: 411914 - protein, 488 aa, unidentified
MSTAAKQPAKNGSDAQRSAPKRKARGSHCQQGKGNQRRSKLTITNPDAAGIDVGSQVHYVAVPEGRAQTSVRSFGAYTAQLDELVQWLKDCGIKTVAMESTGVYWIALFQKLEEAGFEVLLVDARQAKHVPGRKSDVQDCQWLQQLHTYGLLRAAFRPEDAICRLRTLQRHRKNLIEYAAMWIQHMQKALNEMNLHLHHVLRDISGYSGLAILDAILAGERDPSKLASLAHYRVQKSKTQIEAALRGDYRPELLFVLSQSLQNYRQIQQQIAQCDLSIEQQLAKIADCANPNQDCASAQQGQDAAGCNAPKRKPKDALECSLAAHLKRILGVDLTTIPGLDVVAILTLVSEIGVNMTKWRNAKAFVSWLGLSPNNKISGQRVLSSRTRKVVNRAATTLRLAAMVLGKTNTPLGSFYRRKRAQFGAPKAMTATARKLGCLIYHLIKKGQGYQELDLHTYELKYQDQILNSLRKRAKDFGFDLVELPKAA

SEQ ID NO: 411915 - protein, 351 aa, unidentified
MMIIGIDYHPSFQTIAFLVEETGECDEQELRHSDGQAEKFYRDLQQRGICVRVGMEATGYSRWFERLLAELGFEVWIGDAAEIKKLRVRKQKTDREDARLMRKLLLENRFPRIWVPNPENRDLRQLLWHRHRLVQMRTRIMNQLQAVAMNEGYRWKKKLFSERGRAQLEKLSLAPWASRRRKELLELLDQLDPKVAELTAAVEQEANQRPEVLRLMTHPGVGPITGLVYVLVIGTPERFPCGKQIGSYTGLIPCEDSSAGKQRLGHLSKQGNALLRYLLGEAAQAAARCNPDWRRRYVHLAMRRHKNIAKAAMARKLAVRLYWMWRNGWDYSQLVEFGSNAGKLATGHGVK

SEQ ID NO: 411916 - protein, 344 aa, unidentified
MSKFNLISIDLAKNVFQVGKFLHQKLQSNKAVSRKELLSILTTSPRCKVVMESCGGAHYWARKARSVGHEVVILDPRFVKAFRVGQKTDANDVIAIAAASFSPNVRPCKSLTQAQQSLQSIERMRALAEKQKRQLANQIRGLLLEFGIVIKQSECAFRQAIPEILEDSDNGLTAGLRQCLAQCYELFKAQSTLKETLNELLTGLVKQDEQCERLLALEGVGPITAVGLLISLSDTTHFTSGRNAAANVGVTPRQHSSGGKVRIGHIAKYRGEITLRSHLFLGARAVISQLKHREPKTKKEQWLKALVERRGVKCAAIALANKTVRTAYAMLKKGTSYEPSLLAN

SEQ ID NO: 411917 - protein, 404 aa, unidentified
MRVFVGHDWAEAHHDVFIEDEAGARLAAARVPEGIEGVARFHALIADHIDDPSEVMVATETDRGLFVGALVAAGYRVLAINPMSVARYRERHATSGAKSDAGDAWVLAELARVDGQHHRPISGDTDLADAVKALARAHQSLIWARKRHTNQLRSALREFYPAALDAFDDLASGDALAILAIAPTPTAGRHLTSPRIVSALRRGGRQRLVDERAGEIRQALRAEHLRAPDVVADAMGATVVALVGVISELRIQIRRLETELADRFDQHPDAKIIRSLPGLGTILGARVLAEFGDDPNRFDSAKSRKNYAATSPITRASGKHRVVLARYARNHRLADTCHLWAFAAITASPGARAFYDHRRQSGDTHNRALRALANRLVGILHGCLRHGVPYDEHTAWAHRNDLAA

SEQ ID NO: 411918 - protein, 611 aa, unidentified
MFGIGWGGTGVGNEEYLVVHHHRIPGRGVAADLRHGAGNDERVDVPFLQASVQIRRARHEGAEAPLVDDQILIGHIQFGPERVAGVAGRECLDKTSTTFRREEMVKVNRPCADRLCVRCVLREDYQSACSPQPSADTIDIGYDCTGHWDFGHLAGRHEAVLQIDDDMRGAARAQAVKHRDATPAEDEALSDFVEDTQLMHGFTILLMTGSASQGFANSTSSRMPGSEVNVRQWNGPAVLQPCRHEKLARGAQDKEHAMSQKLSAAIAVIGIDIGKNSFHIVGHDHRGAIVLRQKWSRGQVETRFANLPPCLIGMEACVGAHHLSRKLQMFGHDARLMPAKYVRPYSKGQKNDFRDAEAICEAVQRPTMKFVATKTADQLDLQALHRVRDRLVGQRTGVINQIRAFLLERGIAVRQGPHSLRSELPGILATRTDVLSPRMLRVIEALAGDWRRLDERIEGLSSEIETLARHDQACERLMTVPGIGPIISSAMVAAIGTGDVFSKGRDFGAWLGMVPKQISTGDRTILGKISRRGNRYLRALFVQAAWVVLVRVKRWERYGLKSWIEAAKKRLHHNVLAIALANKLARIAWAVLNKGRAFECVKTEEMASRPA

SEQ ID NO: 411919 - protein, 414 aa, unidentified
MDVLHERCAGVDISKKDAKACVRTPSTKRRGSFTTETTTWGSTTNAVLALREHLLAAEVTLVVIEATSDYWKPFYYLLADELNVILVNARQVKNLPGRKTDVSDAAWLAQLGAHGLVRASFVPPQPVRELRDLTRARTQMTRERGQIVQRLEKLLEDTGIKLSAVASDIMGVSGRAMLEALTGGERDPQTLAELARRRLRNKIPELTEALTGRFRAHHAFLTRLHLDHYDQLTDAIRQLDERIKEAMAPFQPALDLLDTIPGINRAVAEVIIVETGGDMNRFASAKHLASWAGVCPGHHESAGRTKNAKVRPGNPYLKGALGLAAFGAVRTKDTYLQARYKRLTARRGPLRALVAVEHSIITAIWHMLTDNIAYHELGGTYFAQRDPERATRRAINALNQLGYTVTLNPLESAA

SEQ ID NO: 411920 - protein, 433 aa, unidentified
MNYNNHPKMKHIYVGIDCHKQTHTAAVINCFNETLDTITFTNDINDFEKLIELVKKYETDGLTAIYGLEDTKHLGHSLATFLINKKCDVRHILSSLTYNERKKHPIISKTDEIDAECIAKVLLDNLDKLEKANNDTLYWTLKQIVKMRSTIVNNNTKVKNKLHAQLMHHYPNYKLFFSNSDCNTALNLWEHYPSPDLLQKVSLEELTEFVKLHSNGTLGENKAQSIFDIVNNTIYEKLEYQEERNILITTLVGQIKNNNKQLEEIEKNIIDLYDKLGLKLHTIKGLSKMSSAEIVAEIGNINRFSSKDRLARYAGIAPVSFSSGNHDKEKRNEYGNRTLNNYIYYLAIRSVSTGKNKDTPTNAIFLDYYKRKISEGKNNKQALTCVMRRLINIIYRMLKDNSEFYVPTELEKKCKSKWLEKLEQLKQENEKNH

SEQ ID NO: 411921 - protein, 458 aa, unidentified
MNRRRKKKAGNEQQDWSVNLDVVHPNAAGIDIGNESHYVAVPPDRDAEPVRQFACFTEALQQMAAWLKSCGIDTVAMQSTGVYWLPVYEILTEEGLQVFLVNARHTKNLPGRKTDVQECQWLLQLHTFGLLNNSFRPPEEICVLRAYWRQRAEHVASASTCIQRMQKVLTEMNVQLANVISDISGLTGLAIIQAILAGERDRYKLADLANFRIQASREEIARSLEGNWRKELLFILQQELNLYQTYQQQIAECDTALAAHLQTLEDKVEPGSQPPAAKANKRAGSNAPTSFDLRGELYRVSGTDLTQIDGINIMNAQTIIAEVGVDMSRFPSEAHFASFLGLCPDNQITGGKVLRRGTRHVENRAATAFRMAATSLWRSKTYLGAKFRRLRARLGAPKAITAMAHMLARLVYRMLRYGEQYVDKGMKYYEEKYREHEIRSIQKKAKDLGLVVTLTTAA

SEQ ID NO: 411922 - protein, 352 aa, unidentified
MKHYTGCDAHKKYSVFTTISEAGEIFPTERVEHDRQKFRSFLETLPTGSSIAIESVGNWYWLIDEMEKAGHKPSLVHAGKAKLMMGNINKTDKLDARGLAILARNGTLPTVWIPPGELRDQRELPRMRLVLVSIRTKLKNRIHATFAKYGITFEEVSDIFGRKGRRLLEQAMNELPPETRHSVEEQLQLIDQVEQSIKQAEKRIRSVIKEDHAMQILETLPGVGPILAITIALEMGNVERFPTGEKFASYSGKVPRVSSSGGKTYYGKVRPDVNRYLKWAFTEAANAIVLQQHRLGDCHVLRLYWRIRNHKGHAKAITAVGRHLAEATYWMLKNDEPYREPGIKKMVSSIQG

SEQ ID NO: 411923 - protein, 388 aa, unidentified
MIYAGIDVAKDKHDCLIVDSDGKGLSKVFTITNNKQGFDELFMNLTTHSEDLSELKVGLEATGHYSDNLLEFLIANDLPTTVINPLHTNLYRKGLSLRKTKTDKVDAHSIVTMLRTENLKPYSQSSYHLRELKSLTRYRFSLVQDCARLKSSFARLCVILFPELEKLVPSLHMVSVYALLAEFPNARAVSECHLTRLANLLSQASKGRYSKDKAIEIRNAAKVSIGSYSEVKSLELQQTLQLIQVMEEQIAQADAKISPIVDSFHSPIMTIPGIGYRMAAIIIAETENFTNFDKAEKVLAFAGLEPSVYQSGQLTSTHAKMVKRGSKYLRYALFNSAKFVCHWDEGFNQYLAKKRAEGKAYNIAVSHAAKKLTRVIFHLVKTNQSFSR

SEQ ID NO: 411924 - protein, 279 aa, unidentified
MPLYVGLDLHATSNYLAVIDHKGKRVDHKKLPNRPVMVLDALRSQRGRVKGVVVESTFNWYWLVDTLMEKGYAVHLANPSAIQQYSGLKHGDDKHDAFWLAEMLRLGILPEGYIYPKEERPIRDLLRKRRHLVKLRTSLIISLQNIISRNCALSIPVNDVKRLKEDRVSPLLEGHKDLALAGQASKETIDYLTRQIRRIENTIVKRVELKESYRYLLTIPGVGHVLALTIMLETGPISRFANVGNYVSYCRKVSSQWTSNEKAKGKGNKKNGNKYLAWA

SEQ ID NO: 411925 - protein, 369 aa, unidentified
MADRITYVGLDVHKDSIVVAVAAGGLRGEVREYGRIANTSTALDRLLRKLGGDGMRLRFCYEAGPCGYGIQRRLSTRGHECVVVAPSLIPKRAGDRVKTDRRDAASLARLHRAGELTAVWVPDVGHEAMRDLVRARLNAVHSLRRARQQLSGFLLRHGCHYGRPAWTRLHRRWLAGLKFEQAVHHIVLEDYIAAVEAAEARRNRLTAQIEAMLPDWTLAPVVAALQTMRGMALVNAASLIAELGDLSRFANPRQLMAYLGLVPSEHSSGSSVKRGGITKAGNAAARRLLIEAAWSYRFPARLSRELLLRQESQPRLIRDIAWKGQVRLCARYRRLARTGKPANIVTTAIARELAGFVWAIARQVTVTTD

SEQ ID NO: 411926 - protein, 343 aa, unidentified
MQAVTTIGLDIAKSVFQVHGIDAEGKVLIRRQLKRRYVLAFFEKLQPCLVGIEACATSHHWSRELKALGHNVRLMPPAYVKPYVKRQKNDAADAEAICEAVTRANMRFVETKTPEQQSCLMLHRTRQLFIRQQTSVINAIRAHMAELGIVTPVGRKGVEQLLAIATDASDRRLTEVARACLAALGAQLRMLKAQILEFDRRIMAWHRSNEMSRRLDAIPGVGPALATALVAIVANPKAFRSGRNFSAWIGLVPKQHSSGGKDKLGSISKQGDRYLRSLFTTGALAVIRYAKINGTQHRPWLAALLTRRPTKVAAIALANKIARMAWALMAKGERYKEPVALAA

SEQ ID NO: 411927 - protein, 340 aa, unidentified
MDKPDLCGIDVSAKQLEVRLRRDGNTEAERSFANTASGHQELKRYLTRKRTAVRVCLESTGLYGLDIALLLQADTRIEVMMVNPRAAKDFARALMHRSKTDPLDALALLEYAARMPFHPWQPPSVAALQITALGRRIHALTEQSTMEKNRLHAVDSTHTTLPVIVRDLRRSIASVQAAIAKLSREAYKLIAADDQLDRRFHLLQSAPGIGEVSALQLLGELVLVPANCDVRQWVAYAGLDPRQYQSGSSVRKKVGISKVGNRHIRRALYMPALSAACHNPHLKSFYQHLQTNGKCKMVALIAVMRKLLHAIYGMFKHNATFDGTKLYPAFTQTEIPALAK

SEQ ID NO: 411928 - protein, 332 aa, unidentified
MYQVFVGVDVSKDSFTACAIDQGRKKLFEISTSMDRKGFEELSRCLLKFQKDSILVGEESSACYHVNLSVFLAKEGYHTVVINPLLISNFMKLSLRKTKTDKKDAFVIACFLSMFHSSLQESSSLSSDFQELAREREKLSFQVSTLKNDIEKLLAVTFPEALKATNVYSKGILNLLKSYPSAWMIKTLSASEVAKLIKPEGKGRRPDISPEKILSLARDSIACMSPAREFILSQKISQLLLLEGELEKLNCILTDMCQECAVEDLEILKSIKGIGDVTAIHFLAEIGDVSRFDNYKKLIAYAGLDPTVHQSGRYVGQSKISKRGNRHLRRVA

SEQ ID NO: 411929 - protein, 338 aa, unidentified
MNIVFPGIDLAKNVFQLCGLNQAGKPVYTKRTDRKELLQTLANIPACLIGIEASTGAFYWQREFEKLGHKVKVISPQYVKPFVRGQKNDGNDAQAIAVALMQPTMQFVPPKSPEQQDIQALHRARQRIVNHRTATVCQIRGLLLDRGIPIGSAVSRARRAIPLIPEDAENGLSSRMRRTIAELYDLFNDLERRIHFFDKEIETVFRQSEACQRIAKVKGIGPETATAVVAAIGKGTEFKNGRHFAAWLGLVPRQHSSGDRQVLMNMTKKGDKHLRTLFIHGARAVVRVATNNNDGHMNQWVNQLKERRGFNKTTVAVANKNARIIWSMLRNETEYQVV

SEQ ID NO: 411930 - protein, 363 aa, unidentified
MKIMVGIDLHSNNALCGLMDESGRRLVHKQLPCDLAAILQLLKPYQKRIATIAVESTYNWYWLVDGLQDHGYHVVLANPARMQPYNGKKHTDDVSDAYFLAELLRLNLLPTGHLYDRKTRPVRDLLRRRLLLVRQRTTLILSFKSLNERTLGQHVPLARVKAMKAEEAQARFTDHADQLLSGEQITLMGHLTDSITKLEQHILGVVGKWSTYQRLQELPGIGKILGLTIALETGDAQRFADAGNFASYSRCVKSLRTSNGKKKGENNRKCGNKYLAWAFVEAAHFACRYDDQCRRFYDRKKQQTNPVIATKSLACKLAKAAWHVMKDDVPFDAARVFGPGKKKDFGETGREPAKGSGHPSQQD

SEQ ID NO: 411931 - protein, 388 aa, unidentified
MIYVGIDIAKLNHFAAAISSQGEIHFEPFNFSNDYDGFYLLLSKLAPLDQHSIIIGLESTAHYGDNLVRFLIRKDFKVCVLNPLSTSAIRKNNLRKTKTDKVDTFVIAKTLMMQDSLRFFTLKDLDYIELKELGRFRQKTVKQRTRLKIQLTSYLDQVFPELQYFFKSGVHQNSVYALLKEAPTPNDIASMHMTHLTCLLQTASHGHFGKDTARELRVLAQKFVGIHDSSLSIQITQTIEQIELLDKQLFHTELEIANLVTCLHSVIMTIPGIGSTNGGMILGEIGDIHRFSTPGKLLAFAGLDPSVYQSGNFQAQRTRMSKRGSRVLRYALMNAAHNVVKNNATFKAYYDAKRAEGRTHYNALGHCAGKLVRVIWNVLTDEVEFNLE

SEQ ID NO: 411932 - protein, 417 aa, unidentified
MTVNSLMQKRSAIKPDTLIVGVDVAKYNHVARTMVPGGAIGRPFSFPNNREGFLALSAEIEARKPTPASAVIVGLESTGVYWINLARWLAEHGCQVVQVSGLYVHRTKELPDNSRGTSDGKDALLIADLVAQGKYLGFVRPAGVLADLRQLVGLRQRLVHERAARYNLLHQSVDLLFPEFATVFRDVTGPSARRVLRRFPTPAAALAHPPEAMRQLLSEDGRVWVSVAKLARLQAVARQSIGACEGTTGLEYALNDTLLELDSLDARVRQVEAEIDRLLPQVDETPILVSLVGRMTAAVILSETGGLKQYSCAAAVLKLAGLNLYQISSGQYRGDRHILQMGRSLLRQTLYLAVLQHTHPGMPLYPYYAELLRRGKPKPVALVALCCRLVRLLYALVRDGRCYSAQPPERNQQNSAA

SEQ ID NO: 411933 - protein, 427 aa, unidentified
MSYRIAGIDVHKRMLHVVVSDVQVDGEYDFTRRIFGSLPEALRSLAAWLLEQQVQEVVMESTAQYWKPVWGTLERYWKQICQTREGALATSGTLHLAQAQSNRGRRGRKKDFRDAERLVKRLVAHELVLSFVPDVEQRLWRTVVRTKYQLTRNRVQLQNRLEALLEETHIKLSSLVSDLLGASARRMLHAIADGETNRETLAALADRGLRATQEQLQDALGVCQELNPVYRRLIRMVLDEVASIDKRIEQLNQEMANLLRPHEDQVKRLAEVPGLGVDSAQQVIAEVGATAATFPSEKHLSSWVGACPGDEESAEVNRSRRSPQGNRHMRRILNQAANAAVKLKGSVFEILYRRYVPRLGHNQTIGIIAHKLCRLVWKILHRGIRYEERGPEVSKASKQRRTRKMIQALRRLGYRIEPSPSQSAIPA

SEQ ID NO: 411934 - protein, 345 aa, unidentified
MKQFIGCDVHKKFSLFVALNEKGEASRAVRVEHDRETMRTFLRQWPTNTPIAVEASGHYYWLVDEIEAAGLKPHLCHPRETKRRMGKTHKSDKLDAGGLAMLLRNGTLPEVWIPPAGLRDQREMLRLRMFLVARRTQIKNRIHGALARYNVQLISKDLFSKVGRDELEQRLEELPPHTRQSVEIECTAVDFLEGQIEEVEQHLDAILQPGQEAQLLRTMPCIGRILSSVIALEIGDVSRFPRAENLAGYAGLVPRLIASGGKIYHGRTAPDVNRTLKWAFVEAGNMVPAQSQRLGGRHVLGLYTRLRQRRNHYKAVVAVGRHLAEAAYWILTKGEAYRDPLCRPS

SEQ ID NO: 411935 - protein, 402 aa, unidentified
MAYDFVIGVDVGKYFHHACVLDPQGRQVLSKRINQHEGSLRKLFGQFLADDASVLVIVDQPNNIGRLIVAVAQDMGVDVRYLPGLAMRQLSRIHVGNSKTDVRDAYVIAHAGLNLPDSLRSVDRVEDVFIQLKVLNGIDEDLARAYTRLINQMRSALVGTYPAFEHVLRGQMIHRKWILHLLAKYGGPTKIRRIGRTRLKAFARKHRARNPEPVIDAMLAAIHERTVSIAGAEYAELGVAMSATDALAKLEHRKEIEAQVLKLIQDIPQTEILLSMPGIGPRSAAQILMTVGDMSDFPDAAHLASYAGLSPRTNQSGTSIMSNSPNRAGNKKLKNALWQSSFASIRFHERSRQFYERKRKEGKRHNAAVVALARRRLNVLFAMMRNGELYRDISTAQEAAAA

SEQ ID NO: 411936 - protein, 372 aa, unidentified
MKKKRDREGMVTAALDLGDSESLATILSPDGDVVDSFSMSMNDDGYSLFASKVPKDARIAFEATSMAYPVSRRLTALGYSDITVAHSKELAWIVKSKKKNDRIDSLKIARLHMAHMLPESHLLSRQEQVKRDLLIQRVTLGKEIGKMKLKLIAYLKREDVYLSLPESSDGFSRERREAIRSMRFGDDDGRDLVIKTMMDRLEFLERQCAPLEEKVRTIVKDSEDIRRLMSIKGVDFYLASLASSYIGDVNRFPDDDHLASFLGIVPESWDSANVKRRGHMSKEGPSTARWAFSVMTDTVMRYNPRLKTYYLSVKKRKNSGSLAHVATMRKLVRMVDHMLRYKENWRWEDEASTTKKLANLDREAEAKTMGGD

SEQ ID NO: 411937 - protein, 418 aa, unidentified
MKRSKRAMLVLAKGRAVVGIDVGKRKHAATALTPQGEVIAQLAAFPNTREGIDLLEKDILRKAGGPGKVLVAMEATGHYWMCLYYELQRRGYECVVLNPVQTNAHSRAQIRKSRNDRIDSAGIARLVLAGEARATRVPNEKTYELRLWVRHRQRLLRAAGNMERFAHTLVDRVFPEYAEVLSKPFLPSAQKLIRQLGLAPASLLAKEDEVRQVLRTASRNKITPDTITRLLEVAKESIGTRQAESVVDRQLVLVFDCLATLRKQIAAVEDELEARVGQLDSPLFSLGITTNLVAVMHAESDPIQDFRSADQYVAYVGLDPSSHQSGDTINRHGKISKRGSPGLRRAMYLAAFVVTRKHACFRRIYQKHCRQGKRHTSALVIVARHVARVIWRLLTDGREFTKRPPNNNSLPKGRRKPK

SEQ ID NO: 411938 - protein, 343 aa, unidentified
MQTVTTIGLDIAKSVFQVHGIDAKGNVVIRRQIKRRQVLAFFQKLPRCLIGIEACATAHHWSRELQAIGHSVRLMPPAYVKPYVKRHKNDATDAEAICEAVTRPNMRFVATKTAEQQSCLSLHRTRHLFIRQQTSVINVIRALFAEFGIVAPVGRRGVEQLLRVAADLSDKRLPDIARACVAALGAQLRMLKAQILQFDRMIMAWHRSSEASRRLDDIPGVGPALATALVASVADPKVFRSGRDFSAWIGLVPKQNSSGGKDRFGGISKRGDRYLRSLFTTGALAVIRYAKIHGTQHRPWLTALLTRRPTKVAAIALANKIARMAWAIMAKGECSKEPAALTA

SEQ ID NO: 411939 - protein, 397 aa, unidentified
MYIVGIDIAKRKHEAAVIDGEGAVIIKPFSFTNNCSGYNRLLAMLAKAKLPLDEVSFAMEATGHYWLALFTRLQKEGFRVQVINPVQTNSIRSFYIRQAKTDPRDALLIAEVIRFGHFSESTLHPENIYELRELCRGRHAIVSMQADVKRKVVALLDQVFPEYETAFTNLFGDTSMAILQTCPTPKELSEMPLEELCHLIEVPSHKRFRMAKAQELQALARNSFGFAMAGDVFSTMIRLYAKHLVFLKQQVQEMDRKIAEIMDTLDTPITTITGIGPTLGAYILSEIGDISRFSSAAKLAAYAGIDPTMRQSGEYNGVRNRMSKRGSPYLRHAIWLAASSAVLHDPALKLYFQKKRDEGKPYMASVGHACRKMVSIIYAVMRDNKAYTPYIPNEISA

SEQ ID NO: 411940 - protein, 323 aa, unidentified
MQGKVLLERSAEEPMYVGIDVSKEWLDVYFHPAGSRLRVSNDAAGLRSLKRKLAGLGAVQAIMEATGKFYRVAWRSLAAGGFAVTIADPRRVRALAKGLGFVAKTDAVDARLLALIGAMVCAAATCPPPEALEELQELVNARSAALADAVALGNRCETSQTRLLRTELNRLHAACRKLVAKLDAEIAQRIKADPALARRHAILISIPGIGAAVAAVLIATMPELGAIDGKQAAMLAGVAPIADDSGRHRGYRAIRGGRSLPRKALYMAALSASRHNPALSAFAERLKAKGKKPKVVLIAVVRKLVTLTNTLITQNRLWSPLAP

SEQ ID NO: 411941 - protein, 414 aa, unidentified
MNKITISKKGQYVNSDVMVVGVDIGKEFHVAVMRRRDGSFSKAFKFTSDVVGFSSFKEWLDQWYTQDGFSRFLIGMEPTGHYWMTLASWLRKQVIEIVQVNPLHTHKAKDLYDNTPGKTDKKDARIIADLVSQGKFLNCIIPQGRYADLRYLVLLRQRLVRERTRQVNTMHRVLDVLFPEFTKVFKNLQTKTSLYLLRYYCTPALLLAGSRSRLVRRLRKISRGKLRMEKVAQLYEWARSSVGVSEGIEGLQVILFKSLLRYGQLIQEIWALEARLEELVYGLSETVYLRSMKGIGLVTVATILGETGGLNHYRSAEEVIKLAGLNLYELSSGKHRGKRRITHRGRSVLRAGLYRAAVGVVRRGGPLHDFYQRLRNRGKYGTVALVAVACKLMRVLFALVRDRRCYTSDYVPIG

SEQ ID NO: 411942 - protein, 353 aa, unidentified
MVVVGSDVHKRTHTFVAVDEAGRKLAEVTVRADPKGHDKAICWARERFGVEITWAIEDCRHLSARLELDLLDAGEQVVRVPPKLMAEQRRTARTRGKSDPIDALAVARAALREPDLPVATHDEASRELKLLVDRREDLVGERTRMINRLRWHLHRIAPGDPVADPPPTSLKRAKPRAQLTEWLADQDGIDARLARDILADIDRVTPVINDLEREITTLVTARAPQLLELPGCAALTAAKIVGETAGISRFATDAKYAMHAGVAPIPVWSGRTKGRVRMSKSGNRQLNAALHRIAVTQLRLGGLGRAYYDKRLAAGDTSTEALRALKRRLARTVFNTLKNNPSTTSATGLAAAA

SEQ ID NO: 411943 - protein, 350 aa, unidentified
MIIIGVDFHPEFQQIASVDTDTGEFQEKRLAHREDAENFYRGLAAMGRAVRIGMEASGQAHWFERLLANLQFELWVGDAAKIHTKRVRKQKTDRQDAQLILTLMLKDDFPKIWVPSWENRDLRQLLWHRHRMVQARTRIKNQLQAVALKEGLRCKKRLWREHGRQELESFQLAPWASRRRRDLLELLDRLNPTITELSQAIEREVENHPEVRRLMTHPGVGPLTALAFVLIIRETERFQCGKQVASYLGLVPLEDSSGSRRRLGHITKQGSSMLRFLLVEAAQVTARSLPEWRSQYFHLMMRRGRKIAKVALARKLAVRLYWMWRKQWDYEQLIKFGSHAGQPGHRHGVQ

SEQ ID NO: 411944 - protein, 365 aa, unidentified
MKRLVCVPSRTQGSAGAVPRPQPGMDVYIPVDLSRSKWVYGVRWGGQHQRTVTSPAGLQHLQALIAEYQQCTPHVVYEACGFGYEIAWWLEEYGIDGMVIAPSRLEQVPGRRVKTDRLDVRAMGRKREQGQLKGIYVPRRAEHERRQLSRTYAQALKECKRARVRVRSLLQEQGRIGPPPRAGWAVYHKWLAAQVLPAPVTLCIQELLTIREAARGSARRLKAAILQLAGAPEYAPVVAALEQQAGVGTFTAIRLVLELGTMTRFATVGAIVNYLGLTPSQYSSGELDQRGRICKTGPGYLRAWLLQCAWAALRGQHADVELKQCFERLAPRVGRKRAIVAVARRLGVRLRARWLEATKAAAVAA

SEQ ID NO: 411945 - protein, 402 aa, unidentified
MNSKIVYKICCGIDVHKTFVVACIASTNKQGVTAYKHHCFTTFTQGLKELLQWLLDKHCKDVCMESTGKYWIPVYNVLERDCTIVLAHPKYVKAIRGKKTDKKEAKWIADLCKHDLVAGSFMPVADIRQLRDLMRYSFKLTCFISNEQNYLQNGLTLSNIQLASVVSDTFGKSSQRILDKILENPEDTSFDIVSLIHSSMEKKLPELELAIDGFITSEQAGKLKIIKKHFEDLESRKAELEELILAFASPYQRELELDLILTATSFKNTFTAIGIIYEIGVNMEAFPSEKHFFSWVGITPTNNESAGKKKSVRVSKSGCYIEPLLVQCANSVVKSEKHPQIRNRYLRLRKRRGHKKSMIAVARMLLTALYNMLKIRNPIMRNYTEKVMVFLSIMKSQLNKLS

SEQ ID NO: 411946 - protein, 401 aa, unidentified
MVFVGLDWASTAHAVCVLDDTGTVQWRGSVPHSAEGLAELVRQLRQFGPPATVRVAIERPSGVVIDTLIDAGVQVVPIHPNVVKASRSRYSAAHAKSDDGDSYLLADLLRTDGHRFRPLRPLADETRALRALVRGRDDLVAQRVALANQLRALLERFWPGAAVIFADVDSPIALAFLARYPTPQSAERVGERRLAQFLRRHAYCGRRPTADLLARLRGAPVGRAGEAECDASGELVRSLGAVLVPLVAQIQHLSAAIAAALADHPDGPLIQSLPRSGQVNAAQLLAELGDDRARFPTAEQLAAEAGAAPVTRASGKHHAVVFRWACNKRLRQAVTTFADNSRHASPWAAAAYARARARGCDHPHAIRILARAWLRVIWRCWQDRRPYDLAQHRAAGLFPAA

SEQ ID NO: 411947 - protein, 413 aa, unidentified
MQTVIERSAALDVHKASVTACVRVPANGGGREQHVEEFAATVRGLLALRDWLDAFGVEQVAMEASGVYWKLPWAILEDEFECLLVNARHVKQVPGRKTDVGDAEWLCRLVEAGLLRANFVPPKPIRQLRNLTRYRKTQIQERAREVNRLHKALEDAGIKLDCVASDIMGKSGRDMLDALVAGERDPEVLANLARRQMRKKIPALREALEGRFEEHHALWIGAILAHIDFLDQQIDRLTAAIGEQIAPLAPAVSLLCTITGVQSRAAEVILSEIGGDMSRFPTPRHLASWAGQCPGNDQSAGKRRSGKTRDGSKWLDWTLEEVALAAVRVRGTYLHAQYQRLRPRRGHKKALGAVKHTVICAVWHMLSTGETYRDLGSDYFTHRDPERRTKRLIQQLEQLGHTVSITTAPAAQT

SEQ ID NO: 411948 - protein, 337 aa, unidentified
MSVYVGIDVHRKRSQVAVVTEDGKVQLNKNVVNGSEPMLRLIGDLPPGTPVAFEAAFGWGWLAGLLEDYGFEAHLVHPLRCKAIASARLKNDKVDAAILAQLLRADLLPEAWIAPLEVRQLRALLRHRASLVRLGTGLRNRIHAVAADHGYDRSASYWTGPGRGWLAELDLPEASREIVTDCLAVIDGLAPVIERIDGELHARAKADPRVKVLRTLPGVGEFTALMMLAEIGDITRFPSARKLASWAGLTPTVRGSDLKVRHGHISKQGSAWLRWVMNQAAQTAKRSPEFAATYAAIAKRRGKKIATIAIARKLLTRAWHLLAEMPATDATTPPRRP

SEQ ID NO: 411949 - protein, 415 aa, unidentified
MAEEVERFVGVDCGSQSHQVCLVDARGECLGERAVAHGGLGIEELCDWLIARTGAAPEVIAVAIEVTHGPVVEALLERGFCVYGINPKQLDRFRDRFTVAGSKDDRRDARVLADSLRTDRHAFRRLSNDEPVIVQLREWSRMADELQQERARLASRMREQLWRYYPQMLEIADDLAADWFLDLWRRAPTPARAGRLRPTTIERFVRTYRLRRWPAPEVLRILKQKPLSVAPGVVEAASQHIHTLTARIRLVNQQLKAAHRKLDDLCAQLIPAEEDEPGQPCPHRDVAILRSMPGIGRTILAVLLGEVWQPLRRRDYHALRTLSGVAPVTRRSGKTCVVVRRYARNKRLEHALYHWARVATQHDACSRQRYAALRRRGHSHGRALRTVADRLLSVACTLLEQQTLFDPAYQVRDAA

SEQ ID NO: 411950 - protein, 315 aa, unidentified
MVATQRPGAKASRSLTIEQTPEGYTSLLHQLQATGSVPGQVLVVMEATGSYWISLATRLVHEGFAVSVINPAQAHHFAKALLKRAKTDAIDAQTLAQLAMILQPEPWTPPPQIYYALQQRLAQRDDLLNLRQQVRNQLHALVQHPEVIAEVRARMESLLATFASQLTEVESEITVALSQDSAWAAAATRLQSIKGVGWVTAAWTLVTTLNLTSCDTVDSLTAYAGLAPMPRQSGSSVWHRPSIGHTGNGRLRTAFYMATLSAAQHNPVIKAFYTHLREVGKPEKVARCAAARKLLHIAWAVVKKDQPFDPNYALG

SEQ ID NO: 411951 - protein, 431 aa, unidentified
MEQKRQPYLSVGIDIGADFSLMASALPIQEIIGKPYKILHSSNRSVQGAVERILSTGRAYELPVRVYMESTGIYHLPLYHRLKDAGLDVYVLNPLVTHANQNINIRNIHNDKLDVRRIALLGLRPDLKTSIVPADEVAAVKALLREYHAMKKETSMYICRLKNQLRQIFPQYLPLFSKVNGKASLEVLSRYPSPGAVLSAGADALAKLIREASGKGAAMAEKKAEAILSAARESLSFGHGNSGITFLIGHYVEMIRILDEKTAAILKQIKHSVQDQPDSLLARQTRLLESIPGAGFLTAVTIVCEIGDFRAFRRPKQLYSYFGLDPVVRQSGNSAGANLRISKRGSPYARRCFYILALQSVSLRKNGEPKNPVLRAYYLEKCKSKAKMTALGAIMHKLCSIVFAVLRNEKPFMLISPQEHRHNFLSLPKAA

SEQ ID NO: 411952 - protein, 406 aa, unidentified
MGVDGRSSMYPSGCPNPIRNDAMPKQSTATAFDHDSTLVLALELSGKGWEVGAVLPGVTRRPRRGLAARDMAGLLQQIERWKAEALRAGRTVCRTVLAYEAGRDGFWIARYLLACGIEVQIMHPASIPVERRGRRAKTDRIDLDMLLRTLLAWLRGEPRVCSIVRIPSEAEEDMRRPERERERLVSERVALENRIENLLCLQGIIGFKPRLKKAAVRLDELRSATGTPLPPLLLDELKRLMVRHRVLSEQLREIEAAREQAAMAAEPDHAVQQIRMLTRLVGLGLATATGLTREVFCRSFADRRAIAGFVGLTGTPFNSGGSEREQGISKNGNPRVRRILLQLAWRWLRFQPESALSCWFAERTGGVKGRIRKIMVVALARKLLVALWRYVETGELPAGARLAAAA

SEQ ID NO: 411953 - protein, 355 aa, unidentified
MKRCHYIGLDVHCSFTELAVVTQAGRLTQRQRCATTIPALRAALDAIARPRAVAREEGPLADWLWRNLNGHVETLTVCDPRRNRLIAKDSDKDDPLDAEKLAQLLRGGYLKAVHHPESLERAVFKQLVLLYHERVRQRVREANRVLASLRRHGVFVREQAFVDKEDRSALLRGLPPARLLAANLNLLWQSYDLAAAQVRTLRRRLVDAARQEEVSERCTQLPGIGWVRAATFFVYVDTPWRFPSKASLWKYLGIGLERRHSGTGPVRVQLVKHANRQLKGVLLGAALRALGQKDNPFAAQYQRWLQAGISVGSARRNVTRSLAATLGGMWKNGSVYRPEWVGVAAAAVSAAEVSS

SEQ ID NO: 411954 - protein, 322 aa, unidentified
MRYIGIDVSKATFVVAYSSDKGGEIRTFNNTTAGIRQFIGTLPKDGSIHCVMEATGNYSALLLYMLNVAGITVSMENPLKVKNFAKAMLSTIKTDKSDARLITLYGEKMNPRPFKVQGEAILRLRQKITGSRQLTKQITAMSNLRGSLACLPVPDKGATHTVDETIKFLEKKRDRLQSELTDLVEVEFSRQLALLTTIKGIGITLATALIITTGGFTYFQNAKQVSRYLGICPTYEQSGTSVNIKGHINRNGDAYTRGLLYIAAWPASRFNAQCKETYTRLRQNGKPGKLAMIAVANKLVRQAFAVVAHDKEYVDGFVSNRP

SEQ ID NO: 411955 - protein, 385 aa, unidentified
MTATTRSFDLTALENTLFVSLELGESRWALSFTSGFGEQVLRRRVRSRDCEAVVSAIGTMKERLGLARDARVLSCYEAGRDGFWIHRFLEAHGVENLVVDSSSIEVSRRRRRAKTDRLDGESLLDLLLRHRAGSRKKVWSVVRVPTVEQEDRRHLHRELASAKKDRTRVTNRMKGLLANQGLTLDLKTDVPLQLSALRSWDGSPLPAGLRSRLSREWERVAFYTDLVERLESERRELLCKAKDPVIEKALQLNTLRGIGVNSAWLYVMELFGWRELRNRKQVGSIVGLAPTPHDSGQSERERGMSKAGNRHVRAMAIEIAWGWLRFQPNSELSQWYQRRFGSGSKRLRKIGIVALARRLMIDLWRFLETGVLPAGAELKTDARIR

SEQ ID NO: 411956 - protein, 393 aa, unidentified
MICVGIDVAKDKHDCVILNSEGKILVGVFTIPNNADGFDTLLQKIRSCTSSDDKIKVGLEATGHYSYNILGFLINQGLPTYVINPLHTNLYRKSMSLRKTKTDRVDAKTIATMLMSNVDLKSYTDTAYHNEELKSLTRYRFDKVRERAQLKQSVSRLVTILFPELEKLVPTLHMSSIYALLIEFPGAKQITEAHLTHLKSLLKDASKGRYGRDMATEIRDAAKHSIGSVMPAKSLELRHTIRLIRELDSEIEDIEAAIEAIMEELQSPITTIPGMGFRMGAMILAEIGDFARFDSPDKILAYAGMSPSTYQSGQLSLAGTYSHMEKRGSRYLRYALYNATKYVCHWDPGFAAYLAKKRAEGKHYNVALSHAAKKLVRLIYAMEKSRQPYKRAA

SEQ ID NO: 411957 - protein, 359 aa, unidentified
MQIVAGVDCHKATHTVVFLTAVGEVRGELTFPTTPDGYEAALGEAAKLGCVEWAIEGSGLYGYAFAVYASASGSAVFEVPGLYTKRHRRHGSHHGKSDSRDAKAIAEVLLRERGRLSQFCLATIQRALRMRYDQRDRLVRERTNAANRLRSAAVLIGVPELPTDITATKTARHLGSVAAKLRRSVPVDYANAAVLDEIEDAAETIQRLNLKIKEVEQVIRPLVRRIAPELLDLHGVSEVAAAGLIGHTGDLRNLRDAAAFAMKCGASPIQCSSGKREAVRVNLGGDRQLNRLLHVAAMSQVRRSDHPGRVYYDRKRTEGKTHLGAMRCLKRTLATIIFYRLRAVHRRLEAPDNGISVAA

SEQ ID NO: 411958 - protein, 320 aa, unidentified
MSKISVGIDISKAKFDAAILFSDNKVKTKKFENKAGGFVELMDWLKKHEALDSHVYLEATGVYGEALSIYLYELRNKVSVVNPSRIKGFAQSELTRNKTDKADAQLIARFCRAMDPPLWQPKPEHIRELGDWVRRLQVLQDLYQQEANRLDVASTCIKASIRAIMKRLEKEIEQVKKKIKEHIDQHPDLRDKQQLLETIPGIGEATIRQVLAFMANIEDFKSAKQMAAFVGLNPKQRQSGSSVQGRTRLSKIGDANLRKAFYMPAITAKRYNPIIKAFCERLQAAGKPPMLIIGAAMRKLVHIIYGVLKSGKAFDANWAI

SEQ ID NO: 411959 - protein, 412 aa, unidentified
MEIIHPCCCGLDVHAKTVVACLIKQGKRQTRTFQTMTDDLLKLSDWLRAEGCTHAAIESTGVYWKPVFNILEAAVKVILVNARDVKAVPGRKTDVRDCEWLADLLRHGLLRASFIPPAHIRELRNLTRHRQALVKELTAVANRVQKLIESANIKLAQVASDALGTSGRAMLRALAAGEEDSAKLAEMAKGRMKAKKAQLRAALRGKLNDSQRFILEELLDHYEDLEAAIARANERIRLEVADGPEPFVKEAVELLQSIPGVGESVAQTVTAEIGVEMAQFPSDAHLASWAGMCPGNNESAGKRRSGKTTKGSAYLRAALTQAAWAASCTKQTYLSAQYRRLYKRLGRKKALVAVGHSLLVIIYHVLDKKTGYRELGGNYFDTLHVKAQRKRLLRKLESLGVKVTVAAVSEAA

SEQ ID NO: 411960 - protein, 355 aa, unidentified
MLNHYQEGEGHINKVTIGLDIAKSVFHLVVMNQSGRVLKKKKLKRYQVLSYFSQLEPSIVVMEACGSCHYWCRELTKAGHEVKAIAPQYVVAYRKSNKHDYNDAEAIAEASQREGMRFVPFKSQEQQDIQLMHRIRERMIAQQTALSNQIRGSLAEYDIVYARGVATVVKELPFTLEEADNGLSMLARQLFQGLFNDLLVLRERIKEMDKELKAFAQNHPVCERLMSMTGIGLLIATALYAGIGQGQAFNSGRHLAAWLGIVPKQHTTGDNPRLLGISKRGNTYLRTQMINGARAALRHIGDKTDKVSQWCRACLARMSFNKACVALANKMARMAWAMLHHQQDYLPGQINKAAV

SEQ ID NO: 411961 - protein, 317 aa, unidentified
MNAHPDVSQPCAGIDVSKDRLDIAFSDDRPAFNAGNDPHGHALVVRSLRGLSTERIVIEATGGYERSVVAELAAAGLPVIVVNPRQVRDFARATGRLAKTDAIDAKLLARFAAAVQPTIRPLEDAETQGLAEVLSRRRQLVQMRVAESQRLNQTRTGRVRRSIAQVIKVLDRQIATINDDLDKLIQSSPIWKEKENLLISVKGIGPATARTLLAELPELGTVSRQEIAALVGVAPFNRDSGQFRGKRMISGGRAVVRSTLYMATLVATRFNPQIRQHYQRLLATGKAKKLALVACMRKLLTILNAILRTQKPWRSPA

SEQ ID NO: 411962 - protein, 345 aa, unidentified
MEIRTIGIDLGKTVFHLVGLNARGEVVVRKKCSRTQLLRFTSNLRACLIGMESCGGSHFLGRALREQGHDVRLMPAQYVKPYVKTNKNDYIDAEAIAEAVTRPTMRFVPIKSDDQLDLQSLHRVRKRWVIRRTAVINQIRGFLLERGITMRKGRKHLEASLPGILEDAENKLSGALRALLTQLQIEMQYLHRQIEECDQLIVRIASELEPCRRLLAIPGIGPVIATATIAAIGNGAAFKKGRGFAAWLGVVPGEHSSGGKQQLTGTSRRGNKYLRKLFVLGAHTVLLQRTKQSPGLSTWLASLIARKRKQVATVALANKMARMVWAVLFKGEAYRPPLVPQLNAA

SEQ ID NO: 411963 - protein, 348 aa, unidentified
MKIVGCDFHPAWQQIAVFDTETGEINEQKLVNGDGEAERFYRGLPAPALVGVEACGNSQWFGDLLEAVGHEVWMGDAAQIRASYVRKQKTDKRDAGHILRLLLENRFPRLWVPTAEQRDLRQLLIHRHKLVEIRSRVKNGLQHLALNRGLQKQRALWSVRGRACLQELPLAGWSARRREDLLKLLAALDSQVAELDAAVEQAAAEHPQARLLMTQPGVGAITALAFVLTIGEVSRFASSGQVASYVGLIPREHSSGGKQRLGAISKQGNRFLRQLLVEAAQTTCRLDEGFRKQYAARCHHKPKGVAKVAAARRLTVRLYWMLRQNVGYPEIAHIESSSRVPLAAITRP

SEQ ID NO: 411964 - protein, 428 aa, unidentified
MKKHSFSKLEAITPNMLIVGVDIAKKFHWARFTDYRGIPLGKALKVLNNKEGFENILTRIKDVCKQHGLHKIILGLEPTGHYWKPLANYLVGQGIKVVLINPYHTKKAKELDDNSPTKNDKKDALTIARLIRDGRFSQLYLPQDVFAELRVLSTTRVSLLKRQNAIKNTIRAVLDEYFPELVTVFKYPLKGKACRQILKSCPFPSLILKLGRTRVLTQIKKAVKKTIGQKRVEKLLKEAKESIGVTYGIPSARLKLTLLLEELELLEKQLDQVESAMEQALTHTGFKEIILSIPGVGIITAAGFLGNTGDPLRFTHPRQISKLAGYNLTEDSSGEHQSKTIISKRGRKQLRNVLYQMARTTVAVNSQMREFYHYLKTRPHNPLKKKQALVVISKKIITIIHSLLKKQVHYQPELVFNQFRLNQLKQVA

SEQ ID NO: 411965 - protein, 338 aa, unidentified
MPLYGGIDLHANNSVVVLLNEQDQVIYQRRLANHLPTILEPLAPHQADIMGVVVESTYNWYWLVDGLMEAGYRVHLANPAAMQQYNGLKYTDDHSDARWLAHLLRLGVLPEGYIYPKAERAVRDLLRKRAHLVRQHTAQVLSVQNLLARNTGSRFSAKRLVEFTLADLQGMLPAAEHVLAVTSSLAVVHCLGQQIKTLEKTVNTCLKPTPAYAQLQTVDGIGTTLAQTIVLETGALGRFPTVGHYASYCRCVGSTKISNGKRKGQGNIKNGNPYLEWAYVEAAQFAIRFSPTVQRFYQRKQAKSHVIIARKTVAHKLARACYYIMRDLVPFDVHKAFG

SEQ ID NO: 411966 - protein, 422 aa, unidentified
MVVRGIGLDVHRDFCEIAVAERGRVRSAGRIRTRVRALEALARSLMPADVVALEATTGTDRIVSVLERHGVRVVVANTRKLRSISEAKAKTDRLDARTLARLLMAGLLDEVWTPDERTRTLRRLTHRREKLVRARTRAKNEAHAVLGRNLIDRPPVTDAFGKAGRAWLAQLKLPVDEQLTLEGCLRQIDFLDQEVGALDREIAKAALEWPEVQRLMSVPGVNVNTAATFMASVGDIRRFSSPRKLVSYLGLDPRVRQSGNAPARHGRISKAGAAEARHMLGEAAWKVTLTAGPLRAFFHRVRARRGPQIAATATSRKLVVLFWHLLTREQDYAFARPAMTRNKIRQLELAAGAAPQKGRRGVAGNKSKAVFEAERALSRQAEAAYRRLISDWRATGPAKDGAGVTRGRASQKALEGQSRAAG

SEQ ID NO: 411967 - protein, 364 aa, unidentified
MAVSGLSPTEPTKEALDIMLHIGLDLSRRRLDFDLLCEDGSRIDRGAVPPDADGLRGLARRLEVYREPVRAAIESMNGARFVHDTLEGCGWEVEVADAVKVKGLAPLACKTDRIDAWVLAELSRRELVPAIWLPSFELRQERERARWRLFLVRKRSSLKHRVHSQLLAFGHACPVSDLFGREGRQLLGRLELPEPWRSGVLAAVGMIEDLDSQVTAIDRELKELGGDHRYIPLLMSAPGIAWVLGYTIAAEIGDINRFASPTKLCGYTGLCPKVYQSGSKDCRGHLTHAGPKYLRWALMEASVHACRHPLYRERYERNKRRLGKQRGPKVAQVDIARRLAHAIWHMLTRNRAFAPAGATHALAA

SEQ ID NO: 411968 - protein, 338 aa, unidentified
MEQQRQYVGIDLHRRRSVIVRMTDDGEVLETVHVHNDPLVFAQAVMKGGPDSEVALESTYGWYWAADLLEAEGAKVHLVHPLGLHWDSRRVKNDERDATELANRLRRGDLPESWIAPTPVRELRELVRYRAKLVALRTSAKAQVHAVMAKLGILPTLDDMFGPGGQKLLDEMAFEGVYAIRVESLRDLLEIYDREIVLVERELARRLKDHAGYQAIQALNGVGPITAAIFVAEIGDVTRFPSARHLCSWVGITPTHRESDLKAHRGHITRQGSSIARWAAIEAVVRYHGGAPIAPSFTRIAARRGTMIARVAAARKLLSLVYYGLRDGEIRCLAKGAA

SEQ ID NO: 411969 - protein, 429 aa, unidentified
MRTESTPGARGPVFCGVDTHADSHWLYVLDWRGRRVLSRRFPADAAGYEALAGAIAAAGEPACVAMEGTSSYGAGLTRHLASLGMPVREALSPARTQRRRPGQGKCDEADAERAARAAMSGSRLGTPKSQDGWVDGVRCMLAARSGAVKARTSAINTARSLLTTAPEGLRSRFRGMGGPRLMEELPSVRSEGALGAALGALADLWAAARDAALDMERAIEASLEENCPALLAMYGCGPVSAAKLAVAAGDNPGRLRSEASFAAICGACPIPASSGKTVRHRLNRGGNRQANSALHEIARQRVMRDPETAEYAERARARGKSDREVMRCLKRYVAREAYRALMHPHEIRRPADASELVAARRAAKVSQVRAASILGTSEKYISMLERGQRELKPIRRAYEAWVEAGLPLNWDRQAFEAERKMDSKKHLAK

SEQ ID NO: 411970 - protein, 356 aa, unidentified
MNSLTDLRAVVDVVIGVDTHVHTHSAAAVDTATGGVLGEITVDATTEGYTELVEFANNHATLRAWAIEGTGGHGAGLSRHLLEMSEIVIELDRPKRAARRNGAKSDPLDAIRAAREAMARPQLGTPRSGGERQALSVLLAARRSAINASTEAQLQVFSLVIAAPEPIRARFRGQKLAAMLNTAANLRVHSSWDVEPASTVVALRSLARRAHALLKEAREHQKAIVTIIRGWRPELLEEFGVGPIVAATVLCAWSHPGRIHSEAAFAMLGGVAPIPANSGQVTTRYRLNRYGDRQLNRACTPWSRSGSSTSQPPATTLPVAPPKERRAERSSAASPATSPATSTACSKTGSQLLDEA

SEQ ID NO: 411971 - protein, 333 aa, unidentified
MVEGTEGSHHKEGSRKMSNHNTVCAGIDTGKHKLDIAFDGSAERLQVDNSSQGHRTLSAWLRQREVERIGIEASGGYEQAAVSSLRADGFVVVVFQPAQVRAYAKFVLQHAKNDAIDAALIARCTAAATDIREPPDARLALLAQHLTMIEQLTEDVGQLKTRREACREERIREFWKREINRLKVLLSSELKQLVVAIREHRDLSDRLDLIASVDGVGLRTAVAILVRMPEIGRVTREQAAAIVGLAPYDNDSGLRHGSRHIKGGRQRLRQSLYAAALPAVFYWNPQLQAFYKRLLAAGKSHTLALVACARKLIIFVNTVVARGTPWTSSAAAA

SEQ ID NO: 411972 - protein, 354 aa, unidentified
MSHLNSGIAAIGIDIGKNSFHLVGQDQRGAIVLRQKWSRGQVEARLANLPPCLIGMEACVGAHHLSRKLRALGHDARLMPAKYVRPYSKGQKNDFRDAEAITEAVQRPTMKFVATKTAEQLDLQALHRVRERLVGQRTGIINQIRAFLLERGIAVRQGLRFLRAELPTILATRSDALSPRMLRLIEDLAGDWRRLDERIEGISDEIEALARQDQACERLMTVPGIGPIISSAMVAAIGTGDAFSKGRDFGAWLGLVPKQISTGDRTILGSISKRGNRSLRALFVQAAWVVLVKLGKKWERYGLRSWIEAAKKRLHHNVLAIALANKLARIAWAVLHNGRAFECVKMDEIAPRSA

SEQ ID NO: 411973 - protein, 404 aa, unidentified
MVFIGLDWARTKHDFVALDARGEELRRFAFPHDSLAFATLEREIAALEPEPSQVLVTLELHDGALLAWLLEQGYTVFGINPKSADRAREQYRPSGGKDDAIDAFVLADLCRVHHGKWRPVQPQSQTTQALHAWVRLRTRLTQEKTAACQRLRALLDEWCPALSALCDDLNRQWQQALLAELPLHEDLCAAHGNRVNGWLKEYRLRAESRSRLQALRSESPLHIPPGKKSSLRFEIRYLAETIAGLTRRIVEIDAELESLTEGHPDAQLFQSLPVKGVFTVSALLAGFGQNRESSPSWRELASRWGAAPVTVQSGKTRHVKRRRACDHTMSQVLIFFSFKTAFTPGCWAADYYRAKREKGVDHYAALRCLSQRWIKVLHRLWLDRVPYDEQLHQQNRHLHGAGIA

SEQ ID NO: 411974 - protein, 354 aa, unidentified
MILHETLSKPKLYIGLDIHKRSWSISIQTDLFFHKNYSMPAVADQLFDYVEQHFGDHEVHLVYEAGCCGFHVARYFLNLGWNVLVINPADIRRSDKDRYQKTDKIDARNLSNQLKLGVLKGIYIPTVEQEQLLSLARHRSQLTRKLRQCKSHIKSMLLFHGIGVPTKFDNSNWTHEFLDWLRSIEFENPMGTYSLRSKIQLYEFVKTSYLESANQLRAYCRKYHKEDYYLLKSIPGIGGFLASVIIAECGDIRRFTNENQFASFIGLVPGIHASGESEKSMGITPRSRSQLRSYLIEAAWVAIRKDPSMQAYYRKHIGKNPKTIIVKVAHKMSRRILSVIKNRKMYEINHIQTV

SEQ ID NO: 411975 - protein, 358 aa, unidentified
MQSNTLNFKGQKIFIGIDVHLKSWNVSIFTSNVKMRPFSQSPDAVALRTHLDRNFPGGDYFSAYESGFCGFSVHYDLLRCGIKNIVFNAADITDSHKERARKADSVDSAKIARNLRDGNLTPIYVPSQEDLSDRQLLRTRRSLVKNQSQTKIRIKSFLNFYGIKCPLSLECNGTHWSQRFINWVKYEFGNMADSQRKSGMFLLRTLEFQHAEVLSATRELRDLMRSPKYEKNMRLLTSVPGVGLIAAATFLLEIGDISRFSNSDHLASFIGLVPDTRSSGEKDAKIGITNRSNRYVREALIEGAWRAIRKDPALTLAYEELRKRMEPNKAIIRIARKLANRIMCVLRTQEPYVPAVIK

SEQ ID NO: 411976 - protein, 329 aa, unidentified
MQIYAMDVLKEYLDVFSVDENQKSFSKKIKNSFSSICKFLSSVDSEDVLCAEYTGVYTSLLAHLTAGFEIKFALASGFDIKHSLGNRKGKSDTLDAQRIWEYANRFHDKLVFHVPESETMQELKALFSLLNQLVKNLKMLSTAHTMEKQNPYLSIAESSLRMETESFLKQQILKTEQQISLLIGTSEELSQTFHLITSITGIGKVTAWELIISTGNFKKIASARKAAAYAGVCPYPNQSGNTAKKAGIHFRADKKLKSLLYLCSTTICTHNKEFLLYGQRKMMEGKHFYLVMNNVANKLLRTVYAVVQSKVPFIPLLITPDPRFSKSNN

SEQ ID NO: 411977 - protein, 363 aa, unidentified
MTTSIMAPVRCDDDCLEVVLGVDTHKDVHVAVVCSPVGKRVATASFSTTSAGYVQLLSWAEGFGAVERAGVEGTGSYGASLTRYLSAQGVVVTEVNRPDRATRRRRGKSDPVDAEAAAHAVISGRAGAKPKSGDGPVEQIRVFKIAKDSAVKAKRQAINQLHALVVNAEPALRERVGQLGRKALVTRCAAFDPPNDGSVIAAVQHAMRSLARRVQALDAEIADLTGRLEVLILDTAPRLLLEHGVGVDSAATLLRTVGDNPQRLHSEAGFAALCGVSPVDMSSGRTRRHRLNRGGDRQANAALFRILMTRLRAHHPTRDYVARRTAQGMSKRRILRCLKRYLARHLFSIIQAAFTPPTVNSTA

SEQ ID NO: 411978 - protein, 403 aa, unidentified
MNSVGIDISKGRSTIAVMRPFGEVVISPFEVRHTGSELSKLARQLKNLDGETRVVMEATGNYHASVAKLLHDAGLYVSVVNAKLVHDYGNNELRRVKTDRKDAVKLANYGLDRWLTLPRYIPEEDTRLLLKNCYRQYRQYSKVQTVLKNNLISLLDTVFPNVNRLFSSPIRGDGSEKWVDFVAEFWHCRCVSEKSQKAFTNKYQRWCRKHGYNFSEAKAHTIHAETCGHIDVIPKSETTKLLVEQAVSQLRATSTALAALKHEMQSLASQLPEYPVVMDLFGVGPTLGPQLIAEIGDVRRFYSKKALVAYAGLDAPPNDSGDVTGRHKSMSKIGASSLRRTLFLVMSVYLQTAPLDEPVYQFMDRKRAEGKPYRVYMMASANKFLRIYYATVKAYLESLEHTA

SEQ ID NO: 411979 - protein, 419 aa, unidentified
MRNGNTKKVKRISEETLLVTIDMGKVKHTGYYRFPDGAEGKIFEFSNSRNGFEDMWQRVCDAKRSRNLTEIVVGFESTGPYAEPLLHFLRKRNVRLVQVNPFHTKRLKELQGNSPSKTDQKDPKVIADIIELGHALTVIIPEGTAAELRRLTQARERGIQRRSMLMSQVQDLVFLIFPEFMPVMKDITIKSTQYLLKRYPRPQDVVETGVKLLTQSLKKVSRGKLGKQRAEALYQAAEASVGLREGQESIVIEIKEIISVIENIERFVKELEKHMSKHLKDIPYSRFILSIKGIGEITTAGLIGEIGDFREYSTISEVIKHAGLDLFEISSGKHKGTRRISKRGRPLLRKLLFFASINVVRKGGILHRQYLQHLDKGMPKIKALIAISRKLLSIIFALVRDHSVYIAQYSEIQQLKEAA

SEQ ID NO: 411980 - protein, 356 aa, unidentified
MINSNANRPQDNRFVIGLDVHKNKWSVTIRALNMELKTFSMEPSPAALAKHLRKNYPKGEYYSVYEAGFCGFWIHRELCDLGICNVVVNPADVPTSDKERDKKTDPRDSRKLARELQNGSLEPLYVPGLEDEHLRTLCRARRKCRQQCCRVMQRIRSLLAFGGEDAPDETAWSGAFIQELERQHSGDRADHSVMRFFIAELKEHRQRHAQIIRELRRFLRASKHAETIRLLMTVPGIGFVSAATFVTEVIDVNRFSKVDHLYSMIGLVPSTDSRGDRAGVKGLSRRKNGYLPKHLIFEAAWTAVRKDPELLACYAALLTRMPPCRAIVRIAKKLVNRIRFVWKNQQPYQTANAAAC

SEQ ID NO: 411981 - protein, 402 aa, unidentified
MNAVGIDVSKGKSMVAIMRPFGEIVSAPFEIKHTASDIHSLVELINSVEGESRIVMEYTGRYYEVLAHQLSKANLFVSAINPKLIKDFDNDSLRKVKSDKADAVKIARYALDKWQNLKQYNVMDELRNQLKTMNRQFGFYMKHKTAMKNNLIGILDQTYPGVNTYFDSPARSDGSQKWVDFASTYWHVDCVRKMSLNAFIDHYQNWCKRKKYNFSQSKAEEIYGKAKELVPVLPKDAITKLMIKQAVDQLNSASTTVESLRTLMNETASKLPEYPVVMAMKGVGTSLGSQLMAEIGDVSRFTHKSAITAFAGVDPGVNESGSYEQKSVPTSKRGSSDLRKTLFQVMDVLIKTHPQDDPVYQFLDKKRAQGKPYYVYMTAGANKFLRIYYGRVKEYLSSLPES

SEQ ID NO: 411982 - protein, 402 aa, unidentified
MFNKPSIDSTRLRRVRVTPSGARSHADAAAGPQPIVSRLISAATEQGSSRSRVRSSEQPTEPSPRSKRSHPQERVHVTDSNSSSGSSAKPSVGIDVSKEFLDIARSDSKQAWRRPNNSDGIQTLLEELRAITPACIVIESTGGLERSLLDALLEADMPVALVNPGNVRNLAKGLGILAKTDAIDAHLLARFGQLASPRLLEKRLQIQTELAALVACRRQLVKSRTEQVNRRGTTVSKTAMRAIDAVIAVLDKQIAKLDRQINDNIDSNDHWKQLADTLKSTPGVGEVLAFTLIAQLPELGKVDHRQLAALVGVAPFNRDSGHFKGKRSIRGGRACIRAVLYMATVTALQHNPLIKAFGERLVKTGKPFKQMIVACMHKLLTLLNVMARENLQWQQLNLVKNA

SEQ ID NO: 411983 - protein, 500 aa, unidentified
MKTNPSSKLNSSIYRNQNALLRALFDRAADPRKVLCVALDYAKRKHVALCCDGNGEILRAPFAVDNTVEGVAFLVEQISATARRRKIPKCDIFLGGEDEPSYVANFTAALRSRQYLVLRVNAAEAKENRENQIASTDLLDLLGIAKTLLSRRARSTEPVGSKDKKLSQDLYFQIREITRCRRGLVRQQTAASNRIHAYVDQLFPGFLEQPKSGLTSFCEASIALMMERFSAPEIARRRPRTLAAFLARHGVRQPDEIAAKLIALASGALPPAPQRLAALQRTLSATVDLRQCLTRNANELRCQAAILLASTPYAMLTSIPGIGFTLAAGMAGELGHPLRLSGVDSLCAFAGIVPHTFQSGGPDQPACQGHTPARCNHILKDWTVQSAQKILLYGPPELKDRITRWNANGQHGIFAGARRYLRLLRSLVLNQVPYLDPASRSSTASNDERADAALRAWLILIRKWRTIPGGLTIISDQSTPLGFWRRTAMESLDVVLPLKP

SEQ ID NO: 411984 - protein, 316 aa, unidentified
MVPSPLFVGIDVAKATLDIAVRPTAETWSVSNDATGIDALVLRLGAWAPTLIVLEATGGYQGPLVAALVAAALPVVVVNPRHIRAFAQAVGILAKTDRIDARVIAHCAEAVKPAPRPLPDAETQELRALLVRRRQLVEMVSAERARLDTVPPSIQDAIQAHIAWLTTQVAGLDDALTRAGQTHPVWQAKDDVLQSIPGVGPVLARTMLGQVPELGTLGPKPLAALIGVAPFNRDSGTLRGRRTVYGGRAEVRAVLYMGALVATRHNPVIKTFYERLLAAGKAKKVALTACMHKLLTIMNAMVRDLKPWQPQEVPSA

SEQ ID NO: 411985 - protein, 377 aa, unidentified
MKRIKFVGLDVHAETITVAVADQDGEVRSLGVIPNREESIRKLVKKLGPVEQLRFCYEAGPTGYVVYWQLTTLGAKCEVVAPTLVPMKSGERVKTDRRDALKLARNHRAGELTPVWVPDAAHEALRDLVRAREAAKKDQLRAKHRLGKFLLRHGRRPPTGVKPWTLNYLSWVKHEVHFEQMAQEATLLDYLHEVEHAELRIARLNLAIEEAVKSTPPKMRAVIEALQVLRGVAKVAAVTIVAELGEVSRFSRARQLMGYGGIVASEHSSGESNWRGGITKTGNAHVRRVVVEAAWAYRHRPNVGGVLRKRQEGVSEEIREIAWKAQHRLHTRYRKLMARGKEKGKVVTAMGRELLGFIWAIGIKAEAAQKETERQAA

SEQ ID NO: 411986 - protein, 371 aa, unidentified
MNFIGIDLHTNKFTCCYRDEKSSVENPKKGREIITFDLNAYGLTSFYQTLTSDTYVLVEATITTFSFVRLIKDMVKEVIIANTYELKQISLARCNTDKIDADKLCRILKAQVLSGELLISPVVSPPKKIQELRSFFTTYRFIKKQNVQLKNRIHSLLKEGLHGFTREEIFGKKARINIRNISPGSVMNYQVIMLLDMLEQNEGRVEELEKEVLLHAEPFMEQIEILTSLKGISVFIAIAIIADIIDVSRFRNSKAFTSYLRSAPRVSNSNTSVSIRGTNKKGRKLAATLLTQSLNHVLKASPKLQRWYDYKCENKKPGLVRTGLRRRVFAEIYQMLKKKEYHYGREKEKHEAKMSQYRTFLKKRKILLNTA

SEQ ID NO: 411987 - protein, 326 aa, unidentified
MVFLGIDVSKAKLDCALLLDSTTLRSRSKSVPNTLEGFAVLLEWVHGQAKVSAEQVIAAIEPTGAYHEALALTLYEAGVNVVVVNPAHLRKFAQGLAVRGKTDAKDSMMLARYGAQPERTMWQPAPAEVRELQALMGRLEAVDVELRRELNRQEAAQLSRDPQLVQASIADSIAFWRAEQDKLKRAIEQHIDRHPGLKAEYQRLLSIPAVGEKTANRMLCVLLSRRFANASQAAAFVGLTPIEHESGSSIRGRPRLSKCGDPKLRAALYMAAVVAIRHNPDVRALYQRLLHKGKAKMSALCAAMRKLVHICFGVIKNKQDYFPQIA

SEQ ID NO: 411988 - protein, 406 aa, unidentified
MTNVFIGVDPHKLSVTIEVVDDHETVLTTGRFGTDKAGYAAMRKTVSGWPERVWAVEGSNGAGRPLAQRLLADGERVVDVPAKLSARARLFDTGHNRKTDAHDAHAVAVVAVRTPNLRVLSYDVELEALRMLADRREELTRQRVQTVNRLQRLLSELTPGKAKKDITALQAKGILASVRPWDLAGKTRRRLAVEQLTELVAVEKKIKALTKELKAMVHARGSTLMDLPGVGPVVAARILADVGDVARFADRNRFASWTGTAPLDASSGEQIRHRLSRAGNRKMNHMLHIAAATQARLDTEGRAYYRRKLAEGKTRMEAMRCLKRRISDAVYRQLRADARRAALQAPETSEADPGGHCGATLTSSAADLPPHIGTSDQPLPGPAHPTLQPATAPRKSPRRKAPQPMG

SEQ ID NO: 411989 - protein, 439 aa, unidentified
MRKIRENAAGIDIGAKKVFVYIEGQKVKSFYTFTEDFDILCQYLLKHNVKTVAMEATGVYWSILYEILEEAGIDTWLVDGRQTKQVPGRKTDVKDCQWIQELHSLGLLNRCFVAKDDVKELRSYNRLREDHIRSASMHVNHMQKALTEMNIRLKEVLSQIHGISGMKIIEAILNGERNKTILLNMCDPRIIKNKKKEVLKSLNGRYTNTGIFALRQAFDGYNFYQGQIKQCDKEIETIIHRMGNGGLNKNLSTKRKTIRHNKPEVDNLGANLIDIFEGRDATIISGITDYSWMQLLSEIGTDLSRWPTEKHFSSWLGVAPGQHWSGKMNRNKKKSGHPKAGQIFRQIAQGLLASKNIALGSFGRRIRSRKGPAKAVKAMARKLAVMYWRVMVKGVDYAELGIKKYEEQLLAQKQKSVKRMAKELNLQLVNMQPIINSCH

SEQ ID NO: 411990 - protein, 386 aa, unidentified
MQTLNDFSRSRIALEPNGTLIAVIEMSLSSWLVAGILPGVERQPLKKLAVDESALLKLLQRWREEAEKAGRRIERIAVAFEAGRDGFWLARWLKARSIEAHVIHAASVAVSREHRRAKTDRLDTALLKRAFLGWLRGERDHCKMVAIPTIKDEDAKRPNRERENLVSEQSRIINRMKATLIRLGIRGFNPKLKRAAGRLEDLRTPGGEPIPPNTLAELRRDMERRRLVRDQIRQIEEARLERFDHAPGDGSHPMVRLLARVIGVGIETADMLVHEVPSRNMRDRRAVARYASLTGSPDESGRKRRERGLARSGNGRVRHGMIQLAWRFLLHQKDSALAQWFRARTENARGSRKRMIVALARKLLIALWRLVRQGVVPDGVVLRPAQ

SEQ ID NO: 411991 - protein, 408 aa, unidentified
MSIVFGIDVSSRDSSVCVLQSGATREYKITNDTIGFKTLLIDLKEYAEHPQIILEATGVYSRRITRFLDEYDYDYVLLNPLKAKKEINQGLRRNKTDRNDAYHLALAQDRNQHQPNRKEPEVYHQLQSLSRAYEELTHDIISSKNRLHKYLQLTFPELETIFNNSRGVNYWYLVELFPHCQDVRSLEVSTIAKQIKDFKGYGINRAQKLAIKLKHLADLAYPAVDQDDPERDEVVYYANRLLRLTADRERRSEAMIKLAKTLPNRDLEILMSIPGIAEITAVRILAELGDIRRFSNPNKINAFVGIDPGRYQSGEKDSNLRISKHGNAVARKILYRAIGQIDLAAKTSPCHIADYYERKKQFSQTKGFKKIAIASIHKLLRTVYVLIITDQMYDYNVANNNQKDFCRN

SEQ ID NO: 411992 - protein, 442 aa, unidentified
MSDLAVLDPRAAFVDVGSEKMHVSIAGGSPAVFGTVTSQLHALRDYLAGHQVGSVAMEATGVYWLPLYGVLEAAGMEVVMVDGRQTRNLPGRKTDMKDCQWGATLHAHGLLRAGFVPPANIRRLQDYLRLRGEHIAAAAGHVQHMQKALERMNIKLHEVISSLTGASGLAVIRAILAGERDPQVLLGLCDIRIRNVKAERVVESLRGDWAQEHLFALAQAVQSWDHYQGLIAACDGQIAVVLRQMPDAKAPPSAASTKTGKPRTRPGVNAPDIADLREILAQICGAKDLTTLPAHSEYSVLQLIGEVGTDLTKWRTEKHFASWLGLAPGSAQSGKRKASVKRRRNRAGQLFCVMARALVRSKHVALGGFYRRMAARRGGLVANKALARKLATLFWRVMVKGLDFVETGVAQYEAKVLETKHRILHRLARQLGQQIVPNPAAV

SEQ ID NO: 411993 - protein, 336 aa, unidentified
MRDIGVDLHKRNFQCCYLSDGRYRFCRYSLSELGEFKKGLKPTDRVALESTGNSRWFRNQIKDLVGKVVVVNPKQFKVISESSRKTDRNDSELLAFYLHKGMLPEVHMKDELSSQIKSLCNTRDKLVKLRTALKNKIHNILNAHGIISKREDFSSENGLRKALSSPVNEVAKIELEVIVSEIRHLNEGIARLDEEIKKKGKHLKGFANITSIKGIGPKSGTILLSVIGDIDHFSSQKKLDSYFGIVPRVRNSSDRMHHGRITKQGSKLGRTTLVQCTLIAVRYSPYLRDFYLRLKHKKGSGKAIIATSRKLLGIIYQTLKNDWVFEDFPNFVLKEV

SEQ ID NO: 411994 - protein, 350 aa, unidentified
MIVIGSDPHKRNHCFAAADAATGELRSSEAVAASGAGFERALGWGRSLGQQRVWAIEDCRHVSGRLERFLVARGERVVRVAPKLMAGQRRSSRQAGKSDPIDALAVARAALREGVASLPAAYLDERALEIKLLLDHREDLVRERTQVQGRLRWHLHDLWGEDGVPAGGLDRAKWLDRLSRRLARGEQTVRARICREQLTRLRALARRATELEREIGRLVSAHAPELLQLPGCGALTAAKLVAETAGAQRFATDARFARHAGIAPIPASSGRNQRVRLHRGGNRQLNCAIHRIAVTQGRVHPPAIDYLARKQAEGKSRIEALRCLKRHLARTIWTTMTTNTNAPANTLELT

SEQ ID NO: 411995 - protein, 344 aa, unidentified
MPIVGGLDIHRKQITFDYLDTATGEVRRGQIAPADREHLAAWLAGRFTGQDAHFAVEGCTGWRYVAEELAAAGITAHVAEPADTAALRGRKRHAKTDKTDSRHLRQLLADGRLPECWIPPSHILECRALLETYHDLRVEHTAWTQRIHAALFHQGAPQLGGQRLRTGEGLAALQAAAAGLSPAGQLQIAVALDKLAALDRHLDVLRRRLLEAARQLAGARELHARLYGVGPVTALALVCWLGGAGRFSSARKAVRFAGLDITVWSSDRKGPPGRLSRQGPEVLRWCVYEAGKTHARGSAPDYRYYASVKDRIDGKRAAISEARKILRQAVHILAELGDSALAPA

SEQ ID NO: 411996 - protein, 482 aa, unidentified
MAKRKVSTFERLRSGKMNRKERKEWQQRLYAEDAGLEVIHPDAAGIDVGNASHFVAVPPDRDEQPVREFGSWTADLRRMAEWLKRCGIRTVAMQSTSVYWVAVQEILEREGFEVYLVNARGTKNLPGRKSDVQECQWLMKLHTYGLLRNSFHPPEEIRAVRTIWRQRDRLVKEAGREVQQMQKALTTMNVQLANAISDVSGVTGQAIIRAILQGERDPQQLAKLRDWRVAATEAEIAHSLEGNWREDVLFELQQVVDAYDFHQKQIAACDVQLQKYLSALPMRNGPGAGERSTANAPSERPKKQRKHKSQKNQPTFDLAAELQRTMGVDLTAIDGVDVMTTQVILSELGPDLSASFPSEGHFTSWLELAPRRDVSGGKVIRQKSRKSNNRVATALRMAAQSLWRSDSYLGARYRHLKARLGGQKAVKAMARYLACLIYRLLTKGQAYVDRGVAHFESKRTERELLALRRKAAELGMQLVAVS

SEQ ID NO: 411997 - protein, 342 aa, unidentified
MKATTIGIDLAKHLFQLHGVDQHGKTVLKRQLKRGQMISFFSNLPPSLIGMEACGSAHYWANKLQGLGHTVKLMAPQFVKPYVKTNKNDAADAEAICEAVTRPTMRFVPIKSSEQLAILALHRARQGFIKARTAQANQIRGLLAEYGFILPQGITHIGKHVPELLEDSENGLPGTFRHLLMRLHEHLKMLDKQVNELEDAIVRWHKDSATSQTLAQLPGIGPITASALVASIGNAKNFKNGRQLAAWLGLVPRQHSSGGKQNLLGISKRGDSYLRTLLIHGARAVLRVAERKESFSGSWLAGVMARRNPNVAAVAQANKTARIIWALLAHDRKYDAHYGMAA

SEQ ID NO: 411998 - protein, 356 aa, unidentified
MSVYLGVDFHARTQTVCWCDTADGLIHQRTLDHEHDDVRGFCTQFTVPAVVGLEATGYARWFHRLLEALGHRLLVGDAYVIRKCALRRQKNDRRDAELLLDLLLHGDFPAVHIPPIASQAVLRLLRYRQRLVEIQTKLRNGIQALALNHQLRLGPKLRSKQGQQQLLAIELDDTDVLQRENSLELLGQIRTRIRTLEKELTSRADQDARVRLLRTHPGVGLLTSLAMVHTLEPVTRFDLARRIAAYCGLDPRETSSGETVRMGHISKQGNRLLRHLLVEAAHRAVHSKADADLRNFYFRLMERKKNAAVAITAVARKLVLRLYRMLREDIDYTEFRRRGREARRARKTPSPTAGGC

SEQ ID NO: 411999 - protein, 366 aa, unidentified
MKKNSTVAVGRKQILKQARLTIGLDLGDRTSYYCILDAAGNVIWERSVPTTLNGIRQGFGRMPRCRIALETGTHSPWVSRQLSEMGHEVIVAHARKVQLIGQSSRKDDQLDARTLARLARIDPGLLSPVKHRSAQAQIQLTVIRARAALVSTRTALVNAARGLTKSYGQRLKKCGTEQMNRDSSEGLSQELREALDPLLREIESLNERIAEYNRRIEKIAKEVHPEVARLKQVQGVGTLIALTYVLTLDDPHRFRRSRDVGCFLGLRPGRRNSGQSEPQLHISKEGDRYLRTLMVQGAHYILGPFGQDSDLRRWGLKLAERGGKNAKKRAVVAVARKLAVLLHKLWVSGEAYEPLRNNHKGARAVA

SEQ ID NO: 412000 - protein, 309 aa, unidentified
MKEELVYLGVDIAKSYLDGAIGSEKRRFSNDTVGHRQLIGWIKQTEGAVQVICESSGGYERKLVQALARARVKVSLVQANRVRQFARASGILAKTDRIDAEVLCEFGRVMRPQTVTAATLEQEHLRELESQRRHLTHLLVMEQNRSARVSDGSVLKLNRSLINQIKKQVERLDLLIKQHIEQSPRLSAKAEKLTSINGVGLRTAALLMAQLPELGQLNRREVAALVGVAPFNRDSGKMRGKRAIYGGRRFVRHGLYMAALVAARHNPILRVFYLRLRAAGKPAKLALTATMRKLLIVLNSSLKTDLTYA

SEQ ID NO: 412001 - protein, 345 aa, unidentified
MARFVGLDVSQKLTALCVVDETGRRLWRGGCATDPGQIERTVRGHAGGDAKIGVETGPMTPWLVHELRGRGLDVVCLDARHASAALKMQMNKTDQNDAEGLAQIMRTGWYRPVHVKSLDAHRARALLGARAQLVGMTTRLSNHIRGVLKTFGMLPGAMRGLSFDRRVEELLVDRDDLAPVVRPMLAAWRQLREQIAAFDKAVRALAKASPTCRLLMSVPGIGVLSVLAYVSTVEDPARFARSRSVGAHMGLTPKQYQSGEVDRSGRISKCGDTLARTLLYEAAVVLLTRVKRASRLKDWAQALAKRSGPGKARVALARKLSVILHSIWKTGKPFRWSEQELPQAA

SEQ ID NO: 412002 - protein, 343 aa, unidentified
MDLYIGLDVSLVSTAICVVSSHGKVIKETTSPSEPEELERALRGLSGPVTGVGLEAGPLSQWLYRHLIEAGFETVLMETRQVKGALKAMPIKTDRRDAEGIARLLQMGWFRPVHCKSMSAQEMRALLSSRKAIVQAITNLELSIRGVLRNFGLKMGRVAKGRLGARVRELADGNAMLEAAATPILTAREALRQELAGLEKLLRDHAKSDPVCRQFMTMPGVGPIVALTVKSAIDDPGRFRSSKDVGPWAGLTPRREQSGERDIIGAISRAGDAGLRTVLYQAAMVMLNKGRPSWLTAWAWNVAKRRGKRRATIALARRIGVILHRMWRDGTEFQFTRTEAVAA

SEQ ID NO: 412003 - protein, 341 aa, unidentified
MSAIGIDTHKDSLAACAVDELGGVVAEATFANDPAGHERLGRWAGEVAPGARLGFEGSSTYGAAAARTLDHAGFEVCEVPPQLSRRERLRTRRAGKSDSGDALAIARVTAREASLPPIRRVDPTTELGLLMAARADLVTETTRIRNRLHADLVVLVPGYGGRVANLVAERHLRAAGRALRRLPGIHAELARERLAELRRQQTRIGRLGERIERLVAGHPLLGLPGAGPLTVAALIAESGDLRRFRSADAFAMLAGVAPIPASSGQIQRMRLNRGGNRQLNRALHTVALVQARVSPLAKAYIARKIAEGRTWKDAIRSLKRHLARIVFRLLLEGAGLLRAPA

SEQ ID NO: 412004 - protein, 385 aa, unidentified
MKSKIKNTSQQFQAYLGVDLGDKKHFVCATDKDGTILKEFSITNDRPALRQLCQDYPGGSVALEVGTHSPWISRFLTAEGMTVTVANARKLRAIYQNDRKCDELDARMLAKLLRVDRDLLSPIEHGSEQAQKDLVAIKIRDSLVRQRVHIIATVRGVIKSLGLRIPATCTTSFHLKAESFLTEHPEYESAITPALRSIKSLTEQIRVYEKDIQQAAKDHHPQAVRLQQIPSIGPITSMAFVLSIGDPKRFKDPRDVGAYLGLVPRRDQSGGTDKQLPISKAWNRYLRCLLVQCAQYLLGHFGPECALREQGLLLAARGGKAAKKKAVIAIARKLAVMMMAMWQKGTDYKPFPEGKKSEPDAAANKPAPASGKPVRASKASSKRAA

SEQ ID NO: 412005 - protein, 327 aa, unidentified
MQARVSTNTLQNINVGVDTGKSQLDIYIRPLDIYFTVPNTDKGITDAIKTIKKHKPQRVVIEATGRLEMPFILACNKAKLPYVVANPLRIKRFAEAIGQRAKNDRLDAELIAHYAERVQPELTKLKSENIRLMSDLVTRRNQLLTMQTMERNRRHILPKNISSTITPILTALKNQLEKVEAKIARLIERSPEYQAKSTILQSMPGVGKVLAASLISNVPELGFITNKQASSLIGVAPITRESGRFKGKRMIKGGRPQVRTVMYMAMMSAIQCDPVFKATYERLLAAGKTKEVAIVACMRKMVVTLNSMPRDGAMWDKDSVKNQLLMP

SEQ ID NO: 412006 - protein, 466 aa, unidentified
MKPFYLGIDVSKGYADFMIINSQKQPAVQGFQLDDTFDGHRSLYNILARFLAEHPDEVLFAGMESTGGYENNWYNSLIEFQGSLNIQTARLNPFGVMHNSKADLKKNTTDEISAQNIAEYLVAHPEKVVYQQHDQLAGLRKQWGFIKMLNKQCTQFLNQLNGLIYSANTELLSYCQNGVPTWVLKLLVKYPSAASLKKAHVKTVAKIPYVSTKKAQQLIAGAKLSVASATDSITDQLIVATAQQILHLKKTIADQTNQMFRECSIPEVELLKTFPGISDFSAVGLIIEIQTIKRFAEAKKLTSFFGVHPVYKISGDGAGGFKMSKQGRTAPRQILYMAALSAIQCNPLIREIYEKHQKQGKHNMAAMGICMHKILRILYGMLKNNKPFNPHIDIANRLRSVRMKNDTPVKNTSRRFQEYDQKAPVSKRQRKKRLERERSHSVSDTKVGITAPAPLADIIANILPQL

SEQ ID NO: 412007 - protein, 311 aa, unidentified
MNHVVGIDIAKYHFDLHLLPEGKTAHYRNDSQGIRHCRQWLAQVQPQGIVLEATGGYELALTTELQAAGLPVIVVNPRRVRDYARSMGRLAKTDKIDARVIAEFATSPRLVLRELPDKPTRQRKALIARKEQLVEMHVAERNRLEHALDRSVATSIRRLLKVLEKQIASIDQKLAELIATDERLQRKVEILDSAPGLAPATAVMLVTQLPELGHANRRQIAALVGLAPINRDSGQFRGKRMTGGGRVRVRSALYMPTLAAIRCNPRIRRFYQRLVANGKSKMTALVAAMRKLVTILNTMIQKDQFWKPENA

SEQ ID NO: 412008 - protein, 413 aa, unidentified
MEVWLGGIACLIPEGGGGMDNLLVGIDVSKEMFAVVGVDSGGNESMCGTYSMDFSGFEELMKAMTSRCEDLSKVFVGMESTGCYHLNLYSFLLSRQIHTIVINPLLIANYAKLSLRKTKTDKKDAGTIARFLLDHREEISQLSVSQDLQDLRDLSRERESLCHFISTIKVAIKRVLRTTFPELESLGNLYTRTMIRFLQEYPSARLVRAAKLKAIAKALNQPSVGNKLTLTAEEVLKAAQRSVAVVSPAKEIIVRGKIATLLHLQERLAEVTKLLTDLCQRTKLDDLDILRSIKGVGPATAAPLLAEMGEVKNYSSHKKIIAYAGIDPSVHESGQFIGISRLSKRGNRHLRRAIYLMTASVVSHNAFFNAYFLKRKREGLAPQKALFATAHKLIRVIFAMLSQRTYFKVKEVQ

SEQ ID NO: 412009 - protein, 406 aa, unidentified
MADIFALDVSMGKSYCVWYRGKHCLKEFSLVHTKAGFNALRDMIKKAQKPIIYFEATGIYSRVIEHFCETNGLRFCRLNPLELHLKSESLRRVKTDQKDAPRIALPVQENTFRLTVPWKKDYLQLHELSRFYNQLNADWNYRLNHLHTALEQVFPELKQLFVNRTSKLALNIVELFPHPALVRPYSRVKLKNILMASTDKRISKMKAYKYADRLIDLAQKSYPTVSGDAIQVDEVRYYARQLIALTRKKEEVIKRMESIAQRLPEYILYCSFPGIGKQTAAQLMGELGDISRFDNANQLNAFVGIDIRRCQSGTYLGQDHINKRGNPIARKLLYFTVGNMIRQQHANSNHIVDYYYRLKEKRPHPKLNKVAMVACMNKTLKCLLSMIKHHEKYHYRYTDSIVPVKA

SEQ ID NO: 412010 - protein, 485 aa, unidentified
MKNKSIFTRQNQTLINLFRDAQHPEKVLCIPIDYAKLTHVALCCNGSGTVLKKAFPVKNNPKGMAFLIEVVEGICRKHNIQREHVFFGGEDCGTFSLNFIYSLREHGFIVMGVNAKDAKEQRENMQASSDELDLLGIAKLLINRRGSTAGGEPGAERALRTLTRHRKAQVRLRTATGNRIHQIVDQLFPGFLDERLSGISPFSEASLYLMGDRFSPAHFSRRQDKALLRQLKACGLQHAEAAIGKLKDYARQVLAHPPELTGLLQTSLASEINLYRCLGANIEQVGREIAQQLAKTPGSMLTTICGIGITLAAGSAAEIGPPDSQPSVRRLGSYAGIVPRTKQTGGPEKSAKTGKVSRRCNHILKDYIVQCGNHLGQHGPADLKEDHRRRGANKQHADFGMARRFLRMAMRLMRNGESYVPPELREGATLEQLQTYYLQLWPKLLDKWVKAKAVKTAFASENPLGEWRNMIQEIYEIKLPLPEEK

SEQ ID NO: 412011 - protein, 349 aa, unidentified
MEHIGIDVHKKETQICILTEDGKLIERRVRTLAERFGEVLGGRSRARIVLEASTESEWVARCLEGLGHDVIVADPNFAPMYATRTRRVKTDRRDARALTEANVLGAYRPAHRLSAGQRHVRAQLAVRDALVRTRTRGIALSRALLRQHGYVVSSGGAETFGRRVVARGVPGRILSEVGPLLALMRTVNGPLAYCEAEIEHVSEQDPRGRRLRTAPSIGPVTAAAFVATLDEAGRFRQAHQVEAYLGLVPGEWSTGEGQRRGRITKTGNTRMRWLLIQAALSIMRLRDPRAAGLRAWALRIAARRGRTVAAVALARRLAGILWAMLRDDASYDPQRWAAPAAATPATIPA

SEQ ID NO: 412012 - protein, 357 aa, unidentified
MERYIGLDAHGRSCTFGVIGPSGRKLRHDVVETTGTALVEYLRRIPGRKHLCLEEGTQSAWLYEILSPHVVEIVVAGIRESRGQKSDVLDAFRRAEELRTGTIKKPVFKAPRRFSRLRELARVHSMLVRDVVRVQGRLKAMYRCRGIATPGQRVYSPRGRETYLRKLPASCRWATATLHETYDQLLELKQSAERELLAEAGKHRIAKILATAPGIGPIRVAQLLPIVVTPHRFRTRSQFWAYCGLAIVVRTSSDWVRTRTGGWMRARVQKTRGLNRNHNARLKDIFKGAATTVITRLPADPLHQHYLRLTSAGTRPNLAKLTIARRVAAIVLRMWKDEKEYDPSRLEQQERLASAVS

SEQ ID NO: 412013 - protein, 333 aa, unidentified
MNKITLISIDTAKAVFHLVGVDAHGHYVWRKQLTRRRLLSSLAQMGCCEVVLEACGASHHWARSIQALGHRVRLIAPQHVKPFRRGQKNDYRDAEAIISAALSPGMHFVGIKRVEQQAEQALHRVRSRVMSHRNAAANALRGLLGEYGVVFRRGFKPLREGARCFAETEEAHTLGLVELVNDVLEEIEVLQRRMDHYERLIKQRVRVDETSRRLREELRGVGELGASALRVKVADVRDYPGGRHFAAYLGLAPGHSGTGGKVRIGHIKRGHDRYLRQLLIHGARSALRHLGDKQDTQSRWMRGLLERRGFNIASVALAHKNARQAWAIMAREQ

SEQ ID NO: 412014 - protein, 333 aa, unidentified
MVFHLVGVSARGEVVVRKKCSRNQALRFTSNLRRCLIGMDACGGSHFLGRALREQGHDVRLMPAKYVKPYVKTNKNDYIDAEAISEAITRPNMRFVPIKSDDQLDLQSLHRIRERWVVRRTAVINQIRGLLLERGITLRQGRKHLQASLPQILEDADNQLSGSLRVLLAQLQREMQYLRREIEEFDKLILCIADELEPCRRLMAVPGIGPAIATATIAAVGNGAAFKKGRDFSAWLGVVPGEHSTGGKQQLTGTSRRGNKYLRKLFVLGAHTVLQRRTKQSAALSTGLARLLARKRTQVAVVAVANKRARMVWAVLFRGEEYRPPLSPQPVAV

SEQ ID NO: 412015 - protein, 364 aa, unidentified
MSNTNTRKLTLVRKPNEPLRLEEGEAVHVGVDVHKASSSVALFSDRRGLIATWVQPARPEALLERLRPLREGVAQVVYEAGPTGFTLARRLRAEGFQAQVIAPSKLLAPVGPEAKSDRLDCRRLAQLAAKGLLHPVRVPTEQEEADRQVVRLREQLARELRVTQQQIKAFLLQHGAAEPAGLAHWTAAAVEALRRLDLNAELRFCLDVMLDERQHALEQVARATRRLEALARADRHCATVAALRTVPGVGPVTATTFRVELHEPGRFRDGGQVARMIGLAPQVLQSGPTRREGRLLKSGNARLRTVLVEAAWRWVAGDAAAKARYRRLVATTGNGKKAIVGMARRLAILLWRLSLSGEPYRAAA

SEQ ID NO: 412016 - protein, 346 aa, unidentified
MEHYVGLDVSLKLTAICIVDQTGKIEREGMVASNPEAIAAFIKSHAPHVARVGLETGATATWLWTELNKMGLPIICIDARHAKAALKMQINKSDRNDAVGIARIMQTGWYREVRVKDLDSHAIRGLLTSRALLVKVKRDIENQIRGLLKNLGLVVGRAKGNPFTKRARELIEGNSSLTASVEPLLKARETIAQQIADLDRQVLRLARHDVQVSRFMTTPGVGAITALCYLATINDPTRFKKSRSVGAYLGLTTRRFASGEIDWTGRISKCGDAMLRCYLYEAANVLLTRVEGWSTLKAWGIRLAKRCGIRKAKVAVARKLAVILHRMWIDGTDFNWTSKKTADQPV

SEQ ID NO: 412017 - protein, 379 aa, unidentified
MEEAIKQCVGIDISKATFTACVCQKFADGRIRLSSVESFDNGKKGFNQLVKWSRKLGSPQLELLFLMEATGCYFEPLAYHLHRLCQPVSVVLPNKVKHFGKSLNVKTKTDAVDARVIAQLGAERQMPHWEPPQPIFRQLRGVTRLRADLVRERTAFQNRITSGESAESVERQVSRGLKAVVKELDRQIDRCDQELEKLVQKEDWLWQKMTKLQSIKGIGLLTVATVVAETQGFALVKSRKQLASYAGYDVVQRDSGTSVKGKTKISKKGNSRIRAALHMPARSAALHSKSMREFYLRVNEGKPSKRVGEVAVARKLLLLMYTLWKKDEAYQKTTFGNQEAKPLLRQGEESEKKVGSPTELPTQDGLSYNQSAEVLLRRP

SEQ ID NO: 412018 - protein, 338 aa, unidentified
MKTYAGIDLHSSNNYIGIIDAKDKRLYSKRHDNRIDDVLKVLGKFKASLQGVVVESTYNWYWLVDGLMDQGYTVHLANPNAIQSYDGLKHTDDKWDSFWLAHMLRLGILPEGYIYPKHQRSLRDLLRRRLMFVRQRTSQILSLQSMITRNRGLNFSGAQIKRFRDEFIDKLFSDRHLVFTAKRNIATIRFLDQIVSEIEIEVASQIKLKKEFISLLTTPGIGNILGLTIMLEVGNIGRFPKAGNYSSYSRCVESKKTSNGKKKGENNKKNRNRYLAWAYVEAANHAMRCCPKAQKFFQRKMAKSGRVLATKALANKLTKATYFIMRDQVAFDEDKLFQ

SEQ ID NO: 412019 - protein, 359 aa, unidentified
MQTQKTGLDFKGQNIFVGIDVHLKSWAVTILTENLVHKTFTQPACADTLSNYLNRNFPYGDYYSVYEAGFSGFWTHYKLKEMGINNIVINPADVPTTQKEHLQKDDPTDSRKLARSLRAGDLKAIYVPEPSTLGDRSLIRLRATLVKDMVRFKQRIKSFLHFYGISIPAEFEKSGTHWSRRFMKWLNQVPLQHEPGTETLKILIQEAEQQRKLLLEVLRKIRVLSRSEKYATNMELLRSIPGVGFVTAITFLTEIEKIERFENTDHFAGFVGLIPNRHSSGNKENNGDMTFRGQNALRKSLIESSWFAARLDPALAMSFNGYVRRMEPNKAIIRIARKVLNRMYYVLKNKREYVSGVVK

SEQ ID NO: 412020 - protein, 484 aa, unidentified
MHLQITNKLTLAFDAFRFNFESAGALELPNEYSGLASEAAPILPSQSSGMHVPLHKLAQWSGMMNQLTDTQYTAYVGIDWAAAKHDICVQAADDGRREFACISSQPEGIDAWAQALHRRFGGPIAVALELSKGPIVSALQKYDFFVLYPINPSTLAKYREAFTPSGAKDDPTDAELAVDLITRHPERFNPLKPQSVDMRKLIGLVEQRDKFVSDQGRLVNRLGHALRQYYPQVLEWFSEHNTVVFCDFLSQWPTLTQVKRARKASLERFFRSHHVNSAELIERRITAIKAAMPLTLDAAVIDPHRLQVEILVEQLRITIKALKRFDDEISATAHKLPDYALLFSPLPGAAKVLAPRLLAAFGEDRQRYPQADALQKYSGIAPVTKRSGKTTWVHWRWQCPTFVRQTFVDWAAQTINKSAWAGAYYRQQRAKGCSYQVAVRALAFKWIRILHRCWQNRTPYDESKYLDALRRKGSPLLKYLAETA

SEQ ID NO: 412021 - protein, 389 aa, unidentified
MKIFVGIDIAKLNHFAAAISSDGEILIEPFKFTNDADGFQLLVSKLESFDKNSIIIGLESTAHYGDNLVRYLVAEFYQVCVLNPIKTCQMRKNNVRKTKTDKVDTFVIAKTLMMQDDLRFITFFDLDMMDLKALGRFRQKTIKQRTRLKIQLTTYVDQVFPEIQYFFKSGLHQNAVYALLKEAPSPKEIASMHMTHLANLLKVNSHGHFTKEQAKELRILAQKSVGANDSAISIQITQTIQQIELLDSQLEKIEAEMTDIMKFNDSVIMTIPGIGYINGGMILGEIGDIHRFSNPNKLLAFAGLDPSVYQSGNFQAKTTRMSKRGSRVLRYALVNAAWNVVRNNATFKAYYDAKRAEGRSHYNALGHCAGKLVRVIWKMLTDNVEFNLK

SEQ ID NO: 412022 - protein, 349 aa, unidentified
MKYFAGLDVSLEETAICVVDEAGAIVKETRAASEPDTLAAALRSLDLQLDRVGLESCSLSAWLHDELRAGGWPAICVETRRAKAAMGATPNKTDRNDARALAQIMRTGWYRAVHVKSKASRIWRSLLVARRTVLNEMRTIENVVRALLREAGVKLGTPSRKDFVERTRELTADDPVLTHLTEPLLTILTTMLREFAKLTKQVLDIVRDEPVCRRLMSVPGVGPLTALAFRATIDQPDRFARSRDVGAHLGLTPRRYQSGETDVQGAVSRCGDELARTALYEAAHSLLTCSRKWSALRAWGMAIAKRRGMARARVAVARKLAVILHRIWVDGGAFRFGREPAPSLASIQP

SEQ ID NO: 412023 - protein, 342 aa, unidentified
MEISTIGLDLAKSVFQVHAIDEAGVVVVRKALRRSQVLPFFAKLPPSLVGMEACGTSHHWAREILKLGHEVRLMPPAYVKPYVKRGKTDANDAEAICEAVTRPTMRFVPVKSPEQQAALALHRTRDLLVKQRTQLVNMIRGVLAEFGIEMARGLHHALALAKRLTDGDAAEVPTLAQRVVSSLALQIGAVQEQLATLEKELVAWHRANDLSQRLATIPGVGVIAATALAASVSEPERFRSGRQFAASLGLTPLQQSSGGKEKMGRISKMGDRYLRKLLVVGMTSLVRRARTAPESVDPRIPAMLERRPARVVTVAAANRTARIAWSIMTRGGSYRKPAPASA

SEQ ID NO: 412024 - protein, 346 aa, unidentified
MKKIFIGIDFSKEKFDATLIKAEGLKECAPSMHEVFDNKTSGFRRLVRWVKTQSEGLPIDTWLFCGENTGAYSIGLSNYLYASGYDMCLENAYKIKHSAGILRVKNDKADSKAIAEYAMRNYDKVRLHKPQSSSLTCLREVFLYRHSLVRQKVALTVRRDEKRLTQEKSDARAFMSFTSKHLITEINKAIYKCDQKIKETIAADDELREIFDIITSMPGIGIQNATCLMVYTDNFQKFDMDSRKIACYYGIAPFGRQSGTSVNSRPKVSPFANRMIKALLSQAALAAIKSDISVHNYYQRLIERGKHPLLIHNNIKNKMLHALVAMVRDRKKYNPDYVYQTNKSAA

SEQ ID NO: 412025 - protein, 350 aa, unidentified
MLIVGCDYHPGFQQIAFVDMETGELQERRLAHPEEAEKFYRELAASGVKVRVGMEASGHARWFERLLAELQFELWMGDAATIRAKRVRKQRTDRHDAQHMLNLLLEGRFPRIWVVSWENRDLRQLLWHRHRMVTMRTRIINQLQAVAINEGLRCKKRLWRERGRKQLEAFPLARWASRRRRDLLELLDRLNPTITELTQAIEQEVEKYPEAQRLMTHPGVGALTALAFVLIIGDVERFRCGKQVASYVGLVPTEESSGDRRRLGHISKQGSSLLRFFMVEAAQATVRSDPEWRSKFFHLAMRRGRKIAKVAMARRLAVRLYWMWRQQWDYEQWKAFGPHAGQPETGIGVQ

SEQ ID NO: 412026 - protein, 412 aa, unidentified
MNIRVEKACGIDIHEAFLVATMLDMAGTKDTRRFSTCIEDLLNLREWLLNSKCQRVAIESTGVYWIPTYTLLEGKVETIVANPLQIKNIPGRKNDDIDSEWIAEVCLNGQIKPSYIPPKEIREIRELTRSHVKLTQARTSFKNRVHKVLSRSGIHISGVLSDIFGKSGMIILNGILNGKTIDQTFTEIKNKQIKIKKTEIKESLKGELSQNDIFVIKECLDSIGFLDQKIKEFDSKININLKGMRKEMEILTSIPGVGFTTAAAIMAEIGNIEEFSKPKELVSWSGLAPAINESAGKSSNGHITKRGNKFLRTILVLAANSIVISRPNKLRFFYQRIKAKKGHKKAIVALARKLVSIIHHLLKFKEMYLEEEGKQKNFKLPKFIPVPDFSIDDMIGILCEAGYSVNKSAAKS

SEQ ID NO: 412027 - protein, 418 aa, unidentified
MTQELSTLYVGIDVSKESNYVYITDFHQSFHQSFNTLNNIHGAELIETKLLEILYDSNYSNITCVLESTGIYSAHIATYMSASEKLFRYNVLVYCINPKISRNYRASFSDMDKTDPKDSYILADLARVGRTKGLTPFKGSQKLALQRLTRHRVHLAELLSKEKTYVLTNIYLKFSEFGKPDAKFTSSKWSNTALSVLEEFSSPEEIVNTSLEDLVAFIMKSSKNRFSNPEDVAKLLKKAARASYRLDKVAYEPINYAISSSLIIIRTYEAEIKKINQSIEELVKGFALDEYTPLRSIPGIGPVYAAGILSEIGSIHQFKNEESLAKYAGITWRKNQSGKFEADDTSMTKTGNHYLRYYLIEATNIVKNYVGSYNTYYQKKYNEVNNHQHKRALALTTRKLIRLIYGLMSNGQLFNKNY

SEQ ID NO: 412028 - protein, 353 aa, unidentified
MKPRMKSNTSSAVVIGVDIGKDIFHLVGFAADGKTAFRRRIRRMGLKDAFEKLSPCIVAMEACLSAHFVSRTLRALGHEPRIVPAIYVKPFVKGQKNDYNDAEAIAEAALRPNLRFVQEKSQDQLDLQACHRVRSRLVSRRTATINQIRAFLIEQGIAVRIGPRALRKSLFAILENRKDEISPRTAKLIRGLYEDWCCLDERIETVTSEIEALSRAEAKCRQLMSVPGVGPLISTAMVAAIGSGEAFERGRDFAAWLGLVPRQYSTGGRSILGRISKRGSKYLRTLLIQAAKVLLMRPYNWARYSFGPWLNSASERLHRNKLAVALANKLARIAWSVLRHDKAFDTHLEAAAI

SEQ ID NO: 412029 - protein, 352 aa, unidentified
MQQGIILSVDYHDRVCVIRWLDPRSRKEMVFTEVPTSAEALSDFVDQARRAAGRRRVVWIQESTTGWARVKDLLGDRVDFQLANVVQMPQPPKARRRKTDKTDTARIQREYLNGRLPLAYQPPAWWRRVRRLVSFRENLVARRTALRNWINRYLAHETWFDRTGLWTTTGQQQLQALLKRLPAQDTFIITQKLEELKQLKEQLGATIKQLLAVFQECPEAQRLDAIPGINVVSAVSIVARIGPVQRFSSVDCLIAYAGLAPGIHESDQTRRDGHIGGGGTDRHLRHYLIEATTWAQKAPRYSAAYGRVRRRKGSKVARLVVARMLLRSIYKMIKEGVEFTAEPTAAVAAAGS

SEQ ID NO: 412030 - protein, 355 aa, unidentified
MSIVGGLDIHRKQLTFDWVDEQNGKWERGRITPADREHLADWLTRFDGVGQVGFAMEGCTGWRYIAEEMSKAGVIAHLAEPADTSALRGPKRRAKTDKADAKLLRELLAAGRLPECYIPPAQVLEWRALLELYQDLRTQHTGWAQRIQSVCFHQGTTAPGQAGIVRGDRARLKKIVDEQLSISGRLQVNTALALMDTLADHLDRLRRRLLSTARGVTGARALMHDIYGVGPLSSLALCAWLGGADRFTSSRKAVRFVGLDITVHSSDGKRSPGRLSRQGPEVLRWLLFEAAKTSARACAPGYGYYTQVKDRYDANRACLSQARRIVRHATHILTGLGDDAFTIVAQPAAATTIAR

SEQ ID NO: 412031 - protein, 393 aa, unidentified
MRKPKQRIKLLNDLSRSLTALDVNHTLIGVIEMSQKSWLVAGIVPGVERQPLKKLEPDETALRKLLERWREEAEKAGRKIKRIAVALEAGRDGFWLARWLRRCGIEAHVIHASSVAVSREHRRAKTDRLDTELLKRAFLGWLRGERDHCKMVAIPTLADEDAKRPSRERESLVGEQGRIVNRIKAALARLGIRNFNPKLKRAGERLEGLRTPEGEPIPPNTLAELRRDIARRRLVTDQIRQIEDARLERLKHAPKEGPHAMVLLLARVIGVGIETADMLVQEVLSRKLRDRRAVARYGALTGSPDESGSKRREKGLARSGNARVRRAMIQLAWRFLMFQKESALAQWFRARTENARGSRKKMIVALARKLLIALWHFVREGVVPEGVVLRPAK

SEQ ID NO: 412032 - protein, 316 aa, unidentified
MAELTTRTNVGIDVSKEWLDIAVLPSGETWRTKNEGAAIQDLIQRLQQIQPERIVVEATGGYEQLLAAQLYLAGLPLCRVNPRRVRYFARSLGLLAKTDKLDAKVLALFGERMQPPLTRLASEQEQHLSALITRRKQISDFLVAERNRLHTAPQSLHASLNEHIAWLKQQLKQLDRQIDEFVNHTPDFKEKDELLREVQGVGKKTAAKLIADVPELGECDNKQIAALIGTAPFNHDSGRKHGQRSISGGRPDVRSVLYMATLTATRHNPVIRTFYHRLLKAGKLKKVALVACMRKLLTILNAIIRDRVHWNPAFAS

SEQ ID NO: 412033 - protein, 335 aa, unidentified
MEFEFFIGTDVSKNELDFAVMQGQRLLFHKEIANQPEAIKGFIKELTRLPGFDLSKGIFCMEHTGIYNNHLLACLYKKKANVCLEAATQIKNSLGNIRGKNDKIDAIRIADYAYTQRSKLRLWQPKREVIQQLAHLAALRSRLIDAKKSLRIAIGEHDVFSAKKIAKQTIQGCSHSLKAIDEDMIRVEAAMDKIIATDEELKRLFTLVTSVTGIGKVTAVQILITTNEFKDISNPKKFACYSGVAPFTDDSGKVKKKARVSHMANKKVKTLLHLSAIVAMRHNSDLKLYYERMVNQEKKNKMSVINAVRNKLVLRVFACVNQNRKYENNYHKLVA

SEQ ID NO: 412034 - protein, 368 aa, unidentified
MLKQSHYRVGCDAHKRYSVFAVCDGKGKVLDRVRVNHERGAIQGFLSQFPSGTPVALETVGNWYWIVDEIEVAGCVALLAHAGKAKAMMGHTHKTDKLDAEGLATLLHNGTLPTVWIPPGDLRDERELPRTRMALSKVRTMLKNRMHSTMAKYALSLDTESDIFSRKWRPQLLDLLRRLPGETQRCMQQELELLDQVQEQIHRLEARILERVQKTPTIQLIQSVPGPAEILSIVIDREVGSIDRFPSPKKFCGYAGTVPKVKGSGGKYHYGRMIKQANNYLKWAFIEAANVVVRQRQHPNWRNKHVVKLYERTCRRKGHAVAVGAMARYLAEATYWVLKKGEPYREPVPRRPVGAKSPISPRQGQARA

SEQ ID NO: 412035 - protein, 338 aa, unidentified
MSVTLLSIDLAKNIFQLHGVDERGRPVLSRRVSRTRLLQAVLDIPCCRIVMEACGGAHYWARKFAAMGHHVQIIAPRFVKPFVKSQKNDRNDAEAITEAASRPTMRYVAINSVEQQDIQSMHRIRSLLMRDRIAQINQIRGLLAEYGVVIAQTPLKVRQQLPAILDDPDNELTALTRSMMHDMYERLTLLDTQIARYDDLIRQAHKASALSQRLEKIRGVGPMIATAVIAAAGSATEFANGRQFAAWLGLTPRQHSSGGKQRLFGITKRGNGYLRMLLVHGARSVVQQAVKRSDALSRWILAVQARRGTNVAVVALANKIARTIWVLLARGREYEPPV

SEQ ID NO: 412036 - protein, 413 aa, unidentified
MVLGIDVGSETHYARAFDYRGVEYSKKPFKFSNTEAGFVTFKAWVLDIKEKHGKDKVIPGMEPTGHYWFNLGKFLQDNEMKPVLVNPHHVKKSKELDDNHPTKNDRKDPKVIAGLVREGRYMIPYLPDGVYADLRTASNIRFQLQAELTRIQNRINRWFNIYFPEYKTVYGKPDAKSGILILKEAPLPEDILTLGIDGVNQIWRDAKLRAVGKARAKTLIEAAEHSVGSKEGAVSARMEIRMLLEDYESRNIRLQEVMGLIEGLVNQIPMAEKLLEIKGVGIKTVSGFLAEVGDIRRFNDPKELQKLAGLALVENSSGKHKGKTTISRRGRKKLRYLLFEVAMSLVAKNPEFRELHNYYTTRRLNPLKKMQSLMAIAAKLLRVFYAILTKGVGYDPKKMVNDIRRPAAYAQAA

SEQ ID NO: 412037 - protein, 304 aa, unidentified
MAELIIGVDPHKRSATIEVIDAGEKVLARARFGTDSDGYKAMLAAGRHYRPRIWAVEGCNGIGRHVAQRLVADGETVLDVPAKLSARARIFATGQGRKTDPIDAHSVAVVALRTPGLRQVTPDDTTVALRLMVDRRDWLGRARTDTINRLHALLLDLVPGGAPKHLTTFRARHILATVRPRDLVGRTRRQLAAELIAELTALDKKIKQANKALTQLIAAAGSTLQRLHGIGPAVAARLIGDVGDITRFASRNHFASWNGTAPIDASSGEQHRHRLSRVGNRRINRALHIMAVVQLSHDTEGRAK

SEQ ID NO: 412038 - protein, 337 aa, unidentified
MEHEQQYVGIDLHRRRSVIVRRTQSGETLETVRIDNDPEALAVELAKAGEHPEVILEATYGWYWAADVLEECGATVHLAHPLGNNWGNRRVKNDERDATDLIDLLRMGRLAEAWIAPPKLREVRELVRYRGKLVHLRSNFKAQVHSVLAKEGVAVPMSDLFGIGGQALLDHVRLGDAYRIRVESLRDLIELADREIAMLEHELAPFFTGDLGFLAVQAIPGVGPVLAAIFVAEIGDITRFKSARHLCSWAGLTPTHHESDEKVRRGHITKQGSRIVRWAAIEAVAHQRSDTPIRLHHRRVGERRGKQIGRVAAARKLLILVYYGLRDGEIRCLAETG

SEQ ID NO: 412039 - protein, 411 aa, unidentified
MYIVGIDIAKRTHVGAIIDDTGKRYGKAFKIDNSVEGFNILLDKIAEISQDISQFVFGMEATGHYWLNIYTWLCDRGFTVHIINPITSDAARRLEIRRTKTDPIDAFLIAEVIRMGKYTKTQLADDDMMSMRDLCRQRFYIVDMVSDVKKKVICLLDRMFPEYQSLFSDIFGRTSRELLKEGASPEEILALDTTKLAEILRKASKGRFDKEKAEELQNQARNSFAVLLSSQTVSLLIKQMIEQIELLESQIDEIDKLIADLYSSFNVKLTKIPGIGTTLAAAIYSEIGDISRFEKPKQLVAYAGLDPELKQSGDKRGEGYHISKRGSPYLRRALWLASSCVIIHDKSFAYAYQHKLSQGKTKMQALAFISHKLLNVFFTILKNNIDYVPVFPPDVDVSKLAQKALDSQSSN

SEQ ID NO: 412040 - protein, 495 aa, unidentified
MVPGDGGCIIGEALAYSAAAIPFRRFPFYLSRLSRNDSQGAESMVSRVKTSGKQMEAIASNTAGIDIGSEEHYVAVDSDSSERPVRSFGCYTPDLEEMARWLLECGVKTVAMESTGVYWIPVYQVLEQHGLEVMLVDARHVKHVPGRKTDVCDCQWLQQLLSYGLLRGCFIPPAEVQPVREYWRQRASHIESISREILHMQKALEQMNVQLHKVLRDITGVTGMKIIRAIVSGERRPLVLAAMREPGCKKSESEIMKALSGNYREEHIFALTQALELYDVLHEKVVDCDKRVEQCLCTFASKADPATMPPKKSKRGSRRKNQPHFDLEKHLYRITGVDLTAIDGIESLTAQTVVAELGFDLSDFATEKHLCSWLALSPEHRITGGKVKTRRTRKSANRVATALRLAAQSLHSSKTALGAFFRRIKAKKGTPKAITATARKLACLIYRMLRYGMEYVDLGQREYENRYQEQEHKLLQKRAAALGYTLTPLPNGGVS

SEQ ID NO: 412041 - protein, 328 aa, unidentified
MIYLGIDVSKLKLDCTLLLDPENDKRKSKVVLNSRDGVQELVRWCTKHGVAADQVHAVLEATGPYHEQAATTLHDGGITVSVANAANVHDFSRALAMRSKTDALDSLVLARYGVAMRPAAWQPPPAHVRELRALITQLEALSKDRLRTMNRQEKIEASAASELVERSISDTLSFYDKEIARLEKAIDDHIDRHPDLKDDTKLLSTIPGVGPKVARTMLRVMRTHQFKCAEDLAAYLGLVPVQRQSGTSLRGRSRMSKAGPADVRAKVYMAGVVASKHNPHVRALYQRLLAAGKTKMSALGACMRKVVHLCFGVLKTRQPYRPDYAFST

SEQ ID NO: 412042 - protein, 416 aa, unidentified
MKIYPRTRPIQRYIALDIHKEYILAGGMNTSQEWILPPRKLEMSRFEEWAKRHLCESDAVVIETTTNVWDIYDIVQPLVGHAVVAHAGAVRQIAEARVKTDKEDVKRLIRLLIADIVPEVWIPPQPVRELRGLISYRQRLVKTGAVFRNRLQSLLHSHNLVLPEEGLLSQEWWTGQEKISPLEKLQIGQEIALLEQIEKHKAEVDQELGKQSLGETWGRDAIRLMQLPGIGVVIAMTVLSAIGDIHRFEDANHLVGYSGLGAGVHDSGQEHIEKRITKSGRKELRWAMIEAAWRAVRMSPYWKEQYEKFFHRMRRESQAIVVVARKLLVAVWHVLSKEETDERASEEDLAYKMLLLSWSLSEEVRQGLTYKQFAKYALMKLGVETDITRFVRRNVPRRLAPREEVLARMTELGLTA

SEQ ID NO: 412043 - protein, 360 aa, unidentified
MFSERTSVGLDVHARSVVAAAIDGVTGEVFRARLTPANEEVIGWVRGLPGPSAVAYEAGPTGFGLSRALSAAGFRCEVAASSKLQRPAGDRVKTDARDALHLARLLRLDEVVSVRVPTQAQEAARDLVRAREAARADLMRARHRVSKLLLRHGIVYSGGKAWTQVHDAWLLGQHFDRVGTQAAFEDAYEAVVLATGRRGRLDEKITAMATASEFTPVVGRLGCLRGISTLTGFALAVEIGEWDRFTGGSIGAYLGLVPSEHSSGSSRRQGAITKTGNAHVRRLLVEAAWHHRKPYRPTAVLRRRWDAATPAARARGHAGNQRLHARWVGYAERKKRPVAANVAVARELAGWCWSLAMLPD

SEQ ID NO: 412044 - protein, 344 aa, unidentified
MIAARDLSTPEQLGGTPLEVIPNGLQGRVRKMSELYVGIDVSKDRLDVATSDGRELHVANDAAGHRQLCELLVRERPQLIVMEATGGLERAVAAELAAVSLPLRVVNARQVRDFAKASGCMAKTDRLDARVLVAFAQAMKLEPRELPSEELQTLQALIVRRQQLIEMLMMEKNRLRTAHKEVKRSLKKVIELLEEQLRHADQDLGSALRECGVWREKVELLESVPGIAQLTALKLLASLPELGTLNRREISALAGVAPFNRDSGRWSGKRSIYGGRALARGALYMAALVGVRHNAVLRVFYQRLRAAGKPAKVALTACMRKLLTIINSLLRHRQRWSPKLMDTA

SEQ ID NO: 412045 - protein, 336 aa, unidentified
MQITTIGLDLAKHVFQVHGVDALGDGIEKRRLRRGQVLAYFGKLPPCLVGMEACATAHFWARALRRLGHDVRLLPPQYVKPYVRRGKNDAADAAAICEAVSHPSMRFVPIKSEEQQSLLVIHRARDLLVRQRTQLINAIRGHLAEFGLIGAQGVPNVKRLLDDMRGDVEIPGDVCDVIEVFAEQLGALEQRIDLLEARIAACHKTSAMSQRLATIPGIGPVIATAIAATVADPSAFRSGREFAAWLGLTPTQRSTGGKQRLGRISRKGDQYIRRLLIIGAQTVLLRSKAAKANPWIQNLLARCARLKVAVALANKMARIAWAVMAKGEPYRQIASA

SEQ ID NO: 412046 - protein, 349 aa, unidentified
MDRTTYAVDLAKNVMQLHWIDAQTGEIGRKKLSRAKLLEYFARLQPVRVVMEACGSAHHWARLLGALGHQAELLPPGQVRAFVRSNKDDAADARAIWVAGQQTDIRRVPVKSVEQQSVLALHRSRQHWVSVRTATVNALRGLLYEFGVVLPGGKKAGLRALRAHRAQIDEQLPAPMQRLVDVQLRALADIEQHIDQLEAEIAAAQRQLSAALELSRVPGIGLLGSTALAATLGDGSGWKSGREFAASLGVVPAHSGTGGKTRIGHLSKRGDPYLRTLLMHGARAVIQHAKHKPQWLERLLARRPLNVVVAALANKMARTAWALVAHQREYQRDWQGTGSKGCVAQAAAA

SEQ ID NO: 412047 - protein, 343 aa, unidentified
MQLITTIGLDIAKSVFQVHGVDAEGQVVIRRQLKRRFVLAYFQKLRPCLVGIEACASSHHWSRELQALGHTVRLMPPAYVKPYVKRQKNDAADAEAICEAVSRPNMRFVETKTPEQQSCLTLHRTRHLFIRQQTAVINSIRAHLAEFGIVAPVGRNGVDQLLGVVADVKDKRLPEIARACVAALGAQLQILKAQILEFDRMIRAWHRSSEVSRRLDEVPGIGPALATALVASVAEPRAFRSGRDFSAWIGLVPKQNSSGGKDRLGNISKRGDRYLRSLFTAGALAVIRYAKIHGTRHRPWLTALLARRPTKVAAIALANKLARMAWAMMARNERYREPAALTA

SEQ ID NO: 412048 - protein, 317 aa, unidentified
MAMQVGKLIVGADVAKAELVIHHDDRDEIVRLKNSKPEIKKWLKQQPLNTAIAVEATNVYHLDLVELAHSLGFEVYVIDGFQLSNYRKSVGGRVKTDPSDARLLSRFLRNEGEDLRPWSPPPAVYGKLQSLLRRRAALVSARTAMTQSWANEGLLKAAFSTFVKSIDRLELLIQKKIKEVLREAGLHEQVARCQAVEGIGFLTATALVMAFMRGEFKSSDAYIAFLGMDLRVSDSGQKSGQRRLTKRGCSEIRRLLHNAAMAASKSPAWKGDYERHRNSGKATTQALVILARKLARVAFALMKNQDEYTTKGVKPAC

SEQ ID NO: 412049 - protein, 332 aa, unidentified
MSAVVCGLDVHKESTYATVLDRNGQVLVQRKMPNEDIPRFLEPLHPEKLAMEASTYIIPLYRKLVEQGYDVTVSHPKKTRYIAEARIKSDRVDSRALAELLRLDSLPTSYIPPREIAEVRERVRRRAFLVRQVTKLKVKIRDVLAYEGVTPPTGYGLFTARGAEWLHSLNLEPVDCYIRLIEPLKDEVKLLSSRLKREAGEDPDVRLLMTIPGVGYYVALLVKAEIGDVSRFSSGDHLASYAGLVPSTRSSGGVERHGGITRQGSRWLRWALVEAAMVHIRFDSPVTRFCHGVAERRGRKAALVAAARKLATVCYSVLVNGRPYFNPLDAQA

SEQ ID NO: 412050 - protein, 377 aa, unidentified
MTGPSLLPCNFGNAGSVRIAVAVADGRPILPGAKKPVEEQGSLSAAPSSPNSRVGRKRSPIVQGRVAMAAVVVGIDVSKEHLDVHVRPGGESFRVSRDGAGLDELAQRLQPLDAVLVAMEATGGFETVVAASLGTAGLPVIVVNPAQVRAFAHALGKRAKTDPIDAAVIAHFAEATNPEVRALPDEATRLLSDLLTRRRQIVQMIVAERQRARVLTAPRLQKSVARLLKALQRELETLDKEIDDSVRNTPAWREKEDLLRSVPGVGPTIARTLLAEMPELGTLDRREVASLAGLAPFTRQSGQWRGKSFIGGGRSRVRAMLYMGALVAVRYNPALRTFYDHLLAAGKPKMVALVAVARKLLTILNAILRDQKPWLPA

SEQ ID NO: 412051 - protein, 349 aa, unidentified
MTMVGGFDVHRKQITFDFVDDDGLVRFGQIRPATRKTLRGWLVEHCPAGDAEFALEGCTGWRYVSEELAAAGVGVHVGDPAEIAALRGPKKRAKTDRADARLLRTLVLEGRFPESWIPPAHVLEIRTLGRLYCTLMDERRAWQQRIHAQLFHQGCPPITALLSAAGRDALASAELSAAGRQYVDTALRRIDELTAGIDPLRTQLVNFARRQAGCRALQARQYGIGWLCAAIMWAEIGDARRFARSDQLVRFAGMDVTVYSSDGKRSPGHLSRQGSPELRWATFEAAKCAARRGSPDYTYYHKVAARPDSGKNPTLAVERKILRRCYHTLRELGDAALALPDTGPQEVAA

SEQ ID NO: 412052 - protein, 331 aa, unidentified
MQTIGIDISKKRLHAAWLRDPEQERSRPKAADNTPEGHRQLLAWAERHSQCPPEQLCFVIEATGVYHEALALFLHQAGTRVCVVNPYQVKEFARSRGIRTKNDRHDGHVLALFGRERRPQAWQPPPEHVRHLQSLLKRIEALEADRQRECNRLEKATVEQAPAPVRRSLQDMIDVLEAEITRLRRQLDDHIDAHPELKQQRALLESIPGVGPKLSAWFLALFGAKRFHSAKQAAAFLGLVPVEYDSGTSVHRRPRLSKAGDARWRARLYMPALVAIRWNSAIRAQFTRLTGAGKSKMSAIGAAMRKLVQIAFGVFNTRRPFNVEQAQPSIT

SEQ ID NO: 412053 - protein, 324 aa, unidentified
MCKIIGIDISKKTFDVCVEGQGKFEHKIYANDLKGFRSFKNELDNNSIVVMEASGPYYVRLACYLHQHHIRVSVVNPLIIKRFAQMKFYRAKTDKKDAGTILEYGLMDQENLALWKPDSNGVQALKQMHTTLELLQKQLNQSKNQLSAFNSSGFVNKEVKKGLTKTIVSLKKAIVDLENQMLIVCKTHYAQNLKLLTSIPCIGAKTAMMLIVITDDFTKFDHYKQLIAYVGFSPRIYESGTSVRGKGHICKMGKSQIRKLLYICTWTAKRYNKTCKEMYDRLQAKGKPERVIKIAIANKLLKQAFAVATKKQKYVENYQPNICF

SEQ ID NO: 412054 - protein, 361 aa, unidentified
MRIIGCDLHARQQTLAMLETTTGEVVNLTLMHEGNQVRDFYSQLPRPVLVGIEATGSMHWFLNLMEELGIECRVGHPATIRAAEPRKQKHDRRDAELILRLLTENRFPAIWLPSKELLDLRALLLHRHQWVRIRTRIQNALQAIALANGLRRGPSLWSYDGQAKMAFLPLPPHASYRRSALQALYRQMAEEIENLTKQVAEQAEQRSGARRLMTHPGVGPVTALATDVFLGDPGRFVDGKALASYVGIIPREYSSGGNQRFGGVTKQGSPLLRFLWCEAGAHAVRRDPERKRFYRRKLVQKGLGKARVAVARKLGIRLWIMLRDEIDYEEFCRRGQKPQSGAACAGMLEVGNGANRYRPID

SEQ ID NO: 412055 - protein, 416 aa, unidentified
MQSAPTTLSSAPPNGLTCGIDWAKDDHAVAVVDSAGREVHRWTVEHTNAGLHGLLRRLARTGVAEVAIERSDGPVVDALLGGGLTVVVIAPSQLKNLRSRYGSAGNKDDRFDAFVLADTLRTDRARLRPLTPDSPATVTLRASCRARRDLVTHRVALANQLRAHLQTVFPAAVGLFRDLDSPISLRFLTRFDCQDRADWLSVNRLAAWLASVGYCGRVDPAVLHARLTAAPRGATGEHGTAAAHVTHALLAALTTLVEQIKTLTEQIDEQLDLHADAHIFTSLPRSGRVRAARLLAEIGDCRARYPTPEALYCSAGAAPSTRQSGKHRAVTFRWACDKQLRDAVCDFAADSRHANPWAANLYQRAIDRGHDHPHAVRILARAWLYIIWHCWQDGVAYDPAQHKALQRLTQDHQAAA

SEQ ID NO: 412056 - protein, 670 aa, unidentified
MPASATAARRLRLGVGIDTARYGHHVTFLGDDLQRVAPDLPVPESSAGYQRLERQLRRLCEKHSDAELHVRIDAAGQYAANLEHFLRSLDLPLPVSVGEPKRNKDYHHAHSPKRQDDQTESWAMARYAVLERPAPSQETPPEFAVLRRIASRLEAQVRQTTRLTNQLHELLSAVFPELANLARDITVQWVLKLLERYPTAPRIAAARFDSLQGIPRLSPEKAQQLQTAARNSVGALRGETCEALVRQLVRELRASLDDESRWKKLLTQAFDALPPGPHRRIATITGIGKVTAAAIVATAVSIERFETPEKFVGFYGVFPQAASSGVDKFGRPNPPGKKSMCARGNDLVRGLLWNCAKSAAMFNPAARTLYQRLTSHSRPDGKLPLRGDVAFGYCMTKLLRLVFAVWKTDRDLNPRHFPWEPQENTCPLDRTERATSDAATSDPTSLEETATPDQTEVGDERESVAADAAASAQEIAKAAGHNEPQGSRDNVVTAATASLSVSLSVRTAADQHLPPSATCGSAAGSPQPFRGPLDFAALRRQVTLRQVLQHLGVLHRFRNSSGSGSQLRGPCPLHQSRSERGRTFSVDLQRNIFRCFNPSCAAQGNVLDLWAAYHGLPLHAAALHLAETFGVLPSRLENGSQTQKQRRGTRNPAVAGSSTNKAGITPAHDP

SEQ ID NO: 412057 - protein, 414 aa, unidentified
MNAAGIDVSSRKSTIAVLRPFGEVVKVPFEVSHTAEGLASLARQLKAIDGETRVVMEHTGRYYESVANVLHESGLYVSAVNPLPIKEYGGNSLRKVKTDKADAMKIARYALDNWCDLRDYTPMDTVRYDLKTLNRQFQLASKQKTASSNNLIALLEQSFPGIRKCFEGPVRKDGTQKWVDFAHTFWHADCVRKLSLNAFAERYRKWCKRNRYQFSTEKTDEVYELAKSAVVLVSKTEVTKVLIKEAANQLTSISRSVETYRTEMNRLASQLPEYPVVMEMYGVGESFGPQLMAEIGDVRRFERKQSLVAFAGIDPMPNQSGEKNVRSNKSSKRGSPYLRKTLFNIMTVHLQRAPANEPVYQFLDTKRAGGKPYYVYMMAASNKFLRRYYAKVRDYLASLDSLPPVDMDSTGLNK

SEQ ID NO: 412058 - protein, 345 aa, unidentified
MTSMNFIGLDIHKKTISYCVKDISGKVLSEGKIPATRQGLQEWVGTLTEPWTVAMEATMFTGWIYDYLRPYAAAVKVAHPLMLRAIAVAKKKNDRIDAGRIADCLRCDFLPECYMAPMEIRQRRRTLRYRKLLVRQNVQLKNKIAQLLMESGVRYNKEKLHQQGYFHKVLPANPEINPSLWPLLKLAREMIERTQKTERALLRSLEADPLLAARVERLMTIPAIGHVTALTWVLEVGEVERFHSVKQVISYCGLCSGEKTSADSSRRMPISKQRDRHLQTVLLEAAHLAPRLNPELAVLYEREAAQSNRNQAAIAVARKLAAYLLAIDRGERAFVTHQVHSSVAA

SEQ ID NO: 412059 - protein, 346 aa, unidentified
MMIIGCDFHPSWQQVSWLDTETGETGEQKLVQASGDAERFYRQVAAPALIGMEATGNCHWLVDLLAELGHELWVGDAAQIRASYVRQQKTDKRDAAHILKLLVEGRFPRIWMPSSEVRDLRQLLLHRYKLVIMRARVKNELQHLCLNKGVQRKHKLWSQAGQQILRELPLQPWAGRRRDDLLKLMAMLDQQIEPLDQAVKAEAQRDKMALLLQTQPGVGPITALAYVLTLGDVSRFPRGKQVASYLGLIPREHSSGGRQKLGAITKQGNRMLRMLLVEAAQIAVRYDPEFRREYLHRCHQKPKAVAKVAAARKLAVRLYWMLRTQRPYSEIVHIESSPRVALVGAS

SEQ ID NO: 412060 - protein, 328 aa, unidentified
MAGPRCVGIDVSADTITVALEGRAEPVTLSNDAEGHARLLRLIVRKSRRLRVCLEATGIYHLDLALALHRARGIEVMVVNPVAARDFSRALLLRSKTDRVDASVLLEFARRMPFEAWQPPAAEILDLRAIVRRIGALTVARTQERNRLHAAGRTAELTSAIAWDIEAHLEHLAQSLERLQQQALELVQAHAELQRRFERLVSVRGIATTSALRILAELAVLPADRSARQWVAHAGLDPRAEDSGTSLHKPARISKTGNRHLRAALYMPAMVAVREEPSVRGFYQKRIAGGLKPIQALVAVERKLLHAIHGMWKTNTNFVGKNFYVMNA

SEQ ID NO: 412061 - protein, 319 aa, unidentified
MSVSSVVGIDVAKAHVDIFVLGAEFKPQRFVNEAEGHSDLATALAPLGVQLVVMEATGGYEAALACALQAAGFAVAVVNPKQARDFAKGMGYLAKTDAIDARALAAFADALSRQPDLASYIRALTDEAQRDLAGLVTRRRQLLAMMLSERQRMQLAVAKVRPSIEAMIEHIKAQLDEIDAEMVGHIQEHFGKLDALLRSTKGIGPVASATLIAELPELGKLNRRQIAALVGVAPMANDSGNSKGRRRVTGGRFEIRRTLYMATLTATRHNPAIAAFYARLLAAGKLPKVALIACMRKLLTTLNAMAKSGLAWDPEFKTA

SEQ ID NO: 412062 - protein, 467 aa, unidentified
MRIYEEAGNSKKVLVVAIDYAKKEHTIMLCNGNGDILRKPFGVWNNPEGVNYLIEQVQKTCTYHKIKTRHAFFGGEDSGSYTGNFAQCLRERGYLVAGVNAQDAKKQRENMQASTDRLDLLGIARMLISRRGNCAPSQSGAYRNLRTLVRHRRKIVALSTEERNRMHCLVDRLFPGFLEERKSGLTPFHEPSLRIMESRFSANQIKRRKQTTLVDILARAGAQKPQQKAKQLQTYAGNVLQPPKDYVATWQTSLTQHVSLYRCLLGNIASLEREMAIWLAQTQGAFLMSVKGIGLVLAAGVTAEIGDAVTQKPVGNLTSYSGVIPRVNQTGGSDSSPHTGSVAKRCNRILKDYLVQSASHQGLHGVDDLMADHKRREANGQHANFGIARRYLRMAMHMMRLSHIYLPPELRVDATSEARGEYYQMIWPYLLEKWKRYDAHDIAFNSEHSLGQWRDMVQSIYKITLKI

SEQ ID NO: 412063 - protein, 343 aa, unidentified
MQNDTRISVDVAKAVFEVAVSDRPGRVSRRERLPRGQFLEFFAQQASARVIMEACGSAHYWGRRIEELGHQVILLPPHQVRPYVRRNKTDRTDAKGILEASRNEDIHPVPVRTVAQQVLTSLHRLRSGWIAERTARLNTLRGLLRELGVFIPVGARQVIPAVWGLIEDADSDLPEALRPLFAESCREIREIEARIRQVERQLEAMVEQVPAVVQLLTIPGIGLLTATALVAFIGNIHRFPSGRHLASWLGLTPREYSSGLKRRLGGISKRGDGYLRTLLIHGARSVLLHARKEQPDHFREWAHKLETTHVHNKAAVAVANKMARIVWAVWSRLEPYGQAKPLA

SEQ ID NO: 412064 - protein, 366 aa, unidentified
MLGPKEAEVKIIGCDLHARQQTLAMLDTTTGEVEKKILKHEANNVREFYSHLAKPVRVGIEATGSMQWFLNLMEELGIECLVGHPTQIRAAEPRKQKHDRRDAELILSLLAANRFPAIWLPSKELLDLRALLRHRHQWVRLRVKIQNALQAIALANGLRRGSSLWTQAGQHAIASLPLSPHATYRRNELQRMYVQFETEIEKLNQRVEQQARERVGARLLMTHPGVGPITALATEVFLGDPSRFADSKELASYAGMIPGEHSSGKRQRLGGLTKQGNPLLRFLWSEAAIHAVRRDPQLKHFYRRKLIQKGLGKARAAAARKLGIRMWIMLRDRIEYNEFCRRGQMQQSGDACAGMPGPRYGAKVTG

SEQ ID NO: 412065 - protein, 372 aa, unidentified
MNYNTVYVGMDVHKESFSLCAYTIETEKASHYQKTEADCKKVLKYLEFLRTIYGDDANFICGYEAGCLGYTLYHQLTANNVKCIILAPTTMLEQRSKKRIKTDKRDAEIIAKCLAQHNYSPVHIPTAKDEETKEFLRMRDDHKLALKKVKQQILAFCLRHNYRYDGNSHWTAAHLKWLKALTPEALYKEILDEYLLTYQTLSDKLERLDKRIGELATQDEYKEAVKKLCCFIGVKTHTALSVLVEVGDFKRFASAQHFASYLGLVPGEDSSGDDQNRLGITKAGNRHVRLLLTEASQCYARGQVGFKSKELKASQSGNTPAVIAYADKANERLRRRYYKMVLNKCKKHNVAKTAIARELACFMWGMMTDNIA

SEQ ID NO: 412066 - protein, 360 aa, unidentified
MKIVGCDFHPSWQQVAVFDPETGEIAELKLLNGDGEAERFYRELEAPALIGIEACGNSQWFIELAEQLGHVVWVGDAAQIRASYVRKQKTDRRDAGHILKLLMESRFPRLWTPTAAQRDLRQLLIHRHKLVEIRTRVKNGLQHLALNRGFPKQSSRLCGVRGRAYMEKLPLTGWTARRREDLLKLLAELDKHLGELDDAVQRAADEHPQARLLMTQPGVGPITSLAFVLTIGDVSRFKHSNQVDSYLGLIPREHSSGGKQRLGSISKQGNRFMRQLLVESVQTVNRLDEGFRKQYAARCHHKAKGVAKVAAARKLAVRLYWMLRQNVGYPEIARIESSPRVALRGESHLETVNGRSRIQQ

SEQ ID NO: 412067 - protein, 344 aa, unidentified
MTYYAALDVSLRSIHICVVDNDGEIVAEGKTGSDAPDVIEFLDQAGVDIGQVGLEAGTLTQYLAYGLQFAGFDVVCMEARQVKNALSAMRNKTDKNDARGIAQLLRSGWYRPVHIKSMASHHIRALLSSRKAVLDKCVDLENEIRGLFKVFGIKLPPKLGHGSFDTKVRALIEADSALREYLLPVLDARLALYKTFRILDTRTKHAAHADPVCQRLMSAPGVGFVTALTFKAAVDDPTRFKHSRTVAAHFGLTPRRFQSGELDLEGHISKCGDAGVRSTLYVAANSMMTRSSQWSPLKAWGMRLAKTRGHRRAVIAVARKLAVILHRMWIDETQFRWSTESVRS

SEQ ID NO: 412068 - protein, 389 aa, unidentified
MSYCPVAGIDVSKRFSDMCILSPDNKIFAQEKIYHDETSINRANALLQKAERLFFSKPVIVMESTSHYHLILFQFFSEHGYDVIVVNPLQSNSMKDFSIRKRKTDRVDAFKLAMMYRTKTLRPSQIPQTATRALRQLCRHRAELLNDVSSYKNRLTALLDQTFPGYDKVFSDVGGVTSCAVLVRFPTPTILLVEEESELVEVIAAASKSGYSFAKKKAGLLISAAQKAQTLGIHSCADETLIVCTIQMLRTLSESVLQIETAIDNLLAQIKEMRNNVSLLQSIPGVGSHSAALLLGEIGDILLFKKPKQLAAYFGLDPTERQSGSFRGTKNKLSKRGSPYARAALHMGVVNSICKRGKDSAANPVLLSYYEKTNRQRLLKQRQCTNWSL

SEQ ID NO: 412069 - protein, 421 aa, unidentified
MFKILKFNCCGLDVHKTWIFACIGITDANFRTEYFEARFSSFPKDLRRLAEWLQEHKCEEVCMESAGKYWIPVFNVLEETCKVTLAHPKYTKPQKGNKTDRKDARWICDLFMCGMIKPSFIPPPPIRHLRDLIRYRVKLTNMLAGEKNRAQNCLTVSNLKLDDVFSDVFGKSARSITEYILSHPGEKFDVAPFVDRRCKTPIDQIQAAVDGAISPEQAAKLRECLNHIDELSAHRGRIETEIFRIAEPYSSQLNLIRTVPGMNKDPMTAILILSEIGSDMSVFPTAKNLVSWAGCCPRNDRSAKHVKSTRISQAGSFLKPLLVQVANALLKSKQHPEFTERYCRINSHRGHKKAIIALCKMLLTAIWNILSTGEVYNPSGYILQTSRPAPEKKVLTQKQAFELLRLRGFVIKDVSGGPASA

SEQ ID NO: 412070 - protein, 351 aa, unidentified
MDKIIKQAVGIDCGKEELVASIGFLDSNFQTSIKATGAFPNNESGHKELIDWVNKYADQEAALQFVAEPTGVYHQRFCYYVTALGYSISVVLPNRAASFLKTLKGKTINDRISASGLAIMGLEKKLDTWSPPDTVMNQLKQLCREREELTEDITSIKNQIHALTSSAVYAGTTLERLQQRLQFSQAQLKEIEQEMKVVTTTNADLEQRFNNVCTIKGVGLITAITVVAETNGFSLVRNQRQLVSYAGLDVVKKQSGISINSPARISHRGNRHLRKALHFPSLAAIRFDDNMRDFYERLLPRHNIKMKATVAVQRKLLVLIYTIWKKNEPYNPKYLEQSKKTALTELVHDRP

SEQ ID NO: 412071 - protein, 349 aa, unidentified
MEEISTVGIDIAKSVFQVHAIDNGGNVVVRRQLRRQQMLKFFAQVPPCLIGIEACGTAHYWARELSALGHDVRLMPPAYVKPYVKRQKNDAADAEAICEAVTRPTMRFVPVKSVEQQSAAMLHRSRALLIKQRTMLLHSIRAHLAELGISIGVGISQMARVVRELAQGERSDLPELARFVLEALAKLVCDLAQRLQAIEKKLISWHYQNDLSNRLETIPGVGFVTASALSSIVPDPQAFKSGRHFAAWLGLVPRQNSSGGKARLGHISKQGNPYIRQLLVLGATSVLRYIRRDGGSGTGWISGLLRRRPPKVAAVALANKMARIAWSIMTRGGEYEEINDLRAVQPANS

SEQ ID NO: 412072 - protein, 422 aa, unidentified
MMDKERRWFVGIDWGSQEHVVSLYDEDGNKIGQRKFPHGGTGLTDMIAWLLKASGGKPGEIHVAIETPHGPIVEALLERGFVVYSINPKQLDRFRDRFTVAGAKDDSRDADVLADSLRTDMRAFRKLSVADPVIVELREWSRIDEELKVEHVRLTNRLKHQLWRYYPQMLELADDVGANWFLDLFEAAPTPEKAANVREKTIARILKSHRIRRFDAAYVLAELRKRALTVAPGTIEAAIAHIRSLIERIRIINGQLADAQRQLDRLCKKLCEPVADENGETTQGQKNEQPDAAILDSLPGVARTVLATLLAEAPDPLQHRDYHALRALCGSAPVTRRSGKSCMVVRRYACNRRLTNAAYHWAQNAIQRDPTSRAKYDALRARGHGHARALRSVIDRLLGVACAMLNNGTLFDPEFASKRAAA

SEQ ID NO: 412073 - protein, 392 aa, unidentified
MVVSVGIDVSKDKHDCFIVSSEGEVRADVFTIPNTMDGFHCLLQRIRDCANAQDKIKVGLEATGHYSYNLLGFLMDNGLATYVLNPLRTNLYRKSLSLRKTKTDRVDARTIASMLLSDEGLKPYSDAAYHNEELKSLTRYRFDKVKERAKLKGSIARLVCILFPELEKLVPSLHIASVYALLEEFPGARQVAAAHLARLKALLETASKGRYKQDIAQEIREAARNSIASRMPAKSLELQHTIRLIRELDAEIHEIEAEIEAMMDEIQSPITTIPGIGCRMGAMILAEAGDFSRFDSPDKLLAYAGMSPSTYQSGQLKNCYPHMEKRGSRYLRYALYNATKYVCLWEPTFAAYLAKKRAEGKHYNVAISHAAKKLVRLIFAMEKSRQPYRAVA

SEQ ID NO: 412074 - protein, 433 aa, unidentified
MVDRVIIGVDPHKLSVTIEARDNREILRATGEFRTDAGSYRRLLEVARQWPERIWAVEGANGIGRPVTQRLIASGERVLDVPAKLAARARVFDTGQGRKTDATDAHAIVMVALRDKGLREVRTDPDLAVLRMLCDRRDELSRARAQALNRLHRLFLDLLPGGAPVKKSARQYQALLATVRPRDPAGRTRRRMAAEELADLHRLDGKLKAMKAELKTAVQAAGSHLMDIHGIGPAGAARILADVGDVARFPDRNHFASWTGTAPIDASSGQHLRHRLSRAGNRRLNHVLYMAGIVQLRNDTPGRAYYRRKLAAGKTPMEAMRCLRRRLSDVVYRQLAADTRGQHNASPGGHPGASLTSSAAGLPPDTGTSDQPLPGPAHPTLPPPTAGPKTPAVPPAATSRRRARGVNVERPTGRTTLTSTSAAAHSTASGPPS

SEQ ID NO: 412075 - protein, 353 aa, unidentified
MTSTKYIGMDVHKESISIAVRNDAGKIVMECVIETKANIILDFIHGLRGELQVTFEEGTWATWLYDLMKPHVEKLVVCNPRKNNRQGDKNDRIDARELSDLLYMNKLSSVYHGGAGVRTLRELARSYLTISKDLGRVMSRVKAIYRSWGIPCAGKQVYAPRHRAEWLGKITEVGVLRRAEFYYQQLDALRPLRHEVRRELLAESKKHPATKLLCQIPAIGPIRAALLIALIQTPQRFRTKRPLWKYSGFAIEMHSSADYRSVKGQLQKSRKRITVRGLNRDCNHDLKNLFKSAATIASVKPGPFQEFYAALLAKGMRPEMARLTLARKIAAIVLIVWKKGVSFDAKYLKSQTA

SEQ ID NO: 412076 - protein, 593 aa, unidentified
MAYPMGEADKCALRLDFDRRLMLQFRGSTITSDAGLLAYRELDDALHLTDTAADALADVRTGKNGRHRLAGLLRQSVFGRLAGYEDVNDAERLCHDPAMRWVVGARAISGSAASASQMGRFETKWLSRPENLTALADLSGQWIDKVRRRRGPKTVILDMDSSESPTYGEQEGSAYRSHGRQDSDRRSARVRLLNQPTLETTMQVVADRAAEPIAIQTDLRAIFVSLELSRSTWLITSLSPGGGEKMSKHSVPAGDIAGLLKRFAQLEEKARARTGRDSPIIVIQEAGLDGFWIHRVLQSEGIESHVVDPASILTSRRGRRAKTDRIDGETLVRTLMAFKRGEPRVCSMARAPTPQEEDRRRVCRERRTLVGERVRHVNRIKGLLFAQGLFGYEPLRMGRRERLEDLRTGDGRPLPVHLKAQIIRELDRLEVLLEQLKTVEAERDALLKPATDEAASPPAMLARLKGIGPQTAAVLWSEGLFRRFDNRRQVAAYAGLAPTPWQSGSIDHEQGVSKAGNPRLRTTMVELAWLWLKNQPTSALSLWFHERVRRLGGRMRKTTIVARARKLLIALWRYTTAGVVIEGAVMKVAPATT

SEQ ID NO: 412077 - protein, 312 aa, unidentified
MAMRYVGIDVAKKTLDVCVLPDSAERQFANDRRGWTSCSRWLGDPQDTLVVLEATGGYEAQAADALRAVGFAVAVVNPRRTRDFARACGRLAKTDRLDAQGIARYAQMLQPSPREALDASHRRLQALVARRDQLLAMRTAETNRLEHATDRAIRTSLRQIVRALERQMARIEAQIRQTIDEEPSLRQAKETLTSVPGVGETTASMLVSDVPELGRLNRRQIAALVGVAPWNRDSGMFRGKRMTGGGRVRVRTRLYMPTLVAIRHNPVIHAFYERLVQNGKAKMTAVVACMRKLLTILNTLVAKNEKWKPRIA

SEQ ID NO: 412078 - protein, 392 aa, unidentified
MQPVVGVDVAKGSSVVQAFRTRNEPFGKAVDIVHEKSGFEQFSRILDGLQAETGLAPVIVLEATGHYHRALVSYLERSGYTYYIVNPLQSKRAKGTQLRKVKTDAVDAWHLAEMYYRGDVKPHRTWEETFTELQHLTRQHEFVTGIFVQAKLNSRALLEQVFPRYEGLFSNVFSATSLTVLARCLEGSTADWIEVIQGSTGRSHSRTWAIEKNEKLKEMLGDWKEGRHSQSQSQALLGMVKLLQTLMEQLDELEQQMEEMAANLPEVELVKSIPGIGTKLAAAIVAEMGDIRQFSDAKQLVAFAGLDPGIFSSGKFTATSTRITKRGSKRLRRSLYLAVQCGIRKNANTKISSYYEKKRKEGKPYKVVVIACANKLLHHIFAILQKGLPYQV

SEQ ID NO: 412079 - protein, 466 aa, unidentified
MRLRLGIDVACKAAHQVSCTDETGNFLFAGRRFRSTIDDLDKLWASLPDAEEVLVVLEPTRNAWVLLAAWLRSRGARVVLVPPEQSADLRDYYHKHTKNDRLDSRVLARLPLLHPEGLRTLGDGELGPADPLRRATRRRRSLVKRRTATYARIDALLELLGPQWADALGSGEYAKTALTVLEHTGGDPHAIKRLGRKRLSALLIRTSRGAWRETHAEVVWHAAELTLKLWEAGGLDFTELAQDLAGEARLALQLNTEIDALDDRISVLYDDADPTAILTTVPGLGVTSAAVILAGLGDPDRFSTLAGIRAFTGLIPKLDESGTSSRHGPPTKAGDPALREALFNAADRARKIDPTLAARYQRLIQAGKHHNSALCTLAAVLVTRLAACWRTRTPYQLQDVDGQPLAEAEGRAICVTRYQVTDADRAKNRSQRTAHHQKQTGRRKKESQSAPAAGPSTNHTNHHEAA

SEQ ID NO: 412080 - protein, 340 aa, unidentified
MTVRVCGVDIGKTVFHLVGLSKEGHIVTKKRFNRKQLLTHTANMPTCLIGIEACPGAHFLARALLQQGHDVKLMPAEYVRAFVKSNKNDYVDAEAIAEAVQRPTMRFVPIKNEAQLDLQALHRVRDRWIGRKTAVINQLRGFLLEHGITVRVGPAHLKRQIPSILEDADNLLSPRMRALLLELRDEWVRLEEQIDASTRELAMFAKNEDDCRRLLTIPGIGPLTATALTAAIGNGAAFRKSRDLAAWLGLVPRQHSTGGKVRLLGISKRGDPHLRRLFVHGGRAVLAQVKRDRHQFGSWLDRLEARSPRNVAIVAMANKIARMAWAVLTSGQSYNAAFST

SEQ ID NO: 412081 - protein, 420 aa, unidentified
MRYIGLDVHKHFIEVCITDRKGKILERGKVNCQRDVLLEFATKKLRKHDRVALEATTNTWAVVDLIRPHVKQVVVGNPMKTRAIAEAKIKTDKVDAEVLAHLLRCDYLPSVWQPDEPTQTRRALLTHRNGLMSRRGRHMNRVQSMLARLMIKPPCKYLWSKTGVAWLETLELSPVDRLMLDSQLRQITQVNQELEIVDQRLVEIARNDSSVRLLMTLPGVSHVVAVGLLAAIGDIERFCDGNHAASYLGLVPSTRQSGNKCYHGRITKMGNPHCRWLLTQACQHVSRHPGPLGAFYRRLVKRKPRQVAIMALARKLVTIAWQMLKQNEPYRYAKPMLMAKKFTDLDRKYRQEQRRTPSAARAKAGDGLTAVYDEIGFTDSLSLNQVPDGERRMLIEKDVMMFVEELYRPVKKDKSNQSDK

SEQ ID NO: 412082 - protein, 381 aa, unidentified
MLGNPQKGKVMDKITRIGVDLAKNIIQVHGVDSMERVVVRKAISRQKFLEWFANLEPCLVAMEACSAAHYWGRKLRALGHEVRLIAPQFAAPYRKGGKHVKNDRLDAEAICEAAGRPHMRFVAVKTADQQNVLVLHRMRDGFVEERTALVNRLRGELVEFGVFLPQGIDAFRAHFVEALEDGATELNGVARTALLRGWEHLQALDQQIAWCDAQVATHVKHDSNAQRVMAVIGIGPLTASATVATVGDARLFKNGRQFAAWVGTVPKQKSSGGKTRLGHITKQGNTYLRTLLFQGARSAVTSAHRRTDRLSRWIVQLQARVGWYRTLVAVANKHARILWAILAKGERFDPSYVSTPSTPGPATVGQQHEQVNSQRHPSVTS

SEQ ID NO: 412083 - protein, 386 aa, unidentified
MFKTERPATAIHTNLAAIFVSLELSRSTWLVTSLSPGNGEKMSKYSVPAGNIVGLFDLFSKLRERSRVKTGHDWPIITIQEAGLDGFWIHRALVQEGVESHVVDAASIATPRRYRRVKTDRVDGEVLLRVLMAYKRGEPRVCSMVRAPSPEDEDRRRIARERKALTVERVGHVNRIKGLLFSQGITDYEPLHKDRRRLEELKTGDGHPLPGHMKAQIGRELDRLELVLEQIKVVEEERDALIAAQAAEVGKPSPVTMLLEIKGIGAEFANILWSECFFRHFDNRRQVAAYAGLAPTPWRSGSIDREQGVSKAGNPRLRVMLIQLSWLWVLHQPNSTLTQWYKARVDHKGGRMKKSSIVALARKLLVALWKYATSGVVIEGAIMKRA

SEQ ID NO: 412084 - protein, 341 aa, unidentified
MEEYIGLDVSMKETAVSIRREGKRIWRGKCASNPTIIAELVRKRAPAAKRVVFETGPLSVWFYHALQEEGLPAICIDARHAKAALDMASNKTDANDADGLAHLAEVGFFREVRVKGYDSMLIRTLVAARTRLVRITTELSNQIRGIMKTFGLVVPAGKGTTFERNVRNLLVDHDQLASIVLPMLAAWRDIRIRAAELGRQLVADARESQACRTLMSIPGIGVITATSFVAAIEDPNNFKKSRSVAAWIGLTTRRYQSGEVDYDGHISRRGDRHLRGLLYEAAAVILTRCSTDSTLRTWGLQLRERIGFKRAAVAVARKLAVIMHTMLKTGELFNPNAGATA

SEQ ID NO: 412085 - protein, 352 aa, unidentified
MEVTTIGLDLAKSIFRVHGVDTTGEVVVRRPLRRAQMLPFFARLPSCLVGMEACGTSHYWARDLIKLGHEVRLMPPAYVKPYVKRGKTDAADAEAVCEAVRRPTMRFVPVKSPEQQAVLSMHRARDLLVKQRTQLVNMIRSLLAEFGLNIPKGLERALLMARRIVDGKAPDVPMEAAKIVSTLSQQALDIHVRLRQIDRDLLVWQRGNDVARRLMTIPGIGPVGATALAASVTDPRQFRSGRQFAAWLGLTPLQKSSGGKERLGRITKMGDKYLRKLLIVGMTSLVCRAKHNPETIEPRLANLLARKPVRVATVAMANKTARTIWAIMTRGETYRAGHQPALAHKNNVTRIS

SEQ ID NO: 412086 - protein, 310 aa, unidentified
MKEEAVYLGVDIAKSYLDAAVGNEKKRRFSNDTIGHRELIKWVKQLKAPVQMICESSGGYERALVQALARAGVQISLVQANRVRQFARAAGILAKTDRIDAEVLCEFGKVMRPQRVTAATLKQEHLRELESQRRHLTHLLVMEQNRGARVSDACVRRLNRNLTNQIKKQIQQIDLLIKQHIQGSPELSAKADKLTAISGVGLRTAALLLAQLPELGQLNRREVAALVGVAPFNRDSGRMRGKRAIYGGRRSVRHGLYMAALVAARHNPILRNFYQRLRSAGKPTKLALTATMRKLLIVLNSILKPDLSYA

SEQ ID NO: 412087 - protein, 387 aa, unidentified
MQTKTPATTVETTARDHSNTLFASLELSKAKWLVTANSPGEEKFSKHVVEGGDGASLLVLLARLKAKAEQRHGVAVKVVVIQEAGLDGFWIHRLLVQSGIESYVVEAASIAVARRHRRAKTDAIDGVSLLRTLMAWARGERRVCSMVRPPSPEEEDQRRLSRERGTLLKERIQHTNRIKGLLSGQGIRGYDPLKPDRLDRLDALRTGDGRPLPDRLKAEIRRELARIDVVASQLATVERARDALVRTQTTEPTNPSALLIKLKGVGIEFASLVWLEGLFRSFTNRRQVAAYAGLAPSPWQSGGTNRDQGISKAGNHRLRHVMIELAWFWLRHQPDSALSRWFHNRVGTAKGRVRRIAIVALARKLLVALWRYVTQGIVPEGATLKAA

SEQ ID NO: 412088 - protein, 337 aa, unidentified
MDYFAGLDISMDETHVCVLDREGEVVRESKTVSTAQAIADELVKAPNCSRIVFETGRMAPILFHGLRELGFPVVCVESRQAYQALKSLSTHKTDRNDAWGLAHLARTGFFKPVHVKSLPAHAVRSLIIARKKLVGQRVTLENQIRGLAVVFGVRLPRALTSAFINEALKASEGIAGLSAAMRGLIAARTAVMTAVAAIDADIRRMTRASGACRRLMTIPGVGQLTALAFVAAIDDPSRIRRSREIGAYLGLVPRRYQSGEVDYVGGISKCGDRRVRTLLYEAANVMLTRYKGQLKLKDWAFAIARRSTMRKARIALARRLAIIMHAMLRDGTEFAPA

SEQ ID NO: 412089 - protein, 354 aa, unidentified
MVTMGVDGHKESHTVVAVDPVGRKVAQMTVSNRPESYAGVLTWAQGLDAQRVWGIENSGSFGRGLAQYLVGQSEEVYEVSPHLTGRKRCRSLDREKSDPADALAIGRVVLQEGDHLPRVQAEEVSSVLSVVVEHRGNLVAERTRLINQLHGQLSQVEPGYKERLGDLTKREVLEACQIYPMPSGDAVAQMRVTVIRQMATLLVSLTEMIRQLEKAQIVPLVEETHTPLLSIQGIGVLTAAELMARVGPISAVKSAASLARYSGIAPMERSSGGSERHRVNGHGDRQLQAVFYRMALVQKRCNPLAQAYVAKKRQEGKTAKEAHRCLMRRLVDIVYSVWKHNVPYCPPAAECIAV

SEQ ID NO: 412090 - protein, 322 aa, unidentified
MSKFFFGIDVAKAKLDCALLLPNGKWRNKVVANSKKGFEELRIWLEKQGVDSSHVCMEATGTYWEGVAGFLVAIPGFTVSVINPAQIKAFGASKMVRTKTDKVDAQLIAEFCAERHPEPWQPAPVAVQSLRALVTRLDALQAMRTQESNRLDVASSVTQEGITSHLTWLDEQIEKVTKQIKDHVDSDPDLHDKQQLLDSVPGLGERTIAVLLAFYAQPDRFGNARQAVAFAGLDPRQHESGSSVRGKPRMSKVGHAFLRKALYMPAMVTLYKTKWGKKFHARLAASGKCPMVIIGAMMRKLIHVAFGVLKSGKKFDPALHGA

SEQ ID NO: 412091 - protein, 318 aa, unidentified
MTNITYQFNIGVDIAKQKLDVSFSDQRVVSFENNLAGFKRLLKEITDKSQTRVVMEATGGYEKPLAHFLQGQGVAVSIVNAKRVRDYAKALGLLAKNDVIDAKVIRLFADAVNPKLLLAASDTQQALDAQVHRREQLVKQRAMEKQHLETVGNKDAVRSIKRTIAFLDKEIERIEKAIKALIRADSILTEKVERLSAIKGVGDITALTLIADLPELGQLSNKEISALVGVAPFCHDSGTQKGKRTTWGGRKQVRSILYMAVLSAVQYNPPLKAFYNRLLMKGKTKKVALVACMRKLLTVANSMLRNNTEWNPNHGKLA

SEQ ID NO: 412092 - protein, 323 aa, unidentified
MSKHNIVCAGIDTGKSKLDVAITGSLKGWCFDNAAQGHAMLSARLRQHQVERVGIEASGGYERAAVAELRRDGFVVIVFQPIQVRAYARFHLQRAKNDKIDAGLIAACTAATEKIHAPPDPRLAALADHQTLIDQIIDDIAMLKNRRESAREACFRQFWTVQIADLKKREKSEFNKLVAAIRQHDDLSRRLDLIASVDGVGLPTAVAILVRMPEIGRVSREQAAALVGLAPYDDDSGERNGAKHIAGGRERLRKTLYNASLAAAYHWNAQLIAFKDRLLAAGKLHKVMRVACARKLLIYVNTVVARGTPWVSTRAPLTVQAVL

SEQ ID NO: 412093 - protein, 345 aa, unidentified
MDSIGIDLHKRESQLCTITEDGELREQRIITSRERFTAVLGARPPARILLEASTESEWVARHLEALGHAVIVADPGFAAMYATRSKRVKTDKRDARTLCEALQLGAYRAVHRASDAQQQLRAHLAVRDALVRTRTRYVALIKAAVRREGLRLPSGEAEQTVAKLAPLPVPAHVHAALAPLVAVWGPLQAEIAAVDARLTVLARQHPVVVRLATMPSIGPVTALAFVAALDDVTRFQSAHQVQAYLGLVPSEYSSGDRRARGRITKRGDARMRWLLVEAAWRILRSSNPTLAALKAWALQIAARRGKRIATVALARRIAGILYAMWRDDAPYHAGSTSQPSHHAAA

SEQ ID NO: 412094 - protein, 347 aa, unidentified
MNSVGIDLHRNRSHVAVIDGDGELALSRRIVNGRETFLELLAGLEGESRIAVEATYGWEWLAELLEDAGYEIHLAHPLRTRAIAAARVKTDAVDARTLAHLLRADLLPEAYVAPRELRDLRELLRHRIALTGMRSALKNRVHAILAKHGITRQHSDLFGPGGRRFLDELLLREAPRRRLDSLMALIDDFDREIKQTTAEIEQRAKADDRVEVLTQIRGVGRYTAMLIIAEVGEIGRFPDARHLCAWAGLTPTVRSSAGKARLGRISRQGSPALRWALVEAAQKCTTGGGPLRESFERIAKRRGRKIAKVAVARQILTLSYYGLRDGEIRCLARRSRASANEKLAVAP

SEQ ID NO: 412095 - protein, 376 aa, unidentified
MDKDSRFVGLDVHAETIAVGVAEPGGEVRSLGTIPNTPEAVRRLVKKLGPPETLRVCYEAGPTGYVLYRQLSALGVPCAVIAPTLVPVKAGDRVKTDRRDAEKLARSYRSGDLTPVWVPDPGHEALRDLVRAREAAKKDQLRARHRLGKFLLRQGRRAPTGSKAWGVKHRAWLQTIRFAHAAQDATLLDYLTEIDHAADRIARLERAIATAADLTPAPVRAVIAGLQALRGIAKLSAVSIVTEVGALSRFAKPRQLMGYSGAVASEHSSGPHRRRGGITKTGNAHLRRIVIEAAWAYRHRPAIGGTLRTRQAGLSEEVKALAWKAQHRLHGRYVRLIAKGKAPTQVVTAIGRELLGFIWAIGVHIEQHTAGGAPAA

SEQ ID NO: 412096 - protein, 416 aa, unidentified
MKIYPRTRPIQRYIALDIHKEYVLAGGMSARQERWLPPRRIEMGKFGEWAKKNLCETDAVVIETTTNVWDIYDIVQPLAGHAVVAHAGSVRQIAEARVKTDKEDVKRLIRLLIADILPEVWVPPQPVRELRGLISYRQRLVKTGSMIRNRLQSLLHRHNLLLPEEGLADGEWWEQQEKIPALEKLQIRQELSMLEQIEKHKAEVDHELGRQSLGERWGKQALRLMQLPGIGVVIAMTILSAIGDIQRFEDARHLVGYSGLGAGIHDSGQEHIEKRITKSGRKELRWALVEAAWRAVRMSPYWKEQYEKFLWRMRRPNQAIVVVARKLLVAVWHVLSKEELDERASEEDLAYKMLLWSWSLSAEARQGLTHKQFAKYALMRLGVQTDITRFVRKNVPRRMAPKDEVLARIAELDLTC

SEQ ID NO: 412097 - protein, 417 aa, unidentified
MKKNSKSPMKKEQKAKRAKAQRPVQREAKEVLAELVEKMRGKLEVKSTSARQAEAGPRGELSPNVNRLTVGVDLGDQRSHFCILGFEGETLSEGQLQTREAEVAEFFQALAPARVVMEVGTHSAWMQEIIAGEGHEVVVANPRLMEGSKRRKRKNDRIDAKKLARLGRVDPQSLHPIRHRSREVRQDLVVLRAREALVAARTELINATRGLVKSMGTRLPKCSSPSFGQKVKDVIPEKVREALLPLVQLADALSDCIQSYDQKIAELGSEKYGHTKLLRQVKGVGPITALAYVLTLENPEHFAKSRDVGPYLGLVPKQEDSRESQPQLGISKTGDTMVRKLLVGSAHYILGPFGPDTDLRRYGLRLCERGGKNAKKRAAVAVARKLAVLLHRLWVSGEVYEPLGYASSREIVQQAAA

SEQ ID NO: 412098 - protein, 329 aa, unidentified
MLFVGDDWAEDHHDVELMDGSGRRLAKARLPEGVAGIARLHAMIGEHLGEADSESAQVKIGIETDRGLWVQALIAAGYTVFAVNPLQASRYRERLAVSGAKSDAADAHMLADMVRTDSHQLRAMAGDSPDAEAIKVVSRMHKTMIWERDRAVLRLRHALRDYFPAALAAFDDLDAADSLELLGKAPEPAAAARLSLTQISAALKRARRRGDLTAKATAIQTVLRTGHLGQPAVVATAYAATTRSLVALLLTLNEQIAVLQQEVEAHFGRHPDAEIILSQPGLGAVLGARVLAEFGDYHARYASAKARKNYAATSPLTRASGKKKIVMAR

SEQ ID NO: 412099 - protein, 449 aa, unidentified
MHGVHIGGQRAGAFLDLVGGVDPKRVLLVGIDVAKATWFVVASNLLGGSWWDGVRLVADRAGLAELERVLGAASARVNAAMVVVGIEAAGHHHQTLTAHLLDRDELVVRLLNPAQVAAVRKQQGNRRRKTDWLDAAAICELLARGEGALVHLDGSAAAALRPLWSGRKDLVDTRSRLRQQAGALVDCLWPGCSAKDPVAGVTPVLCDLFATKAGRVLLELLAQGWTPARVAATSVAALRGLFAVRGCRLTRPLATRLIGRAQAALPAHPAATAGKAVTLAALLGTIDTLDHQIACLEAAMAPLLAHTQGAKLTQLRGVGVVAAAGFVAFVGSTDRWAEWSKVWRAAGLDPARSQSGPTDARLGISREGSAWGRRAILDLAAAVCQQPGPWRDRLRTRTTQQHKPAKVALTATANAIGRTLFALMASGADFDPGFEAKRAAARKAGGQAA

SEQ ID NO: 412100 - protein, 309 aa, unidentified
MNPKANDLIAIDVSKNTLRVQTPQGGFDLPFNATGLSRLKRELDRWDQPLVVCEATGNYERKLVNASHQWGVAVSVVNPALVRSFAKSEGLKAKSDPIDAKMLMKFAQQKELRPTPAPSPTQVQMVALLDRRVQLSGSLTREKNRLEKEPEHTRDLIEQSIAFIEEQIAEVDRRMKALVQADSEHEQDCRRLEQIKGVGELTANTVLTYLPEIRTVKRNQLVALAGLAPYDNDSGEKQGRRYIQGGRAKIRRCLFNAARSAASHNPHIRDYVRGLTARGKPYRCAIVAAMRKILLCMQSLLKNPDFSLA

SEQ ID NO: 412101 - protein, 372 aa, unidentified
MTSIIYVGMDVHTTNYTLCCYSMEDDRFFAEVQVEPDAKNILKYLARIEKQQSRDCRIVCGYEAGCLGYSLYHQLHAHGIDCVILAPTTMMTKPGKRIKTDRRDARLISKCLAFHTYSPVYIPTEVDDAVKEYIRMRDDANSALARVKQQIIAFCIRHGKIHDGKSYWTNKHLEWLSSLDLGNKILSEVLQEYLIRYYQLREQVDMYDMRINELAQAEPYRQKVEKLSCFRGIAAHTALSFCVEVGDFRRFATAQQFASYLGLVSGECSSGDKQQYTGITKAGNSHLRKLLVETAQVFGRSATKSGKSVALKERQAKCDSLTVAYADKANARLKKKYFKIAMRSKVNIAKTAVAREMACFIWGMMTDNISCA

SEQ ID NO: 412102 - protein, 350 aa, unidentified
MAHRNLPRPAAVYGIDIGKNVFHVVGLSADGTPVQKVRFRRDTLLQFFARADPSIVGMESCAGSQWLARRIQALGHKVRLIPAQFVKPYVKSNKNDIIDAEAIAEATTRPTMRFVMAKATDQVDLQALHRIRDQMVGSRTRLINQMRAFCLEYGVPLRQGAGLFKLDLPQALNDPENDLSPTMRRLLGDLHADLLRLEERIRQVTKEIEAIADREDVTRRLMTIPGIGALGATALLAAVGDGLQFRKARDLAAWLGLVPRQYSTGGKQTLLGISKRGNRYVRKLLVHGARSCFRHLDRTRDRLGNWLDGLEARMHPNKAVVALAAKMARIVWAVLNKPGALYERRDPAFA

SEQ ID NO: 412103 - protein, 392 aa, unidentified
MYIVGIDIGKNHHEASIVSPEGKQIGRSLRFATTHKGADSLMSFIFKNIGNSPCVFGMEATGHYWYPIYSFIKAKGYTIYVINPIQSDSLRKMYIRQTKNDSIDSFLIAEVIRFGQFGTTSMADENILAMRQLCRYRDSVISSRTEIKLRIGTIMEQIFPEYEKQFSSLWLSTSMGILEKYLTPENIENAPIDELFEIIKDKSHNKLTMKKAISIREAASDTFGIKIAQDAFSFQLKQLIDRMNFLDKQIEALDCQILEYYEKFDCYLHTIPGIGMIAAATILAEIGDINRFKSSSALVAFAGIDPTVRQSGEFSSTHNHMSKRGSPYLRHAIFLAATTCSFHNSPLNAYYKKKREQGKHHLTATGAVARKLTTVIYAVLRDGKPYEPKSFC

SEQ ID NO: 412104 - protein, 341 aa, unidentified
MGITTLGIDIGKTWFHLIGCNRAGTPIARHKLNRNKLMQFIATLPRCLIGMEACPGSQHFARSFERHGHEVRLIAPKFIKPYLKGQKDDFNDAAAIAEAVTRPTMRFVLPKSNEQLDLQAIHRIRDRLVGERTAVINQIRGFLVEYGLPVAVGRAALRRDLAGILEDAQNGLSEKMRQLVARLREHWQHLESQIDECMQEIEGIVSRNDDCRRLVSIPGIGPLGATALVAAVGNATTFRKGRELAAWLGLVPRQWSTGGKPTLLGIGKRGNTYIRRLFIHGARSVLQHLKRGSHDLGTWMTQLEKRAHKNVVIVAIANKIARIAWAVLSRQESYRSGDAIA

SEQ ID NO: 412105 - protein, 345 aa, unidentified
MKITTVGIDLAKNVFQVHGIDERGKTVLRKQLRRAQVAAFFGNLPPCVIGMEACGSAHHWGRTLQRFGHTVRLMAPQFVKPYLKTNKNDAADAEAICEAVGRPSMRFVPIKSVEQQAILSVHRVRQGFVKARTAQANQIRGLLGEFGLVIPQGISNVAKRVPELLEDASNELPVPFRQLIDRLTEHLKELDRQVKDFEKQIIAWHRSCELSRKLENIPGIGPLAASALVASIADAKSFDNGRQVSAWLGLVPRQHSSGGKPMLLGMSKRGNPYLRTLLIHGARSAILAARRNTANTNVWLANLLTRRHPNIAAVALANKNVRTVWAMLAHGREFKADYVPTRMAA

SEQ ID NO: 412106 - protein, 421 aa, unidentified
MKGLRAIRVKTVKEGTLIATVDIGLTTNTGYCTTLDGKGTKPFRFDNTKEGFEKFWCMTLASKNRFGCDEVLVGYESTGPYAEPLVHYLANKQVKIVQVNPMHTKKMKEVNDNSPLKTDDKDPRVIADIIRLGHALTIIVPEGEAAYLRRLNNARERHVGEQTALLNQLQQLVFLIFPEFKTVLKNMKCKTAQYILKKYTTPERIATVSKEVLGEEMRKRSMGKFGIQEAESLIGLARETVGIKEGLDGIFMDIRHILMQLEAEVRFISEIEAEMGATLERVPFSGRLLSIKGLGTVSVAGLIGEVGDFSKFSTQSEIMKLAGLDLYEISSGKRKGQRRISKRGRGLLRKILFYAAIQMIRKKGIMYDYYARLTGRGMERMRALIAVSRKLLRIIHAIVRDNSDYVGQNPAGERRMMEIAA

SEQ ID NO: 412107 - protein, 418 aa, unidentified
MKKHSNSREKSEATTKRAKSRGPVQRDTKEVLAELVEKLKVKLDPKKAVAASARDRHPRGELRPNLDRLTVGVDLGNQWNYYCILGLEGETLAEGQLRTTQEDFATFFQGLNAARVVVEVGTHSAWVQEVISGCGHEVLVANPRLMERSKLRKRKNDRIDANKLARLGRVDPESLHPIQHRSREVRQDLVMLRARDALVAARTEIINTTRGLVKSMGTRLPKCSSRSFAHKGEEAVPVEMREALLPLVRLAAALSADIKEYDKKIETLGQEKYGHTTLLRQVKGVGPITALAYVLTLENPARFAKSRDVGPYLGLVPKQEDSGESQPQLGISKAGDTMLRKLLVGSAQYILGPFGPDTDIRRYGLRLCERGGKNAKKRAAVAVARKLAVLLHRLWVSGEVYEPLRAGMSATMTPAAAA

SEQ ID NO: 412108 - protein, 311 aa, unidentified
MTEHTTVGIDIAKETFDVFISPDGIFLHLDNTPQGHQLLLDALSSRTVTRIVMEATGRYHNLLAATLELAGLPVAVVNPAQVKHFARALGTLFKTDPNDARIICEFGRRMTPDIRPAPDEQTQRLAMMVSRRRQLVDNRTMEQNRYGSCTDELIRMGIKRHIDWLNAEIKDTDDDIDQQIKVMPLWQEKVKLLEEVKGIGRTTLAVLLSMLPELGQLNRRKISALVGVCPYAHDSGKMKGKRCIWGGRSAVRAALYMAAMSAVRYNPTIQAFFEKLRSKGKAFKVAMTACVRKLVTILNAMVRDNKKWAAA

SEQ ID NO: 412109 - protein, 430 aa, unidentified
MQTKKEFAATVGLDWADRHHDLWLQPADEGQPQHLILDQQPEALHSWIAQIRARFDNRPVAFAVETSRGPVLSALLAYDFITVFPINPKALSSYRDSFRVSGAKDDRSDAFLLEQYLRHYRDQLRPLCPDTVLTRQLAGLVEKRRSLVDLRTQLVNQLHAELKMYYPLARTLLDDLTVPMASAFLKKWPTLEALQKAGANKVRAFFYGHNCRSAKKLQARLDALASARALTTDPALIVPASLSVQALAGLLEVLHKAIATVDQEIQTAMDAHPDASIFRSFPGAGPVLAPRLLVAFGTQRDRFQSAQEVQQLYGIAPVTKESGQSKVVHMRYRCPKFGRQSFHENAGQACKKEPWAQAYYDQQRKRKKHQAAVRAVAFKLMRIYFVCWRDRKTYDRDLYMSSLEKHGSPFGKPAIKTKRATRGAHLAADE

SEQ ID NO: 412110 - protein, 343 aa, unidentified
MKHFVGLDVSVKETSICVVDGDGDVVLQTSVPSEPRAIVDVLAAPSLAIERIGLEAGPLSEWLYAGLVDAGLPAICVETRHMHAALSAQINKTDRNDALGIGQMMRVGLYKAVHVKTPASQRRRVLLTSRKLLQRKVQDLENELRGIVKTFGLKVGVVGKSRFEARVRELVAGDAILEAIVVPVLTARAALRTQYDALHRMVLALARRDPICRRLMTAPGVGPVVALTYRTVIDNPARFAKSRSVGAHIGLTPRMFQSGEVSRMGRVSRSGDANLRSLMCEAALVLMTGSGRWSSLKAWVIAIARRRGKQKAIVAVGRRLAVILHRMWVDGTDFRWSKETASA

SEQ ID NO: 412111 - protein, 326 aa, unidentified
MKYIPVGVDMAKHLMQVHFVDEHTGEIIDKQVKREKFLEYFSNREPCLIGMEACGGSHHWARELQKLGHKVRLLKGRFVKAFVMGNKNDVMDARAIWLAVQQPVKSVAVKSEEQQATLGLHRMRQQLVKFRTAQINALHGLLLEFGETTHKGRAALAKEVPEALERLKERLPLYLINMLDEQYQRITELDEHLDHIEKQLQAVARQNETCQRLLNIPGVGPLIATAAVATMGDASAFKSGREFAAFIGLVPRQTGSGGKIRLLGISKRGDKYLRTLFIHGARAAALLTKEPGPWITELKKRRPASVAIVAMAQAGANGVGNSRSRT

SEQ ID NO: 412112 - protein, 344 aa, unidentified
MNTIRIVGIDIARSVFQVCVWMIDGSVAWNRKISRQELLNTLRQFEPGTLIAMEACSTSHYWGRTFSAMGFSIRLIPAQHVKAFVRSQKNDANDALAICETACRPGIHFVPVKTTEQQDIKALRNTRQLMVEQRTALANQLRSLLAEYGLIIPVGIQCLQQHLPEFIEDASNDLTFTLRRLISSLREDMQALNERISGLDSEITALSSQQAAYRHLLTIPGVGPLIAAAFISEVDAVQFSSGRELSAWCGLVPRQHSSGGKQRLSSVTKNGNRSLRTLVIHGARSVMRCMKKRDDRLGLWLKKLEARRGFLKTTVALANKLTRIIWRVLTDSVDFNMNKAFAVS

SEQ ID NO: 412113 - protein, 316 aa, unidentified
MNKISGEQFVGVDVSKSTLDMSSEPAAQRLHVAYDEAGIRQIVECLKEVRPALIVIEATGGLEVRIATELASQELPVAVINPRQARDFAKATGRLAKTDQVDAAVLAAFARAIRPQVRPLKDADTRALDDMVSRRRQLIEMRTQETLRLGTAASKPLQKSLKRHIAWLDKQISEADDDLNQRMRESEVWLVKDDLLRGIPGVGVVTTLTLLAKCPELGTLNRREIAALTGVAPLANDSGKHRGKRFIWGGRAEVRAVLYMATVSAIRCNTVIKAFAERLKKAGKPPKVVIVACMRKLLTIMNAILKNNTPWNPKNA

SEQ ID NO: 412114 - protein, 458 aa, unidentified
MEQRKVIGIDPDSKGFQCIYLKEGDRKFTTRYFYVDKISLQKFINWIHKIGNVIIAIEGANGQSRPIEKELRENNIIFYSFKPADVDKYRRAILGENKSNALDAEATASLALALDTQNRLENYKRLWFCEDGLRLLTRHYEKITKDKTAEINSLWKLIRAISPDLYLLLQGKEIGAEEAKKSKLDNKSLLNLLSTKPDPSEWQYFTEVELLEALGGRMQRGVVEKIMKIKKMAHNIFPVDSSLSVLIKGKASHILFLKQQLKDIAKELKKKAEDNEAIKNLMEIKGIGISTAATIVAEIIDIRRFVKDDNLASYTGLGRKTNNTGDSKNEKKMCFFNRRLKNAFITAAKNFVRFNPDHHLTGYCTYLINVNKKNMKKTEAYKRVARSLVRMIFKRLNGLLETTDPIVELKEKEGGMANGKTRNTNVLSNIPPSVVLSLNDKEERSQIKKEKFSKKCLT

SEQ ID NO: 412115 - protein, 346 aa, unidentified
MKIMRVGVDLAKNVFHVHGVDRNKQPVWRRRLTRGKWLKAVVEQVEPDCVIGMEACASAHHWARELQALGYTVKLMAPQFVKPCVKSNKNDWNDAEAICEAMHRPTMRFVEVKRVEQQDIQTTHRVRSELVGQRTAKANQIRGLVAEYGLVGPKHLSQLPAMLPDWLEDAENGLTERFRRLLAGLWGDLVELDRRVAELDEEIEAIAKSDPIAQRLQQLRGVGPVIATALVAAVGSGEQFAKGRDLAVSLGLTPKQHSTGGKDRLLGISKRGDPYLRKLLIHGARSVIHHSKDKDDGLRRWIKGLTARRHTNVACVALANKTARIAWAMIRNGTEYQPELAASPVA

SEQ ID NO: 412116 - protein, 289 aa, unidentified
MQNITLIGIDLGKHSFHIHCQDKFGKALLRKKFTRTKLMQFLATCPPPVVVMEACAGAHFMARRISDFGHETKLISPQFVRPFVKSNKNDFVDAEAICEAASRPSMRFVQPRTEPLQAMRALHRVRESLIRDKVKTTNQIHGFLLEFGISLPTGDAVIKRLSLVLAEHEIPEYLSRLLVRLHTHYLYLVEQIAELESELSQSINADDTAQRIMTIPGVGPITASLLSSQPGDGKQFSCSRDFAASTGLVPRQYSTGGKSTLLGISKRGDKNLRRLLVQCARSFMMRLER

SEQ ID NO: 412117 - protein, 307 aa, unidentified
MKKCSTVSFEGQVIFIGIDVHKESWVVNLRHCHRELDKFSMNPSPEMLAKYLRRNYPGAEYRSVYEAGFSGFWAHRRLCELGIQNIVINPADVPTSGKERDRKNDAVDSRKLARELENRTLEGIYVPPEDNLELRNLVRRETKLTGNITRVKNRIKGHVNFMGLKFGGWSGRSLKIMYADAEKRHDYALQSMLRELRFLREEKLHVIRDERQCLKRLKRDKIQGHLQSIPGVGFHTAVMLQAELWDLQRFEDKDALSSYVGFAPRLVGSGAHEVLKSAGNRKKKQLHAILIQAAWRSVLHNLEMRAR

SEQ ID NO: 412118 - protein, 387 aa, unidentified
MKVRMVNTPSADSNNEPVACYVAIELSKSGWLVGFLTPLSDKTGRYQVKAGDAQALLDLIERVHTRVARQLNRPVEVMSCYEAGYDGFWLHRVLEAHGIHNHVLDPASLQVNRRARRAKTDRIDVDRMLRALIRYLRGEPEACSVAQVPRVEEEDAKRLHRERKRLVAERVQHVNRIKGLCAAQGIYNYAPLRPDRWSQLDKLRTGDGRSLPARLKSEIVRELKRLELVLEMIETVEAERDAIIKDPRSRHLNADKIKMLARLRAIGPEFATSLTGEVFYRKFANRRKLGRYVGLDGSPFRSGSVERDQGISKAGNPVARSMMVELAWTWLRYQPDSALSIWFRERVGNLKGRPRRIAIVAMARKLLVALWRYLETGVIPTGAVLKA

SEQ ID NO: 412119 - protein, 457 aa, unidentified
MESYYMGIDVSKGYADFVILDAKKNVVEPNFQLDDTFSSHCRLFEILKRFFDRHSGSVLFAAVESTGGYENNWLHSLGGFQGALDIRSARLNPLGVRANSRASLRRVITDKISALDVAEYLIAHPEKVTYQQEDSLAGLRRQWGFVRLLVKQKTQILNQFGSLLYTANPELISYCKSGVPAWLLKLLKQYPTAAKLAKAKSTSVARIPYVTTGRAKELIDQAKKSVASATDETTGSLITAMAEQIIRMEETIRIQTQQMAKQCAIPEVALLKTFPGISDASAIGLMLEIQSVKRFSSVKKLAAFFGLHPAFKTSGDGTSGVRMSKQGRKEPRKILFMVAMVALTANPHIRKIYEEHTEKGMKKMAAIGLCMHKILRIIYGMLKNNQAYDSQVDQKNRESRTARKAPHTAKNENRRYEMFDQQAPISRRQSNKRKEWKQSQGDNITQCGIGIPIPSAA

SEQ ID NO: 412120 - protein, 326 aa, unidentified
MEYIGVDLHKQYFVATVMDEEGRVIRKDRVSTDRAAIKEYFQKEPRAKERKVAIEACYNWSYFFDEIQGMVTEVKLAHPLKTRAIAEARIKTDSIDSEVLAHLLRSDLIAEAYAPDFETRDAKNLLRYRASLSQMRTMLKNRVHATLARNHIEVPEFRELADKFGKKGRAYLREFQLRGHDTEILHHYLDLIDAIEEKIKLVDRKVKEACKRDEICRLIESIPGIGHLLAILIRYEIDDIQRFSSAKKLCSYAGLVPSTYSSGDKTYHGRITKQGNRWLRWALTEAAQMAVVKDVGFRGYCRRVEKRGGKKKAKIAIARKLLEIIF

SEQ ID NO: 412121 - protein, 451 aa, unidentified
MSRSPAPAKETESLIIVNPDAAGLDIGQDEIWVCVPADREAPAVRPFGTYTPDLNALADWLEACQIRTVALESTGVYWIPIYEILEARGLTVYVVNARHVKHVPGRKSDIQDCQWIQRLHTYGLLSASFRPVADICAIRSYVRQRAMLIAYRAAHIQHMQKALQQMNVQLMQVLSDITGKTGLAIIRAILAGEHDPRQLATLRDERCTKSEAEIVKALTGNYRAEHLFALKQAVALYDMYTTQIQECDTQLERLWQAQRPARDQDLPPLDTRDKRNTHSKNAPTYDARTLLYQVVGVDLVAISGLNVSTVQDILSDTGLDLSAFPSEKHFCSWLHLAPRNDISGGKVLRSRTLKSGRRAGQAFRLAAQAVSRKPDEFGAYYRRQRARLGPEQAIVATAHKIARAYYHVLKHRTPFRSLSADEYEQHVRQREVAHLRKKAAKLGFTIVEAPA

SEQ ID NO: 412122 - protein, 404 aa, unidentified
MIYLGIDWAEDHHDLCLLDEAGERLATAPVPDGVEGLRRLHELVALHADSADVVVVGIETDRGLLVQGLVASGYTVYAINPYAVSRYRDRHTTSGGKSDRGDAKILADLVRTDRHNHRQIAGDSDLAEAVKVLARAHQNLLWARQRHINQLRSALREFYPAMLEAFGTDLASRDALVVLGLAPTPQEGLRLTRARIRTALARAGRQRNVDATAIAIHTALASQQLLPPARLSAAYGLTVRASVALLRQFNVEIDELEAELVASFEGHPDAEILCSLPGLGSVLGARVLAEFGDDPTRYKDARSRRCYAGTAPITRASGTRTVVLARTARNKRMAQACYLWAFSALRPSPGARGFYDRQRAKGKTHHQALRALANRLVGVLHGCLIRGQRYDEQVAWPTNTKVAA

SEQ ID NO: 412123 - protein, 344 aa, unidentified
MSKHTVRSGDVAGLWARFSQLKDKVQVRTGQVVPIIVIQEAGLDGFWIHRLLQDERVESHVVDPASIATSRRRRRAKTDKIDGEALVRALLAYKRGEPRVCAMVRAPTPQEEDRRRICRERKTLTAERVEHVNRIKGLLFAQGISDYEPLLRKRRERLEELRTGDGRPLPEHLKAQIGRELDRLELTLQQIKSVETERDAMLSPSDEGTPAPGAMLKNLKGIGPEFAGVLWSEGLFRNFSNRRQVAAYAGLAPTPWRSGSVAHEQGVSKAGNPRLRTTMIQLAWLWVRHQPRSMLTLWFHQRVQSNGGRVRKVLIVALARKLLIAFWKYVTAGVVLEGAEITAA

SEQ ID NO: 412124 - protein, 397 aa, unidentified
MYIVGIDIAKRKHEAAVIDGEGAVIIKPFSFTNNCSGYNRLLAMLAKAKLPLDEVSFAMEATGHYWLALFTRLQKEGFRVQVINPVQTNSIRSFYIRQAKTDPRDALLIAEVIRFGHFSESTLHPENIYELRELCRGRHAIVSMQADVKRKVVALLDQVFPEYETAFTNMFSDTSMAILQTCPTPKELSEMPLEELCHLIEVSSHKRFRMVKAQELQELARNSFGFAMAGDVFSTMIRLYAKHLVFLKQQVQEMDRKIAEIMDTLDTPITTITGIGPTLGAYILSEIGDISRFSSAAKLAAYAGIDPTMRQSGEYNGVRNRMSKRGSPYLRHAIWLAASSAVLHDPALKLYFQKKRDEGKPYMASVGHACRKMVSIIYAVMRDNKAYTPYIPNEISA

SEQ ID NO: 412125 - protein, 414 aa, unidentified
MNSPGNTRDIQRYIALDIHKEYVMLGAMKATQEWVIRPRRVEMSHFRAWAANNLCTGDAVVIETTTNVWDIYDIVAPLVTRTVVAHARAVRQIAEARVKTDTEDIKRLLRLLIADIVPEVWVPPAHVRELRGMIAYRNRMVKTGAMIRNRLHSLLHRHNLPLAEGGLTDQKWWEAQALNTLERLQVRQELALLEKVEQNKAELDLELQKMSVGQTWGRQATRILQLPGLGVVVTMTILGAIGDIRRFEDAKHLVGYAGLGAGVHDSGKEHKDKGITKSGRKELRWALVEAAWRAIRMSELWKQRYEELKERKGPCKAIVAIARKLLVAIWHVLSKEETDCNASEEDLAWKMLLWSWSLGDEARLGLTPKQFAKYSLLRLGVQSDVTSFMRGKVLRRIAPIDEVLARAAELGIPT

SEQ ID NO: 412126 - protein, 482 aa, unidentified
MKKKNIFQNRSQQLLRLFEKAGNRLKMMCVPIDYAKKDHIVMFCNGYGDILRKPFSVKNTLEGIKYLIDQVMRSCRQRHIKKEHVFFGGEDANSYAENFANALRAKGFLVANVNAHDAKKQRETLQASTDRIDLMGIATMLLNLRAKCSPAQDGIYRNLRTLVRHRKKLVVMKTEVKNRVHTLVDRLFPGFLNEKNTGINPFSESSLVLMQDRFSAQQIRRRQQRTLIKIFKRCATPDAESLAAKLHNYAVQVIATPDEYAATLQLSLQHHIKHYRCLKENIDQLLTEIAFLLSQTQGAFLTSIKGVGIVLAAGVSSEIGNPFEQKPLNNLTSYCGIIPRVYQSGGIEGHTHTGRVSKRSNHILKDYVVQSALQMGLRGPEPLLQDYKRREATGQHAGFGIGRRFLRMGMCLMRSSQVYLPPKLRNPEAQMQERAGYYLTMWPLFRDKWKKAHAHQVAFAKDQPLGQWRQMVQELYDIKLKL

SEQ ID NO: 412127 - protein, 347 aa, unidentified
MHFYEQHHQHYCGIDLHASSMYLCIQDDRGTVLLHKNLPTCPEAFRAAVAPYREDLAVAVECMFSWYWIADLCAQMSIAFVLGHALYMKAIHGGKTKNDKIDSKKIASLLRAKMLPVAYPYPQATRSTRDLLRRRMYFMHHQSELLTHIHNTNTQYNLPGFSKRIDRHSNRIGLPELFPDPMVRKSIEADVLLLDVYHAILLKLERQVLEQARQHDPVLLSLLRTVPGIGKILALVMIYEIHDIRRFPRVGDFISYCRLVKPARESAGKRQGSKNAKIGNVHLKWAFSEAACLLLKASSPAKELHQRLVSKYGKAKALSIIAQKLGRTVYSILKHRQPFDPEKFFDS

SEQ ID NO: 412128 - protein, 317 aa, unidentified
MATREPLWIGIDTGKDELVIDDGRRTITVSNTSAAIRQWLKQLPGPARIGVEATGTYHLQVLELASEKGHQPYVIDGFRLNRYRDVVGDRAKTDLTDARLVRRYLRNEFDELRPWQAPPVAYTRLKSLLRRRAKIVQARTALRQSLAGVPELRAVSRGLLEGINGALAQIDRLLKRWVEKAGLQDAVRRLDQIEGIGPLVAAAFATSYLRGEFRSSDAFVAFLGLDVRVRDSGKRVGQRRLSKKGDGEMRRLAYIAAMAASRSGRWKEQHLANQARGLSRIQSLVIIARKLVRLAFALLKSGEEYRPQLPQGATATT

SEQ ID NO: 412129 - protein, 325 aa, unidentified
MTNETREPVYVGIDVSKDSLEVALADKAASVRFANDEQGVKALLEHLAGHNVAVVLLEATGGLEKRCAHALYLAGMTVVVANPRQAHEFAKSMGYLAKTDGIDARILSHFARTLHGSERFDKLQFKMATPQQEQLQALVTRRSQLVQMRVAEGNRLNQAHALSAKSIQAVIKTLDKQIKALDENIGNRLKQHFAQKLKLLEGFKGIGEGTKAVLMAALPELGQLNRREIGKLVGVAPLNHDSGKMRGKRSVWGGRADVRSALYMAALSAVRFDPTIKAFYERLRAAGKPPKVALVACMRKILAILNAVIKSNTAWEQRCPQESAA

SEQ ID NO: 412130 - protein, 322 aa, unidentified
MRGTSFAGKPDYKDGQWKVGPSYYCGGFMDIVGIDISKATFDAALLLGKRVRHAAFSNSEAGFEQLLIWLAKHRPDPAIPLYACMEATGNWGLELADFLHAQGVRVSIVNPARIKAYGDSELARNKTDKLDAALIARFCRAQVPPAWVPAAKHLRELRELVRRCDALKSARVQELNRQKAGFASPAVARSIAAHIDWLDDQIETVMDEVRHLVAADPELSRNLALVRSITGFGEVSATILLAELPNIADFTPKALAAFVGLSPGEHSSGTSVRRPGRISRVGTERLRSTLYMCALSAKRKYLLNPVGARIGLRVSCGQPDRH

SEQ ID NO: 412131 - protein, 470 aa, unidentified
MSKSKSKSSRKPGKNRPAAPRRINPNTAGIDIGAEELFVAVPADRDPDPVRRFLGFTEDLHALARWLVACGVTSVAMESTGVYWIPVAHILEPYGLDICLVNAHHVKNLPGRKSDVQDCQWLQELHSYGLLAASFRPADQICVLRSYWRHRARLIQYAGAHIQHMQKALVQMNLQLHRVISDVTGVTGLRIIRAILTGERDPQRLAALRDFRIKASAQTIAKALVGDYRPEHLFALRQAVELYDVYAARIDECDQQVQAYLKSMDSRVDPAVVPMPPSTRTNRSKKPQRNEPFFDLRLEMYRVTGVDFTQIEGFDALTIQTVISEIGLDPSRFPTCKRFTSWLCLCPDNRITGGKIKSSKTRPSANRAARAFRLAAQSLSNSQGPLGCFYRRIKARIGAPEAITATAHKLARIFYRLWSDPASYDPTRLDYYEKKNQERTIRYLEKKARSLGYELVPQGASGSPATTAVS

SEQ ID NO: 412132 - protein, 377 aa, unidentified
MKAPSTRPAAVLGLDVGKSSHWACLVDRDGEVLASAPVRNREAELDALFASAPAGTLVVVDQFRNIGSLAVRRARAAGLAVAYLPGLAASRAAGLFAGEAKTDERDAEVIARTALGVPDSLSGVPGRGEALEAARALSSQRDHVVACATRDKNRLRAVLLESCPALEAAVDLSDRRWLELLAGFGGAWGIARSGAEGPQAEAAGEAAAASTAPPPALVEAENRQVRFLAARISEALDEAGALEAETAALLEGDETYACLLTVPGIGPRTAAQLAVSVDIARFPDHDHLASYCGIAPRVRSSGTSVRSVRASRRGDARLKSLLIFSCNSLVRSSGRYGEYYRACRARGMGHGRALKAVARKRLRAIYAVMRDRVPYRE

SEQ ID NO: 412133 - protein, 425 aa, unidentified
MNYKQNEKINQVKESTLVVGIDIGSTTQYARAFDWRGIELGKVFTFSNSREGFEAFKAWMQHLQDKYRKSDVIVGIEPTGHYWFDLGAYLEDEGILLVMVNPYAVKQTKELDDNSQSKNDRKDPKVIAKLVTEGRYSAPYTPDGVYADLRIMVANRKRLIREMTQIKNRFARWFAIYFPEYTDVFGDYEAQSSMLLLKKVCTPEAIVELGAEKINQIWRDAKLRAVGMKRATTLCETAKRSIGLKKGSSAAQYEMKLLLEDYEYKKAQLDAVMEEIEKLCRKIPESEQMLAIKGIGVITVAGFLAEVGDVRRFESPRQIQKLAGLSLRENSSGKHKGQTTISKRGRSKLRAVLFNAAIPLIAKNPEFKSLHEYYTTRANNPLKKKQSVIAISCKLIRVFYAILANGVTYDPQKMLSDIHRQPQAA

SEQ ID NO: 412134 - protein, 371 aa, unidentified
MDESTKMLFVGLDVHKDTIAVAYAPDDRGADVVSLGIIGTRQCDIDKLIRRLESKGATLVFVYEAGPCGYWLYRYLTRRGFGCSVVAPSLIPRKAGDRVKTDRRDAVTLARLRRSGDLTSIYVPSVDDEAIRDVSRGREDTMRDLKRAKVRLKAFLLRQDLRYEGRANWNAAHLRWLSRVVCPTPAQQIVFQEYVRAVTEQTERLQRLERELHELVKGWRLYPVVEAIQALRGLELTGAIVLVAELGDLTRFDTPRKLMSYLGLTPSEYSSGGRRRQGGITKAGNGHARRVLVEGAWAYRYPAKVSRHLQLRLEKVPAEIQGIAWKAQVRLCKRYRQLSARGKHANQVVVAIAREMAAFAWAIARTVPVAA

SEQ ID NO: 412135 - protein, 320 aa, unidentified
MEKLIFDQVVLVGCGIDVHKDIIVATIRKSEKEYETKEFRSYTSSLTELREWCKSEGVTHIAMESTGVYWKPVFNILEEGDFEIILVNARHVRNVPGHKTDKKDSQWLSKLLLSGLLKASFIPPVEIRDLRDLVRYKKKIVAQASSEKNRIIRILEDANIKLSSVLTNVDGAVGSRIIDDLIAGNTKVEQLMEHYHGKIKVSKAEFRMALQGRLTPHHQFMLRVIKESLTDKEKLIAKIEKQIDELAIQYSVEIELLQTIPGVAYDSAVSIISEIGADMKQFSSEQHLSSWAGMSPGNNESGGKKKAQPPSTETNSCNQP

SEQ ID NO: 412136 - protein, 475 aa, unidentified
MKIVYPNCCGVDVHKNMIVATVAVTDKNGVTRYSAETYTTLNKDLFRFRDWLISLGCKDVCMESTGKYWIPVFNILEQSGINVLLTHPMYVRAIKGKKTDKKDSKWIADLFKHDLVYPSFIPPSEIRALREIARYRYKLVCMRSSEKNRYQNCMTVSNIALASVLSDPFGKTAQDIMKQVLASNVFDEAVYEKLIQKSAKKKTELILDSIRDCNIQSDQRFKMNEVINHVDYLEQSIIRTETELFARMQPHMDIIRHLATQVPGVSMLSAALIISEIGVDMSVFPTAKNLVSWAGLVPTNNQSAGKKKSVRISKAGQFLKPLLVQCVLAAVKDKKQPYFAIKYQNIKKRRGHKKAVIAVARMMLTCIYHLISTGEVFNPSDLLNVVKPSSSKRVPLNEKTAIAFLAANGYDISSLVKLSAPELPSAVVLPAVILSVFVFSSACGYQVFLSCLSPALRATFDFTLSFPFRRFSSRG

SEQ ID NO: 412137 - protein, 380 aa, unidentified
MSRQQTALAVKLSALMNKETISSDIISAASLVNYVNRVLNLGLDVHYRQVTVAMQEDGGRIKAAGKMGHVDFLNWVQKKLQEGWQIYSCYEAGASGYWLHRELVKLGVKNLVVAPKAMGQGGKKQKTDKRDAGELCDCLDRYLRGQDKALSVVAVPTEEQEEKRALIRYHRQIMADRGRCEARGKGLLCAQGIEVHGRWWHGDTWLEVQSDPRLKDWMKEQLIGWRNKILSTDEEQGALRERIAALAPAILPKGVGAYSAAVLHYEMRGFERFTNRRQVGSMTGLCPGIHQSDGRGKEGSINRCGIGIVRWTLVEMVWRLMIWQPQYPPVRRLATGLVKGKRARKRLVVQAARRLAIDLWRLSTGQTTPEKLGLIMHSAK

SEQ ID NO: 412138 - protein, 384 aa, unidentified
MGEAQGRGPPWSPNGIDVPEWRCSVTTRGTGGSTMNVTTYGLDLAKRVFQVHWVEPETGELKRKALSRSDVSVFFARRQPGVVAMEACGSAHHWGRRLRDLGHEVRLIAPQFTRPFLKTNKTDVADAEAIWEASQRPGMRYVALKSEEQQAVLSLHRIRAQLIKVRTMQANQVRGLLYEFGMVVAKGWRVLLAEVAPVLAEGGRGLVPELVRRELLTQVEGLRMLTSRIHELERQIGAWQRRETECRRIAQVPGVGQLTATAVVAMVGDARTFRSGREFAAYLGLVPRQWGTGGRVRLLGISKRGDPYLRTLLIHGARAVVLQQSRADREQDPWLKELLSRRPKNVAIVALANKMARTIWALLAYGREFDRSWSRAQMPAAAQS

SEQ ID NO: 412139 - protein, 412 aa, unidentified
MLWGERRGYGTFGAVERLPMERPMSQTFDASRSLTALEQDNTLIAVIEMSQSTWLVAAVVPGMKRQPLKKLDTDEEALLKLLHRWRNEAGQGRRQIKRIVVAYEAGRDGFWLARWLRARDVEAYVIHPTSVAVSREHRRAKTDRLDTELLMRAFVGWLRGEKRHCSMVAIPTAEEEDARRPNRERGNLVTEQTRIVNQIKAILARFGMRTFRPTLRKAEEKLEGLRTAEGTPLLENTRAELRRYLARLRVVREQIRAIEQGRLRKLAAVPAGEIGPHAMVRLIARVLGVGVETADMLVNEILSRRLRDHKAIARYAGLTGSPDESGRRRRERGLARAGNARVRCGMIQLAWRFLRFQKDSALAQWFQARTADGRGSTRKTMIVALARKLLIALWRLVTMGEVPQGVVLRPAS

SEQ ID NO: 412140 - protein, 370 aa, unidentified
MKYVGIDLHTNRFTCCYLFDDSKEKQMETFELDPEGLRKFYSTINKDTYILVEATVNTFAFISLFKDLVKEVIVANTFQLKSIGIAAKKTDKIDAVKLAEKLKVQVISGVQQIVPVTVPPKEIRDLRALFATYRVLRKEIGITKNRIHSLLKENLFPFTKEYIFGKKARIEIRNISRDITLSFQINTLMDTLEYIEKKFDELNDEIKKAGAVFMSQIEILTSMTGISVITAIAVIADVSDISRFRNSKHFASYLRSAPRVESSNDKTIIKSTNKAGRKLSITLLSQSLNHFRDSNRNLCNFYERAKIFKKKEVVRMALCRKVITQIYQMLKKQEYHYFCNPVLHEKKMAEYKKFLETENIIFSKNYKFAA

SEQ ID NO: 412141 - protein, 343 aa, unidentified
MKLSRVGVDLAKNVYQLHGVDRHGKTVWKRRLKRHQWLKVLLDHTEPDCVIGMEACASAHHWGRELQSRGYTVKLIPPQFVKPYVKSNKNDAVDAEAVCEAMSRPNMRFVTVKTVEQQDIQATHRIREELKVRRTAKANQIRGLVAEYGLVAPKQLSSLRAAIPCWLEDAENGLTHYFRSLLQGLWDDLLILDDRMCEMDKTIKRLAKDNEDCVRLEQIRGVGPMISTALIATVGDARQYRKSRQMAAAIGITPRQHSSGDRDRLLGISKRCDVYLRTLMIHGARSAVTAAKHKDDPLSRWVTGIANRSHPNVATVALANKNARMAWAMLRNKTDYNPDFAVR

SEQ ID NO: 412142 - protein, 342 aa, unidentified
MAISTIGLDLAKSVFQVHAINDAGEVIVRKTLRRSQVLSFFAKLPPCLVGMEACGTSHHWAREILKLGHEVRLMPPAYVKPYVKRGKTDANDAEAICEAVTRPTMRFVPVKSPEQQAALALHRTRDLLVKQRTQLVNMIRGVLAEFGIEMARGLHHALALAKRLMDGDAAEVPTLAQRVVASLAHQIGAVQEQLASLEKELVAWHRSSDLSQRLATIPGVGVIAATALAASVSEPERFRSGRQFAASLGLTPLQQSSGGKEKMGRISKMGDRYLRRLLVVGMTSLVRRARTAPASVDPRIPAMLERRPARVVTVAAANRTARIAWAIMTRGGSYRKPVPAIA

SEQ ID NO: 412143 - protein, 349 aa, unidentified
MTIVEDRPVITGGVDTHADLHVAAALDPLGGLLGVQEFPATATGYAQLLGWLGGFGGIALVGVEGTGSYGAGLARHLAAAGVRVVEVDRADRQDRHRQGKSDPLDAVSAARAAQSGRASGAPKGRDGAVEAIRALMVAKRSARAGRTQAINQARALIVTGPDELRARFAGHRPAQLVEAIAALRPRPGDVPGYATRVALRELGRRAQFLDAQLDRLDEVIGPLVTGRAPGLLRLHGVGPDTAALLLIAAGDHPERLRSESSWAHLCGVAPIPASSGKVSRNRLNRGGDRQANHALWRIVITRLGSRPGHPATRAYVTRRIKEGLSKKEIIRCLKRYVAREVYHQLRAGA

SEQ ID NO: 412144 - protein, 478 aa, unidentified
MDTTPQPTPPATVWIGLDVSKDVLEACLLTETGKPQYKAFPNEAAGHQKLLRWVQHLAPEPTRHFALEATGAYSQAIALFLADAQQRVSVLNPARVKYGGIAMGQGNKTDKADARVIAHYCRLHAPPVWREAAPEVRHLRALVRRQADIRALLAQEKNRASVPGLLPAVRHSLERSLAYLEGEVNELQRQIEEHIRNVPSLKTDRDLLTSVPGVGDGTAQILLAELPDVKQFDSAEKVAAWAGLCPQECRSGSSVRKRTRLSKAGNGHVRKALYFPAISAIRHNPLVRALYQRLRDAGKSSMAAIGAAMRKLLMLCYGVLIAVPDRIERLSWMPLSPISVIPRRLPYGSGLAEDVEEKPDGSTPPGRAIRTATSLRRTGRSRLQPRLDNILSGRRSPRPSKMASEEESGGVASGAKADVLPAPSLPLRGTVSLDGALPNAPPSRRSPTGGALERVCEEAPAARVSLGSSGVAAYRHDN

SEQ ID NO: 412145 - protein, 366 aa, unidentified
MTDGSKGTLKMTAGLDLGDRYSYLCLLDNESGEVIEEGRLRTTPEAFKRRFDSERLLRIAIEVGTHSPWVSRVLKECGHEVLVANPRRLPLVYGERRKTDKLDAEKLARLARVDPKLLAPLQHRGEASQAHLALIRSRQALVNTRTQLVNHVRGSVKSFGGRLSRCSTASFHKKVAEQIPQELRPALEPLLETIASLSACIQHYDRELETLAQEHYPETKLLRQVQGVGTLTALTFVLTLEDPERFEESRQVGAYLGLTPSKDQSGERDLQKRISREGDEMLRRLLVGSAHYIVGPFGEDCDLRRHGLKVVGGAAGKNARKRAVVAVARKLSVLLHRLWISGEVYEPLYNAQRSKDRAASEDLCIL

SEQ ID NO: 412146 - protein, 429 aa, unidentified
MNLRPIAGIDVGKFFSEMAILSPSNEVVARMKIHHDSSADVKRAIELLEKMEKDFASRPFVVMESTGHYHKILFHSLCRAGFEVSVTNPIQTDSIKNIGIRKVKNDKVDARKIALLHRFQELKSTNIPNEDIECLKNLCRQYYKLSDELTVYKNRLTGIVDQVMLIFKDVFPNSFSKAAIAILEKYPTPEHILKANKDDLVSLIRENSHKSLEWSTAKYELLVSKAREFAPLSINNPSNVAMMGVYISMIKTLDENLAKILKAIRQLITEDMAKDTPMLSLTLELLQSIPGIGLLTAATILAEVGDFSAFSKPGKLVAYFGVDPSVMQSGEFIGTRNKMSKRGSRLLRRVLFTAALANIRTKRDKKPCNPVLMEFYKRKCQSKPKKVALGAVMHKLVCIIFAILRDRKPFELRSPQKHAQMLAAKREAA

SEQ ID NO: 412147 - protein, 342 aa, unidentified
MDHIGIDVHKRESQICIVTGDGEIVETRIRTERERFASVLGGRAPSKIVIEASTESEWVACCLEELGHEVIVADPNFALMYATRSRRIKTDRRDAKALADACQHGHYRPAHRTSSEQRRVRSLLTVRETLVRTRTRMIVVCKALLSRQGIRIATGESEHFVTRVRAEGLLPSVQDELEPLLVVLEQLQTQVDTLDAAIARLAKEQAPVRALCTVPGVGPVTAAAFVAAVDDAKRFRRAHQLEAYLGLVPSEHSSGEKQQRGSITKAGPPRVRSLLVQAALGLLHHRQPSSASLRDWALKIKQRRGQGIAIVALARRLAGILWAMMRDGTTYRSQVSQPVRSA

SEQ ID NO: 412148 - protein, 326 aa, unidentified
MVRFHKAGLTKMIQTNITTAGIDTSKAKLDIAVHGRTERWQVANALPGWRALAANLAEAGVTRVGIEATGGYERGVVEHLRAAGFTVLMLQPLQVKAFGRIHLRRAKNDALDAVLIAACAAAVDPPEIAPDPRLTELADYLTFLEQIEEDIRRFKTRLEHIDEPTLRRIVNSDIARLKARKTAQMRDIAKRLRSHDDLAKRLKLVLSIPGIGERTALAIVIRMPELGRVSREEAAALAGLAPFDADSGQHRGQRKIAGGRSRLRRSLFAAALPAAFRWNKALIALYARLMAKGKVHNAALIACARKLLIYANTVVQRGTPWTEKAP

SEQ ID NO: 412149 - protein, 352 aa, unidentified
MKEYIGCDSHQRYSVFVRLNEGGQAGAAERVENDRATMRQYLRRLPAGSAVAVEASGGWYWLVDEIEAAGLIAKLTDPKEAKQRMRGRNKTDEIDARGLAYLLYDERLPEVWIPPAELRDLRGLLRTRLSMRRVTTSLKNRISAAIRRYGLREDECSDLFAGTGRVHLSSYIGWLPLQTRFAAQEEWALLDETEKRIKRLEDRIADRIGKVGWVRMLKSLPGVGDILGATLWLEIGDVKRFHSAEHLASYAGLTPTVFSSGGKTHMGPTPKSANHYLKWAFVEAASATIRQKNKYAFTHVGRLYERIKNQKCSAKAKVAVGRHLAEASYWILTRKQFYREPAPALVASSSNG

SEQ ID NO: 412150 - protein, 375 aa, unidentified
MGDGPMNSTIFVGLDVHKATVSVAVAEGTRGGEVRSFGTVANRAEAIEKLVGRLARDGYRLSFCYEAGPCGYGLHRQLTALGHECVVVAPSLIPIRAGDRVKTDRRDAVMLAKLHRAGELTAVWVPDGAHEAMRDLIRARATAVQVLGKARQHLQGFLLRHGRVYPGKRGWTQAYRRWLTTVRFDHPAQQAVLQDYIHAVTDAEARVARLTRQIEGLVAEWSMAPVVAALQAMRGVAFLVAVTVVAEVGDFSRFANPRQLMAYLGLVPSEHSSGASVRRGGITKAGSGLARRILIEGAWSYRMPARVSRKLYDRIEALPQAVRDIAWKAQARLRARYRRLTAAGKAKVVVTTAIAREMVGFLWAIAREVQPRPAS

SEQ ID NO: 412151 - protein, 350 aa, unidentified
MQLHTVGIDLGKTVFHLVGLDERGEVVVRKKFSRKQLLHFTANLKVKLIGMESCGGSHFLGRALREQGHEVRLMPAQYVKPYVKTNKSDYIDAEAIAEAVGRPKMRFVPIKSDDQLDLQSLHRVRERWVMRRTAVINQIRGLLLERGITVRQGRRHIDAALPGILEDASAKLSGALRALLAQLRLELDHLQMRIDEADAVINKAAGENEACRRLVAIPGIGPVTATAIIAAIGNGAAFKKGRGFSAWLGIVPGEYTTGGKQKLLGISKRGNSYLRRLLVQGARAVLQQRAKQSSGLSAWLAQLTTRAHSNVAAVALANKLARMAWAVLAKNEPYRPPVVVSAATAELACR

SEQ ID NO: 412152 - protein, 400 aa, unidentified
MKETKTPMNAIVHYIGLDVHKETIAVAIAPGATTEVRNYGIIGGTLEALDKLIRKLSLQNIQLRFVYEAGPCGYVIYRHLKSKGLHCDVISPSLIPKKASDRIKTDRRDAEQLARLYRAGELTAIRVPDQEDEAVRDLVRARHCAKDEQRRARLRLKGFLLRLGYRYTGKSSWNDAHKRYLSGLLMPQPPQQIVFQEYIHAIDAASERLQRLTQSMEDALLGWKWEPVVRALMSLRGVQVLTAMTLVAETGDMSRFTDPRQLMNYFGLTSSEHSSGGKRVQGGITKCGNNHCRHVLTEAAWHYRLRPLVSEAMQKRQEKQSKEVRLMAWKAQQRLHKRFKRLCVRKKSVVAATAVARELTGFVWAIACAVKPAAQPAQPEVLRTCRGRVYHLNPHTKYKK

SEQ ID NO: 412153 - protein, 344 aa, unidentified
MKGVTTIGIDLAKNTHQLHGVNAQGKTVLRKTLRRDQVVPFFATLPECLVGMEACGGSAYWARKIEECGHTVRRIHPRFVKPYLLAGKNDANDAAAICEAISRPRMRFVPAKSQEQADIQAIHRVRRGFVQARTAAINQARGLLAENGIVVRQGPSQLRLSLPIFIGDDSNGLSEIMRRLLRSLYEYIVFLEASISTQDNILKGIAKENEACKRLMKVPGIGVMTATILLTMVGAASDFKNGRQFAAYLGLVPRQYSTGGKQRLLGITKHGDSYTRTLLVQGARSVLRALQFSRHPLVRGGPGEWLLQLVDRRGTNRACVALANKTARIVWNMLHTGSEYKNVA

SEQ ID NO: 412154 - protein, 317 aa, unidentified
MYNVNKEEYFAGIDVSKSHLDLGLSASGQFERFNNDETGVAGLVASLERVRPVLIVVEATGGLEMLVVAALRVAGLPIAVVNARQVRDFAKATGRLAKTDKLDALVLAHFAQAVRPAIREGRTDAEQDLVEQVARRRQLVEMRAQEKARLSMAGARQKASIKEHIAWLDERISDLDDDLKTILKASDIWKERVDLLQSVPGVGPVTTLTLLSYLPELGRLNRREIAALAGLAPFNRDSGFQRGYRMIWGGRAEVRSVLYMATLSAVRGNNSIASFHKRLVEKGKPAKVALTASMRKLLTILNSMIKQNKHWSCPQNA

SEQ ID NO: 412155 - protein, 306 aa, unidentified
MNQTIYRGVDVSKQLLEVDGLPRPIKNEEASIGAWLAALPANVQLVCESSGGYEQVLLRTAWQADRKISVVMPRRVRAFAQSCGQQAKTDRLDCALLSRFGTERRPCASVAPNPVRQRVRELLRAREHVLALQLLEHNYREHLPQQPSLQQASEARLGSYTEQLKALEQQIEVVLNAEAPAKREVARLRQVKGVGKITAWTVWADLPELGQLEPGQPAALCGLAPYPDDSGDCRRPRHIQHGRATLRRVLYMAALSASRHNPVLKFAYARLRARGKPAKVALIAIARRLIELLNRLLKDPNFVLAS

SEQ ID NO: 412156 - protein, 339 aa, unidentified
MNITTVGLDLAKNVFHVVCLNKHNKEVKKRMLRRNQVRQFFAQLPACTVAMEACATSHYWGRELLALGHNVKLIPPQHVKPMVQGNKNDYNDACAIAETVNRPKITFVAVKTIEQHDMQAIHRMRAQCIRDRTALSNSTRGLLGEYGISFSKGLATLRRKIPELLEDAENGLSMRFRHLLARRYEQLVELDGHIAFYTKELELLSQQDEACQRLQTIPGFGPIVASAFRSTLGDGSAYPRGRNAAASLGLVPRQYSSGGKNVLLGISKRGDRYLRKLLVHGARTVVLHAANRDDPLSRWINRIRERRGYNRAAVAMANKMARMGWAILRNNTSYGPTLV

SEQ ID NO: 412157 - protein, 333 aa, unidentified
MNKKWFIGIDVAKLTLDVAIHSEDGKLDENYKRVINDIKGFNDLLKWLKKKRIECSETIFCMEHTGVYGLEIQSFFERNGIDYCVESPLQIKRSLGLVRGKNDKIDAFRIAWYAYTFRKKIKMSHLPNETIANLHRLLIERKHYVRQIASYKQQVSDLMKYETALAVQRKQKVMSHLSEVLSDVESQINAIVTLDTEIQHNYKLLLTVPGIGHINAITTIVNTQNFTSFNNARQYACYIGVAPFEHTSGISINGKTRVSKLGNKQAKVELTQAARSAVVHDPGIKAYFWRKFSEKGSTRDAYGVVLNAVKFKLLLRMFAVVKRDSGYIKLAYA

SEQ ID NO: 412158 - protein, 338 aa, unidentified
MTIVMGLDQHRAQITAEWLDTATGEVARKRVAPADRAGVRQFAARFRGHELEVALEATTGWRFVVEEFVAIGARVHLAEPAETAARRGTKKRAKSDRADARHLRELVMVGRLPESWIPPEHLLELRARVRLRHTLVDQRREWQQRMQATLYHHGVPARSWLLGAESRAWLAGLQLPPAAREQITVALALVDAHNVQLVPLDQQLRDYAKRQPGCRALMRHYGIGPLTSITVLAELGDARRFSSSREAVRYAGLDITVHQSDARRAPGHLSRQGPSALRWALFEAAQCARRPASPDHDYYVQAAARLGGNRACLAVARKLLKRSYHTLRELGEEALQPT

SEQ ID NO: 412159 - protein, 433 aa, unidentified
MFEPVEEELFVERIAGLDLGKAGLEACVRVPDPGRPGRRTQQIRSYATTTARLLELADWLRCEQVTVVVMESTSAYWKGVYYVLEAEGFDCRLANAREVKNVPGRAKTDKADAAWLAKVAERGMFRPSLVHPEPIRRLRDVTRYRRLLIRDRSRERQRVEKLLEDAQIKLSSVITDLFGVSGRAMLDALAAGRTDPATLADMSRGSIRGKISVVKEALTTRFFTAHHAMLLGMMLDNHDRLDTQITVLDTHIEELVAPFSRQVEQLTTIPCVGSSTAAELIAELGVDMTRFPTSKHLVSWAKFCPNTHESAGKTKPKGRGDGNPWLGATIGNTIGTLTRTQTFLGARYRRIARQRGKGKAMVAAGNSLLTAIYHLLADPAAEYRDLGPQWHDTLTNPDRRARHLAAALEAVTGQTITITDGKAHIHDTNPATT

SEQ ID NO: 412160 - protein, 373 aa, unidentified
MQKTLENLSLVNLNNYLYLGVDTHKDQHTIVGMNCFYQIIYQKEITNSEENFKQLVKEVERIKDNRSLQPVFGLENTSSYGARLAQYLYLRGFLVKTVSPVLVERERRYQTHPEKSDSQDASGVARALIQRIGKLPSFSISKTEEIANEIKELVVDREFLVKEQTRLKNQLHRLLHKAYNSQYRARFKNPFSGRALRYWLKSSLKLDSLLLKNQVRRKVKRLMDIKNEVKEIEEELRILVGQTGQKIETLNGCGLVLAACLLAEIKNIDRFRSADALAKYGGFCPREKSSGKKIKHIKTKAGNRKLNKAIHRIALSQIGRNGNIYSKTYFKKKISEGKSKAQALCCLKRRLVDIIFMMLKYREEYSYSEEILT

SEQ ID NO: 412161 - protein, 348 aa, unidentified
MPQNPSSSMAVIGIDIGKNSFHIVGLDARGAIILRQKWSRGQVEARFANMPPCLIGMEACVGAHHLSRKLKAFGHDARLMPAKYVRPYSKGQKNDFRDAEAIAEAVQRPTMKFVATKTADQLDLQALHRVRERLVSQRTGIINQIRAFLLERGVAVRQGLRFLRAELPRILAAPPDVLSPRMVRVIEGLAEDWHRLDERVDHLSGEITALARQDVGCERLMSVPGIGPIISSAMVAAIGTGDAFSKGRDFAAWLGLVPKQISTGDRTILGKISKRGNRYLRVLFVQAAWVVLIKPKSWERHGLKHWIEAAKKRLHRNVLAIALANKLARIAWSVLANGRIFEARLQAA

SEQ ID NO: 412162 - protein, 350 aa, unidentified
MNATTVAVDLAKNVFELALADGHWKIVERARLTRAQFERWFDNRSVRLVVMEACGSAHYWARTLRARGIEVRLLPAQYMRAYVKRNKTDAADAQALLEAARANDIRPVAVKSVEQQALQALHRTRSGWMSTRTRRINTLRGFCREFGLVVPEGAATGLACMARYIADDRSGLPELLRPSMRLMLEEIRLMEARIGQLEQQLRALAKQSPACQVLQSVPGIGLLTSTAMVAAVADPRSFDSGRRYSSFLGLTPREYSSGNTRHLGRISKRGDRYIRMLLTHGARSVLRAATVAHRAGRPVDRLKSWALAVRARTNHNKAACALANKLARIAWAVWVKQEKYQSASIEALSV

SEQ ID NO: 412163 - protein, 448 aa, unidentified
MQQPIEVDVDESQQVVARVAGIDVAKATGMICTRVPHASIAGRRVTKVWEVKATTKGLLELSDHLVGQGIERVVLESTSDYWRAFYYILEAAGLTVWLVNATQVKNVPGRPKTDKLDAVWLAKLAERSMVSPSFVPAEPMRHVRDLARARFDLVEDRTRVKQRVEKVLEDALVKIGSVLTDIHGASGRAMIDALIAGERRPEVLAEMAKGRARARLGALAEAVDGRFTDHHACLARMLLDQADDLAARIEVVTALLDQAIAALPAPAGASRTDAATGELTSASAKFATAVERISALPGGGPGSARAVIGEIGLDMAVFGTPARLCSWAKVSPRTVQSGRTKAKAVTGKGNPYLKAALGQMATGAAKTDTFLGQRYRRLAKRMPKAKALAALQRSILVIIFHLLADPTATFEDLGADYYDKRVDKQRHTANLVRQLEALGHRVTLTTAA

SEQ ID NO: 412164 - protein, 406 aa, unidentified
MFIGWDWATETHDVTVMDASGKRVDRWEFPHTEEGFATTLARLRGHGAPADLPVAIETTRGLAVDRLLAAGHPVVPVHPNAFHAMRARWGASKAKTDAGDSFKLADYLRTDGHLLPRLQPTEQATLALQSLTRTRADHVESKVAAVNQLTALLDEHWPGGKAVFAKLDSDIALAFLDRHPTPGSAAKLTAGRLAAWCKRRGYSGKKPGSVLIERLRAAPAAASRLSEAVVERLVRVQVQLVQGIRATIRDLDKAIAEAVATHPYAPLFAAMPRIGTVSLAQVIGEVGPLLERARACEQLIAEAGVVPVTRASGKSRAVALRFATNRRARLALTQFADNSRHGSVWAARIYNDARARKKRHPHATRILARSWLRVMWACWRDGTVYDPATHQANGKIVTVSEAPLAA

SEQ ID NO: 412165 - protein, 339 aa, unidentified
MENVPVFVGLDYHRQSVQVCVMDEAGRVLSNRSCGNSVLEIAAALRPEWTVRRAAIESCCGAADLAEALIASLRWPLSLAHPGYVARMKHNPDKTDYADAKMLAELSRAGLIPPVWLPPKSVRDLRLLVRLRADLVAGVRAVKTRLLSVLRQQRIAEPRGFGRWCRKWLAWLGSEECALSEQGRFAVGVYLDELDALRTRIAKVEARLRDATVGDDLVARLLGIKGVGEVTAWTMRALIGRFDRFVSGKQLARFCAVTPRNASSGPRVADSGMIKAGDPQLKSVVIEAAQRLRRYEPRWRELSESMAQRGKPTSVIIGAIANRWLRGLYHAMKEVPMAA

SEQ ID NO: 412166 - protein, 403 aa, unidentified
MNAVGIDVSKGKSMIAVIRPFGEVVVKPYEVRHTASELRELAQSLKSLDGETRVILEHTGRYYEPVAQLLHDAGIFVSAVNPLLIREYGNNSLRRVKTDKADSLKIARYGLDNWAELREHTPMETIRYQLKYMNRQFNLYTKSKTAFKNNLIALLDQTYPGVNTFFDSPARADGSQKWVDFAAAFWHVDCVRGLSETAFAERYRKWCKRHSYNFRASKASEIYAESRELVAMLQKCPSTKLLIQEAITQLNSVSKAVEVFRAEMFRLAQQLPEYPAVIAMYGVGESIGPQLMAEIGDVRRFSHKQALAAFAGVDPMPNQSGTYEAKSTSSSKRGSPDLRKTLFVLMTVLLQNAPLDDPVFQFLDKKRAEGKPYHVYMTAGCNKFLRVYYGRVREYLNSLDTAD

SEQ ID NO: 412167 - protein, 344 aa, unidentified
MDHFAGLDVSVKETSVCIVDDAGKIVREVKVASEPEALLAVLKNPVYHFRRIGLEAGPLSQWLYSALAEAELPVVCVETRHMQALLKAQINKTDRNDARGMAQMMRVGLYRPVHVKTLRSQKLRMLLTHRKLLQSKAIAIENDLRGTLRNFGLKVGMAGTVKFETRIKELVGNSPELAALVEPLLVVRRVLREQLVILHRRLLAIVRDDEVCQRLMTTPGVGPVVALTYRATVDVPARFRKSKSVGAVFGLTCSKYQSGEIDRSGRISRCGDEMMRVMLYEAAQSMLYSKKWSWLKAWAMQIARRRGMKKAIVALARRLAVIMHRIWVDGTEFRWTRGQTAAAA

SEQ ID NO: 412168 - protein, 337 aa, unidentified
MDKIAVCGLEVSARELVVAMEGKTVQRVANTAAGHRRLLATLTRGGKRVRVVMEATGMYGMDAALVLSGSEGVQVMVANPRSVRDFAKAMMQRSKSDPLDAQVLREYGARMPFRAWQRPSKNRLALWAITRRIEALSAQSRAEKNRRHAAEISQVTPACVRRDIARNLRQFEQSLRRLRQEAQKCLAEEAELRRQFQLLLSTPGIACSSALQILGELAVLPADRDIRQWVAYAGLDPTEYRSGESVRRQSRLSRDGNRHLRSALYMPALVAIRWEPHLRGFYEHLVQRGKRKKQALLAVARKLLHAIYGMFRNNAPYQGQRVFQLRPLPAPPAQIYA

SEQ ID NO: 412169 - protein, 372 aa, unidentified
MVEHSEVFVAFDTSKLRNAVAVAEGGRVGEVRYLGEIENNAAATAKLVRKLAGRYDRLTFCYEAGPTGYGLYRQIRGLGHDCMVVAPSLIPRKAGDRVKTNRRDALKLARLLRAGELTAVWVPDARHEAMRDVTRAREAAVMDVRGKRQQVTGFLLRHERRFAGKKNWTRAYRNWLAGLQFDHLEHRLVFEEMLMAVRQAEERVERLTAAIAAAVPDWSLAQVVTALMAMRGVDLVSASGFMAETGDLSRFQKPRELMGYLGLVPSEDTTGDNIKRGPITKAGNSRARRILVECAWSYQHAPRVGAAKLAKVAAAPPAVRDIAWKAQTRLCRRYRSLIRNGKRKTVATTAVARELAGFIWAINRAVNAGAAH

SEQ ID NO: 412170 - protein, 358 aa, unidentified
MVDKVTEAAVVGGVDTHKDLHVAAVVDQNNKVLGTQYFSTTRQGCRQMLAWMTSFGTLKRIGVECTGTYGSGLLRYFQNAGLEVLEVTAPDRMERRKRGKSDTIDAECAAHAAFSGIRTVTPKTRDGMIESLRVLKTCRKTAISARRVALQIIHSNIISAPDELREQLRNMTRMQLIRTLGSWRPDASEYRNVTNVYRISLKSLARRYLELHDEIADLDVMIAAIVDELAPELIKRNAIGYESASQLLITAGDNPQRLRSESGFAALCGVSPVPVSSGKTNRYRLNRGGDRAANSALHIIAIGRLRTDAKTKEYVARRVAEGHTKMEAIRCLKRYISREVYTLLRNQNRRINSIPITA

SEQ ID NO: 412171 - protein, 410 aa, unidentified
MQVLHERCCGLDIHKRLIVACAITPGPDGRPQRALRSFGTMTADILQLGDWLAERGVSDVVMESTGNYWRPIWNLLEGQVRLVLANARAIKQVPGRKTDVKDAEWLADLLRHGLVRGSFVPDRAQRELRELIRYRTSLIHERSAEINRLQKTLEGANFQLGAVVSEVTGASARAILQALLAGEEAPAALADLAKGALRHKLPQLQQAVEGRVGPHQRFLLPIQLAHLDGLEALIEQVSAEIDARLSPMVDEVRRLDAIPGVGRATAEALLAEVGPDWTRFPSSGQLAAWAGLTPGQDESAGKRRSGRTRKGNRTLRSILVEAANAAARKRNSYLAAQFRRIAARRGKKKAAVAVAHSILVIAYHLLTRGTEYENLGANYFDERNRSRVERRLTHRLEQLGYRVVLEPKAA

SEQ ID NO: 412172 - protein, 338 aa, unidentified
MNYMGIDHHMQYSHITLLDEKGEKLKSGRVANLRSELENFLLGIEEVKAVVEAGRSSYTMVDVLDSMGIDVTIAHPKEVKAIAKAKIKTDKRDSKILAHLLRTDLIPEVYKRSRENRSYQRILRQRVFYVGSMTRVKNRIKALLSQQSEDIRGEISRVKNIFGREGLAVLKGLDLPEGEKKLINALLMTFRHMEERIKESSALVEELYEMLPFVRLIHTVPGFGKFLSVLVAVEVAEVNRFEGLGKFHSYAGVIPSTHSSGGRTYHGKIVKEGNRGLRWAAVEAVWPAIRADFDLRCFYERLKKRKGANSAKVATARRLLTIIYRMLKENRPYIPYKR

SEQ ID NO: 412173 - protein, 341 aa, unidentified
MDQLLKQCVGIDISKKTFTACVSKYYISDNQQLSEVFEFENQKTGFNQFVKWSRKHLDKNTPVSYLMEATGVYYEGLAYHLHKLKLAISVVLPNKARHYAAYLCINTKNDIMDARLLATMGCLQKLPTWRPPAPIYRQLRSLCRFQSEIKKHRTVISNHLEALKNSQYPHPTVLKHYQKTLKQLDKSLKDTPKEIESLVKSDEVLYNKIKKIETIKGVGFMTIVTIIAETQGFELITSRKQLTSYAGLDVIERQSGTSVCGKNRISKKGNSRIRAALYFPAMVASKYNIPLKEHYSRILIKNPKQKMIGITALQRKLLLLIYTLWKNDEVFKLDRYPGMKR

SEQ ID NO: 412174 - protein, 339 aa, unidentified
MTVKTVGLDLAKDVFQVHGISESGRVIFNKAIKRAKLLAFFETLPPCMIGMEACGSAHHWGRTLRKLGHDVRLMPANYVKPYVKRGKTDAADAEAICEAVRRPTMRFVEIKTEDQQALLSIHRTRDLAVRQRTQLANMIRSLLREFGHILPIGIEAVTAFAKRHLDGDHPDMPDIANGMLGIQCYQFIGLNERISGYSKMIEQHAMLNADARRLMRMPGIGPITASAVVATIGDAKQFRTGRDLAAWLGLTPLNKSSGGKERLGKITKAGDRYIRKLLVVGMTSRAVMAKRSPEKVDLWTAKIIAEKPFRLATVAMANKAARSIWAMLTKKQEYRQPAF

SEQ ID NO: 412175 - protein, 419 aa, unidentified
MSNSNISRKLAQVNPGTLHVGVDLALEGNTAIILDENARQHSRFYFPQDADGYQYFRDHIEKVRQKLNASQTLIAMEPTNYFWKLLANHLEQNDIPYHLVNAYTVKKHREGDQIDRSKDDPRDSFTIADLSRTGKFTETRLQRGVYAELRQYATLYYQLTRDIRREKNILWGLIGQVFPELRLVFKELTSQTFKAMIRTCPAAVSVRAFSEDDFIAQVRTSFPGKRLFIAKLHEAYRVAKTSIGLVDGIQANYLAIQIHLEHLEILQWDISRIIKVLKCCLQQVEASKYLLSMKGLSTISVALILAEIGDPSHYSSGKQLVKLGGIQPTPNRSGRKQNSPTPMSHQGRPGLRSVLYLACLRLIQVDRRFKEIYHNLQIRTQNPLTKMQALGVLMNKLLHILWALMCKKTFYNPDFVGAV

SEQ ID NO: 412176 - protein, 351 aa, unidentified
MEHSAIDLHKKESQIRIVTEAGEVIDRRVVTRRETFTKVFGGRPQTRILIEASTESEWVARHLESLGHEVVVADPNYAAMYGTLTRRIKTDERDVAALTDACLQHIYRASHRRSPARRAIHADLTVREGLVQMRTRVISMTRALTRGEGLRIQSGATHTYLDRLRAVATSTELRTTLAPLQAVLELLNEELERADGQINDIARADVDIARLMTAPGVGSITATAFVAALDDVERFRNASRVASYIGLVPREYSSGERCRRGRILRSAQPRLQRMVVQAAWCLWRCKRPEAAALRAWADAVAQRRGKRVAVIGLARRLARILFAMWRDQQDFDAARIRDRRGTATIVAARTV

SEQ ID NO: 412177 - protein, 368 aa, unidentified
MSNKVIFNLDELFISVGIDVGADFSWMSIALPNQQFVGKPYKILHSSIDSLTTAVSKIKEAEELYSLESRIFLESTGIYHYPLFCYLRDKGFNCSVINPIITKNSTNINIRKVHNDRFDSKKAALVGLKPDLKVSLMPSDLALNCRNLCREYYDLIDNRSAYVNKLQGELRMAFPQYLGIFSKVTINTSLTLLETYTSPSAFLKADKQEIIDIIKSTARFGLTYAQNKYNAIIQAATDANQFGYIIDSNIKRIRLYISFIRKYDEEINNILESLHELVDANEDADFVKQIHLIETFKGAGFLSAVSIMGEIGDFSAFSKPKQLFAYFGLDPAVKQSGKFEGTKIQISKRGSAIARRAIHNRYYLILIP

SEQ ID NO: 412178 - protein, 359 aa, unidentified
MSSLTDLHEVVDVVIGVDTHVHTHSAAAVDARTGGVLAEITIEATPDGYAQLTEFADQHSTLRAWAIEGTGSFGAGLTRHLSTRAELVIELDRPVRAQRRNGAKSDALDAIRAARDALSRTKLGDPRDGGDHAAQRHSLSMLLTVRRSAVDAASDARRQLFSLVIAAPEPVRERFRGLKASAMPAVARNLRTRASWDVETLTAVTMLRTLARRIQALTEEAAEHEHAILAIVRRWRPDLLAQPGIGPIVAATVLCAWSHPGRIRSEAAFAMLAGVAPIPANSGQVTTRYRLNRRGDRQLNRALHTITLSRIRHDQRTREYLDRRTAEGKTSREIKRCLKRYIARDLYRLLEANTPLDTP

SEQ ID NO: 412179 - protein, 460 aa, unidentified
MTSKTKPKSKSKSRWSGRMLPIMHPDAAGIDIGAEEIFVSVPPDRDIDSIRRFATFTRDLLALADWLRQCNFRSVAMESTGVYWIPLYQILETRGLEVFLVNAHHVKNVPGRKSDVSDCQWIQYLHSVGLLKASFRPPDEICVLRSLWRHREGLVQMAAEHVQLMQKALSQMNLQLHHVLSDIVGVSGTAILDAILAGERDPAKLASLCNRRVHSSRQTVAKSLEGDYRPEHLFALRQSLAAYRFYKQLMAEVDLELEQKMRQLPRAKHAPDKRPTGTKKRIYQRAGNEPAFDLKEELFRIAGVDLTDVPGISRFTAHTILMEVGTDVSRFRNASAFASWLGLCPEKQVSGGKVLYTRTRKVKNRAAIALRLGAHCLYHAQNYLGDFYRKMKWRLGAPAAVTATAHKLARILYHMLSTRQPYSDEVFARCDQQASIRAEMRLRKQAAQLGFQLAPINGTA

SEQ ID NO: 412180 - protein, 421 aa, unidentified
MRGLRAKGMRMVKEGTLIATVDIGAASNTGYCTTLDGISTKSFRFDNTREGFEKFWCMTIASKNRFGCDEVLVGYESTGPYAEPLVHYLANQRVKIVQVNPMHTKKMKEVNDNSPLKTDDKDPRVIADIIRLGHALTIVVPQGDAAYLRRLNNARERHVGEQTALLNQLQQLVYLIFPEFKTVLKNTKGKTAQHILKRYTTPERIGTLSKEALGEEMRKRSRGKFGIKDAESLIGLARETVGIKEGVGGILMDIRHILMQLEAEVRFISEIEAEMRATLERIPCSVRLLSIKGLGTVSVAGLVGEVGDFSKFSTQPEIMKLAGLDLYEISSGKRKGQRRISKRGRSLLRKILFYAAIQMIRKNGIMHDYYARLTGRGMERMGALIAVSRKLLRIIHAIVRDNRDYVEQYQAPERRVIKMAA

SEQ ID NO: 412181 - protein, 352 aa, unidentified
MEKGNKLNFSGQHIYVGMDVHKKSWSVSIQSEQFEHKTFTQPPEVEKLTGYLEKTFPGATYHTVYEAGFSGFWLHDQLREKGIDCMVVNPADVPTKDKERAGKTDRVDCRKLARGLRNGDMKGIYVPPRVKVEDRTLVRTRQSMVRKQTRCKNQIASILFFYGITIPEEGHWTRRFIHWLESIRMERASGDFSLKAHLEELNHLRQIIANLNRAILSLSRTEEYRSDVLLLKSVPGISTLTAMILLTELSDISRFSSLDKLASYAGLVPDIKSSGETEYATGITFRRNPALRALLIESSWVSVRKDPAMMMAFNKLSARMKKTQAIVHIAKKLLNRIRFVLKNRQAYVLAVV

SEQ ID NO: 412182 - protein, 383 aa, unidentified
MTGTEPHAWGTGLMDDIIFVGLDVHKATVCIAIAEGGRGGEVRQLGVFENRPEILSKLASRLSKGGRRLNFCYEAGPCGYGLYRLLTGYGHECVVIAPSLIPMKAGDRVKTDRRDALTLARLHRAGELTAIWIPDAAHEAMRDLVRARATAVRVLAKARQHLQGFLLRHDRIYHGARAWTLAYRRWLTTVRFEHPAQQIVLQDYIHAVQEAETRRDRLTQQIDELLPNWSMAPVVAALQSMRGVALVVAVTVVAEVGDFRRFANPRQLMAYLGLVPSEHSSGSSVRRSGITKAGNPLARRVLIEGAWTYRMPARISRKLHDRNEILPPTIREIAWKAQVRLCGRYRRLAATGKSRVIVTTAIAREMVGFIWAIARLTQPALDG

SEQ ID NO: 412183 - protein, 404 aa, unidentified
MIFVGVDWAETHHDVCVMGEDGQVLEQRRVSHSVAGIGELHALVAGHAGEGEPVAAGIEVDRGLVVTALLAAGYQVYAVNPLASSRYRDRHATSGAKSDRGDAKVLADLVRTDRHNHRQVAGDSDLAEAVKVLARAHQSAIWSRQRQVNALRSALREYYPAALAAFGTDLAASDAVAVLALAPTPDAGRSLSRAKIASALRRAGRQRNTEQRTAEIQAALRADYLQAPPAVAGAYGAAARSAIRLISAYTAEITELEEALSGHFEQHPDVKIVRSLPGLGTILGARVLGEFGDDRTRFASPQCRKNYAGTSPITKASGRSHVVLARHARNRRLADALEQWAFCSLTPSPGARAYYDQLRARGKTHRQALRQLANRWVGILHICLERGCTYDETAAWHHLQANAA

SEQ ID NO: 412184 - protein, 378 aa, unidentified
MTPTNAVFVAIDMSKSTWLVAVHTPSDGRTGQHKVNGGDVAALLSIVDRARNRQARAAISPPAIHCCFEAGYDGFWLARRLRAEQIEPYVVDPASLRVDRRAKRAKTDRIDASGLLRALMSLHHGDFGACRLVPIPTPEEEDAKRTHRERQRLVKERTGHINRIKGLLATQGSYEYQPLKQDRRRRLHELRTGDGRPLPERLLRELSRELDRLELVIEQIGEIEEERDAAITAADRPEGSTEPGAVMGSQLTRLRGVGPETATILVREAFYRSFTNRKALASYAGLTPSPYASGEVRRDQGLDTSGNALLRKAMVELAWVWLRHQPDSALSCWFRERVGAQKGRIRRIAVVALARKLLVSLWRYATTGLVPTGAILKA

SEQ ID NO: 412185 - protein, 429 aa, unidentified
MKTNSKCQTDTERGGKARKARRPVQRDAKEVMAELVAKLSQKLEPRAAKAEQVGGPAESVPGPNRERLTVGVDLGDKRSNFCILGLDGEKLTEGELQTTQEGFAEFLQSMAGARVVMEVGTHSAWARDVVASCGHEVLVANPRQMEGPKKRKRKNDRIDAHKLARVGRLDPQSLFPIHHRSVEVRQDLMAVRARDAVMAVRKDLINAARGLVKSVGGRLPKCSSPSFPHKAEEALPEAVREVLLPLVQMVERLSSCIKVYDETIEKLGSEKYPHTKLLRQVKGVGPITALAYVLTLENPQRFAKSRDVGAYLGLVPKQEDSGDRQPQLRITKMGDMMVRRLLVGSAHSILGRFGPDTDLRRYGLRLSERGGKNAKKRAVVAVARKLAVLLHCLWVSGEVYEPLHHTLPEGTAVEATHRAPAESTQEKAA

SEQ ID NO: 412186 - protein, 473 aa, unidentified
MIKSVGIDLAGAGEHKVRCLDEGAQMCDGFSFETTREGLAKLEERIFGDGSNPVIVFEPTGLAWLLVAIYLKARHPDSRLVRVQAQKVVALRKYLHRYSKSDKIDSLTLAKMPFIDPEKLEEIYFPPAKIYAIQRLGRQRRRLESEIAGRKVRIGLIVDGYFPMIRKSFSDPWSAHARAFLHSRLNPLAVVYAGEKALHAFLAKARRHCKIDPLVESHMVYLACRESATLYKLSSSVGMIDEDFFSDFQEEISRELRLMEIEETESEAIAKRMEQLYQELHTSDNLRTIPGVGDHTAPIFLATVGDPSRFRSQSAFANYCGVVPGANQSSDMEAKGLRMTKAGPAMMKWALFQSGQIGRRYDPQLACLYYREMVHHGKNHMQAMGAVMSHMSARVLAVLREDKPYELRDIDGRLISREEARKLILSKYQVPDEIRRQRRHRKPSGDSISGRKRGETLAPRANEAAAAPQPVVI

SEQ ID NO: 412187 - protein, 363 aa, unidentified
MQNSITWVGMDVHAENIVVAAVRGSSDAVLFRTEFPNTPKGRERLAGKFNENGPVRCVYEAGPCGYELRRFLEGRGIECNVAAPALIPRKPGDRVKTDRKDAEKLARCHRLGELATVFVPTPAQEALRDLLRTREDAREDLLRRRHRLSKFLLRRGRRYTEGNRWTTRHWDWIRAQTFTDRNAETVFREYIVAIEQEVERIRRIEQQIVEESMSPEVGRVIARLRALRGVDTITAMTIITEVIDLNRFRSPRELMAFIGVVPRERSSGGRERRGSITKTGNAHIRRVLIESAWHYQRLPAGTPKTILARREGQPPEVIETARKAELRLHRKFMKLLGRGKPKGIAAVAVARELAGFIWALGRG

SEQ ID NO: 412188 - protein, 327 aa, unidentified
MMFIGIDISKEKIDLSWLRDQLTNKIKTKVFKNKHQDFLAIEKWLLNTTKSAANELVITLEPTGVYHEALMYFLHEQGFNIILANPGKAKKYADALNIIHKTDKSDATMLAHYGCAKHAVVSYWQPDALEVRELKALIRRLDALESNRQREANRLEASEFSNVSARVCQSIKVTIAFLDDEIKQLKSDIDNHIDNEPDLKRNRKLLESIPGIGPLLSRELTYLFAAKKLNKAKEAAAYCGLIPRHNESGKLKGRTSISKLGPARIRCKLYMAAIVAGQWNKTIKRHKLTLINNGKTPMQAVCANMRKLIHICFGVIKNQEAFKLQES

SEQ ID NO: 412189 - protein, 405 aa, unidentified
MYYVGIDVAKEKHYVCILDESSELACKPFWIHSDILGLRELLKRLAELSLDNDNFIVGIESTGAFSENLYSFLSDANYKVILLNSYQTAKYRDFSTLKKIKNDSIDAYVISELLASGKYKSSYISNDDYHNLKVLNRLKKSLDDKIKTIKREISTVVATVNPEITNVFPNIFSKTALEIIKVYPTAMDIRKATPKKLTRLFRHIKGNNFSDEKAKYLIELAKSSIYSGRALESRTLMIQTNIKILELLCQEKNIIEEQIKDLINNQLDDDSSNIEHIKSIPGVSDKTVAAILGECGDLRRFKDAKAFIGFLGLYPTLYQSGNSSSVGTLAKRGIPIAKHALYLAAVSSIRHNIELHKLFRDKVSVGKSKKEAIIIVAKKLATIIYSLFKYNQPYNPSRVLIQYKR

SEQ ID NO: 412190 - protein, 446 aa, unidentified
MLDTIRAVQQEPEWAAFAAIDWADQQHTWTLVPAGSSLPQRGKVENTPEALHLWATALSVQFGGRPIAVCLEQCRGLLIYALSKYAHLVLFPVHPTTAARYRQTFSPSGAKDDPRDADSLLDLLLHHRDHFPRWQPDTVTNRHLQRLVEQRRLMVHEKTRQSNRLTACLKTFFPQILQWFDDITAPVVADLLKRWPTLEQLQHSHPGTLKKFFLQHNSRSEKRIQARLNAIYQAVSSTHDEAVLESESIAALGFLRLLKTLGENIEILDHRIQQLVATHPDAPIFASLPGAGPATIPRLIVAFGSRRERWTSAYEMQCYSGIAPVKEASGRHEWIHFRRSCPKFLRQTFHEYAFLSTNKSPWAQAYYRHQREKGIAHPAAVRSLAYKWIRIIFRCWKDSQPYDEARYAAAQQKRNSPLAALGIDTKEVAGFQKPALKKSCSKRLTE

SEQ ID NO: 412191 - protein, 384 aa, unidentified
MANHTGGVVGGVDAHTDEHHVAVVDLQGRLLGATAFPTTAAGYARMISWLRSHGEVERVGVESTGAYAAGLVRALRAGGISVVEVNQPHRHARQRLGKSDPIDAELAARAALSRTATAVPKQTSGIVEAIRQLQVVRTSALKARHAALQQLNDLIVTAPEQLRSELRHGRTMRAKAALCQKLRPDTQRIHEPAQAAKLALSSLARRIHELDREILELDRQLEQLVRAAAPRTTQLFGVGTQGASQLLIAAGQNIDRFRSEAAFAKICGAAPIQASSGRTNRHRLDPGGDRQANRALHMIAVCRLRYCHQTHRRRTQQTRHPPLPQTLHRPRNLPHPPSRPQSPRQHLTSIGTSLSHGRRETWKRHWSQHRTSWQHGSVAHSSPG

SEQ ID NO: 412192 - protein, 368 aa, unidentified
MHSVGIDIGKRQHVAAICRQGERTADKPVLRFSADRAGLADLGRWLSRHGPVERVVMESSGHYWMPLAAALHRARVPVAIVNPVSAKHFGARRLQRIKSDPADARTLAALGMADRPRIREPLAGAEPREAARFAMHLVEEQSRIDNKITRLIELGFPELERAYDDPTCTSALAILRLAPTAQAVARKRVATLADANRGPGHRAVGITKAAQIQALATDTMAPPELAPRVAGLLDGELARRLQTIPGVGPAICATLIAEIGDIFRFSDFDQLVAYAGVHPAEKSSGQKGGPETSWQMAKTGNAYLRAALYRMSVVGLRHNPTIKAHYARKRAQGKSKMNALGHCMKKSLAILWGIWRGDHDFTPEPPTA

SEQ ID NO: 412193 - protein, 329 aa, unidentified
MMIIGVDYYPSFQQIALFVEETGEYGEQRLNHEGGEAERFYRGLQQRGIRVRVGMEATGYARWFERLLAELGFELWIGDPAEIKAQRVKKRKTDREDARLLLRLMREDRFPTIWVPSPENRDLRQLLWHRHRMVQMRTRIMNQLQALAMNEGKRWKSKLFSQEGRAEFEKLAFAPWASRRRRELLELFDQLNPSIQELSAAVEQEVQKRPEALRLMTHPGVGPITALAYVLIIGTPERFARGRQIGTYVGMIPTEDSSADKQRLGHISKQGSSLLRYLLVEAAQAATTLQPALAASVPALGRAPTPEHREGRQGTPTRDSVVLDVAKWL

SEQ ID NO: 412194 - protein, 345 aa, unidentified
MVLLGVDPHKSTHTAAAVAADSQQQLSSVTIRASLPEYRRLLRWARQWPQRTWAVENANGLGRHLVQWLIARGERVIDIPATATSRVRELSRGGGRKNDQIDAAAAATVAHLHGDGREVRAEDHSTALALLDERRVNLAQARVPAVNQLHALLRDLLPGGAPDQMSADQAAALLRTVRPAGAVEKVRKGLARDLVAEIRALDKQLTANAAHFADLVAAADSTLTRTPGIGPVLAARLIARVGRASRFPTSAAFANYTGTAPVEIASADKARHRLSRSGDRQLNSVLHTIAVVQIRMPNSPGHAYYQRKVSEGKTSKEAKRCLKRRLADHIWKIMLADERRAHLTP

SEQ ID NO: 412195 - protein, 340 aa, unidentified
MTITTIGLDLAKSVFQAHGVDDSGATVLVKKLHRKQMLPFFSKLPPCLIGVEACGTAHYWARTLAAMGHQVRLIPPSYVKAYVKRGKSDALDAEAICEAVQRPTMRFVPTKTVEQQGILMAHRARSLLVRQRTMAANALRAHLAEFGFIANPGLGHLATLAEQALADRDALPPYARTALETLIRQIVALTSEVATLDQQIASWHAESEISRRLATIPGLGIITATAIAAAVADPDQFKSGRQFAAWLGLTPQQHSTGGKTQLGGITKQGDRYLRRLLVIGATAVMRHTKDKTTPMANWIRKLLEKKPFRVVSVALANKLARIAWVVLTKKETFRPYSPVA

SEQ ID NO: 412196 - protein, 407 aa, unidentified
MAITCGIDWAEKHHDVTLVGDDGRVIVHRRISTDAAGFTALMALLTEHAGDPTTVPVAIETDKNLVVVGLQAAGITVYPINPRACARYRERHSQSGGKSDPGDAFVLASILRTDQHLHRQLPQLSDESKALKALARQHQEAIWALHQTESRLRSVLLEFYPQALDAFPNLGHKAAQTFLAALPSPAAAQKLTLARTVTLLRRSGRGNRAGLAEKIKAGLSAPGIRQPPAVEGALAVTVRGLIGIIVMMQASVEALELALGEAFAAMPAARIVEDVPGLGMVLGARILAEIGDDSTRFLTASGLRAFAGTAPVTRASGKSHYVKARKVRNKRLADACHWWAFNAITRSPGARAHYDRRRAAGDYHNAALRNLANKLIGRLWWCLANDQPWDDDVAWRSAETAPELLAA

SEQ ID NO: 412197 - protein, 332 aa, unidentified
MSVYVGIDVHRKRSQVAVIDADGEVLANRNVPNGVKPILGVIGGLPAGTPAAFEAAFGWGWLVELLEDYGFSPHLVHPLQCKAIASARLKNDKVDAAILAQLLRADLLPEAWIAPPAVRQLRAMLRHRAQLVRLRALLRNRIHAVLADHGYGRPEGCWSGPGREWLASLELPAVSREVIEDGLALIDALQEPIDRLDWEVHQRARSEPAVKVFTQLPGVGVFTALVLLAEIGDITRFGSARKLAAWAGLTPAVRGSDRTVRHGHISKQGSVWVRWVLCEAAQTAKRHPDFAASYQAIARRRGKKIATTAIARKLLTRAYHLLTDASSGGAPH

SEQ ID NO: 412198 - protein, 343 aa, unidentified
MKHYIGLDVSMKRTFICVINEHGKIIREGSESTEPHLIADYLEKLGLEEMTVGFESGSLTPYLLTGFKERAIDAICMDARKLSPILALKINKTDKNDARGIAEALRSGMYTRVHCKPEESINRAILLTARRALVEQQTHLKNTVRGLLKGYGIRLGAISAKKFAAAVMKQIENCQEIVSLSIKCLLDAFDKLVEETGKIDKKMLELAYQDKEVRRFMTVPGIGPVTGLTYKAEIFDATRFKESRSVGAYLGMTPTQYASGETQKQGKTSKCGSKELRFLLVEAGIVILTRSKKWSKLKAWGLKIMRKKGLKKAAVAVGRKLAVIMHQMMLEEKDFIYGEPKAA

SEQ ID NO: 412199 - protein, 355 aa, unidentified
MSHLNSGIAVIGIDIGKSSFHVVGHDRRGAIVLRQKWSRGQMEARLANLPACLIGMEACVGAHHLSRKLKMLGHDARLMPAKYVRPYSKGQKNDFRDAEAIAEAVQRPTMKFVATKTADQLDLQALHRVRERLVSQRTGIINQIRAFLLERGVAVRQGPRFLRTELPGILATRTDVLSLRMLRVIEDLAGDWRRLDARIDSLSSEIETLARQDQHCERLMTVPGIGPIISSAMVAAIGTGDVFSKGRDFGAWLGLVPKQISTGDRTILGSISRRGNRYLRVLFVQAAWVVLVKLGPKHWERYGLKSWIEAAKKRLHHNVLAIALANKLARIAWAVLNNGRAFGCDKTDAMASRPT

SEQ ID NO: 412200 - protein, 323 aa, unidentified
MQGKVSFEEDAMPVVYAGVDVSKEWLDIHLHPLGESRRFSNDKTGIRQLKRLLARHRPKSIVMEATGKFHRPAHRSLWLDGFAVAVVDPLRARMFARACGYLAKTDRLDARFLALLAESLRPPADTPPSPHVEALQELVNARSAAKCDITALQNRSKTATTALLRGELNRLVRRLEQHVERLDKEIERRVGEDPQLYRKAEILTSIPGIGRVTALALMAGMGELGTCSGKQAAMLAGLAPIANDSGARTGRRSIRAGRPAPRRALYMAALSACRYNPALARFADTLKAAGKPAKVILVAVMRKLLVLANCLLSQDRLWTPTPP

SEQ ID NO: 412201 - protein, 422 aa, unidentified
MNAFNTNSFSAYIGIDWADTKYDICLQVANESQRSFDVIEHQVEKIDEWAQSLRKKYKPPIAVAVELSKGPIVYALQKYDCFVIFPINPSTLAKYREAFQPSGAKNDPTDAELALNMMLHYPERFKPLKPQSVEMRMLSSLVEQRRSLVNDKTRVTNRLRSTLKQYYPQMLEWFDRIDTYIFCDFLTRWPTLLQVKRARKTTLTTFFHEHHMRFKHVLERRLAAIKTASPLTLDEAVIMPHRLKALFLVEQLRLMLDAIEQYDLEIEQIAVQHDDYALFNSLPGAGPSLTPRLMVAFGEQRERYKCAAELQKYSGIAPVTEHSGKKHWVHWRWQCPTFLRQTFVEWAAHTISESLWAGAYYRQQRDKGCSYPAAVRALAFKWIRILYRCWQTRTPYDEMTYLKALQQKGSKLFEQTLSVEPN

SEQ ID NO: 412202 - protein, 344 aa, unidentified
MDTHKDTHTAAAVDTAGRVLGSAQFPTDAAGYRALLRWLRGFGTLLLVGVEGTGVYGAGLARMLAAQGVAMVEVDRPDRKARRWQGKSDPVDAEAAARAALARVRTGVPKQRDGRVEALRALRVARRSAVGQRADVQRQIKALIVTAPESLRAQLRKLPDRELIEVCADLRPDRANADDPGTATKIALRSLARRHRRLSVEVADLDELLGPLVAQINPGLLALKGVGAEVAGQLLVTAGENADRLTNEAAFAMLCGVAPLPASSGKTTRHRLNRGGDRAANCALWRIVITRMGTDQRTKKYVARRTTEGLAKPEIIRCLKRYVAREVFLALQSASTEKRPANAA

SEQ ID NO: 412203 - protein, 460 aa, unidentified
MSNASRLSRGDRRRNDRLAALRAVVTRHSAVLAFDLAADKQVCALTDQDSRVLARRTVKAKAWQLREAVEWGMAQAAAAGFSSVVVACEPTGHRWRVLDQIAAEAGARLVCVQPLLVHRARESEDFTRNKSDETDAMIIARLVTELRCYLPERAEPVWARLRHLGARRVALVTDATAARQQITDLLECAWPAALRAAGKPMKSKSWLAAMTVLLDRVGANGDLSVIRRWGWSRFAAAVRRELPRHGATRWHSKIVRAVFDAAADPAWAADGVSNQRAGALERTRFALADLAHARAETALVETRMVEVLDELGLTTLVTSIPGLSAVSAAAILAETGDPTRFSSARALVKHAGLCPRDNASGSYQGKTGISGRGRPHLRLAAWRAVWAALRNNPVLAARHAHLTGRADNKLTTTQARVAVAGSLLRQLHAVITTGTAWDPAIASGLKPQSPANARGAAAAA

SEQ ID NO: 412204 - protein, 312 aa, unidentified
MTEIICGVDVSSEALDARIGRDGAETRIAATPEGVADLAAFCREHKVTLVVMEATGGYEKLVHALLWSHGIPAAIVNPRAVRQFAKAMGFLEKTDRIDAGVIAWYAEIKRIVAQEPASAAQQHLKALVTRLRQLTELRTMQSNQRRLVGDPDVNGLFSELMALIARQTRKLETKIAALIDSDPVWHKLDECFRSIKGVADRTVARIMAEMPEIGTLSNKAVSKLAGLAPLADDSGKSQGKRSICGGRANLRNILFVVVETVRRHNPLFAAFHERLTKQGKAKKVIRVALARKLLVQLNAKARDARKELALAA

SEQ ID NO: 412205 - protein, 370 aa, unidentified
MKDYITVVGLDVHKDSIEVVLADTFGNREIRHYGKIGGDMESLDKAVRKLVSRGSILEFVYEAGPCGYEIYRYLTKQGYQCAVVAPSMIPRRSGNRIKNDRRDAEALARLYRAGELTTVHVPQEEDEAMRDLIRGRQDAVKGLRTVRQQLGAFLLRHGIRYGGKTTWGPSHTRWLADVSMAHPAQQIALQEYINAVRERTDRVERMTGEILKFLPQWRMAPVIEALQALRGVAPIVAVTVAAEIGDMRRFENPRQLMAYLGLVPSEHSSGSTVSRGGITKTGNTHARRVLVEAAQTYSYSARVSRPLLKRQEGLPQPIRDIAWKAQVRLCGRFRRLMGRGKSRNTVVAATARELAGFMWAIAQQVKTPTV

SEQ ID NO: 412206 - protein, 359 aa, unidentified
MQTQSNKIEFNGQNIYVGFDVHLKSWSVTVITERLTHKTFSQPPKPETLHRYLVKNFPGGVYYSAYEAGFCGYWIHHELIKLGINSMVVNPSDIPTTGKEKVMKTDARDSVKIARSLRSGDLKPIHVPSLATLEERGLVRTRSQLVKDATRYKNRIKSFLYFHGVEFPESFLRDSTRWSMRFIKWLETVELSEPSGKASLDILLLQVMNLRSSILQLTRQLRQLAETERYKTQYELLRSIPGIGSLTAMIILTEIETIHRFANIDQLVGFIGLVPSTNSSGEKDIKGDITPRGHSMLRSAIIESSWIAARRDPALNKSYHGYCKRMEPNKAITRIAKKLISRISFVLKNNQPYVCSVVK

SEQ ID NO: 412207 - protein, 370 aa, unidentified
MSTKVRFIGLDVHKESIAIATADSGRAPATNFGIVPHDIPRLFKTLKKLTPAGGTIHVCYEAGPTGYELYRRLTEKGISCVVIAPSLVPSKSGDRVKTDTRDAKKLAHYLRSGDLTTVYVPEEAVEALRDLERGRTGAKRAERCARHQLGKFLLRHGRRFSDGKAWTVKHMQWVRRQKFEHVAQKRMLTDYIKTVEDCSERVARLTADIEELFLETALAPLIKAFQALRGVKTISATVFAAEVGDFSRFPTAPDFMSFIGLVPSEHSSGEKQFRGRITRCGNSHLRTAFVEAAWHYRHPPNLSLQIRKRSAGLSDEVRKIAWTAQKRLHKRFVTLVAKGKCKNKAVTAVARELAGFVWAIAQQEKLLADG

SEQ ID NO: 412208 - protein, 458 aa, unidentified
MQLWCGIDWAENHHDVSVVDEEGRQQVRVRIEDTAAGFSELMAMIGGQQRGCDKPISVAIETTKGLLPAALRAACVTLVAINPLAVSRYRDRLWPSRSKSDAGDAFVLANILRTDPHNHRPLPVDSELAQAIQVLARAHQDAVWDRMQIANKLRSTLREFYPTFLAAFDDLASREARAILHLAPTPGEGQRVRRASLSAALRRAGRSRGIPAAVEAIHVELHRDQLRQHGQVETAMAQHATALLNALDTAVANVTRLEQQLQTAFEQHPDAEIITSFPGLSTVLGARILAEIGDDRTRFASARGLKAFAGTAPVTRASGMKTVVTRRVVRNKRLGQAAYVWALPMLAHSPGAHAHFKARRERGDSYSAAARNLTNRGIGMLHHCLQTRQPYDEAKAFPNTTSQPVTSSRPQASKASRETEASNQQTGDDYRRQADRDLYRASDHEGLSKDRGTSSLTT

SEQ ID NO: 412209 - protein, 412 aa, unidentified
MKVQYICCAGLDVHKRIVVACVLKGTLGEEVISKVKSFGTTTPELMEMIEWLKSCGATHVAMEATGNYWMPIYNLLEGHFELVVANAAHMKAVPGRKSDVQDAEWIAELLRHGLLRSSFIPSREQRDLRELTRHRSSLAGKRAQAANELQKSLESANIKLQSVVTDITGASSMEMLQELISGKNNPKELAQLAKRRLRAKIPELEKALCGNLRRHHQMIIEQLLADIGLFAAQIAELDAYIENLLRQEQEIIDRLDDTPGINRRIAEIVIAEAGTDMNRFPNQYHFASWIGLCPGQNESAGKRKSGKTRKGNRALRCALVEAAHGAVRKKDSYYGAQYRRIAVRRGKKRALVAVAHSMAIAIYHMLKSKTAYRELGANFFDTINPVKALNRLTKRIESLGYHVSVTVADMAA

SEQ ID NO: 412210 - protein, 348 aa, unidentified
MRFYTHTHNHYCGIDLHARSMYLCILDRDGNVLLHRNMKATPDAFLTAVAPYRDDLVVAVECIFTWYWIADLCAEQGIAFVLGHALYMKAIHGAKAKNDRVDARKIAGLLRGGMLPQGYAYPKKMRATRDLLRRRNHLMRKRADLLAHIQNTASQYNLPPLGTRLDRKGERDKVPEHFPDPVVRRSVELDLSLITHYDRLLRTLEEELARSAKAHDSFAYHLLRSIPGVGRILTLVLLYEIEDVNRFPRVQEFLSYARLIKCQKESAGKLRGHSGKKIGNPHLKWAFSEAAVLYLRNNPQGQRYVERLARKHGKGKALSILAARLGRAAYTMLRRREPFDAEKFMANA

SEQ ID NO: 412211 - protein, 451 aa, unidentified
MATKRKKRVQDLPVLHPDAAGIDVGASEIFVAVAADRDAEPVRSFATFTRDLNSLADWLQACGIRSAAMESTSVYWIPLHQILEARGIEVCLVNAQHVKNVPGRKTDVSDCQWIQYLHSVGLLRASFRPPAVICAIRSLWRHRDSLIQMAAEHVMHMQKALDQMNLQVHRVLSDITGFSGLRIVDAILAGERDPIKLAQLCHSRVKSSQDTVAKSLEGDYRIEHVFALRQSLAGYRYYQGLIAEVDQEIQRQLADLKTADGDSKPPKRTKKTPYQRYRYEPAGFDLRGELYRILGVDLTDVPGISSVTAHTILCEVGTDVSRFRNASAFASWLGLCPERQISGGKVLYTKSRRVRNRVALALRLGANSLHHANNYLGEFFRRITRKLGKAQAITATAHKLARIVFHLLNTKEAYNESVFRRCEEEALKHAELRLRKHAARMGFQLVSAANG

SEQ ID NO: 412212 - protein, 387 aa, unidentified
MIYYIGIDISKYKHDFCIISNTGEVIVENSSFENNKKGFQSLLELLKSYNKSEVHIAFEATGHYSKNLELFLIDQGYSFMKMNPLVIHQFLKARSLRRTKTDKADSLTIANYLMSVPYKPNSDLLYNIFTLKSLCRSREQLIKERSKYQVLLTNQLDLTFPELKQFLNNRISATLLFILEKYTNTDHISLMRDYDSIKNISRGKFSYAKFAKLKELAKNSIGHHDENTDLLISTYTSIIKTFNEKIDPIEKQISTIIKELNPKMLTIPGLGEISAAAILSEYGDINNFSSPNKMLAFAGLEPSIIQSGTIENNGKMVKHGSGHLRYSIMNTTMIILRYSPTFYDYYLKKRSEGKCHRVALSHVCKKLLRIIYTLEKNNIDFDPSLLK

SEQ ID NO: 412213 - protein, 414 aa, unidentified
MFIRPEELSKILIIMVMIMLYLGIDIGKNTHVASLVDEKGKILFKAFSFSNTSASAEGLIHRLSNFISATSEVEIGMEATGHYWLSIYSFLVEKGFVIHVVNPIQTDGWRKGVEIRKRKTDVIDSVLIAELIRYGDFLETSLADENTISLRNLSRFRNYLISSIGDLKRKTICVLDQVFPEYQSVFSDIFGQTSKEILLHLNNPEDFENISSNQLQEVLSKITLKKFATNKINEISTLAKDSFGIKFALDSFQLQLKLLIEQINFIELQAKDVEEKISTLLDKINSPITTIPGIGYVTAATILGEIGDISRFSSPSKLVAYAGIDASISQSGEYRSCNNKMSKRGSPYLRKALFSAALVASNHDPVFKAFYQKKRKEGKHHLTAVGATARKLCYTIHAILKNNSKYEVQHPCDE

SEQ ID NO: 412214 - protein, 337 aa, unidentified
MKFSGIDLHSNNSVVVVSDEEDRVVFHRRLPNVLAQIVSALAPYREELKGVVVESTYNWYWLVDGLMEAGYRVHLANTTAIKKYEGLKYSGDFADAAYLAQVLRLGLLPEGYIYPREQRAARDLARKRMQLVRCCTAQTLAIENILARQTGGRMSGNQVKRLTAEQVDGLGFAPDVALALQANRAVNETLQQQIDVLEKRLRERVKLRSDYRLLKSVPGIGETLATTIMLETGTVERFASVGNFSSYCRCVDSQRISNGKKKGEGNTKNGNKYLAWAFVEAANFALRYCPEAKRFYERKKRKANGIVAIKALAHKLARACYHMLREQQPFDVKRCFA

SEQ ID NO: 412215 - protein, 369 aa, unidentified
MLESDQLQPRELPIVTTSTRIKCHLYIRLHDLPTIAQEELFTVDAILERCAGLDVHQDTIVACFLSGPLDQRPSKEIESFGTTTKELLRLQDWLQDRECTHVAMESTGVYWKPVWNILENTCELTLANPTRIKNVPGKKTDYSDAEWIARLHRSGLIEKSFVPNEEIRDLRDLTRYRRKLLQNVTQEKNRVHKILQDANLKLTTYMSDVFGVSGRALLESIVNGEVLDAEQVRDMVKSTLKRKVPELIEALNGRLRLHHRKMIRRHLEHIAFLEREIQELEAEIEQLLAPYQREKELLETIPGIKQDAAASILAELGPDMSHFPSDAHLASWAGVCPANHESNGKKNEKRTNVEIKDLNPCSVNVAGQP

SEQ ID NO: 412216 - protein, 330 aa, unidentified
MKNYVDVVGIDVSKLTIDAHIHHKSVHRVFSNAPKGYRALLSWTKKYLAEQSYFFCFENTGHYSANLSVYLSETNIGYVEESPLAIKRSVGIVRGKTDKLDAAMIARYAWLHKEELVLSTPKEQDIQELGRLLSFREQLVRDRTGKLSSLKEMQSLLSSPSTDSCCKIITKTIHYLTKQVEALEARIKVLIKNDESLKKNFDLLNTLKGVGLVLSCQLLYHTNNFNRFDSWRQFSSYCGVAPFEHSSGTSIRRRNRTHHIGDRKMKTLLTLASVSAIQCDKELKHYYKKKVAEGKPKMVALNNVRNKLLSRAFAVIKRGTPYVPMQQFAA

SEQ ID NO: 412217 - protein, 427 aa, unidentified
MAGIETGGQEPQFAAFVGIDWADQKHVWCLQSWDSTKREIGELKHTPEAVEAWVAQLCQRFGNRPIAVALEQSRGSLVFMLAKYEPLHLFPVPSTMSASMRKALYPSGSKDDPRDADVLLDLLLQHRNKLRRLSPDTEPTRRIQNLVEERRKLVDEKTEHTNRLTSHLKIYFPQMLNWFEHLDTELVCALLERWPTLEELQKVPPAKLRTFFGKHHCRDQELIEWRILAIRQSIPAIQDRAVIEAKSAAVKVIVQLIRILLEGIADLDERIEEAAAAHPDFFIFKSLPGAGPALAPRLLAAFGSQRERYRNADEVQTYSGIAPVMEKSGKKQWIHFRWACPKFLRQSFHEWAGHSIGYSVWARAYYRQQRGKGVDHHGAVRALAFKWIRIVFRCWKERVAYDESKYLAALTRRGSTLVARVATAKAL

SEQ ID NO: 412218 - protein, 363 aa, unidentified
MMTSTVAGIDPHQHTITVGIVDNNGVAIFHDTFPNSAAGHCATIELLTAHGVEQVGVEGSASWGAHVAIALVAARFDAHEVPPQRSAAQRRARRLDKTDTVDAYATARALLGEPTLGPVQALEVYDPLVAKIEAVLEHRRMLVDVRTLVLHHAQDQIAKLPTDIRDQLCTDGKIEGRLRRLEQLDTTVVSTTAGAYRLSWLVPLIDQDRAARRQIRQLERDLDQLLDEHGTTLRDEPGIGPIAAATLLAEVGDPFRFARESKFARWCGTGAVALSSGEGAGQPLRHRLDFGGNRRINSVLYIASVTQHRDIDEARIYINRKISEGKTRREARRAHKRHLANRVIRRMWNDEQHRLSKQLPPAA

SEQ ID NO: 412219 - protein, 367 aa, unidentified
MTKSITVASQQTRNFAEKKYTVGLDLGDRWSWYCVLDERGDVVFEHKLSTTPKALREVFGAMPHSRVALETGTHSPWVSRLIKELGHEVIVAQASKVRLIGESRKKDDRLDARTLARLARVDPELLGPIQHRSARAQADLIMIRARAGLVRARTALINAARGLTKSYGERLRGCSPRNMDAEKSKGLSAELQMALEPLLRAIESLSQQILDYNQRIEQMARDGYPEVARLQQVKGVGTLIALTYVLTLEDPQRFTKSREAGCYVGLQPGRRNSGSSTPQLHISKEGDPYLRTLLVQGAQHILGPFGQDCDLRRWGLKLAERGGKNGKKRAVIAVARKLAVLLHRLWVSGEAYEPLRNQRAVELPAAA

SEQ ID NO: 412220 - protein, 339 aa, unidentified
MQQDVVTVCVDLAKNVFQVHVIGADGKVLVRRQLRRGEVLKVLLIVAAVPGRDGGMRVGAPLGRELLALGHDVRLMPPAYVKPYVKRGKADAANAEAICEALTRPTMRFVAVKSVDQQAVLMLHRTRDLLVRQRTALINALRAHVSEYGIVTSRGPGGVTALMKLLHEGQEKPPAYARSALHTIGTQLRSLASEVDRLETLILAWHRANDTSRRLATIPGIGPITASAIAAAVPDASLFRSGRQFATWLGLTPRPHSSGGKERLGGISKQGDGYLRKLLVVGATAVMRMAYKDASRQPWLARLLERKPVKIATVGLANKTARIAWAVMARKEVYAAAAA

SEQ ID NO: 412221 - protein, 421 aa, unidentified
MNQLTDTQYTAYVGIDWAAAKHDICVQAADDGRREFACISSQPEGIETWAQDLYRRFGGPIAVALELSKGPIVSALQKYDFFVLYPINPSTLAKYREAFTPSGAKDDPTDAELAVDLMTRHAERFSPLKPQSVDMRKLIGLVEQRDKFVSDQGRLVNRLGHALKQYYPQVLEWFSEHNTVVFCDFLSQWPTLNQAKRARKASLERFFRSHHVNSAELIERRITAIKSAMPLTLDAAVIEPHRLQVEILVEQLRITIKALKRFDDEIAVTANKLPDYDLLFSPLPGAAKVLAPRLLAAFGEDRQRYPQADALQKYSGIAPVTKRSGKTTWVHWRWQCPTFVRQTFVDWAAQTINKSAWAGAYYRQQRAKGCSYHVAVRALAFKWIRILHRCWQDRIPYDESKYLEALRRKGSPLLKYLAEAA

SEQ ID NO: 412222 - protein, 364 aa, unidentified
MKRSLKYVGLDVHQATTVTSVREESGRVIAQTVLPTDGRMLVEYFRGMRGSIHVAFEEGTQAQWLHDLLQPVVAQVVVCDRRGTTARGNKGDQPDADALSEQLRRGALRSVYHGSGERATLKEVARTYRNLVEDTTRVMLRLKALFRARGITTAGRSVYRADERADWLAQLDAAAGPGASRGVHFRAATLYAELAVLQALRPTARRALIVEAKRDPAWAVLRSIPFLGPIRVALLLATLQTPWRFRTKRQLWGYAGLAVVTRTTAEWALVDGRAVRRRRPPMTRGLNRNHNRVVKEVFKSAATAAATRSGPWQDWYQEMLKRGMREELARVTLARKLAAITLHLWQTGARYDPSHLMPSTVPAR

SEQ ID NO: 412223 - protein, 326 aa, unidentified
MRQPGSHTPKIKTQVALDISSKALDVHFKSDGKAFSVPNTEEGLNRILKSFTAYDVSLVLMESTGGYEDLAACFFQSHGIDVAVVNARHARNFARAMGKLAKTDRIDAAILADMAFMIDASNDRDRYIKPLTDEQRKRLSVMTVRRRQVVGLISTEKQRLTRADDWTRASIKKTIKSLTTELRHIEQQISDHVKKNFVDLSKMLLSIPGVGEQAMTVLIGEVPELGKTDRRTVSALIGVAPFNHDSGNFRGKRRIWGGRQSVRNVLYMGIISATRFNPVIRAFYLRLLNAGKPKKVALIACMRKLLTIINAMMRTGQPFDVTLHGV

SEQ ID NO: 412224 - protein, 350 aa, unidentified
MSSVPIFVGLDYHQDAVQVCILNPEGEKLCNRSVPNDVQVIHRLVTQHGTPRRVAIEACCGAADLAEKLATLEGLPMQLAHPGYVNRMKRSPDKTDLGDAQLLADLVRVNYLPRVWLAPQAIRELRRLVRHRANLVRQRKDTKLRLRGLLRENRLKCADARPWTKAWYGWLRSEAGLSISDRWLVDQLLEQLVFLEGQISATVARIEQATADDPLVAKLQTLYGVGLITAVTLRAEVGRFDRFDNGKQLARFCGVTPRNASSGARQADAGLIKAGNPAVRQVLIELAHRLICRHHAQWGKLAHQMLGRGKPKNVVVAAVANRWVRWLYYEMKRGAPVVEEPVVEESKNHS

SEQ ID NO: 412225 - protein, 318 aa, unidentified
MNVIGLDVSKDTMDATLITTKGSKDYIKIYNNTEGFENLINWIKTKRIRKIAISMEATGIYYEQAAEYLSALYTVYVINPLKIKEYAKSQFSHTKTDKSDSKLIAEFANQHLDKLTPFRPSENPTLYKLINLLQQLKEQQKETQNRLHTAKDIYIKSTHESIIELLEEKIDQTSKRIEGMIKQKESLNIEYQNLQTIPAIGKETAVILLRHLTDKNFETANKFVAFAGLSPKIEQSGTSVNKKGRLSRYGHRQLKRALFMPALVAYRMNAFPQLVSNLEAAKKPKMIIIVALMRKLAKIAFYIHKTKKPFDKARHQTV

SEQ ID NO: 412226 - protein, 392 aa, unidentified
MIFVGIDVAKDKHDCFITNSDGEILYKVFTITNNLEGFHDLYQKISSVMEDASKVKVGLESTGHYSYNLLGYLIDKGLTAYVINPLHTNLYRKSLSLRQTKTDKVDARTIASMLMSDVNLKSYSDTSYHNEELKSLTRYRFDKVKERAKLKVSIARLINILFPELEKLVPTLHMASVYSLLSEFPGASHVASAHLTRLTNLLSEASKGHYDKDTAIHFREAAKNSIGSVMPAKSLELKHTIKLIQELTTEIDEIETAIKRIMDEEIRSPILTIPGISYRMGAMIIAEIGDFRRFDSADKILAYAGMSPSTYQSGQLDNCYSHMEKRGSRYLRYALYNATKYVCHWDESFGAYLEKKRSEGKHYNVALSHAAKKLVRTIFAMEKSGQAYKATS

SEQ ID NO: 412227 - protein, 355 aa, unidentified
MSQTLKTSVAVIGVDIGKNSFHLVGQDRRGAIVLRQKWSRGQVEARLANLPPCLIGMEACVGAHHLSRKLQMLGHDARLMPAKYVRPYSKGQKNDFRDAEAIAEAVQRPTMKFVATKSADQLDLQALHRVRERLVGQRTGIINQIRAFLLERSIAVRQGLHFLRAELPGILAKRTDVLSPRMLRVIEDLARDWRRLDERIDALSDEIMMLARQDKGCERLMTVPGIGPIISSAMVAAIGSGDTFSKGRDFGAWLGLVPKQMSTGDRTILGSISRRGNRYLRTLFVQAAWVVLVKIKPEGWERYGLKSWIETAKQRLHRNVLAIALANKLARIAWAVLHKGRAFECVTNATASRPA

SEQ ID NO: 412228 - protein, 367 aa, unidentified
MGKSSTVFVGMDVHKESIDITLAEVGGEVRRLGAIGGDRVSLLKTVRKLRSRGQELVFVYEAGPCGFWIYREISSLGLGCMVVSPSLIPRRAGDHVKTDRRDSERLASLARAGELEPIHVPDIRDEAIRDLVRARDDALISQRRARQQLKALLLRNDIRYVGKTSWTAAHRRWLSELKLPQGAQQIAFEEYIDAITLATERILRLIRAIESEVATWRFAPVVAGLQAMRGIQFVHAVTLVAELGDLTRFHSARQLMGYLGLVPREDSTGERRRQGSITKAGNAYARRAMIEAAWAYRHPARVTRIIATRQTGLPKAVCDIAWRAQLRLSAKYRRLAARHLHQNKIVVALARELSGFVWAIGQSVRPQ

SEQ ID NO: 412229 - protein, 368 aa, unidentified
MIFVGDDWAEAHHDVCVLDEHGERLARRRVPEGFAGIGELHALLAEHASEPGEVVIGIETDRGLWVAALLEAGYEVYAINPLAASRYRDRHAVSGAKSDPGDARVLADIVRTDRHQHRPVAADSTLAEVVKVLARAHQSLIWTRQRQINQLRSTLREFYPQALAAFPGELGERDALAVLARAPSPAEGRLLSLSALRATLKRAGRERNLDGKAQQIQAALRGGQLATSPQITSAFAASVRATVAVARELSRQIDELERELADAFMSHPDAEILRSLPGLGLVLGARVLAEFGDSPNRYKDAKARRCYAGTAPITRASGTRRVVLARVARNRRLADACYLWAFAALTCSPGARALYDRQRERGATHHQA

SEQ ID NO: 412230 - protein, 418 aa, unidentified
MTRRDDSRIIRIVHPICCGLDVHKESVSACVIFPDDKGEEQCDVKVFGTFTDDLMRLRDWLATHNCPVVAMESTGIYWRPVHNVLENSVQVVLVNAREMHNVPGRKTDIGDSRWIAGLLRHGLLKSSFIPPQDVRQWRDLTRLRKKYVHTVGDYRKRTHKLFESANIKIDSVVSDLFGVTGRNLMQLLVADRKLTLSDIQTCVRGKLKGKEAELFRSIQGFFTDHHRFVLKMILETIATLEAQIEALDLQICCAMKEHEALLDRMKQAPGIADVASREILAEIGPTLDSFPKDTALVAWCGLCPGNNESAGKRKSGKSPVRKNHLKTIMTEVAWAAIKKKDSYFKDKYYRLKARRGAKRAIVAIAHRILLGIYHVIKDGADFRDLGGDYLALRNKSQKVFHLRKQALAMGFNLVPQAV

SEQ ID NO: 412231 - protein, 337 aa, unidentified
MKYCGIDLHSNNSVVIVSDEEDRIVFSKRLPNDLGQIRAALEPHREDLAGVVIESTYNWYWLVDGLMDTGYQVHLAHPSAIKKYEGLKHSGDFADATYLAHLLRLGLLAEGYVYPREERGVRDLARKRLQLVRYRTAQILAIEGILMRQTGARLKGEAVKRLTAEQVDAFAFAPDVSLAVQANRAVSQTLSQQIEALEKRLQQRVILRPEYRLLKTVPGIGEVLATTIMLETGTISRFARVGNFSSYCRCVDSLKESNGKRKGEGNTRNGNKYLAWAFVEAANFALRCCPQARSFYDRKKSRSNRILALKALAHKLARACYHMLQDQKPFDVHLCFG

SEQ ID NO: 412232 - protein, 351 aa, unidentified
MLIIGCDFHTRYQQIAMAEESTGELLLERRLDHESGEAHAFYRSLQGPVRVGIEATGPIHWFERLLAELGHELWIGDSAKIRASEVRKQKTDERDARLILDLLLAKRFPRIWVPTPAERDLRQLLWHRHKLVCLRTMLGNQLHFLAMSQGLCRKRKLFTKKGRAELVGLALGPWARRRREELLKLLDQLDPPIAELDRAVLEQAKHRNDAVLLMTHPGIGPVTSLAFVLTIGTVTRFCCSRKLVSYLGLNPTEESSGGRRRLGGISKQGNTMVRWLLIETVHQAVRLDPELRQDYQRLKFRRGHAVAKVAIARKLAVRMYWMLRSGADYAQLVRRQGSPGATLVDASSSLG

SEQ ID NO: 412233 - protein, 350 aa, unidentified
MIIGVDYHPSFQTIAFFVEETGECGERELKHSDGEAERFYRDLQQRGIRVRVGMEATGYSRWFERLLAELGFEVWMGDPAEIKAKRVKKQKFDREDARLLLRLMRENNFPQIWVPGPENRDLRQLLWHRHRLVQMRTRILNQLQALAMNEGYRWKKKLFSEQGRALLEKLSLAPWASRRRQELLELLDRMNPAIEELTAAIEREARKRPEALRLMTHPGVGPLTALAYVLIIGTPTRFQRGKQIGTYVGMIPCEDSSAGKQRLGHISKQGSSLLRFLLVEAAQAAARIQPDWRRRYMHLAMRRHKSIAKVAMGRKLAIRLYWMWRNGCEYSPSLEFGSYAGQLGTGHGVK

SEQ ID NO: 412234 - protein, 351 aa, unidentified
MTVTNLPRCVTGGVDTHLDVHVAAALDERGTLLGVENFPTTAEGYKKLLGWLSDFGPVELVGVEGTGSYGAGLTRHLQAEHVRVVEVDRPNRQRRRRKGKSDPQDAIAAAHAAQSGDALGEAKTRDGNVESMRVLRVARSSARKGRTQALNQMRSLISTAPEIIRTELRGLNVYRLLERTSTYRPGAKRDIVSLTKFSLRMLARRAIELEEEITEIDAILKPLVKETAPELVAALGIGTDAASALLVAAGDNPERLRNEAAFAHLCGVSPLEASSGKNQRHRLNRSGDRQANSALWHIVITRMVYDAQTSEYIDRRTKEGKTKKEAVRCLKRYVAREVYSLLPHDKLGSPD

SEQ ID NO: 412235 - protein, 313 aa, unidentified
MKIKVEDTFVGIDISKDELEVAIWQEQTTEQYANTGEGIRKLIAELSKKPIALVVVEATGGYEYQLVLLMLAADLPVALVNPTRIRRFAQAGGNLAKTDKLDAQVLAHYGQAMRPEVRVQKSELEDQLSLKITRRRQLIGMITAEKNRLGTARGTNIESIKRHLEWMKIELDLLEAEMMGLLQTHPSYQKMVENLISVPGVGPVTALTLVAQMPELGLVNRQEIAALAGVAPLNKDSGKRRGRRHTFGGRSAVRSALYMAALSATRCNPVIKEFYERLLANGKEKKVALTACMRKLLVILNAMARDQQSWNLT

SEQ ID NO: 412236 - protein, 347 aa, unidentified
MYYVGVDLHKEMSWFYVMDSHGRKLSSISISNNPERLKQFLEKIPTPFTLAVEATYNWYFFVDLAEQFAEKVFLADSFELKAFAKRHKKTDKIDARLIADVLRKGYLPSVFIPNQEIRTMKELLRYRINLVQDRSRYIFRLKNTLDRLGADSSGNFTTAKRLNLFPISSFSPEYQTIISGYIARIIELSKQIHSMKTYLRDSYEHDTDIRNLITLDGLDYFSAALIKSEIGDIHRFSSFGRLCAYAGLAPKVSQSGSKSARHGGLLHNRRKHLQWILLEVVFPYIKASPEREVRYEYLKRRKCANIAKVIFARQMLKMVYHILKEQRPYYEDTHSIQSVAAPALAGV

SEQ ID NO: 412237 - protein, 382 aa, unidentified
MQTIDTIKPTILLAIELSASTWLVAARVPGWEKPHLHRIDGGDTAALLALISSLQARAARGLDATIGVVCCFEAGRDGFWLHRLLTAHGVVCHVLEPTSILVNRRARRAKTDRLDAEGMLRVLAAYLRGDHQACSMVRVPTPEEEDAKRTHREREKLVQERQRIENRIEALLFTQGIRKRPSLRSWERDLAVLRTGDGREIPRHLRAELDRLRRRLVMTLELIREVEAERDQAAKTKPQDRACHKIAALSRIRGIGENFAAVLTREVFYRSFDNRRQIASYVGITPMPYQSGGMDRDRRISRAGNPRARTTMIQLAWLWLRYQPGSELAEWFRERVGTLAGRTRRIAIVAMARKLLIALWRYAETGVIPAGAEIRAEITVAA

SEQ ID NO: 412238 - protein, 420 aa, unidentified
MQERPSEFAAFIGIDWADRKHDVCLQVAGADTLEKSVIEHRPTVIDDRARALRKRFDGRPVAVCLELSQGPIVSALLEHDFFVIFPVNPSTLAQYRKAFTPSGAKDDPTDAAVALEILRRHPDKLAPLRRESVDMRALRRLVESRRDLVQDRVRVTNRLIYALKAYFPQILDWFRDKETEVFAAFLERWTSLPEAQRAKRDTMVDFFHAHNVRRVNTIEKRINAIKSEKPLTTDPAAIGPALLLVEALLPQLRALSASIVRFDDEIARRCKALPDFLLFSSLPGAGKVFAPRLLAAFGEQRDRFATAAAIQKLTGIAPVTERSGKSHWVHWRWACPKFLRQTFVEWAASSIPQSFWARTFYESRKAKGASHNAAIRALAFKWIRVLFRCWVDRVPYDESRYLAALQKRHSPILKFAAETS

SEQ ID NO: 412239 - protein, 342 aa, unidentified
MDYFAGLDVSVKDTSVCIVDDAGKIVREVKVASEPDALLQVLSNPAYCFKRIGLEAGPLSQWLFSALGEANLPVICVETRHMRAVLKAQINKTDRNDARGIAQMMRVGLYRPVHVKTLRSQKLRMLLTHRKLLQSKAIAIENDLRGTLRNFGLKVGTAGRTKFEARIEELVEEMPDLAVLVEPLLVVRRVLREQIAVLHRRLLTIVRDDEVCRRLMTIPGVGPVVALTYRATVDVPARFRRSKSVGAVFGLTCSRDQSGERDRPGAISRCGDEMMRTMLYEAAQSMLVRSTRWSWLKAWAMQIAKRRGIKRAIVALARRLAVIMHRIWVDGTEFRWTREVTA

SEQ ID NO: 412240 - protein, 351 aa, unidentified
MKTVPTAQPKLYIGIDIHKLSWKVHCATDLFCGKSFSMPPEAKTLYDYVQKNFKDHQVSVAYEAGCCGYSAHRSFAGFGWHSVVTNPADIHRKGKEKHTKTDRIDAQLIARELKDGRLDCIRIPDVEREELRSLFRRRNDIVKDIRRNKSRIKMQLLYFGIKIPEEFSNDKWSHKFRNWVDAVRFTHPTAKSALEGRMRTFRFLDKEKREISTQLRAYCRKHHKEDYYLLRSIPGIGGIVACGILSELGDLRRFNNIKQFAGYLGLAPGIYQSGENSRGTGITKRANKIMRSYFVEASWQAIRADPVMQAYYRKHVHRNSKSIIIKIARKLASRTLAVVKTGIPYEPGVVQ

SEQ ID NO: 412241 - protein, 370 aa, unidentified
MLNTTTFVGLDVHARSIKAVALDAMTGEVRSATFGYDAAEVAGWVSSVDPSAKCVYESGVTGFDLQKRLSSMGIDCVVGAVPKMIKPSADRRRKNDRNDAEFLARMLSVGNVVEVWVPDDECEAARDLTRALDDAREDLKRCKQRLSKFLLRHGLVFSETNAKGRRKKNWTAAHWAWIRSISFPDKADDEVLAYYIDAARQAMEDKARLERLVEAEASKPRWKKRVDSLRCLKGIDVASAADLVFEAGEFSRFKNARSFAAWIGLTPSEHSSGESVRQGGITKAGNKHLRRVLVESAWHYLGCSPHSKDLAKGQAPDPGARRHAAKGVRRLVGRRAAMLERGVHKNKANVATARELACWCWAVGRMVENG

SEQ ID NO: 412242 - protein, 428 aa, unidentified
MDKLITYVGLDVHKDTIAIALAESGKRGEVREYGKIANTSAAVKAVAIKLARDGSELRFCYEAGPCGYGIQRQLAASKHACVVVAPSLIPRRPGDRIKTDRRDAINLAKLHRAGELTAVWVPDQAHEAIRDLVRARLAAVRTLRQTRQQLSSFLLRHGHHYRRPAWTQMHRRWLAGLRFEQPVHHIVLEDCIAAVEAATARRDRLEAHIEAALPDWSLAPVVRALQALRGMAQVVAATLIAELGDITRFANPRQLMSYLGLVPSEHSSGGTRRRGGITKAGNSAARRMLIEAAWSYRFPARISREMLLRQEGLPKAIRDTAWKAQERLCRRYRRLAQAGKLPTVVTAAIAPNCRASSGQLPNWYIGRTADPLTKTATGRTATALTHPKLGKAGGTVTGQENPRIHYQPDLIRCWPLDRGSSATHPVRR

SEQ ID NO: 412243 - protein, 346 aa, unidentified
MKKIAHLAMDLHAKNCTLGQMDDDGSFLGNIEFPTSENNIIDGLKSIKAKEKYLAIEAGTLTYWAAQVANPFVSQVIVCDPRENALIYKSPYKKDKVDTRKLCRLLRLGELNHVYQPENDDRAIFKAAAQHYIDLRNQLIRLKQKVKAMYRHWGVINVFTDAVYSKSGRDKYLAQVKHLPVRNQLLRLYYLMDQTEAMRKSALKSMKQLGRKYAEIREFKKIPGIADISAHVFDAFIQTPHRFAKKNRLWKYCRLSITDRSSDGKPLGFQRIDPSGIGELKALSYRAFMATMKSDNEVKRFYLGSLQRTHSRKHARLNTQRKILSVMYSIWKKGAAYRPELFAGSA

SEQ ID NO: 412244 - protein, 420 aa, unidentified
MRNAGIHADSLLEVRRMYNAVGIDVSKGKSTIAVLQPGGTVIRKPFDVSHTSQSLIELARYLGSLEGSTKIVMECTGRYHEPMLKALYEAGLFVSVVNPHLIKNFGNNSLRRVKSDPADARRIARYTLDNWAELRQYSGMDNTRTQLKTLNSQFSFFMKQKVAAKANLIALLDNTYPGVNKLFDSPPREDGSEKWVDYAYSFWHVDCVRRIGLKTFTERYRAFCRKHHYIFQPDKPEKLFHASKELVAVFPKEKTYKLLIQQSIQQLNLASGHVERLRQEMNALASTLPEYSTVMGIYGVGKTYGPQLIAEIGDVSRFTHREALTAFAGVDPGVDESGQHKSKSNRASKVGSARLRKTLFQIMTTLLQNAPEDDPVYRFLDKKRAQGKPYYVYMTAGANKFLRIYYGKVKECLRNLEQAE

SEQ ID NO: 412245 - protein, 409 aa, unidentified
MDRQLERCCGLDVHKETIAACVRIGGWRGPAEQHVQTFRTTAADLVVLRDWLAAHGVTHVAMESTGVYWKPVFYALESDFTCLLVNAAHIKQVPGRKTDIHDCVWIAQLLEHGLLRGSFVPPAPIREVRDLTRYRKALIQDRTRVANRLHKALEDAGVKLATVASDILGVSGRAMLAALAQGTTDPTVLADLARGRLRGKLPALRVALAGRFRTHHAFLVGHLLTHLDYLDEAIGTLSTEIERHLAPFADQLTRLDSIPGINRRTAEVIIAEIGVDMSAFPTAAHLASWAALCPGNNESAGKHKSGKTRKGNHWLRTALIEASAGASRAKDSALQARFRRVLRHRGPKKAVVALAHTLLRIVYHVLAQGTTYQEHGGDYYDRRHTQRLTRRAIRLLEGQGYRVTLEPAA

SEQ ID NO: 412246 - protein, 381 aa, unidentified
MFTVSTATAGVVYLALELSRSTWLAAARLPGVERTALRKIEAGDTASLLALVTTLRKRAQAQLGCPVDVVCCFEAGRDGFWLHRLLLANGVASHVVEPTSILVSRRARRAKTDRLDAEGLLRVLAAFHRGDRQVCSVLRVPSPAEEDAKRPHREREHLVQERVRIENRIEALLFTQGIRKLHPGHPEAALRTWERDLTSLRTADGRDLPPNLRAELDRLRRRLVLTLELIREIEAERADAAAAPEEVCQKTAALARIRGVGENFAAVLTREVFYRRFDNRRQLGSSVGVAPMPHQSGAMDRDRRIGRAGNPRARKTLIQLAWRWLRSQPGSALASWFRERVGVLAGRTRRIAIVAMARKLLVALWRYVETGVVPEGVELKV

SEQ ID NO: 412247 - protein, 310 aa, unidentified
MAFLHHPPSRVVGLDIAKHTITLVDSRAPAPRVIDNEPRAIRALLKTCDETCLVLCEPTGGHERTVLAEACRAGIPCHRADTLKLKAFIRSFGTLGKTDAIDAARIADYGRERWRTLPLWTPPTRQAQTLVDLVRRRHDLVALRVAERNRAKAPGAAPLAASFEAMLTVIGEQIAAIDTAIDEAIASCPDLVRRSAICTAMPGIGQKTAAALLAHMPELGQLSRRQAAALAGLAPHPNDSGLLRGHRRIKGGRPEVRTVLFMPALSAARGCGEFASFYQRLVQNGKNRLAAIAAVMRKIIVVLNARLQTT

SEQ ID NO: 412248 - protein, 412 aa, unidentified
MQTLIERGCGLDVHQAKVVACLLIVRKDGKVQKQMRTFGTTTRELVGLREWLLSEGCTHVAMESTGVYWKPIYAILEGALEIVVANAQHIKKVPGRKTDVKDAEWIADLLCHGLLRSSFVPPKPIRELRDLMRYRRKLVESQAAERNRLLKVLETANIKLANVATDVFGMSGRLMLRALIAGKATPQEMAELAKGLLRKKIPELQLALEGKLEEHHRFLLELQLQRLEAAEKDLAVLEQRIRQMLEPYAAQLALLDEIPGVDWTLAAVIIAELGVDMTVFGSVSQLASWAGVCPGNNESAGKRKSSRIPGGNVYLKSGLVEAANAAARAKGTYLRDKFFRLKARRGYKRAVVAIAHKILVAIYHMLSQRVSYNDLGDLYLDKRNKNHLTRNLVHRLERLGYEVTLTPQQKAA

SEQ ID NO: 412249 - protein, 434 aa, unidentified
MTVCLELTRLRLARECGPPHINYGLVKSMYYVGVDIAKRNHQACLLDEQGSQLLMMSFANTAAGGKKLLEAVSAVTKPAVTETEFCMEATGHYWLPLYCFLRDQGFEVHVINPIQSDSARNLYIRKSKTDKKDAFILADLLRMNRVTSTKLAEEPVLKLQTLSRTRSEFVSQVGALKSRVLGILDRIFPEYERFFSNVFIKTSRELLKSFTTPDELATIDLSELTEFLAKHSRGRIGYDRAQKIQSYAQASFGISIGTDAFALQLRLLLAQVEFIEEQIAEIEEAIEQVMEELRACQDQPYRHVIETVPGIGPVLAAAIIGEIGDIERFPNARKLVAYAGIDATTRQSGQFEGTRNRMSKRGSPYLRHALWLAAVSARRFNPQLREYFQEKLAEGKHPYVATGAVARKLLHLIYALWSQNRPYETDYTWHPPEH

SEQ ID NO: 412250 - protein, 313 aa, unidentified
MFSEKPDYFIGVDVSKLTLSICVLHKNTINHFEISNNKSDIIAFFAMYANMRSYATFENTNTYNYDLMRAFDELGLAYARLDAFKFSHFLKHNSKNKTDKSDAYAIALYGSKFYDELGKNEFSEEFALIKSYQSGLTQLNKISVQIQNFNEALANIDNQTLKEAMFEVLETLKEQKKKVEDEVFELICSIVPQTKQIIAENKGFGKTFAVYVLPLIYLNRTRSSNELVSYIGLAPMSYESGTSVKRGTHISGGAKLARNCLFMCSLTASKYNEHFSAIYKRHIKNGKAKKVALCAVARKMLVFVKNIYFKDEK

SEQ ID NO: 412251 - protein, 345 aa, unidentified
MTVNCGLDLHRHQITFDWVDSETGECARGRIAPADRSELRGWLAGFADRDLEVVVEGCTGWRFVAEECRRVGTKVHVADPGEAASIGRSHKKRAKTDRVDARHLRGLLEDHTVPESWVSPPQALEARALVRLYSDLVQERSRWLQRIHATLFHHGALPQRKLLLGDRVVLHASPALSPAGREAIEAALVVIDALDGQVARVRAQLVAFAAHQPGCVELQREYGVGRLYAVIIWAELGDTARFSSSDDAVRHTGLDITVHSSDGKRTAGRLTRQGPPLLRWALYEAARHASRTGSPDHEYYQRAAARVGAQRATLSVARKLTRRCHHRLRALGDQAIADLPDVQAA

SEQ ID NO: 412252 - protein, 356 aa, unidentified
MQTQVTKKIDFTGQSLFIGLDVHKKSWSVTVVVDGIEHRTFTQPPDPKALNNYLQRMFPGGAYNSAYEAGFCGYGIHRELNSLGIRNIVINAADIPTSQKDKLNKRDPVDSRKIARELEKGSLHGIHIFDRDLEELRSLNRTRFYLMRDLRRSKNRIKSFLQYYGEPIPPEFDNNQWTLKFVSWLKQVQMKTPGGQDAFSYLIRSYEHQREQMVSLSRQVRVRIREYDNELYSLLKSISGIGPLTSSALMTEIGDINRFPHIDHLSSFVGFVPRVRESGETTHTGGITFRCNSFLRTLLIEASWQAIRQDPALMQYYHRHLVNNKGHKVIIKVARKLLNRIRYVMKNRKPYETGVA

SEQ ID NO: 412253 - protein, 325 aa, unidentified
MTSPTYLGLDIAKRKFDAALLHPQGRCVHKQFPNNQDGFAQLARWLQGHTTGPLHACLEATGSYGDAVALFLHQHGHRVSVVNPARIKAFGKSELSRTKTDKADAALIARFAAAATPRPWTPLQPEQRQLQALVRRLEAIQRMRQQERNRLDLEAADSLVAESLREHLAHLDQQIRQLQQRLRTHVRSHSSLQQQSDLLQSIPGIGATTALNVLAEIPDLAHWPSARQAAAYAGLTPRHRESGSSVRGRPRLSKIGNPRLRRALYLPAVVAMRANPILRTFAARLLAAGKPKMAVVGAVMRKLLHQAYGVLKHATPFNPNLELTP

SEQ ID NO: 412254 - protein, 418 aa, unidentified
MFALIEPVLKCCCGLDVHQAVVWACLLIEQPDGKAVKRNRSFSTMTKGLLQLKDWLEEHHCQHVAMESTGVYWKPIFNIVEDSAKITLVNARHLKKVPGRKTDVKDCEWIAIVHRYGLVKASFVPPRPIRDLRDLTRRRRKLTGAAASEKNRIQKVLEDANIKLSAVISKIWGVSCREMIEALISGGYTPEEMATFARGRMRKKIPKLQEALAGKMSDHHRFLLTQAMEHIQYLEGQIAALDERIDQCLTPYREVYECLQSIPGVDEVAAAGFIAEMGADMSPFPTAAHVASWAGMCPGNHESAGKRKSGKTRPGDKYLESLLCEVAWAASRTKDTYLSAKYNRIAYRRGPKKANVAVGHSIIKIAYHIIKERVLYLEPETKQLTAQQTQRLLKKHLHALERLGYKIELPQEPVKQAA

SEQ ID NO: 412255 - protein, 326 aa, unidentified
MDNVYRSCAGIDIHQNNVVACVLVGPLTSTRPKKYEATFKTTTRDLEALNHWLKSFGVEAVGMESTGVYWKPIWHALINDFKLILANPQRIKNIPGQKTDKKDAYWIAKLTRIDLIPASFVPDENIQALRNLTRQRIHYIESRNTEKNRVHKILQCGGIKLTSYIKDVFGKSGRNLLDMLMNGEVITLKKIQNSVYTSLKNKTQDLYDAMDGYLSKVDRFLLKQAMMIIDTYNEAIESIEEQIDEQLKIYEEELEVLDSIPGIDKIAASIIIAEIGDDVSQFPTANHLASWAGLCPGNNESSGKKKSTRIRKGNRYLKNICAKQLL

SEQ ID NO: 412256 - protein, 409 aa, unidentified
MEHHTEAFIGLDTSKLRNAVAVAEGGRNGQVYFVGEIDNTEAGLRKLVRKLESKYQKLHFCYEAGPSGYGLFRLIEELGHNCSVVAPSLIPRKAGDRVKTNRRDALNLAKLLRAGQLVGVWVPDERHEAMRDLVRAREAAHLDYRRNRQQVSSFLLRLGRHFPGKNTWGKAHLNWLARQKLDHCEQRIAFEELMLAVQQARERVERLEQAIRDSVPEWSLVPVVEALQALRGMRLISAVVFMSEIGDLSRFESPRQLMAFLGIVPSERSTGESVVRGRITKAGNRRARRILVEAAWSYRHPPRVSKDKQEKLETVPRIVREIAWKAQTRLCGRYRKLTRKGKVSTIAVTAVARELSAFIWAIGREVAAMKMKPGVSKNLQSRPRQTCRRAQVSKGRALWVAAKQAASLD

SEQ ID NO: 412257 - protein, 315 aa, unidentified
MKKHAKPDVGVFAGIDVSARQISVARLQRGEENPAFTTFANSASGHTALVAFLLHAGDGLRVCLEASGNYSLDVALMLHAHRKVEVSVINPRRARRFAESLGERSKTDPVDAYVLCQYAARMPWESWQPPSSTALRLRAITRAIESLGVMHTQENNRAHALSSSQALPALVLRERQRHQHYLEHRIKQLRREACRLIARDPELDRYYRLMLTVPGIAQTSALQILGELAVLSETSDARQWVAFSGLDPCHFSSGTSVEKRPRISRGGSRYLRHALYMLSGVIRPFAERTTGQYRMPASVRTRLVTLHCRFIGDPS

SEQ ID NO: 412258 - protein, 343 aa, unidentified
MGRKIGVDLHKNSFRVCYYQNDEKYDFETYHVSVKGLEHFRKGLRKADELAVESTGNTGHFVRSIEGKVKRIRVVNPMQFKVISESVKKTDDEDALKIAKFLSKDMIPEVRMKTKQEGQLSSLIGTRDKFVKLRTALKNKVHNILNANGIVTKTELLTSDKSLDKVLGNKLDEACLFELEIIVSEIRNLNEAIKKIDAQVKERGQKLDGFKGVTSITGIGDMSGTILLNTIGDVKYFRDEKALASYFGIVPRIRSSNETTHMGRITKMGNKIARTALVQSTLIAIRYSPYLRAFYDRLKAKKGSGKAIIATARKLLGIVYNTLKNNWVFEDFNNYKLAPQGAY

SEQ ID NO: 412259 - protein, 314 aa, unidentified
MSGINVGIDVAKEELVVAVLPSGEAFTEVNDDRAVVRLVKRLSALRCERIVLEASGGYETLVVGALAAAGLPVAVVNPRQVRDFARAIGQLAKTDPLDARVIAMYAERVQPPIRELPDAQTRALRELCVRREELIEMLIAERNRLRLASPATHHEIAGHVDYLLKRVKQIDRDLDQAVRNSPPWRAKGELLTSVPGVGRVSRAVLLGLLPELGRLNRAEAAALLGVAPYNRDSGALRGRRMIRGGRPRVRRVLYVATVAAVRCNPVLRAYYLRLRAAGKPIKVSLVATTRKLITILNAIVKTNTPWRPPCATPL

SEQ ID NO: 412260 - protein, 319 aa, unidentified
MEGSPRSFDSFVGIDVARDKFDVCVLPTGDAFSLKYDDKGIRALLERLRPRTNGLIVLEGTGGLEQRLVAELQDAGWAVAVANPRQVRDYARGIGYLAKNDRIDAHVLARFAREVLPHAREKKPEKLRELEQLVIRRRQLLDIRVAEGQRAERMTSVKGRKSIDKVLKCLAKELEDIEAAIADLIQSDDTYRQKSEIVQSTPGIGPVTSATLVAELPELGILNRQEIAALVGVAPYDHDSGVHKGRRSIKGGRGSVRAVMYMAAMSARRFNPIIKRFADRLEKAGKAFRVVLTACMRKLLSILNTMVKRKTQWDPRIAG

SEQ ID NO: 412261 - protein, 416 aa, unidentified
MGVEICSEELAGKVVAGVDTHADTHWLCVLDEERRVALSREFPADAAGIAALADAIGDPARCAAVGVEGTCSYGAALAGELALRGFRVLEVLNKKKGRRRGRGEGKDDALDAERAARDVLAADGTSVPKERSGWVDGARSLLVARERCVSARVEAHAAALSLARTAPEDERRRWEGMGQERMMRAMLEIEEEGAGALHRAMLSLARVWEACTAEAEGLERMIADAVSEGCPALLAMYCCGPVSAAKLAVAAGANPGRIRSEAAFAMLCGAAPIPASSGKTERVRLNRGGDRRANSALHEIAVRRLRYDPATRDYVARRISEGHTKAEALRCVKRYIAREAYRALLRPHDVGERLDRSSLRGAREGAGLSQAQVARALGVAPSSISGVETGRNQCRRLAERYSQWVLDGMPMEGIGT

SEQ ID NO: 412262 - protein, 345 aa, unidentified
MNVTTVGIDLAKNLFQVHGVNGRGRPVLTKQLRRSQVPEFFANMPPCLIGMEACGSAHHWARKLRGFGHEVRLMAPQFVKPYVKTNKNDAADAEAICEAVGRPNMRFVPIKNVEQQAVLALHRVRQGFVKARTAQANQIRGLLAEFGLVIPQGICHVAKRVPGLIEDASNELPGSFRRLVQRLLEQLKELDRQIHEIENQIVAWHRENNDSRKLAKMPGIGPITASAMVASIGDPKSFDNGRQVAAWIGLVPRQSSTGGKTVLLGMSKRGDSYLRTLLIQGARSMINAARRRKGALDGWLGGLLKRRNANVAAVALANKNARIVWALLAHERDFRPDYAAVNAVA

SEQ ID NO: 412263 - protein, 364 aa, unidentified
MNATATTNPMTATGTILALDLGKYKSLACLYQRDTAEYYFQSLDTSRDHLRHLFQQQRPALIVFEACALAGWVHDLCTELGLPCKVANTASEAWKFKHSKRKTDKDDALRLAQLEALGQLPTVVIPPKQTREWRGLIACRQDLVGRRVALQNRIRALLVGQGLPAPRGHRAWTEAGLHEMGHYARPLAECRPDELWRGLLELALTEYRHVLALLQQAEARLDVLAKTDAGVRILESIPGVGSRTAEVIVAYLGEAKRFPTAKQVSAYAGLVPRQYQSGESDRRGRITRRGPALLRKLLVECAWVMLRYNRWARIVYQRLSRGKARKKQAIVALARKLLVRCWAMLRDKARWRDETAVPAAAVPA

SEQ ID NO: 412264 - protein, 346 aa, unidentified
MIVIGCDYHPSWQQVCWMDTLTGETGEQKLDHASGEAERFYRGLSGTALIGMESTGNCQWFVELLTTLEHEVWIGDAAKIRACEVRQQKHDRRDAALILKLLVEGRFPRIWTPSGPEKDLRQLLIHRHKLVRMRVQVKNELQHLAMNQGITKKRKLWSKAGEKTLCKLPLKPWASRRREDLFKLREMLHAQIAPLEEAVRKAAEENEKARLLMTQPGVGPITAMAFVLTIGDVHRFRRGKQVASYLGLIPREYSSGGHQRFGPISKQGNRFMRMLLVEAAQSAVRRDPQMRSEYLHRCHSKKKGIAKVAAARKLAVRLYWMLRTNTQYPEIVRVESSSRVPLVSAS

SEQ ID NO: 412265 - protein, 392 aa, unidentified
MYIVGIDIGKNHHEASIVSPEGKQIGRSLRFATTHKGADSLMSFIFKNIGNSPCVFGMEATGHYWYPIYSFLKAKGYTICVINPIQSDSLRKMYIRQTKNDSIDSFLIAEVIRFGQFGTTSMADENILAMRQLCRYRDSVISSRTEIKLRIGTIMEQIFPEYEKQFSSLWVSTSMGILEKYLTPENIENAPIDELFEIIKDKSHNRLTKAKAISIKEAAADTFGIKIAQDAFSFQLKQLIDRMNFLDKQIEALDIEIMKYYEQFDCYLHTIPGIGIIGAATILAEIGDISRFKNSSALVAFAGIDPTVRQSGEFNSTHNHMSKRGSPYLRHAIFLAATTCSFHNSPLNAYYKKKRDQGKHHLTATGAVARKLTTVIYAVLRDSKPYEPKKFC

SEQ ID NO: 412266 - protein, 425 aa, unidentified
MNYKQNEKINQVKESTLVVGIDIGSTTQYARAFDWRGIELGKVFPFSNSREGFESFKAWMQHLQDKYRKSDVIVGIEPTGHYWFDLGAYLEDEGILLVMVNPYAVKQTKELDDNSQSKNDRKDPKVIAKLVTEGRYSAPYTPDGVYADLRIMVVNRKRLIREMTQIKNRFARWFAIYFPEYTDVLGDYEAQSSMLLLKKVCTPEAIVELGAEKINQIWRDAKLRAVGMKRATTLCETAKRSIGLKKGSSAARYEMKLLLEDYEYKKAQLDAVMEEIEKLCRKIPESEQMLAIKGIGVITVAGFLAEVGDVRRFESPRQIQKLAGLSLRENSSGKHKGQTSISKRGRSKLRAVLFNAAIPLIAKNPEFKSLHEYYTTRANNPLKKKQSVIAISCKLIRVFYAILANGVTYDAQKMLSDIHRQPQAA

SEQ ID NO: 412267 - protein, 394 aa, unidentified
MLKYSLGLDISAQDFHACLSVIDQQQKVIVLTTKKFANTKSGFTEMHNWITKHRKEVNVPLVVCMEATGIYHEGCAYFMQSKEYAVSVILPNKSKNYIKALGVKTKNDKADAQHLARMGAEQSLELWQPHSKFYYELRELTRQHQNCQELKSVFNNQLLALGHGIYRLKIVEKQLKKNIAIIEKQLKELETATKKHIESDVDIARKVKQICLIKGVALHTASVIIAETNGFALIKNYRQLVSYSGYDVVENQSGSHVGKTKISKKGNSRIRRALFMPAFTVVTHNQKPFADLFKRTYERHKVKMKSYVAVQKKLLTTIYALWKSDTPFNENYKHELSECTVPDNNATSIERENLTDGKKISPTKNGKAKQGSRINLTPQVTKVKNKIKVKQENS

SEQ ID NO: 412268 - protein, 464 aa, unidentified
MAKLNKHNKGATSIESSRASSLQLAVINQHTAGIDIGTTLMMVSYTDTQGNQCLFETDGFTQSLHALAQKLVDASVTDVAMEATGIYWMSLYEILEEYGLVVTLINPRHFKNVHAQKTDAKDCQWINQLHAHGLLRASHIAPELYRELRSYLHERNRSQSQKGDTLNCIQRTLSLMNLKVQHLLSDIEGVSGMAVLEAIAGGCKEPEALVELIKLGRVKASKEDLILSLSGYYKANYIAILNQQLKTYKFHVEQMRDYEKYIEAVLKKMLPEDEKGTQASIPDKKTKIRKNQYAFNLSGYLKEILNVDTTEIPGFNEITTLSIIAVTGNDMSKWKKAKYFTSWLNLSPIPSKSGGKLLGHLKRYTNNPASQAFRLAAQSLWNHKGSLGVLYRRLSAQRGSSVAIKAVARKLAIIFYNMVKYGKAFDSSKITADPTKQRDKKVANLKKQLAAYGYAIQPIVNTSL

SEQ ID NO: 412269 - protein, 341 aa, unidentified
MMLYVQVESVDMLINVGIDVGKESLDLCVLLDKTIGKLKSKKFKNKKEGYISAVEWLTKTIDCAPGTMLITLEATGVYHEGIAYYLYSQGFRMFISNPGKAKKFAQSLGLVHKTDKSDAAMLAKYGSIQPDDMSLWVPEDDDVRAIKTLIRRLNALEKDKLRESNRLEASLISDAAKRVIQSTRYLISVLGNEIMDIQNEIDQLISSNQEMNKNRELLLSVPGIGAVMARELVYLFSAKKFTSAKQVAAYVGLIPRLNESGVFKGRSSLSKSGPARTRSKIFLAAVCAGTHNPDIKAQKVRLIHAGKTKMQALGAAMRKLIQICFGVIKNQTRYQPQIVLI

SEQ ID NO: 412270 - protein, 346 aa, unidentified
MEHYAGIDVSLELSSVCVVDAQGKIVREAKVASEPEALLAFFASLGFEVKRIGLEAGPLSQWLHAGLKRTGFDAVLLETRHVKAALSAMMVKTDRKDARGLAQLIRMGWFRPVHAKSMGSQEVRALLVARKQLLGRLIDVELSIRGILRGFGLKVGVVTRKGFEARIRELVTGHITLERIAGAMLSARATLKVEYEKLHKIVLTIVREDAVCRRLMTVPSVGPLVAITYKSAMDDPNRIAKSKAAGALFGLTPKKYQSGEKDVSGGITRAGDEMVRTALYEAANVLLARITRFSKLKRWGIDVAKRRGSKRAKVALARKIAVILHRMWVDGTTYRWTDAQPIAVQV

SEQ ID NO: 412271 - protein, 403 aa, unidentified
MNAVGIDVSKGKSMVAIMRPFGEIVSTPFEIKHTSSDINSLIELINSVEGESRIVMEHTGRYYEALAHELSVANLFVSAVNPKLIKDFDNDSLRKVKSDKADSVKIARYALDKWQNLKQYSVMDELRIQLKTMNRQFGFYMKHKTAMKNNLIGILDQTYPGVNSYFDSPARSDGSQKWVDFASTYWHVDCVRKMSLNAFIDHYQKWCKRKKYNFSQSKAEEIYGKAKELVPVLPKDEITKLIIKQAVDQLNSASTTVEELRTLMNETASKLPEYSIVMNMKGVGPSLGPQLMAEIGDVSRFTHKGAITAFAGVDPGVNESGTYEQRSVPTSKRGSADLRKTLFQVMDVLIKTMPQDDPVYQFLDKKRAQGKPYYVYMTAGANKFLRIYYGRVKEYLATLPESN

SEQ ID NO: 412272 - protein, 385 aa, unidentified
MTSITYVGLDVHTTNYTAACYRFETDNTFAVAELKPKADEIEKYLKRVKKNLGEDCEFLCGYEAGCLGYSLYHELTAKGIKCVIMAPSTIESAPVNKIKTDKRDAKKLARCLATGGYKAVHVPTDEDNAVKEYIRMRDDVNGALKRIKQQITAFCIRNSKIYRGVVGKNYWTHKHLNWLEKLEFNNPVLRETLEEYIAVFYVLREKIDTYDAKIAELSQTPRFEEPVKKACCLLGIATHTAMATISEISDFTRFPSAGSFAAYLGLVPGEHSSSNKRNQLSITKQGNTHVRRLLVEAAQSYTKGQIGKKSAALKKRQAGMDPKIIAYADKCVERLKRKYVRIALHSNRNVAKTAIARELACFIWGLMTNNYGECRGNVENRPILC

SEQ ID NO: 412273 - protein, 374 aa, unidentified
MGNYNEAFVGFDTSKSRNSVAIADGGRRGEVRFLGEIENTAAATAKLVRKLSAKYKRLTFCYEAGPTGYGLHRQIKGLGFGCVVVAPSLIPKRPGDKVKTNRRDALSLAKLLRADELTAVWVPDGGHEAMRDLTRARETAMLDLRTKRQHVSAFLLRLGRPYPEGKKTWTKAHLSWIAGQKLEHPQQRLVLEEMMLAIRQAQERLARLEQAIAAAVPEWSLAPVVTALMAMRGMDLISATTLLAEIGDLSRFRTPTELMAYLGLVPSEDSTGDAVKRGPITKAGNRRARRMLVECSWSYQHPPRVGQAKQPKVDAAPPAVREIAWKAQCRLYRRYRTLIRKGKLKTVAIARELAGFVWAVARAVSAARVAAATA

SEQ ID NO: 412274 - protein, 386 aa, unidentified
MQRNDLSRSLVAFDQNSTLVAVVELSLKTWLIAGLVPGLTRQPLKKQGADADALLALLHRWQGEAIKAGRKIERIVVAFEAGRDGFWLARWLRARGIESYVIHPTSIPVSREHRRAKSDRLDTELLMRAVLGWLRGEVKHCSMVAIPTLAEEDARRPNREHEHLIGERTRILNRLKATMIRHGIRNFNVKLRKALERLAGLRTPEGVALPANTLEELRRDMARLRLIRDQIKEIEQQRLRRLRKAPQEGTHPMLLMLAKVMGIGVETADMLVHEVLTRQLRDERAVGRYAGLTGAPDESGSKRREKGLARAGNARVRRGMIQLAWRWLMFQKDSALAKWFQARTANARRNVRKTMIVALARKLLIALWRYATAGEVPAGAKLRPAI

SEQ ID NO: 412275 - protein, 391 aa, unidentified
MPVKTDRPTITSSAIRADLGAIFISLELSRSQWLVTSLSPGGGETMSRHSVPAGDIAALLARFDALEKKAQARTGRRFGLVVIQEAGLDGFWIHRVLKAEGIESHVVDPASVTTSRRARRAKTDRLDGEALVRTLLAYTRGEPRVCAMVRAPSPQEEDRRRVGRERKVLVGERTRHVNRIKGLLFAQGLYGYQPLRRDRRERLEPLQTGDGRALPAHLKAQIGRELDRLDLLDAQIKAVETERDALLAAQQTGADRPAPATMLLAIKGIGPETAAILWSECFYRHFDNRRQVAAYAGLTPTPWRSGSIDREQGVSKAGNARLRTTLVQQAWLWLRHQPGSALSRWFQERMQATGGRYKKTAIVALARKLLVALWKYVTAGVVIKGAVMTRA

SEQ ID NO: 412276 - protein, 359 aa, unidentified
MCRRVVGELIRKISVSSPVQRRTSCALDQTFTTGGEETVLAVSLELAAAKWKVALHDGRREEPAGHTVAQPQAAARLQAVQDVIEQQKLQWSLPAGTRVVVSYEAGQDAFWICRALQGHGIECYVVDPASIPVERHKRRAKTDRLDVIKLVINLRAWLRGERDRMHVVHVPSPQDEASRQLMRDRGELQKEVLQHRDRMRKLLVTLGCWDEVDHKHFAGRLARDEVRCHDSAPLPPELRERLLRECERLALAAEQLAALEKTRQASLPAPARRRSDDLARLKGIGEVSASRLALELFWREFSNRRQVGACVGLVPQPYDSGESQVDQGISKQGNRRVRALLVEMAWTWLRYQPSSALTQ

SEQ ID NO: 412277 - protein, 349 aa, unidentified
MDRTTYGLDIAKNVMQLHWVEAETGEIGRKKLARARLAAYFAELQPVRIVMEACGSAHHWARVFVAQGHEVELLPAAQVRPFVRSNKDDAADARAIWLAAQQSDIRRVPQKSVEQQAVLALHRTRSHWVSVRTATVNSLRGLLYEFGVVLRGGRQAGLKALAEQRVVIDEQIPATMRTLVDGQLNTLQHIGQRIEQLEREIAALHKQLAGARELDQVPGIGVLGSTALAATLGDGKAWRSGREFSASLGLVPAHAGTGGKVRIGHLSKRGDPYLRTLLIHGARSVIEHAKHKPKWLEQLLARRPKNVAVVALANKMARTAWALVAHGRAYQRDWQSARPGSAAAQAAGA

SEQ ID NO: 412278 - protein, 421 aa, unidentified
MTVYLERGYNRKEYQWFYKQYQNIYSKEIFMIYVGIDVAKDKHDCFITNSDGEVLFKSFTIPNNREGFETLFQKVQSVSDDLTKVKVGLEATGHYSYNLLGFLLDKGLPTYVINPLHTNLYRKSLSLRKTKTDKVDAHTIASMIMSDVNLKSYSDTSYHNEELKSLTRYRFDKVKERAKLKSSVSRLVCILFPELEKLVPQLHMASVYALLSEFPSAHAIASAHLTRLTHLLSESSHGRYGKDTAVMFREAARSSIGSIMPAKSLELKHTIKLIQELTSEIDEIETEIKSIMDEINSPILTIPGISYNMGAMIIAEIGDFSRFDSADKILAYAGMSPSTYQSGQLDNCYSHMEKRGSRYLRYALYNATKYACIWDKSFGAYLAKKRAEGKHYNVALSHATKKLVRLIFAMEKSRQAYRIAS

SEQ ID NO: 412279 - protein, 337 aa, unidentified
MKLYTGIDLHSNNHYVVVIDQERNRLVEKRLPNDLSKTLCVLEPYREHMDSIAIESTFNWYWLADGLINHGYHVELVNTVAAQQYSGLKHTDDRSDAFWLAHMLQLGILPTGHIQPPEPRALRDLLRKRLQLVEDRTQHLLRVQSQIMRSCAQKVSSRDIKAQNLRPSHYTDDRNIQRALQAELACIALLGEQILAIETQAQSQCRLNPDYKLLNTVFGIGPILAMTIMLEVGDISRFPKVGNFASYCRCVASARFSNGKKKGVNNRKNGNKHLSRAMVEAAYFAARFYQQPRQFMERKTKQVNRTLATKALAHKLAKACYYVLRDQVPFQADKLFA

SEQ ID NO: 412280 - protein, 327 aa, unidentified
MTASVASHNQIFIGIDVGGLSFEAAWHRGGSTQYQNRPDAIAAFVARLSVEKQIIRIAVEPTGGHEKALVKALRGAGLPVEMVHTSRFAAYRKLIGAKAKSDTSDARLLAAYAAAPEEVRGRKAGHVVLPQDDVREQLAELAARRDQLKHMIHAETCRLSTVRSPSIRDEITAHLQAMRQADRKTHDAMMQLVRQRDELRNAKRLLQTIKGIGDKTALTSIAAVPELGLISNKAAAALVGVAPFVRKSGTMTAPAHIHGGRALVRNAFYMAAVTASRHNPVLAPFYARLIAAGKPVKVALVAVMRRLVVYANAVLRSGQPWKGAEIG

SEQ ID NO: 412281 - protein, 357 aa, unidentified
MEKQNNSISFNNQRFYIGVDVHKKQWTVTIRSNKLALKTFSMKPSAKELSEYMRKKYPGGEYRSVYEAGFCGYSAHRELESYGIKNIIAAPTEIPTSSKEKNKKRDSVDSRKLARELENGSLEGIYIPSQLQQELRSIVRQRFQVINKQTRLKNQIKGYLDFYGHKLPENYQLKYWSKNFIKHLGTLSFSYAIGKEQLAIYLDELTEMRKLLLRIIRQIKNYLKEHSLKEEVSLLCSVPGIGFTTAVTLYTEIIDPKRFLSFDRLSSYVGLVPSIRSTSERETVLGIKFHHNKLIRQLLVESAWIAVRKDPALTLSYNNYLKRMSKQEAIIRIAKKLLSRINYVWTNKKPYVSSVVK

SEQ ID NO: 412282 - protein, 367 aa, unidentified
MKKVSTVVTKKGRHFSQPTLTIGLDLGDRNSCYCVLDDAGQIQLEQRVRTHGKALREVFGAMPRSRIALEIGTHSPWISRMLSELGHEVIVANARKVRLIGESRKKDDRLDAQTLARLARIDPELLSPVKHRSAQAQADLMMIRARAGLVRTRTGLVNTARGLAKSYGERLRGCNVRNMNPEKAESLSPELQTALQPLLAAIESVSERIAEYNERIEKLAQERYPQVGLLTPIKGVGTLIALTFLLTLEDPHRFRKSRDVGGYLGLQPGRRNSGQSEPQMHISKEGDPYLRTLLVQGAQHILGPFGVDCDLRRWGLKLAERGGRNGKKRAIVATARKLAVLLHHLWVSGEVYEPLHNSQSPVMMAAA

SEQ ID NO: 412283 - protein, 438 aa, unidentified
MRRVIGIDVHRTFGEVVFWENGRLRHAGRIDMTRTALEGFGKTLLASDEVVVEATANSMAVSRVLAPFAARVIIANPLQVKAIAQAHVKTDKIDAGTLASLHAAGYLPQIWTPDAETERKRRLVARRYQVVRHRTRLKNEVHSILHTHLIPKCPHADLFNVRGRAWLAAQSLLDDERAAIDRHVRELDRLAEDLALLDREIAQDAIDDPAVNRLMTITGVNLAVAAGIVAAIGDISRFNSPQKLVSYFGLNPRVRQSGLGPAHHGRISKIGRSHARAMLVEAAWTAAKTPGPLHAFFVRIRARRGHQIAAVAVARKLTVLCWHLLTKGEDYQWARPALVANKTRAMQLQAGHPQQKGSRRGPAYAYNIKALRDREMLIAAQAERSYERFVSQWKPRRPKNRRAGASARQDKIGSPVTLAADASRFATRSPARDDHNRR

SEQ ID NO: 412284 - protein, 342 aa, unidentified
MKEVSIVGLDLAKRVFQLHAASADGGLVFRRKLSRVHVLAFFSELPRCVVAMEACATAHYWAREIGKLGHEVRLLPPAYVKPFVKRQKNDAADAEAIVEAAIRPSMRFVVPKTEKQQASSMIFRTRDLFVRQRTQLINALRAHLAEHGVVAPQGLASLAALRGIVEDDDSGLELLVVETARIYLEQIDLLTARISNLEKVLKSEAQQSDNTARLMSMPGVGPITAIAIEAFAPTMTTFQKGRDFAAWLGLVPKQHSSGGKQVLGRTSKMGQRDIRRLLIIGAMTVIRWACRKPPSGSSWLGRMLTRKPRMLVAIALANKMARSVWAMMTKKENYKDSGLATA

SEQ ID NO: 412285 - protein, 355 aa, unidentified
MNSEKYIGMDVHKESISIAVMNGAGKIVMECVIETKASVILQFIHGLRGDLHVTFEEGTWAAWLYDLLKPHVTKLVVCDPRKNASMKEGNKSDKIDARRLAELLRLNHLSPVYHGEHGLRSLKELVRSYLTITKDLGRVMSRVKAIYRSWGIACIGKQVYAPRHRAEWLGKISELGVRRRAEFYYQQLDALRALRKQVRRDLLAECKKHQAWKQLCQIPSIGPIRAAVLLGILQTPHRFRTKRQLWTYSGLGIETRSSADHRSVDGQLERAKKQISVRGLNQNCNHDLKNLFKGAAIVASSKPGPFQEFYTALLTKGIRPEMARLTLARKIATIALMVWKRGASFDAQHLKPQTA

SEQ ID NO: 412286 - protein, 331 aa, unidentified
MGNVTTVGIDLAKNVFSLHGVDADGAVVLRKTVSRARLMEVVVQQPACLIGLEACSGAHEWARRFQELGHTVKLMAPRFVAPYRKNGKNDGNDAEAICEAVSRPSMRFVPIKTLEQQAVLCLHRVRQGFVEERTATINRLRGLLAEFGFVLPQKAGEVRRRATEWLEQMPPRAAGAIRDLREHLRVLDERVKEYERSIEAHARDHEQAKLVQQRLGIGPMSASAIVASVGDMREFKNGRQFSAWLGLVPRQHSTGGKQRLGHITGRGDPYLRTLLVMGARSVLQRASSQSDPLSRWALAVRERRGYHRACIAVAAKNARVIRAMLNQHAAA

SEQ ID NO: 412287 - protein, 421 aa, unidentified
MLKIHRFNCAGLDVHKNLIVATIGITNKKTRVTEYIQKEFSSLNYDLYHLKNWLIEHDCFDVCMESTGKYWIPVFNVLETENKMNIVLVHPKYVKAIKGKKTDKKDSKWICDLFKHDLLKSSFIPPKDIRELRDLSRYRFKLICMRTGERNRYQNAMTVSNIGLASVVSDPFGKTAQSVMNEVLSTKVIDENKIKKLIHGRCKNKDKIVESLKNSKIEPDQRFKMTEIQSHMNELDQHIEAVEVEIIKRASKYFDNFLHITKINGIQMMSAILIISEIGVDMTQFETDKQLCCWAGLSPANNESAGKKKSVRINKAGQYLKPVLVQCALASIKNKDSYFGQKYSRIKKRRGHKKAIIAIARMMLVSIYHMILTGETFNPSDYESFKNPKPQREKNIYTVETALDFLKSQGFDVSSIQDIPK

SEQ ID NO: 412288 - protein, 412 aa, unidentified
MDIVVERSGALDVHKAQVTACVRVPDGSKGQRVEEVETFATTVPGLLALADWLDAHGVGRVAMEATGVYWKPVWAVLEDRFDLMLVNAHHVKQVPGRKTDVSDAQWLCRLVEAGLLRASLVPPKPVRALRNLTRYRKTQIQDRQREANRLHKLLEDTGIKLDCVASDILGVSGRAMLDALVAGTTDPELLAELAKGRLRQKLPALREALQGRFDAHHALLVGQLLAHLDFLEESIEQLSDEIEVQIAPFAQAVELLCTIPGVARRTAEVIIAETGGDMTAFPTAKHLASWAGMCPGNDQSAGKRRTGTTRKGSKWLRGALAEAALSAARTKDAYLAAQYRRLAARRGPRKAMTAVGHSILVAAWHMLQTGETYTDPGGDFYARRNPQRLTRRLVAQLESLGHTVTLQEAKAV

SEQ ID NO: 412289 - protein, 415 aa, unidentified
MEIIYPRVAGIDVGKREIAVAVRTPGDVPGRRRQQIRKYKTYYLVLRGMVAWLVEQGVTHVTMEATGVYWKPVFHALCEAEQIEVLLVNARHVRNVPGRKTDVKDSEWLAQLLECGLLRGSFIPPKEIAAIRELTRYRKKLIEERTRELQRLSSVLEDGGIKIDSVASSITTLSARDMIEALIGGERDPRVLAELARGVMRNKIPDLTMACDGRFGDHHALLARMHTDQIDNLASMIQVLDDRIEEVVDPFAEQLRLLLSIPGIGERAAQVIISEIGVDMARFPTAAHLASWAGLCPGNNESAGKHKSGRTRKGNAEVRSILTECAWSAGRTGTYVGAQFRRMHRRFGKTGGGKAAIAVAHTLIVIIWHVLHDGAAYRDLGSDYFTRHDNPEARKRRLVHDLQSMGYQITITPAA

SEQ ID NO: 412290 - protein, 318 aa, unidentified
MTAFVGIDIASQKFDVAVLYGKNSYKCSSFSNSTQGFIAFTNWLQVYGEIHICMEATGAYSTPLATFLDEISVPVSVENPARIHAFAQRELTRNKTDKSDAKMIARYCRLYHPTLWKPAPLYIRQLLSLMSRLDNLKEMLRMEQNRLLTADVIITVSLQENINSLSRQIVVIQQAVKEHINANKELKKNKALLTSIPGVGDILSCMFLAYVGDISKFSNNKKLVAWVGLNPMQQESGLWKGRSKISKKGNIELRKALYMPAVAALTHNPILIDLKNRLKVKNKSGKSIVCAGMKKLLQLMYGVLKSGVPFDAKKSFAN

SEQ ID NO: 412291 - protein, 413 aa, unidentified
MAVFCGIDWAEDHHDIALVDQDGALLAKRRIGDDAAGFAALLQLLAEAGDDPDAPIPVAIETSHGLLVAGLRATGRPVFPINPMSVSRYRDRHSVARRKSDAGDALVLANILRTDLAAHRPLPADSELAQAIAVLARAQQDAVWARTEAHNKLRSLLREFYPAVLAAFASKRGGLLRREARALLAAAPTPRTAARLTLSQLRTVLRRAGLQRGLDVEAQRLQQVLRADYLHHPPLIEEAFGQQTLALLRQLDTACANAEQLAAATAQHFAQHPDATIITSMPGLAELTGARVLAEIGDDRNRFADARGLKAYAGSAPVTRASGKSTTVLHRRVKNQRLASVGYVWAFAALTASPGARAHYDRRKNAGDRHVSAQRNLFNRLLGCLHHCLHTHQTYDEATAFPATSSTPNARAA

SEQ ID NO: 412292 - protein, 337 aa, unidentified
MTIIRIGLDTAKHVFQVHGIDENERVRLRQQVRRGEMEKFFAKLAPTRIGLEACGASHHWARVLRALGHEVVLLPPQYIKPYLKRGKNDALDAEAICEAMSRPSMRFVPVKSAEQQAALMLLKTRDLLVKQRTMLINAMRGHAAEFGVVAAKGPFKVGELLQRAHAEAAQVPALALDMLRLLASQLDALEVKLKIIEARLIAWYKQDPVSQCLATQPGIGPISAVSFALKVTDPKAFGSGRHFAAWLGLSPKENGTGGRSRPGRISRQGDESLRRLLVLGATAVVQFAKPGRASPWLINLLARRPRKLAAVALANKMARILWAMMVSGELYRQTQPA

SEQ ID NO: 412293 - protein, 364 aa, unidentified
MSVYVGVDVHRKRSQVAVAGDDGRVQLNRNVVNGSGPMLELLSGLPAGTPVAFEAAFGWGWLAELLEDYGFDAHLVHPLRCKAIASARLKNGKVDAAILAQLLRADLLPEAWIAPPQVRALRALLRHRIQLVRLRTLLGNRIHAIAADHGYDRPAGYWSGPGRAWLACLDLPPASRQVIDDDLALIGALAGRVTGLDGQVHQRARAEPGVKVVTQLPGVGEFTALVILAGTGDITRFGPARKLAAWAGLTPIVGSSGRTVRHGHISKQGSAWLRWALGQAAQTAKRSPDFAASYQAIAARRGKQIATTAIARKLLTRAWHLLTDAGITGPQACPPPRLSPPKGRQAPGELAKVPEPAPPPRTSC

SEQ ID NO: 412294 - protein, 383 aa, unidentified
MTRQQACRIDQVPRPWTLPFKTERYLRPCSNSESAFTRKVLGGYHPFTEDSPLANIIGIDVSKLSLDCAYLRDVDQHKAKRKRVTNNPEGFAALLCWAQTVSGVCVSEIRFIIEPSSIYHELLVQFLDQHHATICLVNPGRVRKFAQGMGILSKNDLIDADMLTRYGLLNRKLMAYQAEAQEIGDLRSLLNRLDSLERDLRRELNRQEKIGRSSVLHRFEKQSMQRCVKRLKAEIVLFKKHIRKMICFSTLLKKDYDLLLSIPGVGAKTAWVMIVVLGSRQFDSAVQVASFLGLNPIEKQSGKTRYRRPRLSKAGNGRFRQALFFPAMVATRKNPDIKAQYERLLESGKSKMCALGAAMRKLVHICYGVLKHQRPYENRAQQS

SEQ ID NO: 412295 - protein, 463 aa, unidentified
MKANRTTQRPKEPVHDQEIPKLDALKQINLNAAGLDIGDDEIYVAVPEGRNEESVRVFGTFTIDLYALANWLQFCGVDTVAMESTGVYWIPIYEILDQRGFEVYLVNARHIKNVTGRKTDILDCQWIQQLHTYGLLQPSFRPPEEVCALRALVRHRDSLITSCTREIQHMQKALQQMNLKLTNVISDITGVTGMLIIRDIVAGEHDPHRLARHRNPHCAKSEEEVAKALHGNYRPEHLFALQQALEAHDFYQQQIQTCDAEIERCYAAFKPKVDISDKPLPPRQRQRHKPEGNAPNFNLRLYLYQMAGIDLTQIDGVNALTVQKVLAETGVDMSPWPTVKHFTSWLSLCPHNDKTGGKVIKSRTQKSQNRAAAALRIAAQSLAHSESTLGAYHRRMRAKLGKPEAVTATAHKLARILYSMLKNRTEYRDLGAEHYEEQARQRAIKNLKRKAKQLGFQLVPTDA

SEQ ID NO: 412296 - protein, 411 aa, unidentified
MIFVGDDWAEDHHDVYVCDAAGTRLARRRLGEGVDGIAAFHALVAEHADNPAGVAVGIETDRGLWVTALVDAGYQVFGVNPRAAARYRERHSMSGAKSDRGDARMLAELVRVDRQHHRLIAGDTAVAEGIKVLARAHQNLIWERTRTVLRLRSTLLEFFPGAVATFGDLADRDALAVLTKASTPHAARRLTLAQIRAALRAGGRKRSIDTRAVEIAAGLRSDHLEAPEAMASAFGATTSSMVAVLVVMNQQIARLEAELTDHFEQHPDADIYLSLPGLGAILGARVLGEFGDDPNRYADAKSRKNYAGTSPITRASGNRHVVAARFVRNRRLADATHRWAFCALTASPGARAFYDHRRTLGDTHNQALRTLANRLVGILHGCLRHHTPYDEHTAWAHRPENQHPTEIRVAA

SEQ ID NO: 412297 - protein, 334 aa, unidentified
MENIALIGIDLGKNSFHIHCQDHRGKAVYRKKFTRPKLIEFLATCPATTIAMEACGGSHFMARKLEELGHFPKLISPQFVRPFVKSNKNDFVDAEAICEAASRPSMRFVQPRTESQQAMRALHRVRESLVQDKVKTTNQMHAFLLEFGISVPRGAAVISRLSTLLEDSSLPLYLSQLLLKLQQHYHYLVEQIKDLESQLKRKLDEDEVGQRLLSIPCVGTLTASTISTEIGDGKQYASSRDFAAATGLVPRQYSTGSRTTLLGISKRGNKKIRTLLVQCARVFIQKLEHQSGKLADWVRELLCRKSNFVVTCALANKLARIAWALTARQQTYEA

SEQ ID NO: 412298 - protein, 354 aa, unidentified
MADETAVIGGVDTHTDFNQAAVIDPIGRHLATQAFPTTPDGYHRLLGWLCSHGEVIAVGVEGTGAYGSELARYLQDSQITVIEVDRPDRRARRAGGKSDPIDAYAAATAVLTGRAGGIPKARDGIVEAIRTLRVVRRSAVKARTQIINQIRSLIITAPGEVREQLRTLPPAQLIKHLARSRPGTQTSEPACAAKIALRRLARRHQYLTAEINDADAELQTLMTEAAPELVALPGVGIETAAQLLITASDNPERLASEASFAHLCAAAPVPASSGRTNRHRLNRGGDRRANHALHMIALVRMRYDQRTQAYVARRTAEGMSKKDILRCLKRFIAREVYKYLTYQHTPSKPLIPTA

SEQ ID NO: 412299 - protein, 408 aa, unidentified
MEVIHECCAGLDVHKETVVGCLRVGERGRIRREVRRWATTTAELLKLGDWLRQAGCTHVAMEATGVYWKPVWHMLEGEFELLLANPAHIRNVPGRKSDINDATWIADLLAHGLIRASLVPPGPIQELRDLTRTRKQLIREIAQHKQRIQKVLEDANVKLASVVSDVFGESGRRILKALCAGQTDAWQLAALRDGRLAASRETLAVALQGKVTAHHRFLLSQHLRMIEYLEQTIRDFEGQVEVVVAPFRAAVGCLVTIPGISATAAHVIIAEIGVDMSRFPTVAHLRSWAGLCPQLHESAGKIMSRRLRHGAPWLKTVLVQCAWAASRNKHNYLYAQFVRLRARRGPQKAIIAVAASILSIAYYCLRNQVPYRDLGALYFTRADEERTAQRLARRIKELGYEVQIRKAA

SEQ ID NO: 412300 - protein, 406 aa, unidentified
MELKALYRCVAALDVHQAKLTVCVLYEDETGQAQVELREFGGFKRDRKAMAQWIASFRPQQVVMESTGNYWQSPYAALEKQGIYALVVNARHVKQVPGRKTDIADAQWLAVLSRSGLLRGSFVPPQNIRTLRLISRQMQKLTGIMSGEKNRMHKVLTDGGIRLAVVVSDIHGKSAREMVRGLLRGETPEQVLQYASGRLKATEEELLDALSGELTADHIFVVSEILDHIEDLERRIALFARQLLTGLDSYKAMIQTLQTIPGIDQMGAAMLLVELGDDMTAFGKAEKLASWAGVCPANRESAGKRVAGKKRKGNPYVRRILCEAANAASRTRCSLREKFKSLLVRRGRKRAIFALAHKLLKIVFVLLSRGDYYRDATINYEKLTVERNAPRWMKMLVKYGYIPVTA

SEQ ID NO: 412301 - protein, 325 aa, unidentified
MKFILGMDIAKDKFDCCLLSEGRKFHQEFLNAPRGFKQLLGWLRKADASPAALWACMEATGIYGEALLRFLFEKGLRVSKVNPAQIKHYARSLLSRNKTDRQDAWIIAEFARERSASGQLRVWQPPSPAIARLRQLTRLLAARKGQRAREKRRARMVDRELRAHTRGMLRAFEKQIEVIQAQIDALIASSAELKRRHDLLRSIPCVGPVTAQTVLAELPEQIANARAAAAYAGVTPRREDSGQKKGRARLSKTGNAHLRQALYMPASSGRKTNPRLRACAQRLAQKGKTRKLAIGACMHLLLRLCVGVMASGKPFDPHWPKQPMR

SEQ ID NO: 412302 - protein, 346 aa, unidentified
MEHYAGLDVSLKEISICVVDRDGKTVARGTCPAVPDGVAGWFRTRSLTPFRIVHESGQLSIWLQRGLMRLELPATCIDARKAHKALSARLNKSDAADAEGLAQLARTGWFTPVHVRSEAADRLRSLVGARERMIRLRKDLEGHIRGALKTFGIRMTGIGQGRQRQGFRDQLAEAGESDPILRTIADGFITAHATLCQAADDLDKAVKRKAKAHPVARRLMTIPGVGPVNALSFIALVEDPGRFSRTADVGAFLGLTPKRHQSGEVDWSGRVSKCGDGAMRGLLFEAASCVIRQVKRFSPLKSWAVRLAGRRGFRKAAVATARKIAVLMLTLWKTETDYHWTKEATA

SEQ ID NO: 412303 - protein, 389 aa, unidentified
MKIYVGIDIAKLNHFAAAISSDGEIIIEPFKFTNDADGFQLLVSKLESFDKNSLIIGLESTAHYGDNLVRYLVTELYQVCVLNPIKTCQMRKNNVRKTKTDKVDTYVIAKTLMMQDNLRFVSFFDLDMMDLKALGCFRQKTIKQRTRLKIQLTTYVDQVFPEIQYFFKSGLHQHAVYALLKEAPSPKEIASMHMTHLANLLKVNSHGHFTKEQAKELRVLAQKSVGANDSAISIQITQTIQQIELLDSQLEKIEAEMTDIMKFNDSVIMTIPGIGYINGGMILGEIGDIHRFSNPNKLLAFAGLDPSVYQSGNFQAKTTRMSKRGSRVLRYALVNAAWNVVRNNATFKAYYDAKRAEGRSHYNALGHCSGKLVRVIWKMLTDNVEFNLK

SEQ ID NO: 412304 - protein, 343 aa, unidentified
MKLTRIGVDVAKQVFQVHGVDRHEQPIWRRRLSRDRWLKAVQEVAEPGCDIGMEACGGAHHWARQLQALGYRVKLIAPQFVKPYVKSNKNDANDAEAICEAMSRPSMRFVSVKSVAQQDLQAIHRVRASLVEQRTAKGNQIRGLVAEYGLVAPKEMASLRQAIPCWLEDAENGLSHLFRRVLEGLWRDLRNVEGRVRELDVQINEAGKADPAARRLQQLRGVGPVVATALIACVGDAKQFANGRQMAASLGLTPRQHSSGGKERLLGISKRGDAYVRSLLVHGARAMLRTASRHDDPLSRWVTRLSARSHPNVACVAMANKTARMAWAMLRHGSNYQPALAAA

SEQ ID NO: 412305 - protein, 463 aa, unidentified
MARNNKSKKQKMPVRSLKTIQPYAAGIDLGSREHWVACPPLKDNTPNVQRFGTTTPELLRLADWLKEQKVKTVAMESTGVYWIPLFEILDSRGFEVILANARQVSHVPGRKTDMLDCQWLQLLHACGLLRGSFRPSDDICRLRALFRERSTMIDQRSDWVRRIQKSLDQMNVCVHHAVSDITGATGMAIIRAIVDGERDPRTLAQMRDRRCKKSEKQITEELTGNWRPEHLFNLRQALKMYDQFCQIVTEYDSEIFAYINTLQPGVDDDQCVPPPASKSKARNIAKKNQEPMRQALYQLTGFDMTIIDGIGVDTTSVVLSELGFDYSAFPDENHFVSFLRLAPNLSISAGKKVPSKLKGTTTSRVATALRMAALSLRNSKTALGAFYRRISRRKGASVAVFATARKLAQIIYRFVRHGQAYIDIGAKAYEAQFNNRRLKYYTMALKDMGYKVKPLKAAEAQMA

SEQ ID NO: 412306 - protein, 345 aa, unidentified
MFVAGIDAHATYLVIAIVSNTGELVQKPVRVRSSEADRLDALLEPFRPLEVVVETSPAWPWLFDRLEGPGVHFVLAHAKRLRVIAESNYKSDDIDAELLARMRLAGLIPEVHTKSVEQREQAVLLRGRARLVRQRTQMANRIHSQLHNVGLCLERGHLLTQGGRAWVRTEAWPRLGEERRMFITMQWALIDQLEPMIKTLDRRVERMGRDNPAVALLETIPGIGAYRALVIATETLPITRFRTPAHLVSYAGLAPRSSQSGMRPIRHKSIPAGANRWLRGTFVRAVVSHVANAPDSWLSESYEQMKQRLGWQVARVATARRLARAVHAMLRTGEVWRDQPISQKN

SEQ ID NO: 412307 - protein, 388 aa, unidentified
MTTLTTSAVGPILGIDLGKYKSVGCTHGGAGGEIAFTTFETTRAELQRLIGRDRPAVVIIEACLLAGWVHDLCGEVGVPCVVANTASEAWKFKHLKRKTDRDDALRLAQLYWLGQLPTVNLPPSRVRQWRSLMATRQNLVGRRVAVQNRIRAIFVAQGLPAPRGAKAWSATGLAGMMLQAKPIAACGPDELWRGLLDLALTEYRQIGELVTQAEERLDALGRHNAEVKLLQTAPGLGPRTAEVVAAYLHEPQRFHKAKQVSAYSGLVPRQHQSGEMDRRGRISKRGPALLRKLLVECAWCMVRYNAWARGFYLRLTGGGQRRKKQAIVALARKILVRSWAMLRDGKSWHDPQMPPKPALPPSKQRRAAEAARRRQEKARAATATAGCS

SEQ ID NO: 412308 - protein, 350 aa, unidentified
MHLWDTKPVGEPGSPSAVPLNPNSRQGRLRKQSPIRQVWDQMEIVVGIDVSKERLDVAILPQEEVFAVGNDHAGIDELAERLKGIGVDAIALEATGGFEMLAVAGLSAAGLTVLVVNPAQVRAYAHAIGRRAKTDPIDAAVIAAFVLATKPEIRPLRDAETQALSELVARRRQIVQMVVAEENRLRMALAKQAQESIKRLLKALRRELESLDADLDSHIRKSPVWRVREALLTSVPGVGATTARTLLAELPELGSLDRRQIASLAGLAPWTRQSGKWKGKSFIGGGRGKVRAVLFMAALVASRYNPDLKAFRDRLVAAGKPKIVATVATMRKLLTILNAIIRDGRPWQNA

SEQ ID NO: 412309 - protein, 370 aa, unidentified
MPIRQLWEAPVFTERTSVGLDVHARSVVAAAIDGVTGEVFKARLVPSPEVVIRWVESLPGPSAAVYESGPTGFGLARSLTVAGIRCEVAASSKLQRPAGDRVKTDARDALHLARLLRLDEVVAVRVPSEVEESARDLARCRDAARADLMRARHRLSKLLLRHGIVYSGGKAWTQAHDYWLLKQSFPLAGTQAAFQDAYETVVLAAGRRDRLDVQISVMAADCQFTPVVRRLSCLRGISTLTAFTLAVEIGDWDRFSGAGIGAYLGLVPSEHSSGASRSQGSITKTGNGHVRRLLVEAAWHHRKPYRPTAVLRRRWELAPPAAVTRAQAGNHRLHRRWVSYAERKKRPVIANVAVARELAGWCWSLAVLPD

SEQ ID NO: 412310 - protein, 295 aa, unidentified
MELFTLGIDLGKTTFHLVGMNQRGEVVLRKRFSRSQLLHFTANLKVELIGMEACGGSHFLGRALREQGHEVRLIPAQYVKPYVKTNKSDYIDAEAIAEAVGRPTMRFVPVKSDDQLDLQSLHRVRERWVMRRTAVVNQIRGLLLERGTTMRKGRRYVDEALPGILACGSSKLSGAVLVLLAELKQELEQLAEKIDRADKSIEKIARENESCRRLVAMPGVGPVTATAIIAAIGNGAAFRKGRDFAAWLGVVPEEHSTGGKQTLWKIPRRGNQYLRRLFEWRGQCWPKMISTGHRY

SEQ ID NO: 412311 - protein, 395 aa, unidentified
MFIVGIDVAKRSHEVCMITSDGQTVQRPFSIRNNCTGYNLMLEKIRKHTNVKSQIVFAMESTAHYWLALFTRLRKDGYHVILLNPIQTSAMRDMFIRKIKTDAKDSFIIAELIRFGRYAESNVAQDRLLALKELCRNRFYLVDMAGDLKRKLIALIDRVFPEYEAQFDTIFCKSSVALLKKYPTPQKLSNAHLDKLTELLWNSSNGHFGEWKARELKELARNSFGVEDCDGAYSTLILLMLDQIQSLSGKADALEKEISRLFQSFDTTVTTIPGVGPIIGAVILSEVGDISRFSSADKLAAYIGVDPSVNQSGEFQAAHAHMSKRGSPYLRRCIWMASQVAVQRDPMFRAYYEKKAAEGLKYMTIIGHVTRKMTAVVFAILRDHKVYEPVLPTAA

SEQ ID NO: 412312 - protein, 320 aa, unidentified
MTPVTNVGIDVAKAELVVHVRPADMLWTVPNDDAGIRALVERLRGAAPALIVLEATGGYELAVAAALAAAGLPVAVVNARQVRRFAQATGELAKTDRIDARMLSLFAERVRPEPRPLPSDAVQALDALLTRRRQLLDMLTAERNRLGQTFGRASKSVKDSLKAHIAYLERELRMSDTELSRAVRESPVWREQEDLLRSVPGVGRVVATTLLAQLPELGRLSRKQVAKLAGVAPLARDSGTLKGKRLVFGGRASLRAVLYMGTLVATKRNAVIRAHYHHLLAVGKPRKLALTACMRKLLTILNAMMRAGTRWNESLAAAHA

SEQ ID NO: 412313 - protein, 352 aa, unidentified
MKQANKVDFTGQTIYVGLDVHRKSWSVSIHLEHFEHKTFTQPPKVEALVSYLKRHFPGAAYKAVYEAGYCGFWIHDNLRKDGIECIVVNPADIPTTDKERIRKSDRIDCRKLARSLRAGELQGIWVPSRVQAEERSLVRTRQALVKKQTRCKNQIKSMLYLYGIEVDPFESWSGRFIRSLEALRLATECGNIALKVHLAELTNLRQFIARLNKDILNLSRTERYKENVKLLRSVPGIGTLNAMILLTEIGDVSRFQGLDRLASYMGITPDSRSSGEKESPGDLTRRGNRHLRYLLIESAWIAVRKDPALAAAFNKMCLRTLKTKAIVKIARKLLNRIRFVLGNKVQYLPMAA

SEQ ID NO: 412314 - protein, 429 aa, unidentified
MNCTQNKKIEQVKETTMIVGIDVGSEKHYFRAFNWRGIELTRKPVAFSNSMEGFNSFYNTIVELMQKSELEEALVGIEPTGHYWFDLGQFMGEKDIKFVMVNPHHVHKTKELDDNSPSKNDRKDPRVIAGLVRDGRYFYSYMPTGAYAELRNASNRRFVLVEEQTRAKNRLQKWIAVYFPEYKGIYTHIDAKGGMLVLKKAPTPEEIVRLGVEGIIKIWKDAKLRGNGHKKAMLILAAAMRSIGLKAGLTEARMERQDLIEDHELQTKRLERVNDLIKGLCQQVRYADKLLEIKGIGITTVAGFIAEVGDITRFDSTKELQKLAGLELVADSSGKHNGKTKISKRGRKRLRYLLFEAAISVVGKNEEFKEIHRYYTTREKNPLKKMQSLIVVACKLIRVFHAILTKGIRYDASKMLKDIRHPGEQLKAA

SEQ ID NO: 412315 - protein, 343 aa, unidentified
MQTVSTIGLDIAKSVFQVHGVDAGGQVIIRRQLKRRYVLAFFQKLPPCLVGIEACASSHHWSRELQALGHTVRLMPPAYVKPYVKRQKNDATDAEAICEAVTRANMRFVPTKTPEQQSGLVLHRTRHLFIRQQTSVINAIRAHLAEFGIVAPVGRRGVEELLTVVSDPNDKRVPEIARACLSAFGAQLRRIKEQILEFDRLITGWHRSNELSMRLDEAPGVGPVLATAVVATVADPKVFRSGRNFSAWIGLVPKQHSSGGKDRLGGITKQGDRYLRGLFVAGALAVIRYAKIHGTKHRPWLTALLARRPTKVAAIALANKIARMVWAMMAKGERYNEPVALAA

SEQ ID NO: 412316 - protein, 432 aa, unidentified
MQLWCGIDWAKNHHDVSIVEEGGTQRVRLRIDDTVAGFTQLMTMLAEQQSLCSEPITAAIETSKGLLPVALRAAGVPVVAINPLAVSRYRDRHSPSRSKSDAGDAYVLANILRTDPHSHRSLPVDSELAQSIHVLARAHQDAVWDRMQIANKLRSVLREYYPTFLAAFDDLASREARATLRLAPSPMHGQQLRKSSLTAALRRTGRTRGIPATVNTIHAALHVEQLRQPPLVESAMAEHATALLHALDTAVANVARLEQTLTLAFDQHPDAQIITSFPGLSTVLGARILAEIGDDRSRFATARGLKAFAGTAPVTRASGMKTVVTRRVVRNKRLGQAAYLWALPMLAHSPGAHAHFTTRRERGDSYSAAARNLTNRGMGMLHHCLQTRQHYDESRAFPNRPPHPVTSSKPSAHDAHQETEAQPESIAASSGQ

SEQ ID NO: 412317 - protein, 417 aa, unidentified
MIDDVQWFVGIDWATQSHRVGLLDVEGRHVNERDFAHGGAGLTELRDWLLEKTKAAPGQIAVAIETPHGPVVEMLLDHGFLVFAINPKQLDRFRDRFTVAGAKDDSRDARVLGGSLRTDREAFRRLVVNDPLVIELREWSRIAEELQQERTRMANRVRQQLWRYYPQVVELTDDVADDWFLALWQQVPTPATAAKASEKTIAHILKDHRIRRLDAATVLQTLRKTPLFVAPGTTEAACAHIRTIAAQLHLVNQQIKEAHRALDGLCAKLEARESPSGQNREQRDVTILRSWPGIGRIVLATLLTEAAEPLRARDYHALRALTGAAPVTRRSGKQCFVIRRHACSGRLQTALYHWSRVAIQRDAAARRRYDALRQRGHGHARALRGVGDRLLYALCTTLKRQTTYDPNYQTAQGTADR

SEQ ID NO: 412318 - protein, 454 aa, unidentified
MAKRREKRECRAVVLEPDAAGVDIGAEEIYVAVPPDRDEESVRMFSTFTCDLHALADWLVQCRIRTVAMESTGVYWIPLFQILEARGLEVYLVNARYLKSVPGRKSDVSDCQWIQYLDSVGLLRASFCPSMDICAVRSLWRHRGSLLQMASEHILHMQKSLSQMNLRIHHVLSDITGASGQAILDAILAGERDPVQLAQLCNCRVKSPREKVAKALEGDYRPEHVFTLKQSLDGFLYYQKLIAELDREIQRLMQTLPSAVETGQEIPRRTKHSAFQRQGNDPGFDLRGQLYRIAGVDLTDIPGVSAVTAQVILTEVGPDLRRFRNASAFASWLGLCPENRVSGGKVLSCKTRKVKSRAALALRLGANSLCRAKGYFGEFFRRMRSKLGTAQAITATAHKIARVLYHVLLTKEPYAETVFHQSEEHARRRAEMKLRKHAALLGFQVIPLSATSAT

SEQ ID NO: 412319 - protein, 341 aa, unidentified
MEWTVAIGIDTHKDTHTAVALDRLGAQLASCEIETTRVGYLRLLQFAQALGEPAFAIEGAGSYGAGLASLLLASGFPVYEVERPRRRERRRGKSDLLDAARAAARLLSGDGLSRLRGGGQARDDLRLLLLERRSALRAQTAALNQLHAVLVTGPAELRERLAGLSGAALARRCLRLRPSADSEQILASVLRRLAARWRALAGELANLDSQLKQIVSTLAPELLDECGAGPVCAAQLVVSSGEPTRMKSEASFAALAGTSPVEASSGPIRRHRLNRGGDRQLNWALHVIARTRIRCHAETGAYHERLLARGKSKREAIRCVKRQLARHFYRLLLANPTLTST

SEQ ID NO: 412320 - protein, 423 aa, unidentified
MMKLKYSICCGLDVHKNVIVATIVTTNKDGISEYLQKSFSTINSDIQRFHNWLIENNCYHVCMESTGKYWIPIFNYLENDIDVCLTHPKYVKAIKGKKTDKKDSKWIADLYKFDLVRCSFIPPKDFRQLRELARYRFKLVCMKSSEKNRIQNCMTISNVGIASVLSDPFGKTATEIMSYLLEHTADSMDEKAVRKLIKKGAKAKSDEIIEAIKGYNIETDQAKKLELAQGHLEYLDDMITQTEVELYVRIKPYYEFVEFVSTMPGMTELSSTIVLAETGVDMDIFDDAKHLCSWCGLSPANNESAGKKKSVRIAKAGDYLKPMMVQCALAAIKSKKQPYFAIKYGRIKKRRGHKKAIIAIARMMMVCIYHMVSEKKPFTPTDYEELINPQNHVERVVLNENNVFAYLESLGYDSSKLVKRNDN

SEQ ID NO: 412321 - protein, 410 aa, unidentified
MRKENIIYVGIDLHKETHTAVMLNCWNQKLGEITIENKPAEFHKLTRKVSRFVTEEKTSIYGLENAYGYGRILAVWLIEKGNIVKGVNTAMSYAQRKSVPMYQKSDSYDAEAVALVLINMLDRLPDAIPDDKYWTLSQLVNRRDNINVHQQKLKNQLHEQLCMAYPSYKKFFEDIGRPTALYFFGEYPSPVHLRGKTAEGLAGELRPVSHNNCSVKKAEKILELVRTDGETLRDCQESRDIITRGLVRDLQHYREQMLEVETAIKELLPYFHCTLMTMPGIDIVTAAEILSEIGNIERFPNASKLAKFAGIAPVNFSSAGKGKDVCPKQGNRRLQAIFYFLAIQMVQVSPSGTPRHPVFREYFQKKQDERKNKQQALICIARRLVNIVYGMLKNHTEYREPERRTEEETV

SEQ ID NO: 412322 - protein, 341 aa, unidentified
MKQATTIGLDIAKHVFQVHGADGAGHVLFRKRITRVKLLGFLAAQTRCVVAMEACAGAHYWAREIAKLGHHVRLIAPVYVKPFIKRQKNDAADAEAICEAAQRPNMRFVPVKTEEQQANGIVFRARDLLVRQRTQCVNALRGHLLEYGYVFPKGITHVETLVALVEDLQSSLPNSVRIILKLLVDTFTALEAQIAVLDAEINRRSKSDPAARRLMTIPGVGPIASTAITALVPAAEGVPAGRDFAAWLGLTPLQKSTGGKQKLGAVSKRGERTIRRLLIIGASAVVQQASRRGAPKGSWLAQMLARKPKMLVTVALANKMARVIWALLVKGGTYSAPVAAA

SEQ ID NO: 412323 - protein, 358 aa, unidentified
MQTQRKELNFEGQSIFVGIDVHLKSWNVSIFTENLHHKTFNQPPKAEVLLEYLKINFPNASYLSAYEAGFCGLWVHYKLKELGVNNIVVNPADVPTTQKEKMRKSDPIDSNKLGRSLRSNELDEIYIPRPETLEDRSLVRIRSTIVKDMVRIKQRIKSMLYFYGIEYPVEFQNSNTHWSKKFLKWLKEIELRYPTGTAALGLLINEAELQRKLLLEATTKIRVLSKTEQYSKNMELITSVPGIGLITGMEFLTEIENINRFENSDKLAGLVGIVPNCSKSGEIAKDGEMTPRGHSFLRKGLIESSWIAVRVDPALSLAYYNYCKRMEPNKAIVRIARKLLNRIYSVLKHQNKYVTGIV

SEQ ID NO: 412324 - protein, 446 aa, unidentified
MQKFYLGCDVSKGYSDFVIIDEELNCVEENFQLDDTAVGHAELRHRIDKLFEKYPSAVLYAAVESTGGYENNWYGFLSKQQKNYNLHAARVNPNGIAHDNKAGMVRNLTDKISARSVAEYQVRHPEKVPYGQTNPYASLKKVWVHLRMLKRQRGDHLNELESLLYSGNPEILQYCRNKMPQWVLKLLMKYPTADMLSRARGKSVASIPFLKRQLAPELIKNAKASTAESSDETTAFLITSTVRQLVHMDKSIELYEKRLETMCDWPDVDLLMTIDGVGRMTAIVLMLYIEDIKRFDSAKKLAAFLGVHPEYRLSGDGTKKGSFRMSKKGQKAPRAMLYMAVLAGLSKKSRNPIVRRIYDDKKAQGMVAKAAIGVCIHKLVRIAYGVLASQAAFNPMIDELNRQKSSPAQQNTAIGKGRRYQDYDAKAPISRRQNKKRMEQIKSQDR

SEQ ID NO: 412325 - protein, 362 aa, unidentified
MGLLNVVNIGVVFEPICFHKKENAMNFVGIDLHKQTISVCVVSQERKVSARRTFRCCQPDRIRAYFAALGEFQAVIEATASYEWLWVLLDPLADRIVLAHPGKMRIIAESTRKSDKLDAEVLAAFLALDMIPQAYRPSPRERAHRVLVRHRRYLSKRSTALRNKMRRILSDYNADREDLFSAAGTEYLKQVAVSDSHRFVLDQLLASWLAQQAQLEQTNRKLRAFARQAPVREREAREVLSTIPYVGPVTIDVVLSELGRIERFGSQKQVCAYAGLAPGQRESAGRIKEQGITKTGSSLLRWALIETAWRLVSKTRRWRALFEPLAKRRGRKKAIVAIARRLLCMMTAMLQDGRPYRYAVGR

SEQ ID NO: 412326 - protein, 453 aa, unidentified
MPVMGVPEQIEDEEHEQRLERVAAVDVAKASGKVCTRVPDESKPGKRVTLVWDVPATTHAICELAAHLVAHRIERVVLESTSDYWRPFFYLFEASGLTVWLVNANDVKQAPGRPKTDKLDAVWLAKLNERGMLRPSFVPPAEIRRLRDYTRLRSDLTRDRTRHKQRLEKLLEDALIKLSTVATDIFGKSGRDMIEALIAGNRDPEQLAQLARGRMRVKHAALVQALNGRFDDHHADLARILLDQVDGLDTQIRQLTATIDELITAMPTTTGTTTGTGTTTGTGTGTGHPGTLSTIARLDEIPGIAEHSAQVIIAELGLDMTQFPTAAHLVSWAKLSPRTIQSGPRTRGGKTGKGNPYLKSALSEAATAAAKTDTFLGERYRRLVKRRGKLKALIAVARSILVIIWHLLADPTARFHDLGPDYHTTRINTDRKIRNLIHQLETLGHTVTLQPTT

SEQ ID NO: 412327 - protein, 408 aa, unidentified
MNSVGIDVSKGHSSAVGLRPLGEVALTPREVPHTKSKLEALGYEIIALGEDTRVIMEATGRYHEPVAAALHEMGIYVCVLNPILIKQSGAGSVRKVKNDKKDAMKIAKYGLDNWVKLRQHTPMDAVRQQLKLFSRQYNLYMKTSAALQNNLISLLDKTFPGANTLFDSPARDDGHQKWVDFVTTFWHCDCINRMSEAAFIERYQKWCKRKKYNFSRSKAEDVYISSAGHFTTLPKNDSAKLLITSAAAELTAARKGLMTVKAEMIRLAKQLPEWEIVQSMYGVGEITGAQLMAELGDVRKFANRGSIVAFAGIDPEVNQSGSYQRESNPASKRGSPHLRKTLFQVVDTYIKRAPIGEPVYQFLDKKRAEGKPYYVYMTAAANKFLRIYYARVKAYLNEHCPEQEPLEL

SEQ ID NO: 412328 - protein, 341 aa, unidentified
MKKFIRIGVDLAKNYFQIHALASESGPAVTRKLKRSKMVEFFSQIEPCLVGMEACGSAHYWARELKKLGHEVLLMPPDYTKPYVKRGKNDAVDADAICEAMSRPAMRFVPVKSAEQQATLMLHKTRELLVKQRTMSVNALRSHLSEFGIIAAKGIGRVDELLELAESDATLPAATRAAVEVLALHLEGLDKSIDDLEDTIASAHAQSEMSRLLDEVPGIGKLIASVIAASLPDAGVFKSGRDFAAWLGITPRQNSSGGKQTLGAITKQGNRYIRKLLVLGATSLLRVVGKRKGALRDWIVGLLAKKPARLVTVALANKLARIIWAMMKTGESFRTEMFAKA

SEQ ID NO: 412329 - protein, 400 aa, unidentified
MNYFLGIDIAKTNHVASLINNNGDIVIRAIKFTNSNEGFNKLLNTIQSKLGDLSNIEVAMEATGHYWLSLYSALTDNNFNVSVYNPYQIKSYRGAYNNRKQKNDIIDSIIIADYLRVFGSKESKFPEEKLLSLKQLTRFRANIVANVSSLKVQVIGLLDKVFPEYKKLFCDTFGNTSKQLLLNCPTPDDIINISTTKLANLLSKNSKGRFNKDTALHIKEVAKSSFGIKFTTDACSFEIKQLINQIVFLESQIDAVSKEIKELYNKLDSHLLSVPGIGDNLAPIILAEIGDINNFDKPSKLIAFAGTDPSENQSGNKLSSNDKTSKRGSPYLRHAIYTASLVAISNEPELRAYYDKKISEGKHHFVALAGISRKLLTIIYYILKEDRDYIRYDNIKDKLN

SEQ ID NO: 412330 - protein, 415 aa, unidentified
MEPVLDSCAGMDVHEKKVDVCIAHGPLEKSPKFEIRTFSTMTSDLEDLKSWLKKYNVTTIGMESTGVYWKPIFNIMEGEFTIVLANAQRLKAIPRKKTDIMDCKRIAKLLRYGLLPNSFIPPREIRELRDLNRTRRKLVGMMTSEKNRLTKVLESSNIKLSSVVSKISGVSSMAMIRSLLEKDRLSKEEISQLAKGSLKKKVDLLEKALDGKLIDHHRFLLKMHMENLDHLARQIAKIDEQIERKMIPFQKESNLIQSIPGISKVSASAILAEIGTDMSQFPDEAHLSSWAGVCPGNNESAGKKKSGKTQKGNSFLKGTLAEAAWAASKVKRSTYNAFYQNIVRRRGKKRALVALAHRMLMDIYRVLKTGAPYQDTGAEEANERATKRKERSMIRLLEKAGYEVVRTCTSEIAAA

SEQ ID NO: 412331 - protein, 386 aa, unidentified
MIYVGVDVAKNTHYACITDDKQKLLAKSFAFTNDEAGFAKFRGSFQKYPKAKVIVGLESTSSYGENLIAFLAGLGYRVALINPIEISDSRRNRIRNAKTDPIDAKLICKYLATEEYRLLQPRELQMLSLRALCRFRQTMKKSKNRLKTQLVSYLDLCFPEYATAFSNVHGKGAYAALLEYPSAGEMAKASVIRLSNVLRSASHGRLGRERADVLKRLAKHSVAAKSNDMSVQIRHTIPQIQLIESQLAEVERRIETTFDELDSVIRTVPGIGAINGSMILSEIGDIRRFSTPGQIIAFAGLDPVVRQSGKFRAKTTRMSKRGSSTLRYALMNAAWNVSLNNQTFGDYFNEKLAQKNRHYAALGHVAGKLTRVIFKMLKDNVAFDLP

SEQ ID NO: 412332 - protein, 420 aa, unidentified
MTHDAGYAALVGIDWADTKHDFCLRATGADQAEYGVIEHMPEAIDHWARDLAARFPGGTIAVCLEQSKGSLIYALLKYDHLVLYPINPRMLAKFREAFAPSGKKDDPTDAQLLLELVSKHREKLKLWRPADEHTRTLQFLVEHRRKLVNDKTRLTNRLTSVLKGYFPQVLGWFAALDTPLIWDFLKRWPTLEAVQKTDDATLRTFFQAHHAHNGTINQRRMAGIRQAIPATTDQAVIRASAMLVHALVEQVGCLTEAIARFDKEIDALTRSHEDFPIFASLPGAGPVHTSRLISALGPDRSRYEHVEDLLTFTGIAPVIERSGKVTVTHFRWFCPTFLRQSFHEFAGQSIQHSRWAKAFYHQQRRRGKDHQASVRSLAFKWARIIFQLWKKRMPYREQIYVAALQRRGSPLWQVMAAQQA

SEQ ID NO: 412333 - protein, 323 aa, unidentified
MQTQSKVLNFEGQNIFVGLDVHLNSWNTSIYTESLYHKTFKAPPKPEALFEYLKMNFPNGNYFSAYEAGFCGLWAHYKLVELGIHNIVINPADVPTTQKEQMHKSDPIDSNKICRSLRANELKGIYIPRVETLENRSLIRVRSTIVKDMTRIKQRIKSMLYFYGIEFPQEFENGNGHWSKRFINWLKTIQLQYSTGTDSLQLWIKEAEQQRAILLEATKKINELSKNEQYSKNIELIRSIPGIGLITGMILLVEIEDINRFENSDKLAGFIGLIPTCHSSGERENKGGITPRKHNSMRRTLIESSWIAVHFSIHFLRFTKKPE

SEQ ID NO: 412334 - protein, 320 aa, unidentified
MICGVDISSASLAVRIGREGAAASFANTVEGISELVAFCRLHQVDLVAMEATGGYEKQSFALLSEQGLAVTILNPRAVRQFALSMGRAEKTDAIDAGMIAWFAEVKNSQPMCLSPASQHHLRALVTRLRQLTEVHTAQRNQQRLITDPAVQASFTELLAVINRQIRELAAAIAALLAADPLWSQLDQAFRTIKGVADRTVARLMAEMPEIGTLSNKTISKLAGVAPLANDSGKHQGKRRVRGGRSSIREILFIVASVVGRYEPDFIAFRERLANAGKPPKVIRIALAHKLLVRLNAKAREVRSQFLHSQRNPSSQQSITA

SEQ ID NO: 412335 - protein, 331 aa, unidentified
MNVCVGLDIGSRTSIVGVRKDGRPAGQWDIAQTPAGRKAAVKKLQALKPTSIVMEATGIYYLDLALELHAADLPVSVINPKSFHNFAKLMLVNSKTDSIDAQLLSEYGERMTPRLWTPPSSVQLELRALGRHINRLVGHRTRAKNELHALQATATTVSMLIEDQEEAIATLDNRIERFRKAGRELIAQCPTLNRQYKQLLAGPGMGEVSALAALAELTTLPQMLKSSQVARHAGLDVRQTQSGTSIDKPGRLGKSGNAYLRAAMYMPALTAVRCDPYAKAFYESLVSRGKKKMQAIAAVMRKYLTGIWACMRGDEPFDTAKLFSSEHLRKA

SEQ ID NO: 412336 - protein, 340 aa, unidentified
MNIVYLGIDLAKNVFQLCGLNQAGKPLYTTRVDRKILLQTVANIPACLIGIEASTGAFYWQREFEKRGHKVKVISPQYVKPFVRGQKNDGNDALAIAIALMQPTMKFVPPKSPEQQDIQALHRARQRIVNHRTATVCQIRGLLLDRGIPMGISVTRARRAIPLILEDAENGLSARMRRMIAELYDLFLDLERRIVFFDKEIDTVFKQSEACQRIAKVKGIGPKTATAVIAAIGKGTEFKNGRHFAAWLGLVPRQHSSGDRQVLMNLTKKGDKHLRPLLIHGARAVVRVATNNNDGYLNQWVNQLKERRGFNKTTVAVANKNARIIWSILHNETEYRPAVI

SEQ ID NO: 412337 - protein, 388 aa, unidentified
MYYVGIDIAKYKHDCFIFTSEGEIVLESFTFENTREGFSKLKLILDALDHSQKIKTGLEATGIYGKNLKLFLSSIGYDFDELNPLQVKRFTNALSNRKTKTDKIDASQIARFVSTGASRTYVYSSYHTEALKQLTRARNSLIDERSKHQTVLTGILDVEFPEFKGFFNNKFTDTALYLLNKYKTVKRISKLSHNDCVLLHNKSRVISTSRFEELRESAKNTCGHHFDYNDSLISANLQIIKCLNNEIDKIEKEINSIMSTINSPVVSIPGISAISAASIIGEFGDFSRFDNAKQLCTFCGVEPSICQSGTSYHEGKMVKHGSSNLRRTLFNVVPYIIMHNETFKTFYDKKRSEGKAYRVAQSHVVKKLLRVIFTLEMTGSTFAPSKLY

SEQ ID NO: 412338 - protein, 355 aa, unidentified
MLADQVDHIIGVDTHRDAHSAALVNPAGAVEADITLATDAFGYRRLLRFAQERAPGRRVWAIEGTGSFGSGLTTFLLEQGEWVVEIDRPKRPARRDGAKSDELDAARAAREALSREHLAQPRQRGWREALRVLLVTREGAIASRTRAIGLLKGLIVSAPGPLREQLRRHSTDEQLARCARLRTSAAQSVEHRATVVAIRAAARRSLALEAEARDLESQLELLVHEVAPQLVAERGVGPITAAQVLNAYSHQGRFRSEAAFASLGGAAPIPASSGQTIRYRLNRGGDRQLNRALHTIVLSRLTHDPDTRAYAARRAGEGKTPREIKRCLKRYLARRLFRVLEADSRLAPIPATSGT

SEQ ID NO: 412339 - protein, 369 aa, unidentified
MPKVLYVGLDVHKASLSVSVAEDGRNGPVNFVGAIPNTPIALAKLAKRLAKDDCRLEFCYEAGGCGYGIYRQILKLGHGCTVVATSMIPRKPGERIKTDRRDSQKLAILHRSGELTRVWVPDETHEAMRDLTRARVDASMQLMRARQQLLAFLLRHGRTYEAGKHWTQRHRSWLAGQTFNQAAHHVVFQDYLEAVWSAQDRRDELVRRITAMSAAWSMGPLVEALRGLRGLDFVSAVTFVAAIGDLGRFEAPRQLMSYLGLVPSEQSSGERVRRGGITKTGNCEARRMLIEAAWSYRYPPRVAKEKAEIVVRLPKPVRDIAWKAQLRLCQRFRALSASGKKPTVVVAAIARELSGFVWAIGQEVKPAAL

SEQ ID NO: 412340 - protein, 360 aa, unidentified
MQTQKTGLDFKGQNIFVGIDVHLKSWAVTILTDNLVHKTFTQPACADTLSNYLSRNFPCGDYYSVYEAGFSGFWTHYKLKEMGINNIIVNPADVPTSQKEQLQKDDPTDSRKLARSLRAGDLKAIYVPEPSTLEDRSLIRLRATLVKDMVRFKQRIKSFLHFYGISIPAEFEKSGSHWSIRFMKWLNQGVSLQHESGTQTLKILVQEAEQQRKLLLEVLRKIRVLSRSKKYATNMELLRSIPGVGFVTAITFLTEIENIERFENTDHFAGFVGLIPNRHSSGNKENNGDMTFRGQTALRKSLIESSWYAARLDSALAMSFNIYVRRMEPNKAIIRIARKVLNRMYYVLKNKREYVSGVVK

SEQ ID NO: 412341 - protein, 369 aa, unidentified
MKNGNTLRVGLDVHKESIAVAYAGEAGREPVYVGEIGTRQCDIDAVIRKLQSKGTELVFVYEAGPCGYWLYRYLTGKGLSCFVVAPSLIPRKAGDRVKTDRRDAVMLARLARSGDLTPVYVPAVGDEAIRDLSRAREDALHDLNAARFRLKAFLLRNDIRYSGRANWSAEHVRWLARLVPPTPAQQIVFQEYVRTVSERTELLRRLESELLEQAKAWRLYPVVEALQALRGVQFTVAITTVAELGDLTRFDSPRQLMNYLGLTPSEYSSGERRRQGGITKMGNGHARRVLVEAAKAYRHRAKVSEQIQTRQQHLPKEICDIAWRAQVRLCGRYKKLALRGKHANTIAAAIARELAGFMWAIAKAQATAA

SEQ ID NO: 412342 - protein, 354 aa, unidentified
MDSTSIQNEVILGVDTHLDTHVGVVINRQGKVIGTLASVPTNAAGYLKLLTWARSLGDVRRAGVEGTGTYGAGLARLLYEQGIEVWEINRPDRAKRRLQGKSDPTDAESAARTVLSGEAVATPKLQSGVAEALRTLSVARRSAVKARTQAINQLRSLLISAPDDLRERLWKTKPEQCVAGCARLRNIEGNVLLKTLTATLRLLAKRWLMLSAELKELDATLDRLTSQSAKRLRNQFGVGPQTAAILIAVAGDNPERLRNEAALAALCGASPLQASSGKTTRHRLNRGGDRSANNALWTIAMVRMRSEPRTQAYVMRRTAQGMSNKEIQRCLKRYIVRELYPLILADLSDAVTVT

SEQ ID NO: 412343 - protein, 354 aa, unidentified
MNTTQNSTKSKIVKVIGVDLAKDHCDVIGYDENGKICLRLDGCSYAKLREILANLPQAVVLMEACKGSMFHARSIADLGHEVRLVKGTDVKALRNVNHKNDLRDAAYIANLYFVPGIKYVYIKNQQQQSLQFLQNEYKSLQELRIQVGNQIHAGLEEFGCPVRKSSKFIKTRMVAHLEKHAELIPEDVMASFKRRREIWLNLLQQEEEAKRRLEQVAATDANAKRIMTVPCVGPQTAVGLLVHVGVDFGRFKNSRQFAASLGLVPKQNSTGGNNTLNHITKCGPKSLRSNLVQCAQLVLMSAEKWKGNFGDWVRKMRDSGKKHGVIVCAIAAKLARIIYRLMKDKVDYTPILSC

SEQ ID NO: 412344 - protein, 349 aa, unidentified
MVMDEITEEPGALVERIAALDIGKATLTACVRVPHEDKPGARRQEVRTYATLTPALLELRDWLICQGVTLVVMEATSAYWKPPFYLLEDDIECWVVNARDVKNVPGRPKTDKLDSVWLCKLAERGMLRASFIPPRPQRQLRDLTRYRRTLTQERTREKQRAEKLPGDAQIKLSSVISDIFGASGRAMLDALIAGRRNPHALAALAYKNMRAKTSVLQEALTGHFTDHHAFMLGMMLARIDALTTQIDTLTTRIGQAIAPFAAQVAQLDEIPGIGITAAQDLLAETGTDMSRFPDAGHLVSWAKFAPRARQFAGRSKAASTGKGNPWLGGTLGEAATGAARTKTFLASRY

SEQ ID NO: 412345 - protein, 341 aa, unidentified
MKNKSFIGIDISKNVIDVSIFCEETPIKDFSHDVFNNSRKGFGEMCTWLKKNHVVLSNCLFGMEFTGSYSMELEKFLNARNYQFCMLSTHVVKHYPMGPKDKSDKIDSAKIADFLYRYNGTECVKPYEMPDKTMQRLKALINERKFLVEQRTCFMNRRQLCTTKEDAQLYDSYIKKLSHDIENIELEEQKLLATDESLFTTYWNLLTIPGIGFVNAINVIVITRNFTAFETARQYASYVGVAPHFRTSGTSVRWRPRPSARCDGQAKADLSMAALITVQYDAELQSFYNRKLGGKQDSDTKRKALNAVKFKLILRMFAIGKQNRKWEPLDSKSSNEKLAIS

SEQ ID NO: 412346 - protein, 320 aa, unidentified
MNKEQKYVGVDISKEYLDMAVVEPTNKWRFGNNAYGIGKAVERLKKLSPVFVVFEAIGGLELSFWEALTEAGIEAAPINPRQIRDFAKAKGKLAKTDEIDAVVIAYFGQAMQPRSQPFPTTQEIKEMMSRRSQIVEMITAEKNRLNWARSSRIKEDIQLHIEWLEGQKDEVDKNLKQVINIDPEMREKSKLLQSTPGVGPIVSASLLTQVPELGTLNRHQIAALVGVAPLNRDSGQWRGKRSVWGGRSRVRSALYMATLVATQHNPVIRVFYQRLLDENKPTKVALTACMRKLLVILNAMLKNKTSWNTSITQVSSIACA

SEQ ID NO: 412347 - protein, 397 aa, unidentified
MYIVGIDIAKRKHEAAVIDGEGAVIIKPFSFTNNCSGYNRLLAMLTKAKLPLDEVSFAMEATGHYWLALFTRLQKEGFRVQVINPVQTNSIRSFYIRQAKTDPRDALLIAEVIRFGHFSESTLHPENIYELRELCRGRHAIVSMQADVKRKVVALLDQVFPEYETAFTNLFSDTSMAILQTCPTPKELSEMPLEELCHLIEVSSHKRFRMAKARELQELARNSFGFAMAGDVFSTMIRLYAKHLDFLKQQVREMDRKIAEIMETLDTPITTITGIGPTLGAYILSEIGDISRFSSAAKLAAYAGIDPTMRQSGEYNGVRNRMSKRGSPYLRHAIWLAASSAVLHDPALKLYFQKKRDEGKPYMASVGHACRKMVSIIYAVMRDNKAYVPCIPSEISA

SEQ ID NO: 412348 - protein, 380 aa, unidentified
MEKACGLDVHKDSVFACILDEEGKKIFEKRFGTLTPDLILLRDSILEQDCHKVAMESTSIYWMPIWHVLEPYFALTLTNPYFIKQLPGRKSDTKDAQWIAECLQKNLLKSSFVAGDLLQQMRQYTRQYRRSTKNKVRIEQQMDNQLQRCNIRFSNYISNQGNNVSLRKIIMAIISGERDPVKLSHLVHGRTRNKHGVQVIIDSLSGVIQQTDVEILKQCIEQLNLIEKQQATCLNHLEELANTHFAEEISLLCTIPGIKKLSALCILAEIGNDMSTFQKATHLVGWAGFRPRNDETAEKIKSRKILHGNKYLRLIITEVSWSVARSNKSFLGKKFNILSKRMKSQKALIAIARKLLVIIYNVLKTKQPFDMNRNLQAIVA

SEQ ID NO: 412349 - protein, 307 aa, unidentified
MTLNTKNYIAIDIAKDSLQVQAPNFACALNYDKEAIKELISRTPKGAIIVFEATGGYERTLMQTLLQHRIPYTLISPNRVRAFAESEGIKAKTDPIDAKMILRFAEQKQLEPSNPPERKRAKIIALLDRRSHLSSMHAQEKNRRQNSNPQIHEDIDQCMDFIEGQIKQIDRRIRALISENTVMQTQSMLLQSITGIGEITAWSIIAHFEAITTMKRNQLIALAGLAPFNKDSGKSRKRRSIQGGRAKVRRVLYMAAQTAAIHNPHIKKYVDGLRARGKPYKWAIVAAMRKLLLHAQSILKNHEYALA

SEQ ID NO: 412350 - protein, 350 aa, unidentified
MLESIKTETQGIVGVDLGDRSSQLCRLDRESGAILDEQRVSTTTAQLQSYFGALSPQLVVVESGTHTPWVVRLLLQLGHQVIVANPSKVRAISASRRKTDERDARCLAQLGRVDPELLCPVHPRSEEAQRALAVVRSREGLVRARTQLINQVRGTVKSFGHRLPVGSTASFARRALKVLPPSLKAALEPLLRIIAELSQEIASFDKDVEALAELWPATQYLRQVKGVGALTALVYVLVLGDPKRFARSRAVGAYVGLVPARRDSGNSSPQLPISKQGDRLLRRLLVQASHYVLRLGEDSDLKRFGLQLAQRGGKNGKKRAVVAVARKLAVLLHRLWVDKSKYVALRSATA

SEQ ID NO: 412351 - protein, 344 aa, unidentified
MGEVSTIGLDIAKSVFQVHGVDGAGAVMIRKRISRAKMLEFFAELPPCLVGIEACPSAHHWGRELQGLGHTVKLMPPSYVKAYLKRSKNDANDAAAICEAVTRPSMRFVPIKAKEQQTALMLHRTRQLLVRQRTMLSNALRGHLAELGIVSAKGRNGTGELLRIIADSADKRVPPAVRGILDVLARQYSAIGTEIASIDKNILALHRSCEASRRLAEIPGIGPLVATALVAEIGDWKTFSSGRSLAAWIGLVPKQHTTGGKDRLGSITKQGNRYLRWLLVVGAMAVIRSAQKHGAEKRLWLARLMGRRPTKVAAVALANKIARMAWAIMVHGDRYKEPNLLLAA

SEQ ID NO: 412352 - protein, 424 aa, unidentified
MKQETLEPEEFGAYIGLDWADRTHVLSLRSPDSNKVERYKLDHTPEVLAEWVSGLQQRFPGQRVAVALEQARGAVVYALMGYDFLVLYPVNPKTLAKYREAFSPGGAKDDPTDADLLLELVTLHRDKLRAWLPDDELTRTLTLLVEYRRDLVDTQTGLSNQLTSLLKLYYPQALAWAGELTTVQACDFLQRWPTLAKVQQATPAKLRQFYLAHGCRKADVIARRLQEIKLAQPLTRDGAVITASLAMVQATISQLRPVLASIAQMEKQIAELFSQHADHELFNSFPGAGPVLAPRLLAAMGADRGRFAAAREVQQLSGIAPIMERSGKSWWVHRRWACPKFVRQSFHEFAGQSIRWSAWARAFYDQQRQRGNGHHAAVRSLAFRWIRIIYRCWQTRVPYCEETYCRALVRRQSPLARVLSQMQN

SEQ ID NO: 412353 - protein, 349 aa, unidentified
MLIIGCDYHPGFQQVAIFDKQTGEIRQRRLAHPQEAIEFYGGLAAGARVGIESTGFSGWFERLLETLGHEVWMGDATQIRAAMTRQQKTDKRDAEHIVKLLVEGRFPRIWVPSAADRDARQLLVNRHKLVHWQTQVKNQLQFLALNQGLQLKWRLWTRSGRQKLEALPLGGYAAQRRATLLGLLDQLEQQIASRDAEVLCEAQARPDAVRLMTHPGVGPVISLAFVVTLGPVARFAGARQVASYLGLIPRERSSGGKQRLGGISKQGNSFVRYLLVQGGHSAARLDPELKRFYGRCKHTHAHAGVAKVAVARKLAVRLYCMLRDGISYAEWRSRRRSHAGEPESSCGRN

SEQ ID NO: 412354 - protein, 335 aa, unidentified
MRLYCGIDLHAKNSYLAIIDEQRKRIFKRNVTNDRKLILALLDPYRSELQGVVVESTFNWYWLVDALMDDGYTVHLTNVSAIQQYEGIKYVDDKHDAFWLAELLSLGILKEGYIYPKEQRPVRDLLRKRGHLMKLRTSLLVSLTNTLANVCDTKVPSHRIKGKEDHVSVHLDHDESLALMGQVSKTAINMLTDQIKTIASHVEKQCTFDTPLLSLPGVGKILGLTILLETGPIGRFPAVGNYVSYCRKAESTWKSSEKVKGRGNRKNGNRYLSWAFAEAAEHARMLDAASRKFYTRKLHERNSPVAHAALANKLSRAAYYIMRDRVPYEEAKLFG

SEQ ID NO: 412355 - protein, 344 aa, unidentified
MKITTVGIDLAKNVFQVHGVNEFGKTVVKKQLRRDQVAEYFVNLPACLIGMEACGSAHYWARKLQGFGHTVKLMAPQFVKPYVKTNKNDAADAEAICEAVARPNMRFVPIKNVEQQAVLALHRVRQGFVKARTAQANQIRGLLGEFGLIVPQGIGYIATRVPELIEDASNELPGSFRVLVQRLLDHLKELDRQVGELEVQIQTWHRSSEVSSKLAKIPGIGPITASALVASIGDAKSFDSGRQVAAWLGLVPKQHSSGGKQNLLGISKRGDTYLRTLLIHGARSVIYRAGQKPESCSWINGVVNRRNKNVAAVALANKNARIVWALLAHEREFRSDYTTAKAAM

SEQ ID NO: 412356 - protein, 449 aa, unidentified
MGRCAGVDWASEKHDVVVQEADGECVLQGTFAHDERGLAALCATLVRLKVALVAIERPDGLLIERLLDAGLQVMAIHPNQVAATRARFRASGGKSDRFDAFVLCELARTDSHRFRVLVADSDETKALRALSRAREDLVQARVALANQLRAELERFWPGATMVFDAIDSPISLAFLERYPSAIDARGLGEKRLAAFLARHGYCGRNQPAELLSRLRAAAQGRAGDAESEARRAIVLALVAALRPLVAKINELTREIAQRVRAHPDGHVFLSLFRHPRSVVCAAALLSEIGDCRARYPTAEALAADAGMSPVAVESGKRKVATFRRGCDHRLRAATVTLADATRHWHPWAQDRYAQARARGHDHPRAIRTLGRAWCRVLWRCWQDGVAYDPARHRGLQHHIAVTIPNQSSPRLDVTATQRMAGAAVTRRAAHSAEREALDGKPTAATNTEG

SEQ ID NO: 412357 - protein, 324 aa, unidentified
MPLYGGIDLHANNSVIVLLNEQDEVIYRKQLLNELPTIIRQLGPYQMEMEGLVVESTYNWYWLVDGLMEAEYRVHLANPAAMQQYSGLKYTDDHSDARWLAHLLRLGVLPEGYIYPKAERAVRDLLRKRAHLVRQHTANVLSVQNIMARNTGARFSVKRIHELTKQELTTLLTEETQVLAVTSSLVVLDCLRQQIKALEQTVHKRLRHTPSYEQLLTVQGIGTILAQTITLETGAISRFPTVGNYASYCRCVDSTKISKGKRKGTGNVKNGNPYLAWAYMEAAQFAMRFQPQAQRFYQRKLAQSRNNTVLARKAVAHKLSRACY

SEQ ID NO: 412358 - protein, 392 aa, unidentified
MPQLNDPSRSHTTLKQDCTLIAVLEMSQSAWLVAGLVPGIERHPLKKIEPDEAALLRLLRRWQEEASKAGYPITRITLAFEAGRDGFWLARWLRARGIEAHVIHPTSVAVSREHRRAKTDRLDTALLKRAFLGWLRGERGHCSMAEIPTLEEEDAKRPTREREGLVRERTRLVNRIKGALARLGIRGFKPTLRQAPERLSALRLPEGAPLPPNTLAELRRDMARLRFVLDQIREIEAARLNQLEQHPETGTHTMVRLLARILGVGIETADMLVHEVLSRNLRDRRAVARYAGLTGAPDESGGRRREKGLAKAGNARVRRGMIPLAWRFLRFQPNSALTRWYRARTADARGATRKTMIVALARKLLIALWRWVRSGEPLEGVVLRPAAEADRT

SEQ ID NO: 412359 - protein, 481 aa, unidentified
MPRTKQQTKKRVHHPCQAGGRKQDRKRKGLCLQDRPLLEPNAAGIDIGAREIFVAVPPDRDETPVRVFATFTQDLQKMAQWLKQCRITTVAMESTGVYWIPLYDVLEQHGIQPCLVNARNMKNVPGRRTDWHECQWLQYLHSVGLLRAAFRPEGEVCAVRSLMRHRSELVSMANQHIQHMHKALTQMNLQIHHVIDDITGLTGLAMLDAILEGQRDPAVLAKLRDRRIQASEETVRQSLVGNWRAEHLFTLEQSLKSYRHYQQQIATCDEQIEKRVVAFAPRVDPAERPLPPDRKQKQRRSKKKTVNPLTGFDMRTESYKLFGVDLTQVPGIARSVLHLFTEVGRDMSRWPTAAHFVSWLGLCPDNDISGGKVLWRGTRKMHNRAGQILRLGASGLHHDQTPLGDYLRRMKSKLGPAGGITATAHKIAIIFYTMVKRQVEYDDTIWAQRDLQREKRLEERLKRQAKQRGYKLVPIEEQPAA

SEQ ID NO: 412360 - protein, 375 aa, unidentified
MREKVRFLGLDVHAETIAVAIAEPDGEVRNLGTIPNRSESIRKLVKKLGPVEPLRACYEAGPTGYVLYWQLAELGVKCDVVAPTLVPVKPGDRVKTDRRDAEKLARSYRSDDLTAVWIPDEGSEALRDLVRAREAAKQDQLRARHRLSKFLLRSGQRPAPGVQAWTQPYLTWVRQIRYSQIAQESTRLDYLHEVEHMGERVVRLEQALVEAIKLASPQMQDVIKGLQALRGIAQISAVTIAAELGEISRFESARQLMGYSGTVPSEDSSGKRKRRGSITKTGNAHLRRIAVEAAWSYRLRPGVGPALRKRQEGVPEEIKEIAWKAQHRLHKRYSRLAAAGKDKRKIITAVGRELLGFIWAIGIKTEAATKQRMAA

SEQ ID NO: 412361 - protein, 349 aa, unidentified
MENIALIGIDLGKNSFHIHCQDRRGKAVYRKKFTRSKLIEFLATCPATTIAMEACGGSHFMARKLEELGHFPKLISPQFVRPFVKSNKNDFVDAEAICEAASRPSMRFVQPRTESQQAMRALHRVRESLVQDKVKTTNQMHAFLLEFGISVPRGSAVISRLSTILEDNNLPLYLSQLLLKLQQHYHYLVEQIKELESQLKRKLDEDEVGQRLLSIPCVGTLTASTISTEIGDGKQYASSRDFAAATGLVPRQYSTGGRTTLLGISKRGNKKIRTLLVQCARVFIQKLEHQSGRLADWVRELLCRKSNFVVTCALANKLARIAWALTTRQQTYEAISLNNHSSGFADTDY

SEQ ID NO: 412362 - protein, 348 aa, unidentified
MRFYSKQHKHYCGVDLHAKTMYLCIIDQEARIVKQKNIKSNPAAFLKAIDKYRDDLVVSAECMFTWYWLADLCAEQNITFILGHALYMKAIHGGKAKNDRIDAHKIAYLLRGGTIPMAYVYPPKMRATRDLMRRRNHLMRKRSELLAHVQNTNHQYNLPPLEKNIRYKGNREGISEHFRDECVQMSMDVNLSLIDHYSGLLSKLEYYITKKAKIHDGDSLFRIKSIPGIGETLSLIILYEIHTIKRFPRVQDFVSYSRLVKPAKESAGKLYGHSGGKIGNAHLKWAFSEAAVLMLREIPEVKKYKEKLERKHGKGKALSIVAHKIGRAIYYMLRRKEVFNIEQFLNKK

SEQ ID NO: 412363 - protein, 463 aa, unidentified
MGHEPEAEHNPDAFRNNQLSPPTGMSTRECFGFSHPASIACLTEEEFTLQVLYPRCCGLDVHKKSITGCCLWFDAEGQRQEEIRKFGTYTSELRRLAVWLRQHEVKHVVMEATGSYWRPIWNVLEGEGFEQTLANPQHMKAVPGRKTDPHDAHWIADLFQHGLIAASFVPNQQMRHLRDLTRMRTKVTEDRARVINRIEAVLEDANIKLSSVVTDIMGASAQAMVKGLLRGERDTAQLAELAQGRMRAKRPQLQTALEGNLQPHHVFVLQRLLMQSRFLQQQREAIERQIKRRLDPEMRQAIAFWDSIPGVDEDIATILVAEMGIRSDQFADGAHVASWTAICPGNHESAGKRKSGKMREGNRWLRGALTQAAWAATHTKGSYLSALYRRIAARRGSKRAIVAVAHAILISAYYMWKKKQAYHELGDNFLDTLKPEKTADRLLKRLAKLGYAVTVTGFPSPAA

SEQ ID NO: 412364 - protein, 330 aa, unidentified
MKCHYVGVDVGAKELVVSIERSGTRESGIVFTNDAVGHRTLIRWATMKGATARVLLESTGVYGLDLAFALHRAKRVEVMVANPRAIAAFAKASLQRSKTDALDAETILEFCMRMPFVPWNPPAPSILELRALSWRIEAMSKTVTQEKNRLHANQQSKELSDFVKQDIRELIELLEARIDRLRKQALLVIEQSTELTQAFGHITSIKGIAVAAGIQLLAELGTLPEDMTTRQWVAHAGLDPRQHPSGTSVYKPARISKTGNAHLRRALFLPALVASRWEPNVKAFYEKLLAKGKTKMQALVAVMRKLLHAIHGMLRHDQDFDGEKFFAVKA

SEQ ID NO: 412365 - protein, 483 aa, unidentified
MAKRKKSTFERLQSKRLNRQQRKQLQRQFDAEAPELTIVHPHAAGIDIGNESHFVAVPPDQDQEPVREFGSWTEDLHRMARWFKSCGVKTIAMQSTGVYWIPVYDVLEQEGFEVYLVNAWGTKNLPGRKSDVQECQWLRKLHAYGLLRKSFRPPQEIREVRTIWRVRDLVIKDAAREVQHIQKALTTMNVQLANAISDVSGLTGMNIVRAILQGQRDPHELAKLRDPRIRASEEEIAHSLEGNWQKDVLFALQLAVDAYDFHRKQLTNIDTELQKYMSALPTREAVVKAETRDDSKLTANQRKKRKASRKHKDNRPAFDLGAELARLMGVDLRLIDGIDLMTVQTIYSEVGADLSAWPTEDAWASWLELVPRKDVSGGKVIKQKKRPSKNRVATALRNAAESLARSDSYLGARYRHFTGRLEGLKGVKAMAHYLALLVYRLLTKGPEWVDRGAAYYENKRRERELVRLHLKAAAMGMQLVPTA

SEQ ID NO: 412366 - protein, 339 aa, unidentified
MKLYAAIDLHANNSVLVVLNEKDRVMLEERRPNDLKAILAELAPYKKKIQAIAVESTYNWYWLVDGLMDEGYDVKLVNTAAVKVYEGLKYTGDEHDAKHLAHLLRLGVLPTGYIQPREDRAVRDLLRKRAQLVRCRTTQILSIQGLVTRNSGKRINTDGVRKLDDEQIGQYCGGNSVLELAVKSNLSVMRCLDEQVVALEKVVLKQARLKPEFRKVLTIDGVWEILGMTIMYEAGDMKRFEKVGHFASYARCVSSSRWSNGKKKGEGNRKNGNKYLAWAFVEAAHFAIRYNERIRNFYQRKTAKTNKIVAAKAVAHKLARACYHVLKEQKVFKEELAFA

SEQ ID NO: 412367 - protein, 367 aa, unidentified
MKKNITARQSPQGGKRVPQPITIGMDLGDKTSRCCELEGDAMREGSLATTKKAMLQKFGSMRCCRIAIEVGAHSRWVNRLLTALGHEVYVANARQVKLISQSSRKDDRLDAQTLARLARVDPLLLGPIRHRSEEAQQDLNVIRVRERLVDLRTSAVNAVRGMTKASGERLPKCDADQMGVERSENLPAELRETLKPLLEAVESLTEKIQQCDRKIEQIARDKYPETKLLKQVSGVGTLIALTFVLTLEDKERFQKSRDVGCYVGLRPKRSESGARQPQLGISKEGDMYLRKLLVQGAHGILRRRGPDTNLKRWGLKLAERGGRNAKKRAIVAVARKLGILLHRLWVTAEVYEPLRTSPARERLRPAA

SEQ ID NO: 412368 - protein, 455 aa, unidentified
MAKKGKGSAKPTLAELSALEQINLNAAGLDVGDDEIWACVPVGGAEVSVRSFPTFTADLHQLADWLAECKVTTIAMEATGVYWIALFEILEDHGFEVYVVNPRYLKNVAAQKTDVLDCQWIQQLHTYGLLRPSFQPPEQIAALRAVVRQRDMLVRYRAAHIQHMQKALQLMNLKLTNVLSDITGMTGMLILRAIVAGEHNPKVLAQYRDPGCKKSEEEIAKSLEGNYRREHLFALKQALQLYETYGAQIRACDDELAAMYNAIDTVDSDIKPPKPKSGKRRKNQAHFDVASELYRVVGVDLTQIDGIDALTAQKVLVEIGWDMSRWRSVKHFTAWLRISPRKKVSGGKVLGRTSNKTQNPATQALRVAAQSLARSSSALGAFYRRIKARHGAQQAVAATAHKLARIIYAMLKNRTPYVDPGPDYYEKRYRDRTIRALEQKAAKFGLQLVPTTSVS

SEQ ID NO: 412369 - protein, 447 aa, unidentified
MIKLYIGLDVHKASTSIGLAAADGSEPAYYGKCSSTLRSTEETLKRILKRHGVEQAEVRLCYEAGPCGFVLVRRLLRLGYDICVIAPSLTPKAPGERVKTDRRDALKLARLLRAGELVVVHVPEANDEAIRDVGRARTDAVDDLRRARFRLGAFLLRNGHGWTGKARWGATHMSYLRGLSLETPAHKLVLEEYLLAIDDAEARVARFEQHLESLLAAWDRAPWARSIQGFRGFRLVGSMIVSSELGDLTRFDHPRQLMGFVGLVPGEDSSGTRRRQGSITKCGNSHARWMLIEAAGSYRLPPRVSPELSKRQAGLSKAVRAVSWRAQNRLHKRYHRLKRRGLHENKIKVAIARELLGFLWELAHIVRAEESGCDQRAPSAEFSQASVAPSVGSKKAGALRPRPRPMVATPEYPSESCSPAELSSVCSDALSNHQEETQNKDKKQYNA

SEQ ID NO: 412370 - protein, 344 aa, unidentified
MQIASIGIDLGKTTFHLVALGERNKVLARKKFSRAQLLAYTAKIPSALIGIEACAGSHFMGAKLREQGHEVRLIPAQFVKPYRKSNKNDFQDAEAIAEAVRKENMRFVPIKTQEQLDIQGMHRVRDRLVQRRTALINEIRGFLLDRGITFAADPKHLRKNLPAVIEDAEQNLTPRLRWLLDRMWQEWKQLELDIETMSDELERISEENELCRRLRKIPGFGPLVSTATVAAIGNGAAFRCGRDFAAWVGVVPRQYSTGGKQKLLGISKRGNRYLRRMLIHGARAVLFRVKYDTGGFGEWFRRLAQRAPRNKVVVAIANKLARMAWAVLSSGKEYHYQRPQATAA

SEQ ID NO: 412371 - protein, 351 aa, unidentified
MPRTATVHAVTAIGIDMGKNTLHMVGLDTRGTIVLREKVSRGRITSRLANLPPCLIGIEAGMATHYVARELAVLGHDVKQVPPAYSKPFRQGQKNDFRDAFAVAEAVQRPTTRFVPAKTDEQLDLQALHRVRSRLVSERTAVINQIRGFLLERGIIVRQGLRFLRQALPDILAKRTDVLSPRMVRIVADLASDWRQLDERIEVVTDEIETLAKSDSSCRRVMTVPGIGPIISSAMVAAIGSGAAFARGRDFSAWIGLVPKQMSTGDRTILGRISKRGNGYLRMLFMQAARVILLRPASWPKHGFGVWLARAAQRLHPNVLAAALANKLARIAWTVLAQERSYETRLTKAAA

SEQ ID NO: 412372 - protein, 416 aa, unidentified
MDLTDLTSTDTEPASPAPPPGLVAGVDTHQDTHTLAVLTAQGAVIATSSFPADQQGYNDLTAHLDRLGPLMAVGVEGTSSYGAGLTRTLRQAGYDTVEVLRPSRRVRRHHGKPDPIDTIAAARTVLSGDGVSQAKDTTGPAEQLRLLLAARTRLISAATAITNSIHSLLTTAPEPLRERYRRLDTPALITRLARTRPTRTITTPQQAATSALHHMARTHQDLHHRAERLNQQMHHILTTHYPGLLAVYGAGTTVATQLAVTAGGNPGRIHNETAFAHLCATAPIPASSGKTTRHRLNPGGDRRANAALHRIALVRLRHDPTTKNYANRRTQEGKTTKEIIRCLKRAIAREVYRALTQPPPTDTTSTLAAHRKRHHLTQTDVAHALNTLPHQNLRHRKPPTPTTPTHTPLPPIPHHP

SEQ ID NO: 412373 - protein, 427 aa, unidentified
MSYRIAAVDVHKKMLAVVVTDVAGEGEYEFERRKFGATPGELHVLAQWLDQQEVEEVVMESTAQYWKPVWGMLERFWKPVRQQREGASQMCGTLHLCQAKSNHGPRGRKNDFLDGERMVKRLVAQELVLSFVPDPEQRLWRTVTRRKHQLTRAKVVYKNQLESLLEQAHLKLSSFVSDLLGLSARRMLKALAEGETDPAALAALADCRLRATPEQLRDALGACTELNGTFRRLLQMALDELQLIETHIEKLEREAMDLMKEHQDVVQRVAEVPGFGPDSALQMIAEVGPKAATFRTAKKLSSWVGVCPGNEESAGESHSTRSPKGNRHMRRLLNQAAQSAVKVKGSIFELTFSRLLPRLGYQQAIWAIAHRLCRVLWVILHEGVRYEERGPTVSAKSKRTRASRMIRELKKLGYRVEGGPLPAVTRA

SEQ ID NO: 412374 - protein, 411 aa, unidentified
MAEGYDFYIGLDWGTARHQVCVLDAAGRRVAEQTVAHSGAGVAAWLAELARYAPTERLAVALEVPRGAVVDALLAHGCHVYALNPKQLDRFRDRQTVAGAKDDRRDAGVLAAALRTDRGAFRALQPEDPRLVPLRELSRLARELRTESMRLTNRLREQLVRVFPQVLTLCPAADEPWLWTLLERASTAPEAARLRPNALRALLAEHRVRRFSGADLYACLQAPPLPASPAALAAAGEHIAFLLPRLRLTFQQRGQCERRLEKLLDALAAGEPAPGQPLEHRDVTILRSLPGVGRVVAATMLAEAWPALAARDYQMLRTHSGVAPVTRQSGKTRLVTMRRSCNGHLREGVFHWASNSLRLDPRCRAHYDRLRRQHGHARALRGVADRLLGLLVALLQAGTLYDPARRHVAAA

SEQ ID NO: 412375 - protein, 436 aa, unidentified
MRGCRCSMIMGFTKPIEHFNLQRKKVITMNTLYVGIDVSSKSNVVYLMLPNGDKHSNFSVANSHEGSTLLVKKIYSALTSHSLDTVLIGLEATSVYGDNLVYFLREDATLAPFNRKIHVLNPKQVKKFHDTYNDLPKNDYVDSFVIADCLRFGRINKEVYMGEYRYKALQNLTRARFFAVQNLVKEKQRFMNVLFKKYSTMTQEKVFSDAFSTTALAVYDEFESAEALANMDLHELTDFIIEKGKNRFPDPDAVAKAIQKAARSSYRLPKTVNDSVNQVLSISITSMKALESQIKEFDKAIKAQMELLPNVLISIPGIGPVYSAGIMAEIGDINRFNSQAALAKYAGLAWKQHQSGGFESEVTRLIPSGNRFLKYYLCEAAFSLVRCDKEYSDFYHLKYKEVNRCQHKRALALTARKFVRLVFRLLKDNRLYCPAK

SEQ ID NO: 412376 - protein, 371 aa, unidentified
MRKNTIFVGLDVHKDSIDVALADDGRDGDIRFYGTIGGDLESLHKVVRKLQSAGATLRFAYEAGPCGYDIYRSLTSQRLDCIVVAPSKIPRKRGDRIKNDRRDALNLARLHRSGELTPVYVPTAEDEAMRDLTRGREDAVKALRVAKQVLLAFLLRHGYRYSGQSYWSKAHHNWIADIKMPHRAQQIALQEYVHAVQEQLERVQRLTHQIQGLIPQWQLAPMVKALQALRGVSLIIAATTVAELGDLTRFESAKQLMAYLGLVPSEHSSGGTTRRGGITKTGNGHVRRALTEAAHAYHHPARESRVLLTRLDGLPQEIRQIAWKAQLRLCGRFRRLMARGKNRNTIITATARELAAFMWAIAKEARSVSEI

SEQ ID NO: 412377 - protein, 377 aa, unidentified
MKRIRFVGLDVHAETIAVAVAEQDGEVRSIGVIPNRFESIRKLVKKLGPVEELYFCYEAGPTGYVLYWQLTALGAKCEVVAPTLVPVRAGDRVKTDRRDALKLSRSYRAGELTAVWVPDAAHEALRDLVRAREAAKRDQLRARNRLTKFLLRHGERPPAGVNPWTLNYMNWVRKEVHFELLAQQATLLDYLHEVEHMAARVTRLEQAIEEAIQLAPQQIREVIEALQALRGIAKVSAVTIVAELGELSRFGQARQLMAYSGTVAREHSSGESCKRGGITKTGNVHLRRIVVEAAWAYRHAPAVTACLRKRQERVSEEVKEIAWKAQHRLHDRYRRLTARGKNTGKVITAVGRELLGFIWAIAVKVEAAQRKALGQAA

SEQ ID NO: 412378 - protein, 362 aa, unidentified
MAMKTKLSRKQMFFNKINLTKDDDVYIGIDAHKDSYNIAIWLNDAPAIDYTMPANNKKLIKDIEKIKPAIKNIVYEAGPTGYSLARELQGQNFPVQVIAPAITPRPATKQTKTDRLDCRKLAQYAAKGLLRPVAIPTKQQEADRQLTRIRGHIVDKLKRIKIQIKSFLLQHGIDQPVGLKNWSQEAVDCLKKINLNEYLRFSLDLMLEQLEFFRNKLKEVESKLKELLEKERHHRKIELMRTHPGVGPVVAGMFRTEIFNPKRFKDKTQIAKYIGLSPQITQSGQSMRDGPIIKTGRAQIRSTLIQAAWRWVARDPAARGIYRRLLANTAQPNKAIVAMARRLAVNLWKISCDNLAYIAPVY

SEQ ID NO: 412379 - protein, 410 aa, unidentified
MTYFVGLDWAAREHAVCVIDGTGAIVVQFTVAHSATGMRELAARLTKFAPPAELRIAIERPTGLVVDTLVEGKFAVVPIHPNAVKASRPRYSAAQGKTDLGDAYLLADLLRTDGHRFRTLTPLADETKALRGLVRVRDDLVAQRVALANQLRCLLEQFWAGAAEIFADVDSPIALEFLDRYPTASAASSLGEKRMAAFMARHGYQGRRSAVELLQRLRAAPASVAGELEAEAKGECVRALVAVLRPLVAQIATLTAAVEHAVDAHPDGQIITPLFRSGRICAAQLLAELGDDRGRFVSADHLAAEGGVAPVTRESGKRRVTAFRWACNMHLRSALSTLANTTRHTSPWARAIYQRARDRGCEHAHALRILSRAWCRVIWTCWQKRVPYDPAKHVAAHQLSNLRVINREAA

SEQ ID NO: 412380 - protein, 342 aa, unidentified
MELNAIGIDLGKTLFHLVGLDASGNVVVRKKCSRAQLLKYTANLRVQRIGMEACSGSHFLGRALREQGHDARLMPAQYVKPYVKTNKSDSIDAEAIAEAVQRPTMRFVPIKTEEQLDLQAVHRLRERWVMRRTAVVNQIRGLLLERGVTLPKGRSHVDEALPEILQDADLKLSGSFRLLLAELQLELEQLAEHIQQMDSAIQHTVKENEACQRLTTIPGVGPVTATALIAAIGNGSGFRKGRDLAAWVGMVPREYSTGGKQKLLGISKRGNNYLRTLFVQGARAVMRYRAKQAPGLNHWLTQLLARTHQNVVIVALANKLIRMAWAVLCKNEVYRAPAVASV

SEQ ID NO: 412381 - protein, 425 aa, unidentified
MEVIHPRCAGLDVHKETVVACVRLVLDGKISREVRTFETTTSGLLLLLAWLTELGCTHVAMEATGVYWKPVWNILSDGDFELVLANAAHIKNVPGRKTDVSDAAWIADLLAHGLIRSSFVPEQEIQELRELLRTRKQLTRQQSSHIQRLQKTLESANVKLDSVITDIVGKSGRAMIQALIAGETDPVKLAALADRRIKASPQELREALRGRVTNHHCFLLHLHLQHIEFADAAIQDIDRNVTALINRMDQEVEAGQTRATFQSLILLLMTIPGIDVLSARIILSEIGRDMSRFPTAGHLLSWAGLCPRNDESAGKRRSTRLRKGDLWLKTLLVQCAWAARRKKGSYFNAQFLRLRGRRGPKKAACAVAASLLTTIYHMLKDGTQFQDLGVDHFDRRSKDVRAKRLVNQLANLGFHAKITPFAQAA

SEQ ID NO: 412382 - protein, 413 aa, unidentified
MEAIIERACGLDVHQAQVTACLLVGGAGQRVKREVRKFGTFTRDLLALREWLREAGCTHVAMESTGVYWKPVYAVLEEDFELIVGNAFHIKNVPGRKTDVMDAEWIADLLRHGLIAKSFVPPKPVRELRDLMRYRSKRVESRSAERNRLLKLLETANIKLSSVATNVFGKSGMRMLEAMAAGDASPVVMADLAMGLMRKKLGELEGALDGRVGEHHRFLLRLQLGRLKAVDTDLAQLDSYIDARLEPYRLAQQTLQTIPGVGAHTATAILSEIGGDVGAFPSAKHFAAWVGVCPGNNESAGKKMRAGARKGNRHLRKALIEASLGAVRKSGSYLKAKYYKLKARCGVQRAAMAIAHKLAIAVYQVLAKGVAFADLGEAHLDKVAGPRTHRHLVRRLEALGYRVQLEPVGPAQT

SEQ ID NO: 412383 - protein, 399 aa, unidentified
MLAVGIDISKSKSVAAILNQDGSMHTSPFEFHHTQPELDAFIKYILNSKQSATILMENTGHYHYPVLKAFQEAGLPVCMVNAYQIKKFGDMDLRKAKTDKKDAVRIARYALEKSYSLVPYTSMEQKYEDLRFLARQYNQRMLKLKTNKVFLLNLLDETMPGITNILPLTTRTPETSLSVLFINRFKSYDRIKKMGKSRFLDAFEKIARKSRNRQTKTYGLAIYEAALRNITTRGENEYTLAAQDQCLELVCESQKAADSIILKMKTLAETLPEYAVLRSMAGVGDRLCPLILAEIGDIRRFHSGKALNAYAGNDAPPYQSGTFESYNRHISKRGNAALRKYCFEVMQTLKLTRPQDDPVYLFLLKKEQEGKPYNVAKMAGVNKFLRIYYARAMETLKQQ

SEQ ID NO: 412384 - protein, 421 aa, unidentified
MKDEESFLVYAGIDTHKENHALCLVDQFGRKISGEIYPANKEGYAMIAKAIGEPKNCGGVGIEGTMSYGAGICKYLQSQGYKVFEILGPKVDRHRCGVGKNDLIDAQRAAQMALKGENIYSPKSADGWVEALRALHITRNTYVKITTSITNIVKSLLVTAPNDIRDEFTSIKNVKNMMASLSEKREVEDVVEQALFSALQSLALTWIDANKKADELEEEMRAILEEHAPALLVIEGCGTLTSAQLAITAGDNPKRMKNKNAFAALCGVSPVPASTGDNGRPKRYRLNRGGDRHANCALYRIVKSRLAYDEQTKAYVEKRKSEGKTKKEIIRCLKRYVANEVYRALCNPKEVPDWQGSKLRELRKSLGLTQADIASMLKVSRTKIGQIERGECRHLRLEEQYCEAIERLASQEIAINQKSAA

SEQ ID NO: 412385 - protein, 428 aa, unidentified
MDEVDRNRLEEFRQLRQEIRHSEEYLIVGIDIAKDRHHAFLGTATGKTLLRRLVFSNDHEGFRKLLDQAEALRVRHGLKKVVYGMEPTANYHKPLGEYLIALGRRVVLVSGVTVKRNRESLDGRWDKHDVKDSANVADLISQGKCLYYEYSSAELRGLRGLLSLKRRLKKQEHGYRVRIRNHLIAQYFPEMDRDYERLGAAGLSIVRWCFPASQITELDVEPFIQRVTSRRIRVETRRRLEEVWEKAGASIGCEGVPGVEHEAKVMVEGLRQIREMIKETEDKIQELCEQFPEYEYLLTIPGFGPDVSAKVLGAIGDPDRFQNGKQVLKLAGLDLSADRSGKDSDKAIPEISKRGKADLRYALYQAALIASTKNQDFMRYYTRKLEGREREKGIQTKMWVKLSAKMLLIAWTLMKKKEAFDPAYLNAE

SEQ ID NO: 412386 - protein, 432 aa, unidentified
MTVINPTAAGIDVSDTEMMVAYPISPEQLEIRVFGCFTRDLHSIANCLKEHGTTTIAMESTGVYWIPLFLLLQEYGFEVYLVNAKHVKNVTGRKDDESDAEWIQKLHSCGLLSASFQPDNMERTLRSMVRHRKNLVRTSSTYLNRIQKALELMNIKLHTIISDIDGKTGLLILEAILAGERDPEVLADLRDKRIKASREDIIKSLEGHWITEHLFELGQCYQLYCTHRQMIDECDKEIEKQLVIQIASKNEGVIPDIPKVKRKVSGKHKVKFNLTADLKEILKVDVTEVFGINELSALTILSEVGCDMTKWKTEHHFTSWLGLAPNTKISGGKVMSSRIMKKKHHAGQAFQMAANGLYNSKSPLGDYFRRLRAKAGAPKAVVATARKLAIIYYKMVANKEAFNPKALDDYRKKYNEKKINQLKRKIAQLEAA

SEQ ID NO: 412387 - protein, 457 aa, unidentified
MGRKGRRTKGIEEAHPFAGMSRINPNAAGVDIGAVEIVVCVPGEGDTQIVRAFGNYTVDLQAIGSWLKEHGVETVAMESTGVYWIPLFEELERQGFECLLISSRSMRRVAGKKSDIEDAQWIQTLHTYGLLEGSFRPQAELIALRTLLRHRSQLIEHRSPHIQHMQKALLQMNVQLSQAVTDITGVTGQTIIWAILAGERDPQKLAALREPGCKKSEEEIGKALTGTWREEHLFVLKQSMEMYDFYTQQIQACDQEIERVYSLTRPDWDAGELKPLSISKRNSHSKNKPQNPESIRKHLKRISGVDLSMVDGFGVSLAQTVIMEVGTDMSKFPNEKHFCSWLGLAPKHEVSGGKVLKNKTLKTKNRAGQAFRMAANSVKLADCVFGVMYRRLKARLGPAQATVATAHAIARVVYRMLKYQVEFETISVEEYEKKYRDQQLKYMKKKAAKLGYQLIPA

SEQ ID NO: 412388 - protein, 392 aa, unidentified
MTYFIGIDLAKYKHDCFIMDENGEVIRDSFSFNNDKEGFNTLLNVLNSLDSNQEKRIGFESTGHYGSNLKIFLERNGYSFMEFNPLLVHRHFKSETLRRTKNDKVDARKISSYLYTREYKPNPNSSYHLNCLKSLTRTREALIKDRTRHIIHMINVLDKMFPEFKLQFGNQGLNAASAMYLLENYGSPSKMSNMTRASYDKMKSELRRTISYAKFLRIKELARNTIGNEDEILVFELNTYLELFKELDKKILKVEDKITKEFSIMKCHIASIKGIGIITAASILAEIESIDRFDNPGQLCAFAGIEPSENQSGTHDGGGKMVKHGSSHLRNYLMQSAGYMLIHNPVLYEYYLKKRNEGKCHTVALSHVAKRLTRIIFYLEKNDTDFNIDKMR

SEQ ID NO: 412389 - protein, 456 aa, unidentified
MQEKEKRSKRSVKQVLQDLKMEIRSSQNTLIVAVDIGKIRHCACFASSSGKVLRRKFFFTNTIDGFNQLMRQTKFYQRKEELPHTLFGMEPSGYYWVHLYEYLSLREKRVVTVSPLAVNRNRETINVSKDKSDPKDAYNIADLMRQGKFYFPIYRDKEVRKLKRFMQMYYRLITQKASLRCRLRGVVGYVFPELEHYFTHITAKSVLAILQAYPFPLQIRTLGKSRFVSFLAKENPHFSRKRAEEIYELASSSIGITGEEEAVLFEIRLLLNELRNLEENVARINTEVHAIVKDREDYELLLTIPGIGPVTASSIVAEIGEITNFSSGKQLIKLAGLDLCGSESGISVHTLRHISKRGRKVLRTVLYQATVACIKCNAHLRACYLKLLANQPNKKKVKPKAIVAIACKLLRIIYRMLTEKKAFDLGYDEKLKRRFSLKKTKTVSIEKSDLLQPVAC

SEQ ID NO: 412390 - protein, 344 aa, unidentified
MTYFAGIDVSLEASSICVVDADGEIIREVKIASEPEALVKFFQEAGFAVRRIGLEAGPLSQWLHDGLTQAGFDVVLLETRHVKAALSAMVVKTDRKDARGIAQLLRLGWFQPVHAKSVGTRDVRALLAARKLLQSKLMDVELSIRGILRGFGLKMGKISKGRFEARVLELVDGHDMLGEIMASMLRARDVLRTAFAALHRQVLAIVRACPISRRMMTAPGVGPLVAITFKSGIDDPHRFARSKMVGAHFGMTPRKYQSGETDVTGRISRIGDATVRTALYQAAHIILSGATPYSSLKHWAMQVAKRRGLQRAKIACARKLAIILHRMWIDETDFRWGKETLPAA

SEQ ID NO: 412391 - protein, 347 aa, unidentified
MSMVGSSRLVTGGVDTHLEINVAAVLDRIGGLLGTESFPTTPEGNGQLLGWMAGFGRVVQVGVEGTSSYGAPLARFLAEAGVEVLEVSRPNRQERRRQGKSDVIDAVEAARSAQGQRQLGAAKSKDGNVEAIRALMVARRSARDTKIKTLNQIRHLGFTAPEEIRQSLQGVSRRLIAKRAAAMRPNPTGDPVVFATKTALRALGRRVLELDDERKELDRLLDRFLADTAPGLLGIYGVGKHSAASLLVAAGDNPDRLKSEAAWARLCGVSPLEASSGKITRHRLNPGGNRQANAALWHIVITRMSADPRTRAYVERRAKEGRTAKEIIRILKRYVAREVYPYVVAAV

SEQ ID NO: 412392 - protein, 341 aa, unidentified
MRYIGVDLHTNSFTVCYLEQEKPEYIKTFRLQDLDNFIKDLRETDEVAFEATGNSCFFYDEVSPYVKRVVIIAPGQFEIVRRSVNKTDKHDARAIAFFLSKDMLPEAKCKSKQCQQLASLLKTRDQLVKSRVSLINKMHGLFNYHGIKIKKEVLTTKVGFERSIQKHNWELLEKVEIEVINSNLEVIRESLKKLEKEIIAFAKQLPEFNGLISIKGIGAISAAVFVATIGDINNFSNPEKLTAYFGVVPRVSQSNQQCTIGRITKRGPKIGRTSLVQCTWIAIRYSPYLRSFYEHVKKKRGAAKAIIATARKFLTTIFYTLKNNWVFKDFTKFEFFTGQQS

SEQ ID NO: 412393 - protein, 406 aa, unidentified
MELKPMYQRVIGLDVHQAKISACALAQQPDGTVTIEQREFGAFKRDRKALAQWAREFGPEVVVMESTGIYWKSPYAALETVGIAAWVVNARHVKNVPGRKTDVADAQWLATLARAGLLRGSFIPEAHVRHLRLIARQRQKLGGMLASEKNRLHKVLSDSGIRLGVLVSDMHGQAARDMTKALIAGKPLPAVLDLAGRLRASRADLFEALQPEELSQAHLFVLGETMAHIEELEARMQRFEQELLKGLSAWQTELVLLQTIPGIDIMGAAMLLVEISAEMQNFGSAERLASWVGICPGNNESAGKRKTGKTRKGNAWVRRLLCEFAQAASRSRCALKDKFAALSIRKGHKKSIVALAHKMLRIVFAVLKNKTPYLDKAVDYEALSVQRNAPRWMKMLIKHGYMPTAA

SEQ ID NO: 412394 - protein, 427 aa, unidentified
MKNSTARKLRQIPAGYLIVGIDAHKKKHAAVVKTQDAFTRAKFKVSNSREGFIELLERTKAQMVKTDSSGTIFAIEAGGRYWRTLAYFLEERGIPFRLISPFTLKRRREGEDIDRRKNDYRDADMAAELLRTGKFTETRLPQGIYADLRAAYHTYYSLGRERSRATNLLSALLDSLFPEFHSVFKDVSTKTALAVLATYPSPYVIAEMSMEKFMDTMTAKYKGQHIIRKKLSAIYQAARGSVGIHAGAGVISFELSLLIERIRLLTEHRRKVEDLIVTLVEWIPESKYLLSIPGLGRITTAGILGELGPLNHYRSGKQLVKMAGINPIQSESANKQASKTPMSKKGRPLLRHCLWEASLNILNHNQEFKAWAKRLQERPLHQNPLKKREARGAVCKRLLYLVFALFNKHSLYEKNYKVETERELVVA

SEQ ID NO: 412395 - protein, 332 aa, unidentified
MKFTSFVGIDISKKDYDVALLDAKGTVVETKKFLNNSSGFKSMLSWLKKSVSIENLLFCLEHTGVYCLAICVFFEESGFSYSLQSGLQIKRSMGIQRGKNDKADACVIGKYAYLNRNEIDCYHLPSKVILKLKQLVSYRERLVKAKVALKTAAKELKAFTDKDLHGYVFADSQEHIGRISKSIIEIDKTLRQIITEVPDLNRLFGLITSVKGVGLQIAINMIVVTHGFTRFENWRKFSCYCGLAPFEFKSGSSIRGKTKVSHLGNRKMKAIIGNGIASAIQHDSEIASYYKRKLEDGKHKMVVMNAIKNKLISRVFAVVKRGTPFVPLFQHL

SEQ ID NO: 412396 - protein, 410 aa, unidentified
MMDGLVERCAGLDIHQATIVATVRVPDEAGGRHVVTHTFGTMTVDLLALREWLQAFGVTHVAMESTGVYWKPIYYLLEEHVAVLLENMQHLKQVPGRKSDVKDGEWLAQLLECGLLRGSLVPPAPIRDLRDLTRYRKKQIEDRTQEINRLYRVLEEAGVKLASVMSDIMGRSGRAMLEGLLAGTTDPTVLADLARGRLRPKIPALREALRGQFRSHHAFLIGQILTKIDFLEEAIAMLSEEIDRQLAPFASTVERLMTIPGWGRRTATTVFVETGGDMARFCTAAHLCSWGAMCPGLDESAGKRRSGKTRDGNRFLRGALIESALAATRATGTALQARYRRVKRHRGHKKAIVAVGHQMLEIAYYIMRDEVTYHELGADYFARRDRDRTVRRSVKQLEALGYRVTLEEAA

SEQ ID NO: 412397 - protein, 464 aa, unidentified
MTEKKLWRNRKERKEWGRRLQSEDPGLEVVHSHAAGIDVGNGMHYVAVRPDRDPQPVRRFECFTADLHCLAAWLQRCGVKTVAMQSTGVYWIPIYEILEERGMQVYLVNARHTKNLPGRKSDVQESQWLLKLHTYGLLNNSFQPPSEIRVLRTYWRQRAEHVHGAATCVQRMQKALTQMNVQLANVISDVSGLTGQAIIRSIIAGEHDPRKLAELSDPRIHASREEVAKSLEGHWRPELLFVLQQEVVMYDTYQQRIAECDQQLQKHLASFADTIPLLPTEGEPKRKKSKPAKNAPRFELRSELQRITGVDLTRIDGIDVMVAQTLISEVGLEMSRWKTEAHFSSWLGLCPDNRTSGDKVLARGTRRVVNRAATALRMAAVTLMRSRTYLGAQYRRLRTKLGAPKAITAMAHRLARLVYRMLKYGQHYVDKGAEYYEHRYRRQQIEFLRKKATKLGLQITLAQT

SEQ ID NO: 412398 - protein, 341 aa, unidentified
MDKELYFGVDVSKKTLDLAYYDGETIDWKNAHIKVSNDDAGFKKIGSWVAKVGKDFDTLLFCMEYTGLYNQNFRLWLESKEYIYGMVEPRKMHHFEPDLDDDQRSLDRIKTDELDAFRIAIYCEQNHKKILRNPSKLPSPVYFKLKRLLAERKQNTKQSVLYKQQLHDICAYDTDLSVERKKLLLKNMQENQKAIDKEIDSYMNEDTSIRKNYNLLTSIPGIGRIIALETIVLTENFTAISNPRKYACYIGIAPFKKESGTSVRKKTGVSKKGFSEAKADLSIAVLSAIKNNPSIRDYWIRKRKEKCGGIVLNAIKFKLVLRMFAVIKRGTPYVETDAYKN

SEQ ID NO: 412399 - protein, 344 aa, unidentified
MAIVGGLDIHRRQITYDWIDTDNGETCRGQLSPATRLELRAWLARFTGQQADFAVEATTGWRFVAEELEHAGFRAHLAEPADTRALRGPKRRAKTDRTDARHLRELLRAGTLPESWMPPAHIADARTQVRLRRALVGERTAWQQRIHAILFHHGLPDRSYLLTADGRAWLARAELPAVARQTVDLALRMIDHLEVELDRLDTELAGIARAQPGCKALMGRYGIGWLTAVAIWAEFGDVRRFANSRQAVRFTGLDITISESDGKRARGHLTRQGSPVLRWALHEAAMSAARPGSPDHPYYLQVKQRLGGKRAALSVARKLAREAYHTLRELGDQALVPAELPTAA

SEQ ID NO: 412400 - protein, 408 aa, unidentified
MNPLFVGIDVSSRSNVAYLMNPDGSKHSSFSVQNNLGGAKLLSERIVSALHSMQLNDVVIGLEATSIYGNNLVYTLREDGCLGRFQRKIHVLNPKQVKKFKEAYPDLPKNDFVDAFVIADHLRFGRIAKEVYMDDYRYQALRTLTRARFDVIQNLTREKQRFANYLFLKCSGIAQDKGIQNTSATTIALMEHFETVDDLANADREELTAFVSETGRGRFVDPESTAKMVRAAARGSYRLPRTVNDTVNQAMAVSIASMRALKEQVKILDKAIEQQFEIIPNTLTSIPGIGKVYSAGIIAEIGDIYRFDSQASVAKFAGLVWHKDQSGEFETEHSRMIKSGNRYLRYYLLEAANSVRRCDSEFRRYYDLKFKEVNKYQHKRALALTARKLVRLVFRLLKDNRLYIPPEG

SEQ ID NO: 412401 - protein, 423 aa, unidentified
MGTIIPICCGVDVHKKFLVATILTGDHLIPECKQKHFGTSYRCLLDFRQWLLDNHCLEVCMESTGKYWVPVWNVLEDSFHVVIANPKWVSAVKGSKDDKKDSRWIGNLFRMGLVPGSYIPGKEIRILRELTRYRSKLVSMRASEKNRYQNAFTVCNLTLDGVVSDMFGKSATEIANYLLNTDTVDPEHCVSFLKGTLKKKADAVIEAVEGFSMTPEQRERVRIIQGHFADIDKRIAQIDDLINRQVAEYEPAISLLCTIPGIDRRHAITILSEIGTDMSEFGTSRRLCSWAGLVPGNNQSAGKKKSVKITRAGVYLKPALVEAAHAAVKSAEIQPYFRIKYERIMKRRGKKRAIIAIARMILTSIFAMLQTGEVFHPSDLQQYDMPENLQKKRTLSAAKDAVKLLVSLGLVVEGSISLVSLAG

SEQ ID NO: 412402 - protein, 296 aa, unidentified
MEQPTRFVGMDVHKDTIVVAVTVAGDVGKATFYGTIPNTTVALEKLVTRLRAAGSGPLKFCYEAGPCGYGMHRTLTRLGEDCLVAAPSMIPRRSGDRQKNDKRDASALAVLHRGGLLTAVWVPDAAHEAMRDLIRARQGAVRAARAARQQLSGFLLRHARTYPERRRAWTKAHRGWLADQSFTQPAQQIVLQESIEAVRLAEQRLDRVDGYLRAQIPTWSLFPLVQNLCALRGVDVIAGAGLAAAIGDPSRFATAPAFMAYLGLVPSEHSSGQRRRIPRVKPKGRFCDHQGLPSGA

SEQ ID NO: 412403 - protein, 531 aa, unidentified
MAAKNRSNQRKHLKSGSSYSSEELRSLTMDDGTLVVCLADGDIKRPVCGGIDVHKEILMAAVCKTDPDTLKATFFVRKFTTMNSDIRSMAIWLKEHGVQDVCMESTGKYWIPVFNILEQNGIKPILTHPKYVKQAKGQKTDFRDAIHMASMFRMDLVVASFIPPADIRDLRELCRYRLKLTYMRTSEKNRFQNSMTISKVRLDSVFSDPFGKSASAIMEYLISTNPDQVSDDEILGLICHRGNVKASDEDILNSIHGYEFIGVQRDKLQIISLHLAQIDECISLIDEKLKYYREKYADIICHLTTMIGITPMSALYILGEIGTNMAVWRDDASLACWAGLSPANNASAGKKKTTKVGNGGHYLKPLLVQCALAAVKSTKKDPYFHNKYETLKKRRGHKKAIIAIARKMLVAIYHMIRDDKGFHPIDYEEIIKNTRKTKGLNLNNVIAFLKEQGADESTIRLVETQCSANVVGTKDAKEKQSTSGITDASQPMQESVNESPVFISDFQQGRALNHHPKDPAVATATAQTGLL

SEQ ID NO: 412404 - protein, 347 aa, unidentified
MRFYTKPHQFYCGIDLHARTMYVCILDQQGEIVLHRNLKASPDALLKAIVPYRDDLVIAVEGMFTWYWLADLCAQEGLPFVLGHALYMKAIHGGKAKNDKIDAHKIAVLLRGGMLPQAYVYPAEMRAPRALLRRRLYLTRKRAELLTHVQNTNSQYNLPEIGTKIAYKANRDGVAERFPAPAVQKSIEVDLALLGYYDELLRDLELHLMTAAKQDRANALYLLRTVPGIGKILSLVLLYEIHDIQRFPRVQDFVSYCRLVKCAKESAGKRYGVSGTKIGNAYLKWAFSEAAVLFLRNNPAGQKLLARLAKKHGKGKALTVLAHKLARAVYYMLKRGATFDLDKFFHD

SEQ ID NO: 412405 - protein, 370 aa, unidentified
MHGIFCYAEQKHTQRRLAMAKGNKLDFTGQHIYVGMDIHKKSWSVSIYTEHFEHKTFTQPPEVKKLTNYLQRNFPGATYHCVYEAGFSGFWIHDRLTEEGIHSMVVNPADVPTKHKEKAGKADKVDCRKLARNLRSGDIKGIYIPSRVQAEDRHLIRTRQSMVRKQTRCKNQIKAILFFYGILIPEEGHWSRNFINWIETIRMERASGDIALKVHLEELKHLRQIIAGLNKAILALSRTDTYRDKVVLLRSVPGISTLTAMTLLTELCDISRFSSLDKLASYAGLVPDIKSSGETEHTSGITHRRNPALRAVLIEASWVAARKDPALIMAFNKFSLRMKKTAAIVHIARKLLNRVRFVLMNQERYVPAVV

SEQ ID NO: 412406 - protein, 405 aa, unidentified
MSKRIALEESSIKEVHFMEGERAEVGIDVHKRTYSVTLWSEQRDEVVTRWTQPADPSALIRSMMLFKEHVNRVVYEAGPTGYGLVRALRAEGFRADVIAPSRTPKSTGQEAKSDRLDSRRLSMWSAKKLLKAVRVPTLEEEGDRQVFRTRDDVVAKRRRVKQQIKSFLLQHGIAEPDGLRTWARRGIESLRKMKLSAQLRFSLDFLLADLGHYDSQVQKADAALKSLAATKRHKQASEALQTVGGVGTVTAMAMRTELIAPERFDKGRQVVAMVGLAPLVSSTGETTRQGPLMKCGNARLRKILIEAAWRWMARDDWAAERYGQLVRNTGDRKKAIAGLARRLVIILWRISVTGEPYRPRPVEEPAPRSRTARKRCQPGLPDKNIKRKRAPSTSRRRPMSVQPPR

SEQ ID NO: 412407 - protein, 354 aa, unidentified
MNTIKYIGIDVHQATSVFAIRDSRGNILGESILKTEPTTIVDFLKGQRGTVRVTFEEGTYASWLYDVIKPHVSKVIVCDPRKNKLDENKTDRIDARKLAELLRLNALSAVYHGEQSNQTLKEYARSYLSLQQDSTRIMNRLKAIYRGRGIGCRGTAIYRPKNRKEWLDKLKDTGAQCRAERLMKQLEFFGKLRLEAQRDLIRESRKQKDYKILKGIPGLGLIRIALIMAFVMTPHRFRNKRQFWTYIGFSVVRRGSSEYEINEGELKRKKRKPLPRGLNRNYNHVLKDVFKGAALTAAYRGQFKKLFDQRVADGATPNLALLTMARKIASITLAIWKKGERFDIKRHQLSEQKT

SEQ ID NO: 412408 - protein, 453 aa, unidentified
MAQRNRSIRLKPGKSRAALTITHPNAAGIDIGSASHFVAVPPDRDDEPVREFPSFTVDLNALADWLTACGVNTVAMESTGVYWIPLFELLESRGFTVLLVNARHVKNVSGRKSDVLDCQWLQQLMTYGLLSGAFRPTDAVCALRSLWRQRGMLLRSQGRYVQHMQKALTQMNIQLTNVISDVVGETGQKILRAIVAGERDGQVLAAMKNVRIRASVDEIAKSLQGNWRAEHLFALQQALAAFDFIGTQVTECDREIEAQLVGLQIHDGEPAKGKKRSRARNAPKFDLRSHLFKMCGVDLTRIDGIDVTTALAVISETGADMSRFATVKHFTCWLGLCPGTKITGGKIMSGKTKRCANRAAQALRLAAAALRSSQSALGAYFRRMCARMDKPKAVTAAAHKLARLIYTMLTKGEEYTDQGQDYYEERYRERVLRQLAQRAEKMGMKLVISEQPV

SEQ ID NO: 412409 - protein, 368 aa, unidentified
MTVTIVDAARPVTGSGEMPPDVTVAPRLVTGGVDTHLDLNVAAALDAIGGLLAVADFPATADGHRRLLGWLSGFGPVARVGVEGTGSYGAGLARFLRRAGVEIVEVDRPNRQARRRAGKSDPLDAIEAARAALSGRACGAAKSRDGNVEAIRALVVAKRSARSAKIQTLNQIRHLSFTAPEELRQRLAGVSRQQLAARAAALRPGGMPAGADPVMPATKTALQILGRRVLALDAEKARVDALLTVLVTQTAPQLLALFGVGIDTAAALLVTAGDNPGRLRSEAAWAHLCGTAPIPASSGKVTRYRLNRGGDRQANRALWGIVITRLRNDPRTQAYMTRRLAEGRSKPEVIRILKRYVAREVYHRLPRP

SEQ ID NO: 412410 - protein, 335 aa, unidentified
MNPVRIHIGVDVGKDSLDICYPDGTKEKVRNIKSCRTKLIKKALKLGAIISFEATGPYEEPLAEECLARGVRAVRLDAWGTRKYAESQGRIEKTDAIDCEMIRDYAMSLKDEKLHFIKPRSQAHKALKRAVSTRKNLMKARAIIYNQYENLPDAEMRKCLDQTLAKLDKEIARIEGECDAAIASDDRMRELASRFQTVKGVGPCLTRVVLAYCPDIGEFTDGGIAKMCGDAPIDYESCTIKKKAKPKRGRTDLRKAMYMAAVSASRSNHILRPIYQRLVAKGKPRKVALTAIARRIAILLNNIAKYPDFIPAQDPKDIARAALPKRGRGRPRKTA

SEQ ID NO: 412411 - protein, 342 aa, unidentified
MTMIGIDPHKATHTAVAIDDNEILLEEFRLRASTVQAERLCEWAARFEKRQWAVESANGLGYLVAQQLVAAGETVFDVPPVLASRVRVLGSGRSQKNDPNDARSVAIAALRSDRLAQVRPDDHARVLRLLAKRHRDMARLRNKACSRLHALLLELEAGGISSQITVNKANQLLERVVINNEVTRHRVVIASELVTDIARLDTMLRASKQRVGAAVAASGTTLTDIVGIGPICAAIIIGFTGDVDRFPTRGHFATYNATAPIEASSGNRPRHRLNPRGNRTLNHAIHIAAITQLRYDTEGRAYYDRKIAEGKTSKEAVRALKRRISDRVYRHLVADARRSSAS

SEQ ID NO: 412412 - protein, 460 aa, unidentified
MKLFLGMDVSKGYADFLLLNEQHQKLEDIFQLDDNQQGHDLLKEQMKRWVKLYKPSIIYSGVESTGGFETNWYHTLLQCRKILPLQTIRLNPRGVKHSSKAELKRNVTDALSAQYIAEYLIRYHSTLRFNELANQDRDGYSALYNHIELLKKQQTQRINQFRQLIYNVFPEILMYCRNQLPHWVLYLLQKYPSADLVGKATVAKLSKIKYISQSKAEIIIKKARQSVVNDTQAGHEFLVAQSAEAIIKLDQEIEKYKKHLIKNCNNSSVTLLESISGVGTYTAIALLQEIGDINRFENTDQLAAYAGIHPVLKESGDKKYSFRMSKHGRAAIRALLYMPAMAAIRVDEHIKSIYHRHRAKGKTHKAAIGVVMHKLLRIVFGVLKNKTSYNKEIDKANAAKTQEANTKEKIEKAEIENKRRLQPLSKKAPISNIQYKKRKAYLEPQSAKTETYEVIPNTPV

SEQ ID NO: 412413 - protein, 320 aa, unidentified
MMAQNDLVVVGIDVAKDKVDACIRSLSQRQTFPNTAQGHRKLVAWLRKHEVSKAVMEASGGYERAWARVLREAGIEVRIVDPKRVRSFALSAGRLAKNDVIDAEMIAWFAETFSDAPGQKYDAAREELQTLVKARLSLIDLRMRLVSQSEHAAPGLVQKAHAHILKSLANEIAKLEAAICAKIKSMADFAERAEIIESVPGFAETSSANLVAGMPELGQVSDEIAAALIGVAPYDDDSGKRRGERHIKGGRRWVRNAIYMPCVGAATLNNPVLKAYYQRLLAKGKEPKVAIIACMRKLIIILNTMIARRQKWDPSHYALS

SEQ ID NO: 412414 - protein, 350 aa, unidentified
MRRKFDTAVVTIGIDPGKNTLHLVGLDARGEIVLREKVARTKIVSRLANVPPCLIGIEAGMGTHYVTRQLLALDHDVRQVPPVYAKPFRQTHKNDFRDAHAVAEAVQRPTTRCVPPKTDEQLDLQALHRVRYRLVGQRTAIINQIRCFLLEHGITVRQRLHWLRHALPDIVAQRTDVLSPRMVRILEDLAQDWRRLDDRIEAVSGEIDALSKNTELCLNLMTIPGIGPIISSAVVAAIGDGAAFARGRDFAAWLGLVPKQISTGDRTILGRITKRGNRYLRMLFLQAARVVLLRPKNWMQHSFGPWLAAAAQRLHHNVLATALANKLARIAWSVLVQHREYEARLSVATT

SEQ ID NO: 412415 - protein, 394 aa, unidentified
MGVRYGLTLFYLLEFEQNVRSCLFAQYPEYPSGEKTKGDLSLYKLIKMMNLLKQVLGIDVAQKELVVSLGRMNADLSIDLYAKRVFANKESGFIALIKWVGKLTDESIAVHYVMEATGVYHQKFAYFLDGKGYQLSIVLPNKISGYMRTLDNKTITDSTCADAIAQFGLERKLDPWKRPNILYKKIQQLTRERSQVVDERVIAKCQLHAENAEAQPNDNSIKRLKSRIRFLNQQEKEIKQDIEACIKEDDAITKNIKNLTSIPGIGRLTAAIVLAETNGFELIRNKKQLTSYAGLDVREKQSGTSVKGKPRISKKGNRNLRKSMYLPALTAVKHINDYKELYARLVSKSGIKMKGLVAVQRKLLELTYVLFKNNTTFQNDYKQEKSATAKADTL

SEQ ID NO: 412416 - protein, 387 aa, unidentified
MNPQPSTHDPTTTTATPTADKPPVAPPAPARPRFALGLDVDLHYCVTAIQCDHGAIKPAQKLTRAELVKWVREQVAAGHAVHTVYEACGFGYTLHEALTAAGAQSLVTTPMCLSPERRRKNDRLDARELCVRLARHLDGHAHELRPIRIPTVAERERRELGRQRNFWVREVRRLENHGRALRLEFEHETLPGGWAGPRKWKALATECSAFVRQQLEPVVAQIRAAKATIDQLTAQVEATVQATAVPTGLGALTVALVEGEVCDWTRFPGRKAIGSYTGCCPSEHSSGGVQRFGHIDRHGNAHVRTLLVEAVWRLLRWQPNWHARVKYREKLLHGASLKKKLAVALARQLAIDLWRWRTGRCSAADLGWTTERGVRSAERGVKSPAPA

SEQ ID NO: 412417 - protein, 338 aa, unidentified
MAILTVGIDTAKNVFAVHGVDEAGKVQLRQPRVTRAKLSALIASLPPCTIGIEACTAAHYWARQFQAHGHTVRLMAPKLVTPYRMSGKRGKNDAADAAAICEAVGRSNMRFVPVKSEDQQARLMVHRARQGYVGARTASLNRIRGLLAEFGVVLPLKAEVVRRQAAATLEDLPGYANLVIGDLLSEVHHLDERIAQYDGHIHAMARQCTAAQRLMQLMGVGEVTATAIVAMVGNAAEFDSGRQFAAWLGLVPGQYSSGGKARLGRITKAGDAYLRGLLVIGARAVLNAAAGKSDSLSRWAVGLAARRGYWKAVVAIAAKNARMAWAVLTKGETFKLPA

SEQ ID NO: 412418 - protein, 380 aa, unidentified
MKKELYLGLDVHKDCIITAVAEEGRKGEVRETGALSNDLHSVEKWIGRLRKTHGKEVILRACYEAGPCGFGLARRLKQLGVECEVVAPSLTPKRSGERVKTDRRDARKLARLLRAGELTAVYIPEATDEAMRDLCRARSDAVDDRRRSRHRLKGFLLRHGYRYQGKSSWSAAHERYLRELVLPHPAMKVILEEYLQGIATAGERIERCEEAMGDLLEQWRLAPAVRALMAMKGFQSVAAMILVSELGEVHRFGHPRQVMAYLGLVPTENSSSDRRRQGHITKCGNAHARWLLVECAQHYASPPKVSKELSRRQEGQSAQVRSISWRAQNRLHHRYTRLLARRLQRNKAMVAVARELCGFIWELLRTQPCYQTQSQIGLKS

SEQ ID NO: 412419 - protein, 347 aa, unidentified
MLYAGLDLSRQRLDVHVLDEEGRTVEVTAATPEVFGLRELVARISRHGDEVTAVIESMNGARFVHDQLELAGWDVEIADALRVKGLAPLAAKTDKIDARVLAELGRRDLVPAIWLPDPSVRAERERARFRLHLVRHRTALKNRIHATLIAFGHPVPVSDLFGTRGRELLASLAIPEPWATTLATSLRLVDELGAEIERCTADLQAAGADHPYVPLLMTVPGIAWVLGYTIAAEIGDIGRFASPKKLTGYTGLCPFVRQSGRRDDRGPLAKNGPKYLRWALIEAATHAARNPVYRERYEHTRKRLGRQRGSKVARVEVARELSAAIWHMLTKHESFAPGRPPVVPLVA

SEQ ID NO: 412420 - protein, 332 aa, unidentified
MENVLKIVGADLSKKSIDLAIHATQEHLRIENNTEGFKKMVHWLKYNKLDPSQVTIVMEHTGLYSYCLEEFLHQKGYRFNKVNPLDIKFSIGLTRGKSDKMDAARIAKFGFEKQGRLKAETPVSQALQALKLLNTSRENLVRTRAGLKTSIEEFRNIGLKDSNTALHSQLQIVSQLDKQIERLDKEIRTVIQKEEKIEKSYTLLNSIKGVGPVVATNTIIKTNNFERFANARKFACYCGIAPFENTSGTSVRGRTRVNHMADKGMKTILDLAAKSAIGCDKELKEFYQKRVDQGKSKMSTINIIRNKIVGRMFAVIKRQTPFEQNYFKPTWN

SEQ ID NO: 412421 - protein, 400 aa, unidentified
MSQMWACVDVGKEHHWVVVVDDTGTVKLSRKLVNDEQPIRALVAEIDAMAERVSWTVDLTTVYASLLLTVLADAGKSVRYLAGRAVWQASGTYRGGEAKTDAKDARVIADQSRMRGTDLPVLHPHDDLITELRMLTAHRADLVADRTRTINRLRQQLVAVCPALERVAKLAQDRGWVVLLSRYQRPKAIRQSGLSRITKTLTEAGVRNASTIAEAAVTAVKTQTVRLPGEEVAAALVAELAQGVISLDDRIKATDADIEGRFRRHRLAEVITSIPGIGFRLGAEFLAAVGDPTLIGSADQLAAWAGLAPVPRDSGKRTGRLHTPQRYSRRLRRVMYMSALTAIRCDPHSRTYYQRKRDEGKRPIQATICLARRRTNVLYALIRDNRTWQPDSPHITKSAA

SEQ ID NO: 412422 - protein, 436 aa, unidentified
MEEVTDEPLYRDRVCGIDIGKAGMAVTIRVPSETNPARRAAETREFATTKRGVLALADWLRCWQVPAVVMEATSDYWKPVFYRLEAEGFECVLADAKQVRHLPGRPKRDTSDSAWLAACFERGAIRSCFVATPQFRIIRLHTRYRRDLTDERTREKNRTEKLLESAAIKLSSVVTDLHGVTGRDIMDHLIAGERNPRVLAQLARARARRKITELEHALDGAEFFTDDHAALLTTMLERIDRVNAEIARLSEVIERLLAPYEEQLQQAESMPGWGRRSAQDAVAETGVDMTKFPTGGHLSSWAGKTPLDHQSGKRAGRARHKKGNRYLAAVTGETAVSAGKTATREGARYRKLARRRGKAKAQVALGNTQLKVYHKLLSSPGMRYQDLGPDYYERQAAIRRKIAYHVREIEALGLDVTLTRPAPEPGPDAPGNTQAA

SEQ ID NO: 412423 - protein, 317 aa, unidentified
MIDNSIVCAGIDVGKQKLDVAVCGVKAALQADNTSDGHKKLVTWLRRHKVGRVGVEATGGYEQGIVRALRHEGFLVVVFQPIQVRAYAKFRLKLAKNDKIDAGLIAACVASIDDIRAAPDPRFEAFAATQTLIDQLTDDIVLYKTRRETAHDIHSRAFWEREIAGRKAQARNALKTLCAEIRAHADLAAKLDLITSVEGIAEKTAIAILIRMPEIGTLSREQVAALAGLAPYDDDSGRRVGSRHIQGGRTRLRTSLYAAALPAAFFWNPQLITFYKRLRANGKTHKMALVACARKLLIFINTVVARATPWQPKSVPS

SEQ ID NO: 412424 - protein, 469 aa, unidentified
MAYSIFNHIQGKKGSRWAEFLRETGTENLMLVAIDAAKFTQKALICTFYGDILVKPFEFDASMTGFDYLKRIIESEKNKNRLKEVVVGIETTGHYYEDLVRKSHSLGYHVRTLNAATTAQERQTLLNWSKTDNLDLMAIVQSMIHGRGTSNELASGDVLSLQKLTRARRELVGERTATQNLIRMHLDHIFREFQGKSVWVKGKREKVEPFSNLFGKAPLYLMRHYPHPSDILKLGEKGLRDLSIRENLKIRDNTIQILLNYAENSISQPKASLEGDIFLLTQKLDRFELLNNQIGELERKIEDLFVGMEGAVILSVPGIGVVTGAELYAEMGDISDFEHAGQLIKLAGTNPIVKQSGGKRPSYFCISKQGRRTFRNITYQVGKSLAVNNPEMKQRYKAFKERGKLTGQAYIALGNRMIRLAFSMIRNHTLYHTDQENYVLVDEISKKLRVANTKRFYEVHVLSNTCLSA

SEQ ID NO: 412425 - protein, 411 aa, unidentified
MGQAPRVWHLRRFPRQPTRCSMSQPNDSKKSATPLEQDNTMIAVIEMGQASWLVAGIVPGLERQPLKKLGSDERALIQLLQRWRNEAVQAGRTIKRLVVAYEAGRDGFWLARWLRARDIEAYVIHPNSVAVSREHRRAKTDRLDTELLKRAFLGWLRGEAGHCSMAAIPTIEEEDARRPNRERENLVGERTRIGNRMKATLARFGIRSFKFTLRHADERLNDVRTAEAASLPANTHAELRRDLARLRVVRDQIKEIEQQRLQRIEQAAPSEKGSHAMVRLLARVIGIGVETADMLVNEILSRQLRDRKAIARYAGLTGSPDESGKRRREKGLSRAGNARVRRGMIQLAWRFLMFQKNSALALWYRARTADGRGGARKTMIVALARKLLIALWRMVTTGEIPEGIALRPAVA

SEQ ID NO: 412426 - protein, 394 aa, unidentified
MRFVGIDVAAEQHVVAMVDGAEAVVLKATAFTEDAEGYQKLLSLLGPPVDTLVAMEATGHYWKNLFAALVAAGFAVALLNPLRTRRFAGEELQRTQTDAIDALGIARFAAQKRPLASRLPDRATEELRELVRFRDRLVQDFGDRVRQLHRLVDLGFPEFTRYVRDLGSALATALLRDYPTAAAFHGVSLRRLAGLRYDGRHKIGDELATALRAAAARSVGRHHGEAYRIQVRYTCEDLDLLRRRLRDLERDIERLLDDHEVGRLLTTIEGIGPQTSARLVATFGNFAGFPSGAALASYVGVIPGLRQSGKRTSPRASLTPLGAAHLRAKLWMPVLTAVRKNPWLRAYYERLIARGKLPKVALVAAMRKLLHAVYSVATHRRPFVPNLVAVETPR

SEQ ID NO: 412427 - protein, 366 aa, unidentified
MAHGSKRVVAMAGFERVIGLDLSDKKARFAELDPDPTSEEILAEGTVPLTEIGLRKRLGERARCRIALEVGAQSPWVSRLLAGFGHEVLVANPRQIALIFRNHRKTDRLDAENLARLARVDRRLLRPIVHRSAGTHADLVQIRARDLFVRQRTAAINFVRGELKADGVRVAPCSAETFARKAWVVLPDSLRPALGPALLEIARLTQRIQRYTRTVERLATEKYPETGALRQVKGVGALTALAYVLTIEDASRFRRSRAVGAYLGLTPRLDHSGQQAPELGLSKAGDPHLRRLLVQSAHYILGPFGPDCDLRRWGMGLAGAGSKGRKNRAVAAVARKLAVLLHRLWVSAEPYDPLYQVHLSEPEAAA

SEQ ID NO: 412428 - protein, 346 aa, unidentified
MDEGSMRVTVGMDVGDKYSELCVLDASGEVVEQTRIRTSPQGMRRYFGRERGWRVALEAGTHSAWQSRLLRELGHEVIVANPRRLKLISQGDDKNDRTDAELLARLAKVDVQLLSPLVHRGADTQAALSVLRSRMQLVRARTALINHVRGSVKAMGHRLKGSSAETFHRRGAELPEALHAALLPVMECIEQLSGRIAVLDAEVNRLCKHDYPQTGALMQVPGVGPVTALTFVLTLEDPQRFARSRQVGAYLGLCPRRRQSSEHDPQLRISKAGDRELRRLLVACAHYIIGPFGPDSELRRHGLKLCARGGRNAKKRAVVAVARKLAVVLHQLWLSGEAYERVRPAA

SEQ ID NO: 412429 - protein, 417 aa, unidentified
MDVVVDRVAGLDVHKDTVMAAVRVPGSKGGRQQTIRQFRSYTRDLQELRDWLVSEKVSVVVMEATGVYWRPLWHVLEEVPSFQLELVNAHHVKRVPGRKTDVSDAAWLAQLAECGLLRGSFVPPPTIAHLRDLTRYRKKLIADRAKEAQRIQKLLEDAGVKLDSVVTDILGQSARDMLDGLLAGEQDTAVLANHARGRMRAKVPDLRLALEGRFGEHHHFLLRMHLQHVDHLTAGIQQLDEEVARLMAPFAEPVRRLCTIPGVGRRSAEIILAEIGVDMGRFPTAGHLASWAGMCPGHHESAGKQRSGRARKGNAALRSVLCEVAWAATHTKNTYLSAQFRRLCRRFGKGGSNKAVFALGHTILVIVWHLLQHETDYQELGADYFAQRHETDTYRQRLVHQLEKLGHRVTLEPSAAA

SEQ ID NO: 412430 - protein, 346 aa, unidentified
MSIASIAILGIDLGKTFCSMVGVDERGTVVLRRSLRRQTLIDYVAKLPTCVIGMEACCGAHHFGRLFAASGHEVRLMSPEYVRPYVKAQKNDDRDAEGIAEAASRPTMRFVELKTQDQLDIQTLYRARSRLVAERTNLINQLRAVLFERGVSFPVGRRKLEQGIDDLLTEGDNTLSSRMSRLIAEMRAEWKQLDTKIEMLNGEFVEMAGSNATMRRLTTIPGIGVLNATALVAAVGDGSSFSKARDLGAWLGLVPRQHTTGGKPRLLGISKRGNTYLRTLLIHGARAALPSLSKGDTPLGRWLQGMIERGVHRNAIVVALANKLARIAWAALRRDMPFQRNYPVAI

SEQ ID NO: 412431 - protein, 362 aa, unidentified
MDDGSTEQMKMTAGLDLGDKYSYLYVLDNQSGEMIEESRLRTTPDDLRRRFDSEQKMQVAIEVGTHSNWVNRILKECAHEVLIANPRKTRLIYGDKHKTDKLDAQKLARLARVDPELLYPIEHRGEQSQTHLALIHSRDALVRSRTQLINHVRGTVKSFGARLPKCSAESFHKKVADALPSELAEALQDVVKTIGSLTVKIRDYERRIERVCKEGYPQETELLRQVPGVGALTSLTFVLTLEDPDRFKKSRAVGAYLGLVPGKDQSGEQDPGKGISGEGDEMLRRLLVSSAHYILGPFGPDSDLRRHGGKIAVRGGKNAKKRAVVAVARKLSVLLHRLWVTGEAYEPLRNARLSGTLGEEVA

SEQ ID NO: 412432 - protein, 386 aa, unidentified
MTVMATRQDYDGFAEQLAAIGRPIIVGFEATGNYHRTLAHRLLTAGFELRLISSVALARTREALHNGWDKNDSKDAQVILHMLRIGATQRYVDPLVAGINDLQELSKTHETISRMKTQTWHRILTHYLPLYFPEIARFAGNSRSDWFLALIERFPTPATITALDREAFSAAAWPLIGRKVSKARLINDIYETASASTALPVPENSAAITMFRMVIAQGRSLIHQRDEIERLAHARLADDVDYQLLRNIPGIGPINALTILAEAGDLRRFNHHRQFLKFCGLDLATCQSGTFRGRTKLSKYGNARLRRTFWMAAQVAARQRDNSFRDKLGRYVAGHADDADRRRKAMTALTAKMARVAHAVIKTGTEYRPFLERSDARWKDPSLQVP

SEQ ID NO: 412433 - protein, 419 aa, unidentified
MSFKILKNNCCGLDVHKTWIYACIGITDSNGRTEYKQARFSSFTKGLQELCDWLVKYNCNDVCMESTGKYWIPVFNILEKNNLWVTLSHPKYTKPQKGNKTDRKDAKWICDLYMCGMVKPSFIPPADIRQLRDLVRYRFKLTCMITGEKNRAQNCLTVSNFKLDDVFSDVFGKSSRSITEQILQHPGETFDVAPFVDGRCKTPIEEIQAAVDGAISTEQAVKLRQCLNHIDELEKHQAEIEREIFRLSDKYESILNLIRTVPGFDKNPLTAIQVLSEIGGDMSVFPTAKNLVSWAGCCPRNDQSNHKIKSTRISRAGSYFKPVLVQVANALIKSKKHPEFTTRYRRIKARRGHKKAIIAICRMILTAIWHILTDLKPYTPEGFLESRPVNDSKVLTTSQALNLLKQRGYIIKDDTVPVT

SEQ ID NO: 412434 - protein, 307 aa, unidentified
MTHDIIGVDIAKDWIDIHRLSNGQSKRIAATRSALARFAAQSTGSLVVLEASGGYERPLTEALNAAGCLFSRVNPRQAREFARATGRLAKTDRVDAAMLAEMGRALRLKPSPPRAPERVRLADLMARRDDLSDMRRRETNRIKQARDAWIKKDIKTVLRALDRRLVRVEAEINAQIEADETLASAAARLQSMPGIGPILAASLVARLPELGRLDRRAIASLAGLAPHACDSGVFRGKRRVWGGRAEVRRCLYLAGFIASRYDPRLRAFRTRLEAAGKPPKVAIVAVARKLLTILNAMFRDGNEYKSA

SEQ ID NO: 412435 - protein, 364 aa, unidentified
MQPYLGCDAHKHYSVFVAVDERGKATQPVRIEHNVAAYQRYLDTLPNGTEIAIESTGNWYWIVDLMEQAGHRPHLANPSEAKKRMGKTHKTDALDAKGLAILLRNGTLPESWIPPGELRDQRELLRTRMALRDLRTSLKHRIHSAIDRYGLHATGISDLFGVRGRAYIAEVLPDLPKETARMVSLELDSIDQLNIKLMILEQHIDCTLASSPEIRLLHTLPGVGKILAPILWLEIGDIERFQRAENLASYAGLVPRVIASGGHIRHGGTCRNVNRYLKWAFVEAATCATHLRAYREGHIGLLYRRLAPGKGHGRAIVAVARHLAEASYWMLLKREPYRQPQIHIPSSKFGPARDTSNQAPQVSG

SEQ ID NO: 412436 - protein, 351 aa, unidentified
MIIIGVDYHPSDQYIALVDTETGEYGERQLKHSEGEAEKFYRELAAGGVSVRVGMEATGYSRWFERLLAELGIEVWIGDAAEIKTKRVRKQKTDREDARLLLRLLRENNFPRIWVPSPENRDLRQLLWHRHRMVQMRTRIMNQLQALAMNEGQRRKKKLWSEAGGAQLEKLLLAPWASRRRKDMLELLDRMNPTIEELTATIEQEARKRSEVLRLMRHPGVGPITALAFVLIIGTPERFKCGKQIGSYVGLIPCEDSSAGHQRLGHITKQGSSLLRFLLGEAAQAAARWDADWRRRYVHLAMRRQRNIAKVAMARRLAVRMYWMWRNSWEYTEWVKFGSHAGQLGIRHGVN

SEQ ID NO: 412437 - protein, 367 aa, unidentified
MNEPITYVGIDAHARELHLAMLRWDRAEPSEWTLPNEPRAIERLRRRLEREVSGIVECCYEAGPTGYALQRRLSAGRVRCRVIAPSLIPERIGDRIKTDRRDARKLAQLLRADLLTAIEPPSEDAEAVRDLIRARDDARVDLMRSRHRLSKLLLRRGQVYQRTPWTKAHREWLAQLEWPHAAERQVVRDYELAITHTHARLDELDRAIEEIALTAPYRAPVAALRCFRGIDTLLAMTLLAELYDLRRFAHPRALMAFVGLVPSEHSSGDRRSRGGLTRTGNTLARRMLIQAAWQYNHPPRLGAPLQQRRVGQPAAVLAIAIKAEQRLCHRYHRLCARQKPKSLVIAAVARELVGFIWAMMQLPVTRA

SEQ ID NO: 412438 - protein, 342 aa, unidentified
MQIRSVGIDLGKTTFHLVALGSSGKVLVKKKFTQKQLLVFTANMQTSLIGLEACAGAHFLGKALREQGHDVRLIPAQFVKPFVKSNKNDFVDAEAIAEAVERKNMRFVPIKTDDQLDLQAIHRVRDRLVSRRTAVINQIRAFLLERGMVFAEKPAKLKAAMADVLENADNALTPMVRNLIGGLWSEWKLVEQQIEELTDTLEQIAASDPGCCRIRKIPGIGPIVATAIVAAIGNGAAFRKGRDFAAWLGLVPRQYSTGGKAKLLGISKRGNTYLRKVLIHGARAAAMRIKRDRFAIGVWMDALEARAPRNVLVVAMANKLARIAWAVLSSGNEYRQVATTPA

SEQ ID NO: 412439 - protein, 356 aa, unidentified
MSGLKHQKEKRSMDHFAGLDVSVKETSVCIVDDTGKFVREVKVASEPEALLAVLKNPAYHFKRIGLEAGPLSQWLFSALAEAELPVVCVETRHMQALLKAQINKTDRNDARGIAQMMRVGLYRPVHVKTLRSQKLRMLLTHRKLLQSKAIAIENDLRGTLRNFGLKVGMVGKVKFEARIRELVENFPDLAELVEPLLVVRRVLREQIVNLHRRLLAIVRDDDVCRRLMTVPGVGPVVALTYRATVDVPARFRKSKAVGAVFGLTCSKYQSGEIDRSGRISRCGDEMMRVMLYEAAQSMLRSKKWSWLKAWAMQIARRRGIKKAIVALARRLAVILHRIWVDGTEFRWTREQAPVAA

SEQ ID NO: 412440 - protein, 388 aa, unidentified
MQTVADRPEAPTAIRTDLGAIFVSLELSRSTWLITSLSPGGGEKMSKQVVRGGDVAGLLERFARLREKARARTGKVFPFVVIQEAGLDGFWIDRALQNEGIESHVVDPASIATSRRRRRAKTDGIDGEALVRALLAYKRGEPRVCAMVKAPSPEEEDRRRLCRERKVLIGERVQHVNRVKGLLFSQGISGYEPLRRDRRERLDTLQTGDGRLLPDHLKAQVCRELDRLELLLEQIKAVEAERDVLLAAQQVAAPAPAAMLLDIKGIGPEFAAILWSEGLFRHFDNRRQVASYAGLAPTPWQSGSVDREQGVSKTGNPRLRTTLIQLAWLWLRHQPQSALTLWFEERVRRNGGRLKKTTIVALARKLLVALWKYVTAGVVIEGAVMKRT

SEQ ID NO: 412441 - protein, 423 aa, unidentified
MNESTLCVGADVHLDEIVLRAVDKSDGHEVIEHFRVTNNLPGAHAAATTLAEAATQGGYTRIEIGWEATGLLWVPFHRFLSTTPLLQPFELELVCINPKLVANFKDGLVLRRPKNDERDAWDVAARIRFGELPVSYVPADFGQGLRRLTRYRFQLSRLLSREEMRFQSYAFLKVSDWKRVKPFATIFGATSIALLTEFTVAELTALSHDALVDLITQHGRGRFDDPTATARAVQEALRSSYPITPPMDEMVTATLAAGWEHIHYLQRLMRRLDRSIAHYIAPIPNPLITVKGLGAVITAGLLAEIVDITRFPEQQQVAQYVGLTWEKRASGNFVSQNTRLTKVGNVYLRYYFILGADKLRQFNLEYQAYYWRKYQEVSKYQHKRALVLTARKFVRLAYALLAKNQPYVRPQIIPSQEAVIESD

SEQ ID NO: 412442 - protein, 345 aa, unidentified
MNKYITESFVGMDIGDREIRFCILDPDGSVMDSGSVDTTIRGLNAFLDRFDTPKTVLVALETGTHSPWISHLLEAREFRVLVGNARKLRAIWDTDNKFDDRDAEMLARIGRFDPALLYPIHHRSRKAHADLAVIKARDTLVRCRSTLIAYLRGICKTAGARLPSCTAEAFARRVVEHLPKDLLAAAIPCVNTIQELDSEIRQLDSHIEKLCAEAYPESKTLRQIAGVGPITALSYLLTLEDPNRFLKSRDVGPYLGLTPKRDQSGQSDKPLPITKAGDTYLRRLLVGSAQYILGPFGADCHLRRYGMRIASRGGKAAKRRAVVAVARKVAVLMHHLWKYNAPYDP

SEQ ID NO: 412443 - protein, 400 aa, unidentified
MSQLWAGVDVGKEHHWVVVVDDTGTVKLSRKLVNDEQPIRALVAEIDAMAERVSWAVDLTTVYASLMLTVLADAGKSVRYLAGRAVWQASGTYRGGEAKTDAKDARVIADQSRMRGTDLPVLHPHDDLISELRMLTAHRADLVADRTRTINRLRQQLVAVCPALERVAQLTQDRGWVVLLSRYQRPKAIRQSGLSRITKTLTEAGVRNASTIAEAAVTAVKTQTVRLPGEEVAAALVVELAQGVISLDDRIKATDADIEGRFRRHPLAEVITSIPGIGFRLGAEFLAAVGDPTLIGSADQLAAWAGLAPVPRDSGKRTGRLHTPQRYSRRLRRVMYMSALTAIRCDPHSRAYYQRKRDEGKRPIQATICLARRRTNVLYALIRDNRTWQPDSPHITESAA

SEQ ID NO: 412444 - protein, 350 aa, unidentified
MPQPIEVIGGIDTHTDVHQAAVIDTIGRHLATEAFPTTPEGYRHLLARLHSHGQVLTVGMEGTGSYGAELARHLRASQITVVEVDRPDRRARRASGKSDPVDAYAAATAVLSGRANGTPKDRDGTVEAIRTLRVVRASAVKARTQTINQLKSLIITAPAATREALRSLTTTELIRRLAASRPGSDLTTPAAAVKLALKRLAKRYQHLSEEITDADAELRALITHTAPGLLALPGVGTETAGQLLVTAGDNPDRLVSEASFAHLCAAAPVPASSGRTDRHRLNRGGDRQANRALHTIVLVRMRHDPRTRDYVARRTLEGLKTKDIFRCLKRFIAREVYRHLTSASSTSPAT

SEQ ID NO: 412445 - protein, 446 aa, unidentified
MEQSTRFVGMDVHKDTIVVAVTATGEVGKAIPYGTLSNTAAALEKLVKRLHQAGCGPLKFCYEAGPCGYGVHRTLAKMGEDCMVVAPSMIPRKAGDRQKNDKRDAASLAVLHRGGLLTAVWVPDAAHEAIRDLIRTRQAAVRAVRTARQQLSAFLLRHEHIYPKGRQPWSKAHRGWLADQRFVQPAQQIVLEENIEAVRLGELRRDRIDGHLRAQIPTWSLFPLVQSLCALRGLDTIASAGLAAAIGDPSRFASAPDFMAYLGLVPSEHSTGPKRRIGAITKAGDVHARTLLIEAAHNYRFPARVGRHKLAAVDGVSEAVRAIAWKAHGDRHRALGGNIQIIGGPEQVFLTGACLGAAAAGGLVVLDGLLTSVSALAAVRCRPEVQDHLIAGQLSAEPAHQLVLDALGLEPLLDLRLRAGEGVGAVLALSLLAQAQRARARTATTD

SEQ ID NO: 412446 - protein, 352 aa, unidentified
MKYVGLDWAYRTAQWCALDPGGEIAGEGRFAADRDGLARLVLELGDEVTACLEMMSGALWVRDELVACGWQVQVADARKVKTVAPLAAKTDKVDARLLAELSRRQLVPALWLPSLDERALRERLRRRMHLVRLRTSAKGRIFGLQTQWGIRISLRRLRRADGMTLLERAGMPAVWRHSISECLALIDFLDARIVPLDAELRPFAQADPRAVLLDTIPGVAELLALTIAVEIGEISRFAGPEKLVSYGRLAPRVRQSGEGRPHTGPLNKSGSRLLGWAAVEAAQQAWRESNPWHQLYLDVSRRSRNHNSAKAAVARKILIAAWHMLSRNEPFKPAPRTGATSVPASSRLALAA

SEQ ID NO: 412447 - protein, 318 aa, unidentified
MKTTSNQNINVGVDTGKFQLDIYIRPLNIYFTVSNDEKGIKEAVKTIKKYTPERIVIEATGRLEMPFIMACAEANLPFVIANPVHIKRFAGAIGQRAKTDKLDAQLIAHYSEAIKPTLSTLKPDVMRAMSDLVARRNQLLVMQTMEKNRLQILPKELEMTIKPILTAFKNQIEKIEIKIVKLIESNPDYQAKNTLLQSMKGIGKIAAASIISNLPELGYISNKEASALVGVAPMNKESGRFKGMRKIQGGRHQVRTVLYMAMMSAIQSNPVFKSTYQRLVAAGKPKKVAIIACIRKMVVTLNSMLRDGALWEAPKAIN

SEQ ID NO: 412448 - protein, 343 aa, unidentified
MEQYIGLDVSMKETAISIRQDGKRIWRGKCASDPQLLAALIRKRAPYVRRVVFETGPLSVWFYHALAAEGLPVICIDARHAKAALDMAANKTDANDADGLAHLAEVGFYREVRVKGFDSMLIRTLITARRQLLKMRLQISNQIRGLMKTFGLVVPKGTGSVFERNVHDLLQGEAKLARIVVPMLRAWSDIRYQIAELSKQLAAMAREDQHCRLLMSVPGVGTVTATAFAAAVEDPANFRNSRAVGAWVGLTPRRYQSGEVDNDGHISRRGDNQLRGLLYEAAAVILNRSTDTSTLRTWALELKERLGFKRAAVALARKLAVIMHAMLRTGELFDPHGGTPAAA

SEQ ID NO: 412449 - protein, 409 aa, unidentified
MKVFYLGVDVSKKKLDLCLRSNGKDILYDVIPNDLSSIKSWLTRTFEKFFLSEDSLVVCAEHTGQYTYPLVCATKSIGVYLCLEDAAKIKYCHGIPRGKNDKIDACRIAMYAERYNDCLQPYTASELIIQKLKNLSTERSMLVADRAKYQSQLKDQVDYMEHSIYIAKCNRVEGIINTFTDYIAQIDLEIKELINQAPVIAHQMDLLMSVDGVGERVALKMIMETDAFTSFTDPRKFCCHAGVVPFVYVSGSSQRSKNRVSNRADKSIKHLLHMAALSVSQVKNSPLKKYYDRKVEEGKNKMSVLNAVRAKLVTIMFAVIRTDAFFSRNYKNRGGSTCPDERDFSYLSTAFTNIFHRSSHLYALMRSNIIVCIYGIGYTFIQLFKAVICTVKKPPILDRVIHPFSQSIM

SEQ ID NO: 412450 - protein, 409 aa, unidentified
MLFVGDDWAEDHHDVEVQDERGRTLRAVRLPEGVDGVARFHDLVAGFLPEDASPAQVLVCIETDRGPWVRALVAAGYQVYGVNPKQAARHRELMSISGAKSDKADARTLADMVRTRRHQLRQVAADSDIAEAVKVVARAHQTLIWERTRHTLRLRAALREYFPAALQAYEVLTLTGSDTLELLAKAPTPAAAAKLTVAQISAALKRARRRDIPTKAAAIRQALRTAHLGQSEIVTGAYAATVRATVAILQTLNTEIRTMEGQVEAHFGQHPDAEVYLSQPGIGAILGARVLAEFGDAPGRYTDARSRKNYAGTAPITRQSGKTKTVHARFVHNDRLVDALHMQAGAAILHDTAVRAYYDELRARDVSHPAALRQIGNRLVGILHGCLKTNTHYDQATAWSHRTALPTAA

SEQ ID NO: 412451 - protein, 389 aa, unidentified
MIYVGIDVAKDKHDCCILGSEADKLFPVFTIPNNKAGFDELYEKMFSVTDDKTKIKIGLEATGHYSLNLLGSLIDKGLPTCVINPLHTNLYRKGLSLRKTKTDKVDARSIAMMLMTNKTLKPYSDISYHNEELKSLTRYRFDKVQERAKLKSSVARLVNILFPALEKLVPSLHMASVYSLLSKLPGASYITECHLTHLKNLLETASKGHYGRDMAITLRNTARDSIGSVIPAKSMELKHTIHLIKVMTEEIDEIEDSIKSIMDTCNSPIMTIPGISYRMGAMILAEIGDFTRFNYADQILAFAGLSPSTYQSGQLDSSYSHMEKRGSRYLRYALFNAAKFVCKWDENFGAYLSKKIGEGKHYNVAIGHATKKLVRTIYRMELTGEAYRR

SEQ ID NO: 412452 - protein, 305 aa, unidentified
MKVITNEVRFVIGCDFHPSFQRIAVLDRETGEISKRTLLHGDGEARRFYQSLLGCKVVVGMESCGNSLWFEQMLAEMGHGLAIGDAARIRATVVRRQKNDDRDALHILELMETGRFPALWVPSPEERDVRALLLHRFKLVQMRTRVKNQLQHIALNYGFQKKRKLWSEAGRKFLKELELPTWTRRRRDDLLQMLGPLDAIIEELSAAVEAEVEKNAGAQLLKTHPGVGPITALGFVLIMGPVERFAGSKQVASYLGLIPTEDSSGGRYRWVTSANRGIRFCAPCWWKPGKPRPAGIQNFAVPTRG

SEQ ID NO: 412453 - protein, 322 aa, unidentified
MAMLSFCGIDVAKDRLDVVVLPEQQCLSVRNDVDGWAELVEQLRSSAVAAIGLEATGGYERGIMRALLVAGMSVRQINPFRLRQFARASGVVAKNDPIDARMIASFVAVMPTRSAQRNAPAVERLTEMLAVRRQLSNEKVAAENAARLLEDPMLQRLSRRRIARLSTDIDTLDERLVEIVAADAALAHRYQLLISMRGVGPVLACTLIALLPELGRLNRKQVAALVGVAPYNFDSGLLKGVRRIWGGRAPVRHVLYMAAMSASQHNPVLKAFHDRLKAAGKEPKVVIVAVMRKVITTLNAMVRDDVTCADRSTGRHNVPTAR

SEQ ID NO: 412454 - protein, 353 aa, unidentified
MRKRYNTVSFKNQTVFVGIDVHKKQWTVTIRHCGLAQKTFSMDPEPEKLADYLKRNYPDAEYRSVYEAGFCGFEAHRALCKLGVQNIVINPADVPTSGKEREKKNDNCDSRKLARELENGSLESIYIPTPENLMLRNLKRREDQLVQNLTRVKNRIKGHMYFNGIKFISWAGGSLKSMEEEAQKRNDWTLLSDLRELRFLRTERLQVIRDQRACLKLLDRGEIQENIQSVPGIGFRTGFALQAELWDMNRFKSKDHLNSYVGLAPHVFGSGEDVVVKCGNRKKKQLHYLMIEAAWRAVRHNLEYRARYGALLGRGMSSQKAIVVIAKKLMETIRVVWLQDRKYINFLEASKVK

SEQ ID NO: 412455 - protein, 365 aa, unidentified
MANDSKKERPKMTAGLDLGDKYSCLCVIDDESGEVIEESRLRTTPEALRRRFLFEEHLTKIAIEVGTHSPWVSRVLEECSQEVLVANPRKTRLIYGQKRKTDKLDAQKLARLARVDPELLYPIVHRNEDCQAHLALIHSREALVRARTQLINHARGTVKSFGTRLPKCSAQSFHKKVAGKLPPELEEVLRDVVETIASLTEKIKNYERRIERLCKERYPHESALLRQVPGVGALTALTYVLTLEDPHRFAKSRSVGAYLGLVPGKDQSGQSDPQERISKEGDEILRRLLVGSAHYILGPFAPDSDLRRHGEKIARSGGGKNAKKRAVVAVARKLAVLLHRLWITGEAYEPLRDARLSGALGEEVA

SEQ ID NO: 412456 - protein, 606 aa, unidentified
MHELEGVVVGIDVAKARLDVAVRPSGEERHLANDAAGIAEAVAWLQTVGARVLVIEATGGYEAPLVAELGVATLPVAVVNPRQVRDFARATGRLAKTDRLDAQVLAHFGEAVRPTPRPLADEEAQALAALVERRRQVVAMRTAEANRLGATHVAAVRARIQAHLAWLEADLGDIDADLRRRLRASSLWREQDDLLQSVPGIGPIISLTLLADLPELGRLSHGQIAALVGGAPLNRDSGTLRGRRSVWGGRRAVRTALYMGTLRATRCNPVIQAFYNRLLGSGQSQEGGVSGLHAQAAHPAQRPAATSDVLAGSGRLSLPGRGNTRHSCSNVRHFEQFTALHLGLLAETRHKSLPRLGTIVHANPQALHHFLANADWFVEALRSKRLELLRQALGDTPFLLCLDETGDRKKGKTTDYVAHQYIGNLHTLANGVVSVNAYGVLDTTTFPLLFGVFKPRTRLKAGDVYQTKPQLAIALVEELVALGFRFSVVLADSLYGESGEFTSALHRLGLRYVVALRSNHGAWMLPGQRVRQTRWRPFDRVFTDGSTERRFLRETIYGARHAIRYYQLTTDPATLPPETTWDLLTNLPGKIEQTVGNTFGLRTWIE

SEQ ID NO: 412457 - protein, 346 aa, unidentified
MIIIGCDYHPSWQQICWVDTVTGETQERKLEHASGEAERFYRGLPGAALIGMESTGNCQWFVELLTGLGHEIWIGDASKIRACDPRSQKHDRRDAALILKLLMEGRFPRIWTPSGEEKDLRQLLIHRYKLVRIRAQVKTELQHLAMNQGITKKGKLWSKAGEKVLRELPLAPWASQRRKDLFRVREMLNEQIDLLDRAVVEAAEKNKKARLLMTQPGVGPITSMAFVLTMGDVSRFQRGKQVASYLGLIPREYSSGGHQRLGSISKQGNRFMRMLLVEAAQGAVRYDPGFRNEYVHRCHRKAKGVAKVAAARKLAIRLYWMLRTNTEYPEVVRVESSSRVPLVSAS

SEQ ID NO: 412458 - protein, 438 aa, unidentified
MNSLSYVERFRQIKNELRKNHDFLLVGIDVSKNSHVACIMDSSKHIYHKKFRFDNSANGINLMLTTTKTILQKEPKKEIIFALEPTGNYHKPLANYLHNLGYMGCYVSSVAAKENRKTINGRWRKNDPDDAYNVADLLNQGKIMFYNSEQQKEFNQLKPLNILRKKLQKRLCSIKAKIRNNIFAQCFPEIDSLYNQIDNPEVIEILKNFPSAEQIRNTSFKEFYSKLIQTGRITTQKKQRIHNVWHKAASSIGCPLNAAMEIETAFILQDIELIKCQIGKIDKKINAICSHSQDYKLLLEIPGFGPIYASIFLSVINNIKNYNHPDQIVKLAGLDLEYSQSGKYHSKSQCSKKGNALLRYALCGVVNGALKHKIFQQLFEEQLQKKGDDKDNRRILKVKLAVKMIRIAYAVLSKNEPFDIEKIKLNSVKEPVLIEREG

SEQ ID NO: 412459 - protein, 408 aa, unidentified
MELAPIYQRVIGLDIHQAQITACALIEQADGSVYTEQRQFGGFKKDRQALAQWVAAFSPDEVVMESTGIYWKSPYAALEAVGIRAKVVNARHVKHVPGRKTDMADAQWLALLARAGLLRASFVPPAVLRELRLIAHQRQNLVGQLASEKNRLHKVLTDGGIRLGVVVSDLHGQSARAMVRALIEGKSPPEVLQYASKRLRASREDLFDALQGDLSASHRFVLQELLAHIQDLEARILRFDTYLLQGLATERQALTLLQTIPGVDQIGAALLLVEIGPDMQAFGSADRLASWAGMCPGNHESAGKHKSGHLRKGNRYVRRLLCEFAHAASRTQSIFKSKFQALVVRRGHKRSIIAIGHKILRTIFFMLKRGEHYRDSTTDYEALSVQKNAPRWIKTLVKFGYITPPSDA

SEQ ID NO: 412460 - protein, 465 aa, unidentified
MKKESNQRMKDKRLRGHLDCVNLFAAGIDIGSTSHFVAVPQELDARPVREYSCFTKDLIRLADWLVQLGIQTVAMESTGIYWIPIFEILEERGIEVLLVNAHHVKNVPGRKSDVQDCQWIQQLHTHGLLRGCFRTPENGIALRAYMRQRETLVRKASEPIQHMQKALRQMNLLLDNVVTDITGKTGMGIINAILGGERDPVKLAKLRDGRCKHDQETIAASLEGHYRKEHLFSLQQAVEIYNFYQQQIFACDVVIENELASLEPKGNQTGTPPTDKKRKNKSSLNFDVHSELYRLTGVDLTSIDGMNENSVLKVLAETGTDMSHWRTEKHFASWLGLSPNNKITGGKVLSSKTKPTANRAAAAFRMSAYTLHGSNSALGAFYRRQRTRLGAPKAITATAHKLARTFYSMLKNGTEYVDHGKEYYEKQYENRVLKNLKKRAASLGFKLVLDIDQDDVNKDIAISAS

SEQ ID NO: 412461 - protein, 438 aa, unidentified
MDAYRKGITNMLKFISVGIDVGADFSFMSLALPNRTFIGKPFKIVHNNFNSLERAVLTIREAEELHSMKARIVMESTGIYHYPLFCYLRDKGFDAIVINPIITKNSTNMNIRKVANDKASSKNLALIGLKPDLKTSVMPSDAVLDLRNLVREYYNLVDARSAYVNKLLGILRVVFPRFIGIFSKITVKTSLALLEKFPSPDEFLSARKSSVVSIISKTARFGKAYAEKQYQAITVAAKSAKVFGHFVPSNSTLIRLYVSFIKKYDEEIAVVLALMHKMVDDHAGETFVKHIRLIEAIPGAGFLSAVTVICEIGDFSVFKSPKQLFAYFGIDPAVKQSGNFTGTKVKMSKRGSAVARRAIYTIALVGVGLTRKGVANNPVLRAYYLHKCQSKPKMVALGAVMHKVCNIIFAVLRDNKAFKLITPEQHIQNYTDIQLSVA

SEQ ID NO: 412462 - protein, 334 aa, unidentified
MKYQHVVGMDIAKDSVQASCFDGTTFFDFSFPNQEKSFLKKVQKSIPKSDPSHILFVMEATGVYHLKLATALYKEGYSVAVVNPFIIKKYAEMLLKRAKTDRNDARLIAQFGFYQEVTLFAPKENLAEEITQVLKGLDQLKKERTNLKNYQEALTHHNEINSVVRDIYQKQLKEVEKAIKTLEAEAKRLVCQYAPKEYQLLLSIKGIGKCSATALLGFLQKMDRFSRGKEVASFLGLAPQISQSGKDKGKAWLSKKGNGYLRRLLYLAALSASRSNVQCRELYQRLLAKGKPKKVALIAVANKLLRQAFAVLKSGCPYDPHYLKLKSNLEVVLT

SEQ ID NO: 412463 - protein, 388 aa, unidentified
MSQEKYIGMDVHQATISAAVIDAHGKLIMECLLETKAATIVEFVRGLQGPLSLTFEEGTLAAWLHDLLKPHVDRLVVCDPRKAALMKDGNKSDRIDARKLAELLRSNQLKPVYHGEHGVRTLKELGRSYLTLTKDVTRVMNRIKALYRSWAIPCGGTTVYAPRHRAEWLAKIGEPGVRVRAERLYQQLDVLQPVRQQARHDLLLESSKHPAVKLLRQIPSIGPIRAALLVALLQTPHRFRTKRQLWAYSGFAIEIHDSGEYRCVRGKLQRNRERITVRGLNDNHNKDVKSLFKSAAISASTRPGPLHDFYAARIAKGMRPTMAHLTLARKIAAITLTMWKKGVGFDPPTVASASRLSLSGEEGFPSQDFLGWWSLRFGELGSRVSISQ

SEQ ID NO: 412464 - protein, 411 aa, unidentified
MNAVGIDVSKGKSTVAILRPMGEVVQTPKDVSHDMVSLERLVYQILALGEETRVVMEATGRYHEPVAQELHSHGIFVCVVNPLVIHGYCAGGKVRKVKNDQKDSLKIAKYALDHWVDLREYTPMDAIRQQLKIFSRQYNLYMKSSVALQSNLISLTDKVFPGVNELFSSPERDDGHRKWVDFVTTFWHCECISRVSEKAFTERYQKWCKHQGYNYSAGKASDLHTDSLGHIVTLPKNNNTKLLIQTAAKELTAMDELLAVVRREMVRLAAQLPEYETVRAIYGVGDVIAAQLMAEIGDVRNYPRRSSIVAFAGIDPEVNQSGKMDVQSNPSSKRGSPYLRKTLYQLMTIYLRLAPPDEPVYQFLDKKRFEGKPYFVYMTAGANKFLRIYYARVKECLSKLEESAEAKTDVI

SEQ ID NO: 412465 - protein, 338 aa, unidentified
MGRHIGVDLHRNKFTVCVLTGQGRNYLSTWRLEDLDKFVKKLRGTDEIAVEVTGNTRLFYDAVSPHVLRVVVVNPHQFKVISESVNKTDDNDARRLAQFLSKDLLPEVRMKKKGHAQVASLTQTRDKLVKLRTALKNKVNNILSAHGVNLKKEFLSSEKGLDKVLGMKFDALVEVELLILVEQTRSLNKSISDLEKAINDAGSKLSGHKNLKSIKGIGSLGASILLSVIVDVNDFPDEGKLASYFGIVPRVSNSNETLHSGRITKRGTKLGRTTLVQCALIAKRYSSYLSDYYDRIKARRGAGKAIIALARKFLNLIYHTLKNNWVWEDFPNGVLAET

SEQ ID NO: 412466 - protein, 338 aa, unidentified
MNIVFLGIDLAKNVFQLCGLNQAGKPVYTKRTGRKELLQTLANIPACLIGIEASTGAFYWQREFEKLGHKVKVISPQYVKPFVRGQKNDGNDAQAIAVALMQPTMQLVPPKSPEQQDIQALHRARQRIVNHRTATVCQIRGLLLDRGIPIGSAVSRARRAIPLILEDAENGLSSRMRRTIAELYDLFNDLGRRIHFFDKEIETVFRQSEACQRIAKVKGIGPETATAVVAAIGKGTEFKNGRHFAAWLGLVPRQHSSGDRQVLMNMTKKGDRHLRTLFIHGARAVVRVATNNNDGHMNQWVNQLKERRGFNKTTVAVANKNARIIWSMLRNETGYQVV

SEQ ID NO: 412467 - protein, 342 aa, unidentified
MSFYCGIDLGARESQICVIDKGVKKVLEVKVPNKLEHIKQLLAPYKADLEIVVESTFNWYWLVDGLQAAGFKVVLAHTLGLYMITAAKVKTDRRDAFALAKLLLAGMIPTAYIYPAETRPVRDLLRRRGWLVQVRAGEYGSLRRLLLRQGILSRQQQEIKQATEEDLEKWFTHELVRLHASQELERIHLYSEQIETLEETILEQAKKARAFEKLQQLPGIGPIIALSIYYEMGELGRFASAKDFSSYCRVVPGVAQSGQMSRRGRGSKQGNPYLKWALSQAAVHAVRCYPGVRRYYERQLQRHRGRARQMVVYNIIAHKLAQAIYHVLKERSEYREELLFGR

SEQ ID NO: 412468 - protein, 349 aa, unidentified
MRFYTEQHQYYCGIDLHARSMYVCIRDQAGSKLVHRPIRCQREAFLRLISPYREGLVVGCECLFCWYWVADLCLEEDIPFVLGHALYMKAIHGGKSKNDRIDSDKITHLLRGGNFPYAYVYPREMRSTRDLLRRRLFFARKRGELMAHIQNTNTQYNLEPFEKRLDRLANRDELLEHFADDENVQMSIAADMALLDRYEETIVELELFLAHQAKVHDASTFYLLRSIPGIGKILSMTLLYEIHQIARFPGVGDFLSYARLVRGSWESDGKRKRGGGAGKIGNVHLKWAFSEAAALFLRLNPIGQAYFKRLERKHGKGKAMSVLAAKLGRAAFFMLRRRQPFDLKRFVAA

SEQ ID NO: 412469 - protein, 340 aa, unidentified
MRIVEVTGGVDTHADTHVAAAIDHNGGLLGVESFGADQAGYEELLGWLVGFGPVQQIGVEGTGSWGVGLTRFLTDHDSRVLEVDRPNRQTRRKQGKSDPTDAVSAARAALSGTATTTPKSRDGRVEEMRVLLVARRSARQQRIQTLNQLRQLVFTAPEPIRIRFKDRYKRGLVREAANMRPRESSDPIVFTTNLVIRNLARRIKGLNNEMAEIDRMLTALIEDTAPSLLELYGVGVDTAASLLVAAGDNPDRLHNERSWAHLCGTTPLPASSGKTTRHRLNRGGDRQANAALHRIVLTRMSSHPQTRTYVARRRAEGLTTPEIMRCLKRYVARQTFKHLT

SEQ ID NO: 412470 - protein, 343 aa, unidentified
MSEVSIIGLDIAKNVFHAHGADASGRALFSRKIVRGKLLEFFAGHQRCTVALEACGGAHHWGRELTRLGYEVKLIPPAYVKPFVKRNKNDAADAEAICEAAQRPSMRFVAIKSEEQQASGLVFRTRDLLVRQRTQLINAIRGHLTEYGWVAPKGPSHVAMLGDLLADEVGSSLPEAARSMFRTMLDLLEELNEKIGDLDKEIARRAREDAVARRLMTIPGVGPITATALAALAPPAETFTKGRDFAAWLGLAPRQMSTGGKQKLGSISKMGERTLRRLLIIGCSAVVLQASKRGAPQGSWLEQMMARKPRMLVTVALANKTARIIWAVLVKEEDYRAPVAAAA

SEQ ID NO: 412471 - protein, 409 aa, unidentified
MQVLHPCCCGLDIHKKFIVACLFTTQADGSVQKELRTFTTMTQDLLALSDWLREAGGTHVAMESTSSYWRPVYNVLEGHFELLVGNAYHMKTVPGRKTDVKDAEWIAELLRHGLIRGSFIPAPAQRHLRDLTRYRTHLVEERARLTNRLQVVLEDANIKLAAVVTDVRGVSARAMLDELVAGETDPATLAELARGRLRSKRELLVQSLTGRFTAHHAFMITEHLSQLDYLEEAMERVSEEIERRVEAEQAAIELLDTVPGISVRSAEILIAEIGTDLTRFPSAKHLASWVGICPGNKESGGKRLNGKTRHGNPALRQVLIEITHVASKTKDTYLAAQYRRIAARRGKKRALVALGHTILVIVYHILTRQEPYRDLGATYFDLRDQQRVEHRLVHRLERLGYVVNLQRAA

SEQ ID NO: 412472 - protein, 391 aa, unidentified
MVFVGIDVAKDKHDCYICDSDGLELYSPFIIANNREGFEELMERIRCVSDDLSKVKVGLEATGHYSYNILGYLISHGTPISLINPLHTNLFRKSLSLRQTKTDKVDARTICMMLSSGMDLSSYSESSYHMEELKSLTRYRFGKVGERAQLKQSLSRLVTILFPELETLVPTLHMKSVYALLSEFPGAIYVANAHLTRLKHLLADSSKGRYGKEFAETIRDTARKSIGSDMPAKSLELKHTIALIHVLTEEIDEIEFSIQKIMDTLEAPILGIPGINYRMGSMILAELGDLRRFSSPDKILAYAGMSPSTYQSGQLISSYAHMEKRGSRYLRYALFNATRYVCMWDPTFKSYLAKKRAEGKHYYVAISHAAKKLVRLIYHLQMTGEAYCPQT

SEQ ID NO: 412473 - protein, 410 aa, unidentified
MELLHRRCCGLDVHKATVVACLRLVSDGKVTTEVRTFQTTTADLLRLSEWLAANDCTHVAMEATGVYWKPVWHILDDGEFVLLLANAAHVKNVPGRKTDVNDAMWLAELLAHGLIRASFVPDPQTQEMRNLLRTRKQLVREQSSHVLRVQKTLEDANIKLDSVLSDLMGKSGRAMIEALIAGETNPAKLAGLADRRVKASPEELREALRGRVTKQHRFLLRLHLNQIDALDAAMATVDAQVEANLGPFRTAVEQIMSIPGFKNLGAHVIVSEIGIDMSRFPSDAHLISWAGICPRNDESAGKRRSNRLRKGAPWLKTTLVQCAWAAVKKKNSYLQAQFHRIKARRGPKKAIMAVAASILTAIYHMLKDGTMYQDLGRDHFDRRSADQQKKRLVKRLNDLGYAVEIKPLAA

SEQ ID NO: 412474 - protein, 491 aa, unidentified
MTFFSKETRKLTGARYFGIDLAKRESQVAVLDADGIQVETKRFATTRENFLAIAAELRESDVAALEVTTNSTSIARLIRGNSQARVIVSNPIKTKTIAQAKIKTDKIDARVLAELARVGYLPEVWLPDEDTEALRQFITDRVSLVRRRTECKNTIHSVLHRNMVRQERSDLFGTAGRRWLETVIRGEGVKTPVPELDRMRIGSLLNEIDRIDALVADLESVIASYVALRPHLKQQMDRLPSITGVNLVVAASLIGTIGDIRRFEGKKKLAAYFGVVPSTYQSGDTSRNGRITKQGRAEARWLIIEAAEILRRSPGPMRSLYTRIQRKRNHNVAVVAVARKLVELVHHLLTNEEDYIYRLPKLTMGKRSRWRMLARRKIGIEIKSAAVKIAGRPALYGTGIGVRGSKLKAQVVKQSALDAERIYTAIVDGRRRHLEDPSSPLIPTSDLVFDPTQPREPDWERILSQHTERLLLRYQKREASRSKSAPKPDIS

SEQ ID NO: 412475 - protein, 357 aa, unidentified
MNEGSWVGLDVHARSVVAGVLDAGSGELRTRRVPVGCEETVGWLGSLPGPVRVAYEAGPTGYELARACLEAGIACTVAAPSRIRRAAADRVKTDRRDAELLARMLRMGELVAVRVPERHEEAARDLVRAREDTRGDLMRARHRLSKLLLRHGLVYDASAWTIAHDAWLRRQRFDSRPLSLAFDECYATVLQTKTRRDALDQAIAELAGTPPFVEVVGRLVCLRGVSTLTALALTVELGDWTRFRPQSLGPFLGLTPSEDSTGEKRRLGAITKTGNTHARRLLVESAWHQRRPLRASLALERRRGGQPPHVQAQADRSARRLHDRWHALESRGKRRTVVAVAVARELAAHCWALATME

SEQ ID NO: 412476 - protein, 338 aa, unidentified
MTPFKYFVGVDLASATFTACVGTTPWAILVKPETFENDEDGFASFLGRLKEHNLPPAQTVVCMESTGVYGEGLAYYLSASDYPVAVEPPLNIQRKFPVNSSKNDGQDSQNIAEYACRYADKLSLWKPRDEVLEQIKLLLTTRQQFSVQLTAHKNALHAVKRKKVSSELAKKVHTDMIEQIIKHIKAIDIEIRRLIDSNPTFKAALLLLLSIPGIGLQLAAHLIIMMQYSLDPRVLSAFVGICPYEHESGSSVYRNPTSRHYGPAAIRKLLYLAACSVSTHRTDFRQYFLRKKAEGKPGKLVLNNIQNKLLKIACAVIRTQKPYIPTYVSVNPLVLKNA

SEQ ID NO: 412477 - protein, 357 aa, unidentified
MVKSIRNLSSVSVIGLDIAKNVFQVHGVDAAGAAVVAKAVRRGQLVSFFSSLPPCLIGIEACSSAHHWARSLIALGHRVKLIPPAYVKPYVRRSKNDAVDAAAICEAVGRPNMRFVPVRSVENQAQLMRHRARELLAGNRTQMLNALRGHLAEIGVVAAQGVQHAYALKRLLADGVDQNGEVVVADCVRKALAPLVHQIDAIDAEIAAIDEEIKTQVKADDRARRLMTIPGIGPLTASAIVATVQDTSAFASGREFAAFLGLTPRQNATGGKERLGRITKMGDRYLRKLLVVGACATLSHRKGHDDALRLWADQLLARKAVRYRFKLTAVALANKVARIVFALLTQGGEYNKRPAVG

SEQ ID NO: 412478 - protein, 338 aa, unidentified
MDMVPAYVGLDYHDETIRVCVMDADGEVLCNRNVPNDPGMVRDLVRRLGGLVRGVALEACCGAADFATQLGALTEWSVKLAHAGAVQRLKQGPDKTDHGDAWHLANLLRVGYLPEVWLADEFTRQLRRLVRYRQGLVLERKQIKLRIRALLREERIVHPAGKNAWTKPWREWLKTAALGEHSRWVLDQELRRLERIGDDITQVERRLVEATQEDPIMAKLLEQPGVGLVTAATLRAVVGRFDRFHSGKQLSRYCGVTPCNASSGKRQADAGLVESGHDILRPMLIQLAKRLPRHEPRWKELHAKLRKTKPANVVSAAIANRWLRRLYHELVSVKAQAS

SEQ ID NO: 412479 - protein, 322 aa, unidentified
MTRENYVGIDVGKKSLDLAVYGSKKTTTFPNTEEGIEKLLLALQKINPSLIVVEATGGYERLLVVALISQGFPISVANPTRVRALAKASGKLAKTDAIDAHLIAEYACLMKPQPISSFDEAFLRLQALVKRREQVVEMRTAEKNRLDKSPLFVEEYIERHILQLEEEITLLEKEIRTLAASIPRCREGMELLSTIPGVGFITSVTVLALLPELGTLDNKAIASLAGLAPFNRDSGKKQGKRKIFGGRKRVRRVLYLSTLSAIRCNPVIREFHERLIERGKPSKVAITACMRKLLTIMNAMARDNTPWQEFSLPEVEILLPVS

SEQ ID NO: 412480 - protein, 407 aa, unidentified
MFYCGIDIAKHRHELAVLDEAGVSVLSMHFANSQKGLEKLLDALASLKIEPENISFCMEATGHYWLALYCQLRERGFQLHVINPIQSDALRNLYVRKTKTDKKDALLLADLVRLGRAPATQLASETTLKLQTLSRLRLEFVHQIGGLKNRVLGILDRIFPEYPECFSNVFIRTSRELLKEYPEPELLAEADLSELTAFLKQYSRGRLHRDRAEQIQALAKGTFGIRLALDAFTLELKLLVEQIEFIEEQVSILEEALEQILEEFRTDPEQPYRHVLETIPGIGPVLTAAIIGEVGDITRFPNAKALVAYAGLDATVRASGQFEGTRNRISKRGSPALRNSLWLAAVTARRFNPELKAFYETKRAQGKHSGVATGAVARRLVHLIYSIWKDNRPFEPDYKWSPPGSND

SEQ ID NO: 412481 - protein, 340 aa, unidentified
MNITTVGLDLAKNVFHIVGLDEHGHEKMKKQLSRHQVLKHFANHPACVIGMEACASAHYFARELRKLGHEAKLIPPQYVKAYVRGQKNDTNDARAIAEAVRVPSMRFVTVKTVAQQDVQSLIRLREGAINARTAAANRLRGLLGEYGLVRGKSLSTLRRALPEILEAVSNGLTDVFRRLLAQERQHLLELDAHIDTLTAELTALSKQDDRVQRLQTAPGYGPIVASVFASVMGDGKQYRRGRDASAAVGLVPRQHSSGGKNVLLGISKRGDRYLRSLLIHGARAVVNAAQKKDDPLSRWINHLREKRGMNKATVALANKLTRIGWAILRNGTTYQPAQAS

SEQ ID NO: 412482 - protein, 348 aa, unidentified
MTIVDAPRAVTGGVDTHLDLNVAAALDAIGGLLEVAEFPATSGGHRRLLGWLAGFGPVTRAGVEGTGSYGAGLARYLRSAGVEVVEVDRPNRQARRRAGKSDPLDAIEAARAALSGRASGAAKTRDGNVEAIRALVVAKRSARSVKIKTLNQIRHLSFTAPEELRQRLKEVSRQQLGARAAALRPGRREGADPVLVATKTALRILGRRVLALDEEKARIDALLSELVTQTAPELLRLHGVGIDTAATLLVTAGDNPGRLRSEAAWAHLCGTAPIPASSGKVTRWRLNRGGDRQANSALWGVVITRLRNDPRTQAYMTRRLAEGRSKPEVIRILKRYIAREVYHHLPRP

SEQ ID NO: 412483 - protein, 361 aa, unidentified
MRIIGCDLHARQQSLAMLDTQTGEVVNRTLMHEGNEVREFYSQLPRPVLVGIEAIGPMQWFLKLLDELGIECQVGDATKIRAAEPRKQKHDRRDAELILKLLVENRFPAIWRPNQELLDLRALLLHRHHWVRLRTQIQNALQAIALANGLRRGPSLWSYDGQAKIAFLPLPPHASYRRSMLQALYRQMEEEIAQLTAQVAEQAEQRWGARLLMTHPGVGPITALATDVFLGDPQRFPDGKALASYVGLIPREYSSGAHQRLGALTKQGSPLLRFLWNEAGAHAVRRDPELQRFYRRKLVQKGLGKARVAAARKLGIRLWIMLRDQIDYEEFCRRGQKQQSGEACAGMLEVGFGANSHRPID

SEQ ID NO: 412484 - protein, 352 aa, unidentified
MDNNINKLFIGLDLHKNTSSFCVKNYDGQVLREEQILTDKNQFRGFINSFKGQKMSLVLEPVSQWYTYADFLESLGVEVHLAHPMKVKAIASARIKNDKIDAAILTDLLRTNCLPKAYLAPAPVRNWKEIVRFRASLLNLRTQVKNKIHAILHKHGLKHTFSNLFGKAGTVWLKTLNLPQPFATNLPTWLNLIDYLTVQIKQAEQRVEQLVIEQPAAKLLISISGISYVSALTIMGEIGDIKRFPSAKQLMGYAGLVPSTYSSGDTVRHGRITKTGSKWLRYIMIESAQHQQLCKKKPGFGSYYLKLKQRRGTATATVATARKLLAVVWRLLVDGRPFQATPPHCGKTRPLA

SEQ ID NO: 412485 - protein, 338 aa, unidentified
MKVMHECVAGIDVHKDMIKVAVRSPGAKAWTRKTEVFTFRTFYGVLREMARMLRGRGVTHVAMEASGVYAEPVCYALREEDFDEVLVVNPAHIKAVKGHKTDAKDCARIAELLGCGLLRGSCIPPQELKELRDLTRYRSKEVQARTSEIQRRHKALEPAGIKLGSVASGITGKGPSLMIDALIDGERRGPVMADLAQGGARTAGKMADLSMALEGRFTDHHALMAGLHRDAIRGYDAAIAALDTRIAEKAAPWQRETGLLKTIPGFGDVVAQAWIAEIGPAPHEWFGSREKLASWVTLAAGNYISAGKRKHGRTGDAGAYVKPMLVQAALTPNPAFCR

SEQ ID NO: 412486 - protein, 417 aa, unidentified
MTKNSKSPMKKEPKAKRAKAQRPVQRETREVLAELVEKLRGKLELKPTPASPVKAGQRPERSPNLDRLTVGVDLGDQWSRYCILGLQGETLSEGPLQTRQAELAEFFQAFPPARVVIEVGTHSAWVQEVIAGKGHEVLVANPRLMEGSKRRKRKNDRIDAHKLARLGRVDPQSLHPITHRSREVRQDLVLLRAREALVEARTELINATRGLVKSLGTRLPQCSSRSFGHKVGDAIPAETREALLPLVQLADGMSACIKDYDRRIEELASEKYGHTKLLRQVKGVGPLTSLAYVLTLEKAERFPKSRDVGPYVGLVPKQEDSGESQPQLGISKAGDTMLRKLLVGSAHYILGPFGPDTDLRRYGLRLCERGGKNAKKRAAVAVARKLAVLLHRLWVSGEVYEPLGYASSAAMVQKAAA

SEQ ID NO: 412487 - protein, 373 aa, unidentified
MPDVSSNQPADVRLWVSLDVHKLSIVAATLPPTGGQPEVQRIETTRVAIRRFIERLGSPEGLAVCYEAGPGGFDLLRVLTELGVACDVIAPSLVPIRAGDRVKTDRRDAKKLVRLYRAGELVYVQPPTPETEGLRDLMRCRDDLRRARTAARHRVSKQLLRHGRIYRDGKSQWTKMHRGWVARQRLDDEFAQAALEQMLIHLDGLDRQLDALDRDLEQIARTGRWAETVQILTRFRGIATRTALGLISEIGDFHRFGHPRELCAWLGIVPTEYSSGDQRHRGHITKTGNHHARRLLIEAAWSYQHRPRRPDRGPEPDARAWQAQIRLHRRYRHLTTERGKRSTVATVAVARELAGFLWAAATNQPFALEAAAA

SEQ ID NO: 412488 - protein, 370 aa, unidentified
MKKSITIVGLDVHKNSIDIATAETSGNQEVRYYGTIGGDMASLDKAVRKLISKNVDLRFVYEAGPCGYEIYRHLTNQNLQCVVIAPSMTPRKSGNRIKNDRRDALSLARLERAGELTPVHVPCPDDEAMRDLTRGREDSVKALRTARQRLGAFLLRYGHRYPGKKTWSAPHMRWLSDITMPHPAQQFTLQEYINSVMECTERVNHFTGQIQKLLPEWRMSPVVTAIQALRGVAQIVAVTFVSEIGDISRFAKPRELMAYLGLVPSENSTGDDIRRGSITKTGNGHVRSALVEAAHAYSFPARISRVLLKRQDGLPKEIKDIAWKAQLRLCGRFRRLMAKGKLKTKVLIAIARELSGFIWAIAIRVQIQGA

SEQ ID NO: 412489 - protein, 257 aa, unidentified
MNAAEEVVLRKKLRRNGMVTFFAKLSPTVIAIEACGASHHWARLLRSFGHEVKLIAPQLVKPYVKRGKNDMADAEALCEAMSRPTMRFVPVKTAEEQAALMLVGLRDRLIRNRTQLANAIRGYAAEFGLTGAKGMAHLDPLLERIQADKSLPIAARELFALQAQECAQLRLQIAKLMAWHQADERSRRLAKIPGVGPIGAALLTMKTPAPQLFKSGRQFAAWIGLTPKDHSTAGKVRLGVTPATRPCAACWWSAPPL

SEQ ID NO: 412490 - protein, 316 aa, unidentified
MNTSEVFVGIDVSKATLDVGMLPPQPFGTIPNEEAACRGLVERLKAFSPTLIVLEATGGYETLAVATLAAAGLPVVVVNPRHVRDFAKATGTLAKTDRLDAQVLALFAQRVRPAVRPLKDPQSRELEALFTRRHQLVEMLTMERNRLSLAAAPVRKDLKAHIHWLTKRLKDVDGELKVLIQHSPVWREKDDLLQSTPGIGPVAAVALLAQLPELGTLNRRQIGALVGIVPFNNDSGKFKGQRHVWGGRAMVRAVLYMATLAAIRCNPSIKAFYQRLRAAGKKPKVAIVACMRKLLTILNAMLKTKTPWCDKMAVGG

SEQ ID NO: 412491 - protein, 392 aa, unidentified
MIYVGIDVAKDKHDCFAMNSDGEILIEKLTITNNLDGFETLYNSLMNFSDSLDNIKVGLEATGHYSNNILNFLTEKGFNIYLINPLQTNLYVKGQSLRKTKTDKLDAHVIATMLVSDNLKPYIPVSYHISELKSLTRHRFRLVKENSKFKTSLVRLVDIVFPELPKIVSSVAQKSCLALLYELPSAKDIAECNLTHLTHLLSDNSNKKFDREKALQIRDLARKSIGLNSNSVSFELKQTINIIQFIQEQLDDVEKRIKEILKEINSPILTIPGIYFKTAGSILAEIGDISRFDSPAKLLAFAGLDPSMYQSGKFFSTHSVMVKRGSKYLRFALMTAARMVCLNDATFCAFKDRKMAEGKHYMVTMGHVAKKLVRVIYYLLKTNNVYQASKVA

SEQ ID NO: 412492 - protein, 355 aa, unidentified
MTSTKYIGMDVHKESISIAVRNSAGKVVMECVIETKASMILQFIDGLRGDLQVTFEEGTSAAWLYDLLKPHVTKLVVCDPRKNKSMREGNQNDKIDARRLAELLRLDHLTPVYHGEHGLRTLKELVRSYLTITKDLARVMSRVKAIYRSWAIPCTGKQVYAARHRAEWLGKINEPGVHRRAEFYYQQLDALRVLRQEVRRDLLAESKKQKAWKRLCEIPSIGPIRAAVLLGILQTPHRFRTKRPLWNYGGLAIEMHSSADHRRVHGQLERSTKNILVRGLNRNCNHDLKNLFKGAAVVASSKPGPFQEFYTALVAKGMRPEMARLTLARKIATIVLMVWKKGVDFDAQHLKPQTA

SEQ ID NO: 412493 - protein, 330 aa, unidentified
MRKTTDAGIDVSKAVLDVAVRRDERLLETARFDNDTSGHKKLVRWLTKGGRTARVVLESTGTYSLDVALALQRTRGIAVMVANPRAIKQFTGALMQRSKTDLTAAVALRDFVIRMPFVPWQPPATHVLELRAIARRIAALVVERTRELNRGYALEATAEASAVVRNDIDVNVRHLERRIEVLSAQALALIGDHAGLQTAFDLVVSVPGIAAHSAVQLLPELLVLPASMTVRQWVAHAGLDPRAHQSGTSVAKPARISKVGNAHIRRALYMPALVAVQHNRHVRAFFDKLVTRGKTPLQAYVAVMRKLLHAIYGMLTTRTAFVAAKFHATA

SEQ ID NO: 412494 - protein, 345 aa, unidentified
MPIVGGLDIHRKQITFDYLDTVTGEVKRGQIAPADRSHLRAWLARFASWDDVAFAVEGCAGWRYVTGELAAAGIAAHLGEPADTAALRGRKRHAKTDKTDARHLRTLLAEGRLPECWIPPAQILEYRALLETYHDLRAEHTAWVQRIHAVFFHQGAPALSEGALRTGQGLAALRAAAAAHLSPAGQLQVATALDMLTAAEARLGPLRHQLRDAAAHLTGAKVLAARLYGVGPVTALALTCWLAGAGRFSSSRKAVRFTGLDITVHSSDRKGPPGRLSRQGPPVLRWAVYEAGKTHARTSAPDHAYYAAVKDRKNSKRAALSEARKIVRQACHILTELGDDALTAA

SEQ ID NO: 412495 - protein, 391 aa, unidentified
MTNVGIDVAKEVHWVCAVDTQGVLLLNHKLLNTPADLQGLVDELRRLPAPIRVGIDILGGIASLIQAVILEAGFELLHIPGVAVNRAREGTAGGEAKSDPRDARVIADLIRTRLDLRRVTADSEIDIELRLLVSRRRDLTEEQTRRLARMHDLLASIFPELEHCLDLRRKTDLSLLRSWVTPEEFRAVSNDQIFAGLKAGKVLAFARKLMAQVRACAEKQTIALPGERLTASLIKELADEALRNRQREAELDRDIEARLTTHPDAALIRSLPGMGALLTAEFIAVAGPTVRFRSPDALASAAGLAPVLKQSGKSSWLKRPQKGDKRLKRIFYQSAFASMRCPESAAFYARKRKEGKRHHQIIIALARRRVNVLWAMLHNRTPYAPKPLPVA

SEQ ID NO: 412496 - protein, 370 aa, unidentified
MKQRLLYVGLDVHKNTTDVAIANGRSNGKVRSYGKIDSTLDALNKLIKKLQDGDKELRFVYEAGPCGYQIYRHLDAKGIYCSVVAPSMIPRRSGDRIKTDRRDAINLVRLFRAGELTSIYVPTVEDEAIRDLIRCRDDMKRFERKARQRLLSFLLRHGYQYSGKRNWTKGFYNWLATVRFSHSAQQVTLQEYIEATNECSQRIKRITEQIQVHVEEWSRARFVKAYQALRGVSHIVATTVVSEIGDMKRFPTPKQLMAYLGLIPSEHSSGKTVRRGPITKTGNSHVRRSLIEAAWTYKMQARISTLLLKRQQGLPKSVCDISWKAQTRLCARYRRLFARGKSKQTVVTAIARELSAFIWAIDKEVQFAEQ

SEQ ID NO: 412497 - protein, 413 aa, unidentified
MNFIGVDLHKKSITVCVMDQNRKVLARRTIPCTETNKIVDFFRKFRPFKVVVEATASYPWFVELVESMADEVILANPKKLRVIAESTKKTDRLDAQILAEFLVLDMIPRAYQPTPRQRQHRALVRHRQYLQGRITSVRSKVRHILSNYNADRKDLFSAKCGPAYFKEVPLSDADRFVIKQLWALWQEFVAQREALTKKIKAFVAKAPQREAEDRALLKTAPGVGFVTAEVVLSELGDYSRFRNSKAVSAYAGLAPAVRQSGEKRSKDMRITKEGSGLLRWALVESAWRLVGTSPKWSAMYARLKQRKGSKRAIVAVARKLLCVLYAMLRTRTPYKIVATETKAPQKTRKRLVLVRTSTAEQTTTTETATARTTRKRSAKAPVVEQTTTTQAAVPRVTRRRSSRTLAPKQTTTA

SEQ ID NO: 412498 - protein, 388 aa, unidentified
MFCNGHGDILRKPFSIKNSPEGLDYLVKQVTRSCLHRSINPKHVFFGGEDVGSYADNFVSTLRSKGWLVAGVNAHDAKKQRTNMQASTDVLDLMGIATMLINRRANCDRPQSGIYLNLRNLVRHRAKLVKMTTQVRNQIHMVVNRLFPGFLDEKKSGITPFTKSSLYLMENRFNAPQIRQRRKEKLIEVLKQHGMPQPEQRAAQLQGYAQKVLMTPNEYMGTLQLMLFHHVRHLKCLQDNIEQLEKEIAVWLAQTQGAFLTTIRGIGIVLAAGVTGEIGDPNKQKPVNNLVSYSGIIPRVKQTGGPEGKTSTDKVAKRCNHNLKNYVVQSGMHLGLHGPTDLMADHKRRDAAGQHADFGMGQRYVRMAMSLMRNCQVYIPPPPSKQRS

SEQ ID NO: 412499 - protein, 423 aa, unidentified
MKNNAASKMKQVPEKYLIVGIDPHKKRHAAVVMTQDFTIRNKFKFSNSHEGFKMVLERVIAESARAGCPGVMFAVETGGHYWRNLAYFLDEKNIPFRFINQFTLKRRREGKDLNHRKNDYRDGEVAAQLLCTGEFTETKLRQGVYAELHAAHNSYRRLVKESTRITNLIKGLLDGIFPEFTDVFKDPCGLTAMDVLTVCPRPRVIASMTEEEFIGVIQTVRRGRLMKRKLRTLHDVAGISIGVKADADSVSLEISFLVEKLQLIKRQIRHMAESLVKLVDETEEGKYLLSIRGLNYLSTAGLLAELGSFKSYRNAKQLIKMAGSNPTESESGGKRGNHTPMSKQGRPVLRYCAWTAVIPMLRFNSDFCAWAKRMRERPAQANPLGGREIVGAALNKLLRLAFALVKKQTFYRIPQMKPVNMAI

SEQ ID NO: 412500 - protein, 370 aa, unidentified
MVKRSMFVGMDVHKESIDISVAEDGRQGEVRHYGVIAGDLEALAKVVRALRAPDRVLHFVYEAGPCGFGIHRYLTAQGEDCAVINPSSMPKRSGDRIKTDRRDGDALARLHRAGELTAIYIPTPDDEALRDLVRAREDAVGLSTQAKHRLKAFLLRQGRRYPGRAGWTLPYRRWLADLSFPLAPQHIALQEYRDTIDETERRVERITDQLRHLVRPWRWAPVVEALQALRGVSFVTAVGLVAEVGDFRRFQHPRHLMAYLGLVPSEYSSGPSVRRGGITKAGNPHARRLLAEAAWAYQGMARIGRQMLYRQEALPKSICDIAWKAQLRLTSRFRRLVARGKAKPKVATAVARELTGFIWAIAREGPAPPA

SEQ ID NO: 412501 - protein, 369 aa, unidentified
MGDRIGYVGLDVHKEGIVVAVAEGGARGEVREYGRIANTRSALDGLARKLGREGVKLRFCYEAGPCGYGIQRQLSAGGHDCVVVAPSLIPKRAGERVKTDQRDAVSLARLDRAGELTAVWVPDPGHEAIRDLVRARLDAVHALRRARQQLAGFLLRQGCHYRRPAWTKLHHRWLAGLKFEQAMHHLVLEDYIAAVEAAEARRDRLTAQIAAMLLDWTLAPVVAALQAMRGMALVNAATLIAELGDLSRFANPRQLMAYLGLVPSEHSSGASVKRGGLTKAGNSAARRLLVEAAWTYRFPARVSRELLLRQEELPKAIREIAWKAQTRLCARYRRLARTGKPANVVTAAIARELAGFVWAIARQVTIPAR

SEQ ID NO: 412502 - protein, 481 aa, unidentified
MSQQEKRSKPLGEEKTRAGKGKRGRKRKGMCLEDRPILEVNAAGIDIGAREIFVAVPPDRDEHPVRVFSTFTEDLEKMAQWLASCGITTVAMESTGVYWIPLYDVVEKHGVKACLVDARGMKNVPGRRTDWHECQWLQFLHSVGLLRAAFRPEGDVCAVRSMMRHRTELVEMTNQHIQHMHKALTQMNVQIQHVISDLTGLTGLAIVDAIIAGQRDPAALAKLRDPHIKASEETIRKSLVGNWRAEHLFTLQQSRESYQHYQEQISDCDEAIEKMLMAFAPRVDPAARPLPPDRKRKQRGRKKKNVNPKTGFDLRTESYKLFGVDLTQIPGLMAMVLMLFSEVGRDMSRWPTAAQFVSWLALCPDNDISGGRVLWRGMRRVHNRAGDLFRMAAYSLHHDQTPLGDYLRRMKSKLGPAGATTATAHKIAIIFYTMVNKQIEYDATLWAQRDAQREKRFEAKLKRQAQQLGYKLVPIEEKPAA

SEQ ID NO: 412503 - protein, 308 aa, unidentified
MTYKKPYHYVGIDVAKQSLQVHIGERNQAAAYNRSSMGKLLEDIKALDAPLVALEPTGGYERPLVEALETEGVAYHLVDTRRVRGFAASEGTRAKTDPIDAETLTRFAREKSLQPSPRRSAAQKLLADLLERRAQLSELVAKEKNRLQKASQVAVPLIESTLEHAKTQIAQVEEAIRQELRSDAKLQARCEALLGICGVGEVTAWSVLAYMGPIETIGRSQLVALAGLAPYNRDSGKKKGKRFIQRGRAKVRKSLYMAARCAATHNKVIREQVDRLVNQSGKPYKVAIVAAMRKLIIHMQSVLKKLQL

SEQ ID NO: 412504 - protein, 432 aa, unidentified
MPCTALASTDSGKLRRKERNQLDVFCGIDWAEDHHDVALVDAGGQLLARLRITDDAAGLTALLELLAQHGDSPQDPVPAAIETPRGLLVACLRATGRPVYPVNPMSVARYRDRHSVAGRKSDKGDAAVLANVLRTGLHAHRPLPADSELARAVAVLARAQQDAVWERVHAQNKLRSHLREYFPGFLAAFGTARGGITRPEARVILAAAPTPADAARLTRARLASLLRKAGRQRGIDAEAARLHAAFGQEQMRQLPLVEQAMGRQALALLHQLDAACQSADDLQQAAEESFSQHPDAGIITSFPGIGALTGARVLAEIGDDRSRFKDARGLKAYAGAAPITKASGKSRSVTQRKVKNNRLAAAGYTWAFAALTASPGARARYDRRRDAGDRHASALRNLYGRFLGCLHHCLLTGQHYDEATAFPAAKATPAAA

SEQ ID NO: 412505 - protein, 400 aa, unidentified
MIDTGDIDVFLGLDVGKGEHHATAVTPAGEKTFDKRLPNTEPKLRELFAKLQAKHGTVLVVVDRPASIGALPLAVARHMGCPVACLPGLTMRRIADLCPGEAKTDARGAFIIADAARAMPHTLRAIDGEDETVAELEMIVGFDDDLAGEATRVANRLHGLLTQIHPSLERVLGPRLQHPAVLTLLERFGSPAQIRKAGRRRLVTLLRPKAPRMAERLVEDIFAALDEQTVVVPGTEAAALIVPILAGSLTAVLDQRKLLAGRIEELLEAHPLSKILTSMPGIVVRTGARILIEVGDGSTFPTAGHLAAYAGLAPATCNSGSSIRGEQPSRRGNKQLKRSFLLSAFAALADPASRAYYDKKISQGKHHTQALLCLARRRADVLFAMLRDGTFYEPRTPGAS

SEQ ID NO: 412506 - protein, 336 aa, unidentified
MKNKELFIGIDVSKSTFDAAIIPKGSINNVNHKQFKNQTSGFKQLAKWVKSMYSNYEELHWVFCMEQTGVYAYHLCCFFEENGLDYCHESALKISRSLGIIKREKTDKADSKDIARYLYQHREELSFYKLPSKSLQKLKALVSFRKRLIKQKVVLQASSKEIAAFSDKEASKFIKIESNALIKSYDRKIKKTEQEIQELMNEDLALCEAYKLTTSVVGIGPIIAAYIIARTNCYSSFSNPRHFASYSGSAPFERSSGTSIKKVIKLNKMADKELKALLTNGAYVAIRYDGQIKHYYQRKLKEGKSEFSVINAIRNKLIHRVFATVNRGTPYVKMSF

SEQ ID NO: 412507 - protein, 389 aa, unidentified
MTTTAKTTAADTILAIDLGKYKSVACVHDGASGTFRFSSFETTRSEMHRLLTRNRATVVIIEACLLAGWVHDLCAELGIRCLVANTASEAWKFKHLKRKTDRDDAQRLAQLYLLEQLPTVTLPPSTVRQWRSLIACRQALVGRRVAVQNRIRALFVAQGLPAPRGAKAWAATGLAGLASWARPLGECAADGLWRGLLDLSLTEYRQLCELIDQAQTRLDALGQQHADVVLLQTVPGLGPRTAETVAAYLHDAPRFRSAKQVSAYSGLVPRQHQSGEMDRRGRITKRGPALLRKMLVECAWCMIRYNAWARGIYQRLTGGGQRRKKQAIVALARKVLVRCWAMLRDRKPWHDPQTGPKPTLPPSKQRRQAQAQQRRQVKRRAAPAPAAPG

SEQ ID NO: 412508 - protein, 317 aa, unidentified
MREGVVDSDPEAISVFVRSKAPGAVRIGLETGPTSTWLWTELKRLGLPVICIDARHAKAVLKMQINKNDRNDAIGIARIMQTGWFKEVHVKDIDSHSVRALLASRALLVKIKRDLENHIRGLLKNLGLVIGRATFNVFAVRAEELIEDRPDLVAAVRPLLEARNAVEQQVSELDRKVMKLARRDAQVQRFMTVPGVGPITALAFKATIDDPARFARSRSVGAYVGLTSRRHASGEIDWSGRISKCGDGMPRSYLFEAAGVLLTRVPKWSTVKAWGTRLAKRNGLRKAKVAVARKLAVILHRMWIDGTEFNWSKEVAA

SEQ ID NO: 412509 - protein, 454 aa, unidentified
MGRAVSKGRSLSLECIEPNAAGIDVGATEIYVAVPPDRDAEPVRHFKTFTDDLRQMAAWLKRCGISTVAMESTGVYWIPAYEVLEEAGVRVCLVNSQHVRHVPGRKSDVSDCQWLQYLHSVGLLKASFRPDAAICALRSLSRHRAGLVDSAAVHIQHMQKALTQMNLQIHHVLSDITGISGMAILDAIVAGQRDPLRLAGLCHVKVHADRQTVIKSLTGNYRPEHLFTLKQSLAAYRNYQQLLAECDQEIQRLTGTMSGKIDTGGGSAPQNHQQKRRKNQFHFDMGSELRRLFGVDLTAVPGISALTAHTLLSEVGPDLSRFPSAAAFANWLALCPGNKKSGGRILSSKTRPTNSRISHALRLAAQTLARSRSYLGSFYRSMRARLGAPQAITATAHKLARILYHLLTTGTAYDETVFAQQQQKQTVRLHKRLSKQAQLLGLQLVPIFTGESCS

SEQ ID NO: 412510 - protein, 322 aa, unidentified
MSSRTLFVGIDVSKDTLDVAVRPTAETWQVANEAAEISTLVAQLEAMAPALVVLEATGGFEGPLLAALAVAAVPVVRANPRQVRAFAQVVGILAKTDRIDARVLAHFAEAVTPVPRPLPDAATQELRALLLRRRQVVEMLTAERNRLGMAPPRIHQAIQQHIAWLEGQLASLDDDLTQAIQQSAVGQATEAVLQSIPGVGPVPSRTLLGQVPELGTLGCKQIAALVGVAPFNCDSGTMRGRRRVWGGRAEVRAVLSMSTLVATRYNPVIKAFYARLLAAGKRKKVALTACMHKLLTIMNAMVRDMTPWQPREGAIASHPRPS

SEQ ID NO: 412511 - protein, 428 aa, unidentified
MNGNDTTNTNHKPDPSAEPPQAWIGLDWGDQKHSFALQERGGQVQTGTLEHSAENLHRWLKELEQRFGARPVRLGIETSRNAVVTALLEYPWLEIYPINPVTSARYRSAFTPSGAKDDLPDALVCLELVRDHAAKLRPLRLQDPQTLKLAGLVEARRNMVDRRTALLNQLTSLLKSYYPQALSLLENLNSPMVVAFLKRWPDLISLKAAKAATVKRFFYQHNVRSAELVKERLELIAQAVALTTDEARVSVAVLQLRELVDQLEVFQKHVRRLDDEIQSAFAAHPEASLFRDLPGAGRQLAPRLCAAFGTDRSVYPDPASLQKYAGLAPVREKSGNQLWTHWRWNAPVFLRQSFVEWAGQTVRYSQWAQVYYERMAKKGKKHAVIIRALAFKWVRILWKCWKERIAYDEARYLKQLIHRKSPNSVTVQ

SEQ ID NO: 412512 - protein, 455 aa, unidentified
MARTKTKNRSDLTTIKPGAAAIDIGAKMHMAAVNPDHTDVPIRAFGTFTHDLHDLAEWFTACGVTSVAMESTGIYWIPAYEILEQHGFEVILVNARYAKNVPGRKTDVSDAAWLRQLHSYGLLRGSFRPDAEIATLRAYLRQRERLVEYAAAHIQHMQKALMEMNLQLHHVVSDITGATGMRIIRTIVAGERDPDVLAELRDVRCHSSTETIRAALVGNHRDEHVFALTQSLELYDFYRAKMFDCDRRLEAVLDELAARKNHDARRLPRARTKTKQVNTPSFDVRAALYGVLGVDLTQIHGLGPSLALKLIGECGTDLRAWPSAKHFTSWLCLAPGNKISGGKVLSSRTRRSSSRAAALLRLAATTIGRTDTALGAFYRRLAARAGKAKAVTATARKIAVLFYNTLRHGMTYKDPGASHYEEKYRSRVLGNLQRRAKALGFILQEVPDQGELTVS

SEQ ID NO: 412513 - protein, 417 aa, unidentified
METLIERAAGLDVHQATVVACIVIEQSGARLKRETRTFDTVRRGLEELRDWLGASGITHVAMEGTGVYWMPVYAVLEDRFDVAVVNARHIKKVPGRKTDVSDAAWLADLLRKGMLRKSFVPPKEIRPIRDICRYRRMLVQSETSEKNRILKLLESVGIKLATFASDVFGKSGMAMLGAIAEGTSAAEAIAQLARGRLRAKLPQLQRALDTVVADHHRMMLRDQLSRLDRTAEDIARYDRLLADMVKPYTQDIDLLCTITGIQRTAATEIFAEVGPNLATFPDDAHFSSWAGMCPGHNESAGKKGRTRRRRGNPYLQSILVECALAATRKNGSYHKEKHHRLKARRGAMRALFATAHALARAVYRVLVRKEPYRDLGAGYLDAKNKPAVARRLIDRLIELGYDRQTIVEAFPNPRPAL

SEQ ID NO: 412514 - protein, 416 aa, unidentified
MQYAALVGIDWADTKHDICLIDLTTTAREASILRHSSKTIDEWATALRVRFGGQPVAVCLEQSRGPLIFALMKHDFLTLYPVNPTTLAKYREAFSPSRHKDDASDAAYLAELLRHHREHLRAWQPDSEQTRTLRYLVEHRRRLVDDRTRISNRLTALLKLYFPQVLEWFPDIRTDLVCDFLMRWPCLGALHRIRRETLLKFFRQHHSVRAQTLHKRADLIKASQPLVTDRAVLNSSIVMCKALVSQMKSTLIAIKEFDAEIEAICSVHQDFALFKSLPGAGNIYASRLVVALGSDRERWASADEVARFSGIAPVIERSGKSCRVRWRYFCPKFLRQSFHEYAGESVRHSFWARAYYEQQRAKGKSHQAAVRALAFKWIRIIYRCWQTRTVYDEVKYLEGLRRKGSSLLNYAANNPA

SEQ ID NO: 412515 - protein, 420 aa, unidentified
MSFKIFRKNCYGLDVHKTWIYACIGITDTNGRTDYKQTRFSSFSKGLKELSDWLAKYHCTEVCMESTGKYWIPVFNVLEKAYVSVILSHPKYTKPQKGNKTDRKDAKWICDLFMCDMVKPSFIPPADIRHLRDLVRYRFKLICMITGEKNRAQNCLTVSNLKLDDVFSDVFGKSSRSITEYILEHPGDLFDVTPFVDRRCKTPIEEIQAAVDGAISPEQAVKLRQCLNHIDELEKHLEEIEQEILRLSDKYQAALDLIRTVPGFDKNPMTAIQVLSEIGGDMSVFPSAKHLVSWAGCCPRNDQSNKKIKSTRISRAGSYFKPVLVQVANGLLRSKKHPEITDRYKRIKARRGHKKAIIAICRMLLTAIWHILSDLKPYTAEGFRESRPVNESKVLTTSQALNLLKQRGYIIKDDLTPAMN

SEQ ID NO: 412516 - protein, 408 aa, unidentified
MKTLHRRCAGLDVHSDSVVACVRLTVRTKASHEVRRFSTATPDLLELADWLAAQGVTHVAMEATGIYWKPIWHILEGRFELVLANAAHIRNVPGRKSDVNDAMWISDLLAHGLIRASFVPPAQIQDVRDLTRTRTQLAREVAQHIQRIQKTLENANIKLTSVISNIIGTSGRRILKAMIAGETNPAKLAELGSTRLKCPRAELTAALDGRVTAHHRFLIAHHLSLIGELERHIAAFDTRIEKLLRPLRDAVAQLITIPGVSKVSAQVILAEIGADMTPFPTSGHLLSWAGLVPRLDESAGKRRSTRVRKGAPWLKPVLVQCAWGAARTKGTYYQAQFFRLKARRGPKKAAIAVAASLLTAAYHMLKNGTFHQDLGADFLLKRDRARIVTKLASRIKDLGYDVSFTPAA

SEQ ID NO: 412517 - protein, 428 aa, unidentified
MNIEDTIRRKQFCQIKDEIAGCDDYLVVGIDVAKDKHHAFMGNTTGKTLSRKLVFENSLDGFRKLMEHSKAVKARGALSKVVFGLEPTGNYHKPLAAYLIRCGCHVVLVTGKAVKINREQLDGRWDKNDDKDAANIADLVSRGRCLYYDLPSPDLGQLRQVLSLRKRLKKEEHRLRMNIRNNLLAQYFPELDAYYSACESETLAIVSRCLDPHQIAGKHFDEFFTQVASKRRGIAQKLRLQKIHRAASQSVGCEMGPAVQVEAQLVVNKLGEVRRQLKEVEQWMEDIACGFAEYPYLLTIPGFGPYVAATVLAAIGNPQRFNSANQVLKLAGYDLSASRSGKNSHRAIAVISKKGNGQLRYALYQAARVASSRSADFINYFTGLLRGRERERGIKTKMRVKLAAKMLRIAWALMKKKQVFNPDYLFIK

SEQ ID NO: 412518 - protein, 396 aa, unidentified
MLKSVTSTGQIETAVGKLAERSVARFPTAAGDRSFNPRSKKTVEKLDRRRFHEISPNSRKSRRGAGRRASSHSQGRDIVMDVAFTSFVGIDIAKRTLDVHVLPERRSLPHSNDSKGRRQLREQLPPPGLCLIVVEATGGYERALVAELIDAGYHVAVVNPRQARDFAKACGHLAKTDRIDAAVLARFGEAVELRIQAKIPEKQLELQDLVARRRQLVELRAGEMNRKEKVTSKLVRKSLQETIDLLTKQIRRFEKQIAALVQSDDEWKQKTQIVQSVPGVGSQVSACLLADVPELGQLNRQQIAALVGIAPFNCDSGQFRGRRTIRGGRISVRCALYMAALTARRANPVIRAFADRLAALGKKPKVILTACMRKLLVILNTMVKNKTCWNPTISIT

SEQ ID NO: 412519 - protein, 410 aa, unidentified
MKRDKHIYIGLDLHKFQHTAVIVDCWFEKLGEMTFQNKPSIFPSLLEYVNRFLTEGLTPVFGLEDVGGYGRDLALFIIEQGYIVKFVNSSLSNSERNSYAMTQKNDSWDAQCVADVLIRKLPYLPDATPSDIHWIIAQLVGRRNALVKAQTALKNQLHMQLNYYYPSYKEFFSEVDGKTALAFWGNYPSPSHLDGETVEDLRTFLLEASNNACSTRKAEQIMSLVLADGEVKREYQTSRDFIIQSIVRDIRFKKQEIKKVDKELKVTIQTLGMQLETMPGIDTVTSSALIAEIGNIHRFANSDKLARYAGIAPIKMGSGGKETMKKTKQGNRKLYDIFYNLSVQQVQVSKGSKIPRNPVFYAYYNRKLSEGKSKSQALLCIMRRLVRIIYGMMKNKMAYIMPDQPETKAS

SEQ ID NO: 412520 - protein, 320 aa, unidentified
MDGKRAIGVDIGKRWLDVAREGVAEVERHPNDTAAIAALLGTFDAARDVVVFERCGGYERELEAALAAANVSWAVVHSVSVKAFRQVEGIKAKTDAIDAQLLRAFGRDRLDAGKLRLGRIEDVVLDTLMARHRQLKATLHAERCRRETAAIASVRASIERMIAQLEAELAVITCELAAHEAKDPQLALKERVMCERKGVAQATARALLAELPELGRLGCKQITALGGLAPRVHKSGRTERRRGLDPGRTSVKVILFNPARSAMRCDPEIKAFCSRMRARGKPGKVIMVAAMRKLLVRLNAAVRDALSREELRCPATAVAA

SEQ ID NO: 412521 - protein, 326 aa, unidentified
MTLSHSSDNRFIGIDVGGASLDVAWHRGDSAHYANRPDAIATLVERLRTGPPLTRIVLEPTGGYEKPLVKALRQAQLPVEIIHTTRFQAYRQLVGVKAKSDTSDARLLASYAAAPDEVRGRKADRVELPQDALREELRELASRRDQLKHMIHAESCRLGITRHATLRQSILAHLETLRSEDKQVLQMMHALVRQRLDLRRDQKLLQTVKGLGVVSALTLIAAVPELGHLDNKQAAALIGVAPFVHKSGTLTAPARIHGGRAAVRRILYMAAVTASRYNPVLKSFYERLIAKGKPAKLALVALMRRLVVFANAVLRSGQPWKGAIPT

SEQ ID NO: 412522 - protein, 344 aa, unidentified
MNKLNRIGIDLAKNVFQLHGTDRHGKVMWKRRLSRSKWIKALQEVATTDCKIGMEACGGSHHWARVLQSYGYTVKLIPPQFVKPYVKSNKNDANDAEAICEAMSRPHMRFVAVKTVEQQDIQALHRIRAGLMSDRTGLANRMRGLVAEYGVVAPQTLTALQRSIPDWLEEADNGLSDRFRSLLHDLWEDLKYLTQRIGELDKAIRLLADESAVTQRLQQLRGVGPLVATALIATVGSGQQYAKGKQMAAAIGLTPRQHSSGNKDRLLGISKRGDAYLRTILIHGARAVVSQAKHRDDRLSRWCTDIARRRHPNVAAVALANKTVRMAWAMMKDESDYNPEFVST

SEQ ID NO: 412523 - protein, 392 aa, unidentified
MIYVGIDVAKDKHDCCILGPDGEVLRDAFTFANNRKGFDELLAAIQKALQEKSRDEVRAGLESTGHYSTNLVAFLRGNGFEPVVLNPLSVNLFRKSQTLRKTKTDKADARFIAAMLLTSDASPHASVSYHIEELKVFTRSRSRLIEHRSKLRISLTRLLDVIFPELAALVWSTNQKSVYHLLLELPNPQAIAHCRIDRLTNILSAGSRGKYGREKTLTIRQAAADSIGSNSPAMAFELQQTIRLIQNIQIELDLLDSRIRAAVEAVESPLLTIPGIGYTLAGIILAEIGDIERFQTPAQLLAFAGMEPSTFQSGKFNASQTPMVKRGSTYLRWAVLQAARLVAMRDRTFHDYLLKKRQEGKHFNVALSHVGKKLVRVIFHMLQTNRAFVPQS

SEQ ID NO: 412524 - protein, 316 aa, unidentified
MTDNSMICAGIDVGKSHLDIALHPGRARLRVTYDAAGLKALDAFLQEHDVSRIGFEASGGYEWRLLAHLRAGKRPAARLQPAQLRFFAKSRLKRAKNDRLDAVLIALFTASLEQLPALPDARLDKLAAELTYLEQIEQQIALIKTFAETALSEAIKRRHAREVARLETCRKAHLLRLEKMVRDDCDLSQRLDLLTSIKGIGLRSALCLIIRLPELGHASRAEIAALAGVAPYDDDSGKYHGRRRIQGGRERLRKSLFMCAFTATRHNPDLASFYARLRQNGKDHLCAVIAVARKLIVLANTILSRKTEWTPQYQQK

SEQ ID NO: 412525 - protein, 340 aa, unidentified
MFANFVGIDVSKSKFDLALIKGQDKDHVIQGVFDNTQKGIKTMSKFLEKEHHVQLSETIFCMEFTGVYCRPLTSFFVEQDCHVWIEMPVNIIRSLGLQRGKNDRVDAQRIALYAYKNRDDIKLWKPQRDVILQLRDLLALRERLITSQKALTNPIEELIAMGAKSAASRVRKNCQKTLSSIEKEIDQIDKELDDTIKGDPHLKELFQLATSVPGVGKLTALFMICFTNEFSMYTNPKQLACYCGVAPFEHSSGSSVRGRTRVSHMANKVLKRMLHMGAMSVISRDPELRDYYQRKVAQGKNKMLVINAVRNKIIHRLCAVIKRGYGYQSEIIFKERLVLS

SEQ ID NO: 412526 - protein, 342 aa, unidentified
MQITTIGLDIAKNVFQVHGIDAKEKVVARKQLRRSRVITFFKALPPCLIGMEACATAHYWARELTKLGHEVRLMPAKDVKAYVKRNKNDAADAEAICEAVRRPTMRFVRIKSAEQQGQLMQHRTRDVLIRQRTQIINALRAHLAELGLVAAQGNAGVNELRAIVTDEQDTRLPIDARASVIVLAAQLEALESVIGAIEKRIKMQHRSSEASQRVETIPGIGVIGATAIVATVADPTIFRSGRDFAAWIGLVPRQDSTGGKQKLGPISKQGDRYLRRILVVGAIAVLRRAQENPGKYPWLTQLLARRPFKVVAVALANKMARMAWALLAHGGTYRAPELAETA

SEQ ID NO: 412527 - protein, 490 aa, unidentified
MFMTTLPVLNPKAGAVDVGSEQMHVSIAGDAPKVFGSTTAQLQALRDCLLEQGVSSVAMEATGVYWLCLYAVLEQAGLEVVMVNGRHVKNLPGRKTDMKDCQWQATLHAHGLLRGGFVPKEQIRRLQDYQRLRADHITMAATHQLHMQKALERMNIKFHDVISHLTGVSGLKVIRAILAGERDPAALLALCDPLIQKKKAARVRESLVGTWKEEHLFALRQALAGWEFYQGQIAECDRALEHVLKEIAPGDPGTPAAPGWGRRNGVNAPQIEGLSGLLCRLCDGKNPTAIPGITDYTLLQLVAETGTDLAQHWRTEKHFTAWLGVAPGSRQSGKRRGPKTFAQPCGANFLRDRPQRGPDGGQGAGGILSPPEKSAGWLGRQRGPGPQVGATLLARNGAWHPLRGRRIKEIPRPSRANRTALAAKARQKTRNDSPATNQNRLTVHGKKPKPIKSPAPAGRHIPSLLEFTLQRVRPPPNKLKLELQPAMPLL

SEQ ID NO: 412528 - protein, 347 aa, unidentified
MKFYTQQHPHYCGIDLHARTMYLCILNQAGAIVLHRNMKADSDSFLKAIAPFRDQIVVAVECIFSWYWLADLCAREGIAFVLGHALYMKAIHGGKAKNDKIDAQKIAVLLRGGMIPQAYVYPQDMRSTRDLLRRRMHLMHHRSQLLAHIQNTNSQYNLPEIGKKIAYKSNRAGVAERFADVSVQSSIRFDLRRIDFYDGLLNEVELEILRHAKLHDANTFRLLDTVPGVGKILALVLLYEIHDISRFPTVQDFVSYCRLVKPKKESAGKTYGFIGAKIGNAHLKWAFSEASVLFLRNNPEGQAYVARLEKKHSKGKALTILAHKLARAVYYMLRRNEAFDMKRFLNR

SEQ ID NO: 412529 - protein, 417 aa, unidentified
MRVNEKIERITPDTLICGIDVGKTKCCARFCDYRGLEVYHKVWFDKTENLDAIGCQITAAMYKENKTDVIIAFEPTGHYWLNIDKYFKDCGQETVLMPTYTVKQAKEMHDQNPTKSDPKDALLIARLTSEGKYVKPIERDELYQNIYSGYSIYEDIQKEINRIRNKIHVWNDKYFPEVEKLYKIDSVGIKPIYENQLLPNEIKNMTLENFIELMTKDNSRANKKSIMKLKELCEKSNGISSDAFTKKEIKRLYERFIELFKELEEYEKELIELASQIDYVEKAIEITGIGYMSMVGIIAETGDLNNYEHAKQVLKMSGLSLKESSSGQKKGKKHISKRGRSKLRRNLKQIGICLVGKNNFFLQLHNYYTTQREHPLTKLISINAIIRKFMYILMAIVKSGNSFDEEKAIRESCISFS

SEQ ID NO: 412530 - protein, 320 aa, unidentified
MMAQNDRVVVGIDVAKDKVDACIRALSLRQTFPSTAQGRRKLISWLRKHKVTVAVMEASGGYERDWAKALRGAGIEVRIVDPKRVRNFARSAGRLAKNDAIDAEMIGWFAETFGEAKGQAYDAAREKLVQIVHARQGLLELQTSLQNRGEHAAPEVVQKMQGRLLKKIARELAGLEAAIAAMIKATAHFAELAEIIESVPGLGGITAAGLIAAMPELGLVSDQAISALLGVAPYDDDSGKRRGERQIKGGRRKVRNLFYMACLGAATRHNPVLKAFYRRLLAKGKEKKVALVACMRKLIVILNTMIARGEKWDATRYALS

SEQ ID NO: 412531 - protein, 318 aa, unidentified
MANQIAVGIDISKKTMDVAIGHEQSTAIFSNDGAGHQALIEVLKSHQVSLIVMEATGQYQLACACALQAAGFAVVVINPRQARDFAKAMGRLVKTDSVDARMLAELAQVLNQRPDRDRFIKPMPDQAQQHLHALVLRRRQLVRLLVSERQRKHMAHAEVVQDIAELMEVLAKQLEMLDRRIAEHLVQYQSDLAALLKSVKGVGPATAATLISELPELGQLKAKQICALVGVAPMNRDSGQARGKRIICGGRATVRSALYMAAIVAMRFNAVIRQCYERLLAAGKPKKVAIVACMRKLLVIMNAMVKNGQPWNDQLAPA

SEQ ID NO: 412532 - protein, 374 aa, unidentified
MLSARPAGACRPPPDQQKELAITTIAHPERPRVTVGVDTHLDVHVAHAKDQLGRRMETVSIPTTPAGYQDLLAWARGLGEVEAWGVEGTGCYGAALTRFLGDQGQVVLEVNRPDRQARRRRGKSDPVDAEAAARAVQAGEVTTLPKAGTATVEMIRSLRVARQAAIKARTQAINALKALLVTAPAQLREQLRGRSAAMLVRQAAALEPGPLVTPTAAAKLALRCLACRYQALHAEVATLDAELDRLVAKAAPGLVARFGVGPDSAGALLVAAGDNPGRLRSDACFSMLCGSSPIEASSGKTRRHRLNRGGDRQANAALYRIVVVRLRWHQPTKDYMARRLTEGKTTKEIIRCLKRYVAREMFTVLNQTVPTPAT

SEQ ID NO: 412533 - protein, 400 aa, unidentified
MRVVFGIDVSKASSEVAILVNGEKVHGYTIPNDAIGFNRLLGDLRTVYQPEIVFEATGVYSRRLQAFFEDNSYTYTRLNPLESKKQLDSLRVRKTDKIDAEKLAMSQFILNRKPSYVQEALYQELRDLSRFYQNLTEDIVCSKNRLHKVLQVTFPELENILSSPTGKQYWNLVMAFPCNSFVLELDDATLRAIIRQSTSKRISEKRVTYLVDKLTKLANHSYCAVKKTSPMMEEVKYYAGELLRLSEHRQGVVEEMVTLAQSLPEYEILLSIPGIAETTATSIIGELGDIRRFHSANQINAFIGIDLRHYESGNFLAKEHITKRGNPYARKILFKCIHNIASASHTNPCHIADFYEKRKRQSQVTSTKPHTIASIHRLIRTMYYLITHNKLYDYTSIQNR

SEQ ID NO: 412534 - protein, 410 aa, unidentified
MQTMVERGCGLDVHQATVVACLLIVRKGGRVQKQMRTFGTTTRDLVNLREWLLSEGCTHLAMESTGVYWKPVYAILEGALEIVVANAQHVKKVPGRKTDVKDAEWLADLLCHGLLRSSFVPPKPIRELRDLTRYRRKLVESQAAERNRLLKLLETANIKLSSVATDVFGASGRLMLRALIEGKATPQEMAVLAKGKLRNKIPELELALEGNLQEHHRFLLELQLQRLEAAEKDLAMLEQRIQQKLEPYATQMQLLDEIPGVDWGVAAVVIAELGVDMSVFQTVSQLVSWAGICPGNNESAGKRKSSRITKGNVYLKTALVEAANAAARAKGTYLRDKFYHLKARRGYKRALVAVAHKMLVATYHMLSHNVSYNELGDLYLDKLNKHHLTRNLVHRLERLGFEVTLQLKAA

SEQ ID NO: 412535 - protein, 361 aa, unidentified
MKCVQSNELDFSGQNIYVGIDVHLKSWSVAILSEHSVLKRFSQSPEPEALHKYLVNNYLGANYYSVYEAGFCGFWIHEKLMDLGITNIVVNPADVPTMGKEKLRKTDAVDCNKLARELRSGSLEGIYVPKADVLEMRSLIRMRNLIVKDSTRAKNRIKSLLRFHGVEIPKEFTRCSIGCWSKRFLSWLQALELSTEYGKKTLELHLEQFIRLRKMLLQETRAIREISRKAPFDKPIRLLTSVPGIGVTTAATLMVEIDDIVRFCNAEHLASFIGLVPMCHSSGDNDSVGDITPRRHFMLRCLLVEAAWIAIRKDPAMTMAYTEYRKRMNPQKAIVKIARRLVNRVYYVLKHEKEYVPCVVK

SEQ ID NO: 412536 - protein, 435 aa, unidentified
MTTDHEFAVVASTTDVQKVFVAIELSKSTWVVAIQPPAVDKVSLFRIAGGEIERLFELFEQARRRAGQPIEICACYEAGYDGFWIYRALTARGVACTVLDSASIQVSRRARRVKTDRTDAESLVRVLMAIYRGEHQVAKIVQVPSPKEEDDKRLLRCRGNLLRDRIQHMNRIRGLLNLQGVRHIDPNRSNWENELANLRTGDGRSFPRQLMNEVRREGKLLGTVVRMLKEVEAEIAGMIRDERKRRHPAQRGQNHPIARRLAEIHGVGPQTAGILATEVFYRGFKNRREVASYVGLTPTPYNSGTMVRDQGISKAGNRRARAVAVELAWIWLRNQPESKLSRWFRTRVGDSAGRVRRIAIVALARKLIVALWHFLEAGVIPEGAKTNARNCPKLRDRCTGEGQQHIGMKLDVAGPMLGFDAVRKIGPFLCVKIRP

SEQ ID NO: 412537 - protein, 340 aa, unidentified
MTIATIGIDLAKNVFAVHGVDHNSKTVLVKSRVTRAALPELIAGLPPCVIGMEACSGAHYWARLFRQYGHEPRLMAAKFVSPYRMAGKSGKNDAADAQAICEAVRRPHMRFVPVKDESQQAMQCLHRTRQGFIEEKTAIYNRLRGLISEFGVIAPQSTDALRRIVSEQKSYLPFQVQQCVDDLLEHIDRIEDKVSEYDRTLSCMAKMDHRSQRLMELKGMGPTTACALVASIGNAHDFKNGRQLAAWLGLTPSQYSSGGKSKLGRITKAGDSYLRTLLVQGARSVLIGADKRTDSFSRWVCSLVERRGYWRAVVAIAAKNARLCWASLHYGDDFRLYSAS

SEQ ID NO: 412538 - protein, 362 aa, unidentified
MSKISKEAGRKKTTKDKPEMPMGIDVGDRFSHVCLVDNEGEVVERDCVRSTEAAFRRYFEGTARLRIALECGTHSPWMSRLLKQLGHQVIVANARKIPTITESESKNDDRDAEQLALMAAFNPKLLSPLEHRSLARQQDLNLIQARAILVKARTMIVNALRGLVKSAGGRLPVCSAQSLPARAPAAVPPALAAVAGPLIEQIARLNMQIDAMDEQIEKLAVKYPEIGTLRSAPGVGPLVAAAYVLTLDRPDAVPSSRSAGAFLGLRPGQSQSGDSDPQKRITRTGNTYLRCLLVQSAQYVLGRFGPDSALRRWGLKLAASGAKRAKKRAIVAVARKLAVILHSMWRSGQRFEFFPQSAQAQA

SEQ ID NO: 412539 - protein, 375 aa, unidentified
MNCVIVNTELSSLEETRRQFNGGPGDIKSAEGRIGPVCALGIDVHQEFYVVVMQEGSSNPKAPQRFAKEAFLHWAAKLVRSGAQVYAVYEACGFGFSLQRRLSALGIECYVVCPQKLDEQNKRVKTDSLDAQRLCLRLDRFLQGNRAALALVRVPTEEEEQARAIHRQREQLVKVRKVLEAQGRSLVVNHAIEPVQQWWKQRAFAALSVPDWIRVLLQNTQPIVLSLQSQIDQLTLQLQNAATAEPPRGLGKMTSVIIDREIGNWHRFNNRRQIASYTGLCPSEYSSGQKRLQRCVTKHGNPRLRAALVELAWRMIRFQPHYRAVRKWNERLRKGQLTTGAARKKAIVAVARQLAVDLWRIRTGRLTADQLGLTI

SEQ ID NO: 412540 - protein, 388 aa, unidentified
METGPMPTTSVAKSSRSKSKAQRESSRRPEPGVWSTLGVAKPTRNRQKETPVEQVQHYVGIDLHRKRSVIVRRNDAGETLETVRIDNDPVALATELAKAGEHPEVILEATYGWYWAADVIEACGGNVHLAHPLGNNWGNRRVKNDERDATDLVDLLRMGRLAEGWVAPPPVRELRELIRYRGKLVHLRSNAKAQVHAVLAKEGVAVPMTDLFGVGGQRLLDEVELGKAYRIRVESLRDLIEIYDREIAMLGKETAPFFAGDLGYHAVQAIPGVGPVLASVFVAEIGDVSRFASARHLASWAGLTPNHHESDEKVRRGHITKQGSRLVRWAAVEAVAYQRGDTVIRRHHRRVGERRGNQIGRVAAARKLLTLVYYGLRDGEIRCLAEAG

SEQ ID NO: 412541 - protein, 359 aa, unidentified
MQTQRKELNFEGQSIFVGIDVHLSSWSVSVFTEKLHHKTFNQPPKAEVLSNYLKCNFPNASYLSAYEAVFCGLWVHYKLKELGIQNIVVNPADIPTTQKEKMRKSDAIDSNKLGRSLRNKELKEIYIPRPETLEDRSLVRVRSTIVKDMVRLKQRIKSMLYFYGIEYPDEFQKSNTHWSKKFLNWLKEIQLQYSTGTAALSLLISEAELQRNLLLEATKKLRILSKTEPYIKNMELITSVPGIGVVTGMLYLTEIEDISRFESTDKLAALVGIVPNCHSSGTTDKNGKITPRGHSFMRNALIESSWVAARIDPALSLAYYDYCKRMEPNKAIIRIGRKLLNRIYSVLKYQKIYEKGIIK

SEQ ID NO: 412542 - protein, 501 aa, unidentified
MNINHFPQEKLATFHAMNQSAIGIDVHSNLIVGVYQSSRFNSTRASIDGDTWNGDSTKKGLEDFAKWCKERKPEVLLMESTGVYWQSLYESLENEGFNNKDIVVVNARDVKNRRGNKTDLSDAIHLAEIARNGDYRASFVPKKEVRQLRCLWRSYHTLKNTRKRLLNVLHKQLCQVGCRASSVFSDIRGKIATQVIELLIGDKSGDELKEAIASVIKRSRGRLKATPDMVYEALRTDMDSKVWYSIRQHLEHIKFIDKQLEAAFANLTIQSAPYEKTIQLLQTIPGIKYLTALGIVCELGDDLSAFKSVRKFSKWIGHAPGNNESAGKRYSGRTTPGNKYLKILLVECAAGIGLMKKGFLHEIHQRFKERIGTKRANVALAHKLCRIIYSILKNRTPYQERYKPILKEHRLGKAIKAVDGLRNVGLSCDDIEVTDTETGNSTIIYGANKYRRKLMKNKWYTEGKQSEMCFSHLLNSIRPVSAGNRLRLTLNLLRYLCYLTY

SEQ ID NO: 412543 - protein, 326 aa, unidentified
MTAVAIDGAGRMLDEKTIAVGSDELIAWAAGLAGKRLWALEDCRQLTRWLERQVLGCGEELVRVPPKLLAPKRRAGRARGKSDAIDALAGARAALREPELGRPRPGEQVFRALKLLVDHRDDLVDERRRTQQRLRWHLHQLDPTFAVPLRMLGRPSQLERGSRWLARQEQELQVRLARELVTRCRSLTRAIVELDRELEQRTAATAPALLELPGCAAVTAAKLLAEIGPIDRFKSDAQLARHGGVAPLEASSGRVHRHRLDRGGNRQLNAALYRVAITQARYHPAAHAYLERKQAEGKSRREAIRCLKRLLVRVVFNTLKASPALT

SEQ ID NO: 412544 - protein, 353 aa, unidentified
MNIIGCDYHPRFQMIAHLEKATGELTVRRLEHENGEAKRFYASLPKGARVGIEATGSTQWFERLMAECGHELWVGDPAEIRARRVRKQKTDERDALHLLELLWTNRFPRVWVPSPEERDGRQLLQHRSKLVGMRTAVKNQLHGLAMGQGLCRKQKLWSERGRKQLEGLELGPWASRRREELLRLLDELDPQIEALDEAVEAEAARRPEVVRLMQLKGVGPVTGLAFVLTLGPVERFRRSRQVVSYLGLDPQEDTTGGHQRFGHITKQGNTLLRWLLVEAAVTAQRFDPSWHRQYVRLSMTKHHGVAKVAIAHKLAVRLYWMLRSGQDYEQIKERGSHARQSECPVGRSKGPIE

SEQ ID NO: 412545 - protein, 344 aa, unidentified
MHITSIGIDLGKTTFHLVALGERNKILLRRKFSRSQLLACTANLPSSLIGLEACSGSHFLGTALREQGHQVRLIPAQFVKPYRKSNKNDFIDAEAIAEAVTKQNMRFVPIKTQEQLDWQAMHRVRDRLVQRRTALINQIRGFLLERGLTFAARPIHLRKNLPAVIEDAEQKLSSRLRWLLDRLWQEWQQLESNIQAMSDELEHISREDARCRQLRQIPGFGPLVSTATVAAIGNGAAFRRGRDFAAWVGVVPRQYSTGGKQKLFGISKRGNIYLRRMLIHGARAVLVRVKRDTGGFGQWVHQLAQRAPRNKVIVAIANKLARIAWAVLSSGKDYRHQPLQQAAA

SEQ ID NO: 412546 - protein, 380 aa, unidentified
MEYCTTIGADVSDRTTKICVMTKAEGGERRIVVETTCATTKAGFEEALSKFDRSWPVVFETGTHCRWMDRLFKEMGFKTIVGNPGKIPSITKSNTKNDRNDARELARLAIADPAMLHPVFLRDEVYQQMLRFHHARNVLLSQRTQTINQIRGFAKSMGYRIECSSTEKFHELSKADWPRELEECAWPLMGVLKTVNLKIKAYDRLIERLAERPEFKPMVERVRVVYGVGVIGSTVFVAAIGGRPDRFDHTRDIGAYLGMIPKQDQSGDDDKQLHITHAGADIVRTALVECAGVAMMSNAKDTDLKLKGLRIAMRGGRIARKKAKVAVARGLAVTMLALLQHPEREYVPLSEDGKKGFERYRAELEYLTMQKASRKEKKVA

SEQ ID NO: 412547 - protein, 415 aa, unidentified
MNSFCGIDWAEGHHDIAIVDGEGKLVAKKRISDDSAGFTVLTEMLAAAGDSFDDAIPIAIETPRGLLVAALRATGRPVFAINPLAVARYRERHTVAGAKSDHADAMTLANILRVDSHLHRRMPADSELVQAIAVLARAQQDAVWRRSKASNELRSMLREYYPAFLDTFAGKSATNLAKPEARAVLAIAPTPAHAAKLIKTRVAAALRRAGRKRGIDGLAVNILEHLQAPQLRQPELVEKAMGRQALALLAMLDAACTGADELAQTAAEEFRKHPDYAVITSFPGLADLTGARVLAEIGDDRDRFADDRALKAYAGSAPITRASGKVTSITHRRIKNDRLAAVGWVWATYAYINPGPAQDHYRRRRDHGDRHAAALRHLFNKMLGQLHHCLQTRQTFDPIKAFGQPRTAPREPAAA

SEQ ID NO: 412548 - protein, 369 aa, unidentified
MADRITYVGLDVHKESIVVAVASGGLRGEVREYGRIANTATALDRLLRKLGDAGMALRFCYEAGPCGYGIQRHVSARGHECVVVAPSLIPKRAGDRVKTDRRDAASLVKLHRAGELTAVWVPDPQHEAMRDLVRARLDAVHSLRRARQQLSGFLLRQGCHYGRPAWTKLHRRWLAGLIFDQAIHHIVLEDYIAAVEAAEARRDRLTAQIETMLPDWTLAPVVAALQTMRGMAMVNAATLIAELGDLSRFADPRQLMAYLGLTPSEYSSGSSVRRGGITKAGNGAARRLLIEAAWSYRFPARLSRELLLRQESQPKPIRDIAWKGQVRLCARYRRLARTAKPANVVTTAIARELTGFVWAIARQVTVTPG

SEQ ID NO: 412549 - protein, 401 aa, unidentified
MPELWAGTDAGKAEHHCVVIGTDGKRKLSRRVANDETVLLKLIADVLALSEGEPVTWAIDLNSGGAALMIALLTDNGQDVLYIPGRTVHHASGSYRGDGKTDAKDAFVIADQARMRRDLQTMHRGDDIAVDLRILTSRRLDLAADRTRAINRMRAQMLQYFPALERAFDYKTSKASLVLLTGYQTPAALRRTGKSRLAAWLKNRKVRNSQLVAATAVEAAEAQHTAVAGEKLAAAVVAKLAREVMALDEEIAETDALIEGRFRDHPHAEVILSMPGLGPVLGAEFIAHTGGDMSVFGSSDRLAGVAGLAPVPKDSGRISGNMRRPRRYCRRLLRVFYMSAMVAARCCPASKAFYERKMAEGKGHRQAVIALARRRLNVLWALIRDGRTFEITAPPSPVALG

SEQ ID NO: 412550 - protein, 326 aa, unidentified
MTAPKLGIDISKKTFDVALIRDPETMKVKQRQFSNTPDGFRALQTWLAKQGVGRVHAVMEATGAYGLDLAECLHGAGHLVSIVNPAQIKAFGQSELQRNKTDRADAALIARFGWRHNPAPWTPPEPEQQELQSLVRHLDDLIEQRTQVSNRLSDARLTKLVRESWEEILQALNERIAEVKRQINQHFDDHPTLKRQRELLDSIPGIGPETAARLLAEMPQLGEFDSARAAAAHTGLTPKRHESGTSIKAPARISKIGNPRVRYALYMPAMAALRSSKEFKELAARLTERGKKKMQVIAAAMHKLVRIAYGVLKSQRPYDPSYATAT

SEQ ID NO: 412551 - protein, 482 aa, unidentified
MKKNNIYQNQSQQLLSLFEQAGNNAKVMCVPIDYAKKDHVVMFCNGYGDILRKPFSVKNSPQGVDYLTDQVVRSCRQRGISQNHVFFGGEQVGSFADNFVSTLRSQGWLVAGVNAHEAKIQRENLQASTDRLDLLGIAKSLLNRRANCSPAQSGIYLDMRTLVRHRRKLVEITTEVKNRIHAVVDRLFPGFLNESKSGITPFSKSSLWLMKERFSAGQIRRRRRTSLIEALRQRGTKKPEDTADRLQQYASQVLNAPQDHVHILQLSLAQHVKHFCCLQEGIGQLETEIALNLAQTQGAFLTSVRGIGIVLAAGVSAEIGNPFEQKPINNLVSYSGIIPRVKQTGGPQGKTKTGKVARRCNRIVKDYVVRSASHLGLYGPADLKSDYQRRQANEQHADFGMGRRYLRMAMCLMRTSQTYLPSQLRKAQTQIQDRADYYVMSWPQLRDKWQKSGALETAFSADQPLGQWRKIVQHFYGIKLTL

SEQ ID NO: 412552 - protein, 407 aa, unidentified
MYCLSFDIAKRKSVVGLFNGQLEPLIVPYEIHHVKEEFVALASKLDISQTEIILESTSMYHYPVVSFFENLGFVVIILNPIISREHKRNLRKTKTDFIDCVNLAAIYFEKKFNLQKKHLPIYHQLQSISRHIFTLNESMVRYKNRYHQLLELIFPLYEYTLNNEVKFKSDHMALLKAFPHPELLIHQRVDRLATALASMHKRIDRRFLKTVQRIKDLAKMTLYSVSQNDVVVDEFVELSNLILGLDDKITQHQNHLIDLAQTRPDFHKIVSIFGISPYMAALLVAELKDLSSYKTIKQLTAACGLDPTIIQSGKSIDYHGHISKRGNKHARKALFNIVFAIIRISSKVNPQNPILVYYRKKRSENKHHYASVIACTTKLLRIIFTLCKNDLTYLSQYNQNHLVTPIV

SEQ ID NO: 412553 - protein, 412 aa, unidentified
MNPVIGLDVSKGESQVQAFLDKRKPYPKSFSIEHNLEGLGKLLIFLKQIEKEANGHQPSVILESTGHYHIPVMQFLDEHNYVYILINPLISHRAKGSSLRKVKTDVVDAYHLCELYYKEDLEPFKKRGIQLMNLRNLTRLRETVAGTAAKTKIQFHTIVDQVFPEYVGVFGSLYSKVSLLTLLSFPTSKAVLSTSEQELAKKINSLCKNRSDRWALEQAQKLRRAALRNPFQRNIYDSQIIQLEILANTVLQYQEHLSRLEAEIDALAKDIEEYEIIQSISGIGEKIAATIISEIGEIDRFNHPKKLVAFAGVDPSVFSSGKFTATKNRITKRGSNRLRLALFMAVKCGIRDARKKKTTDEIIPRNKKLRAFYDKKRDEGKPYRVAIIACVNKLLHWIYALLKSKTTFQDIA

SEQ ID NO: 412554 - protein, 418 aa, unidentified
MDDFSVIFPVCCGIDVHKSFVVACIAATDDRGITTYSAKRRFSTFTRDLRLLSEWLAQNNCKDVCLESTGKYWHPVFNILEQTCNVVLAHPKYVKSVYGKKTDKRDAKRIASLFKYGIVEPSFIPPHNVRQLRDLMRYRVKLTNFSTGEKNRAQNCLTVSNIKLDDVFSDVFGKSASAITEQLLLNPDGNFNVSIFIDGRCRASVDKVQAAVDGVMCSEQLEKLKIIRLHMNSVEECKAKLESVILSLSEQFQAQVELVLTVPGIQLFSAIAIISEIGIDMSVFPSAKHLCSWAGLVPQNNESGGKKKTTRISHAGGFLKPLLVQCALAVCKSKKYPEIRNRYLALKKRRGHKKAIIAICRMLLTAIYHILKKSEAYNPNLYRKAVSVPADRALTMKQVISFAKRRGFVIIDPDGVIA

SEQ ID NO: 412555 - protein, 419 aa, unidentified
MQTQKKFAATIGLDWADTHHDLWLQPAGGGQPEHLILEQQPEALHLWIAQIRARFKNQAVAIALETSRGPVLCALLAYDFITVFPVNPKALSSYRDSFRVSGAKDDRSDALLLEQYLRHYMDQLKPLCPDNVPTRQLAGLVEKRRSLVDLRTQLVNQLHAELKMYYPLAPTLLDKLTTPLAAAFLKKWPTLEALQKAGANKVRAFFYGHNCRSAKKLQARLDALASAVALTTDPALIVPASLTVQTLAGLLEVLHDSIATLEQEIERAMDAHPDAPIFRSFPGAGPALAPRLLAAFGTQRDRFQSAQEVQQLYGIAPVTRASGQSELVHMRYRCPKFGKQSFHENAGQAYKKEPWARAYYDQQRKSKKHHAAVRALAFKLMRIYFVCWRDRKTYDPNTYVNSLEKRGSTLVKTVTKTRC

SEQ ID NO: 412556 - protein, 369 aa, unidentified
MPVVRGERAARFTFGTPSPRGSIWRAFATVLWKPEQLIDFNSHLQGWETENMPELIHVGIDVSKDALEVACGPESPTQCFTNDDAGHEALVNVLHVHRVDLIVVEATGGYEAPCACALQAAGLAVAVVNARQARDFAKAMGYLAKTDRIDAQVLAALAAVLANRADRQKLIKALPSDEQQRLHALVLRRRQLVQMLVAERNRLPMSHQAARVSIEALIKAIRKQIVDIEADLSSHIAHHHADLAGLLRSAKGIGPHTSMALIADLPELGKLSNREISALVGLAPFNRDSGKMRGKRMIFGGRTQVRCALYMATIVAMRHNRVIQRFYQRLLAAGKPKKVAIVACMRKLLTILNAMVRTGKQWDETFHFA

SEQ ID NO: 412557 - protein, 348 aa, unidentified
MGVDLGDQWSNYCILGLAGETLAEGQFRTRRQETSEFFQDLATSRVVVEVGTHSAWAREVIAGLGHEVLVANPRLMEGSKRRRRKNDRIDANKLARLGRTDPKSLHPIQHRSAEVREDLLVLRARDALVASRTELINTVRALVKTMGARLSSCSSEAFAKKAELDIPNELRETLQPLLRLIATLNDEIKSYDQRIGQLASEKYMHTQLLRQVTGVGPITALAYVLTLETPLRFARSRDVGPYLGLVPKQEDSGDSQPQLGISKAGDRMLRKLLVGSAQYILGPFGPDTDLRRFGMRLCERGGKNAKKRAAVAVARKLAVLLHRLWASGEVYEPLGHGAVTKPAQAVAA

SEQ ID NO: 412558 - protein, 465 aa, unidentified
MGAGKMNRKQRKELGRRLQSANPGLEVVHPRAAGIDVGNGAHYVAVRPEQDAEPVRRFECFTADLHRMADWLEACEVKTVAMQSTGVYWIPLYEILEQRGFEVYLVNARHTKNLPGRKSDVQESQWLLKLHTHGLLNNSFQPTAEIRVVRTYWRQRGEHVRSASTCIQRMQKVLTQMNVQLANVISDLSGLTGQAIVRAILAGERDPRKLAELSHPRIRAGREQIAKSLEGNWRSELLFVLKQEMEMYDTYQHKIAECDRELEATLKQFAAPERASTEQPKIPNAKKTKRIQRNAPGFNLTGELHRITGVDLSRIDGVNAIVAQTIISEVGLDMTRWKTEAHFASWLGLCPDNRISGDKVLARGTRHVINRAATALRMAATTLIKSQSYLGAQYRRLRSKLGAPKAITAMAHRLARLVFRMLKYGQEYVDKGTQYYEQKHREQQLHLLKKKAATLGFQLVETGVA

SEQ ID NO: 412559 - protein, 296 aa, unidentified
MENISQWVGIDISKATLDVYLRPLSKAMKVANTKEDISKLVETLKSYTVNLIVLEATGGLETELVIQLQEADLPVALINPRQGRDFAKATGKLAKTDAIDAQILAHFGEAMQPQILAVESEESRQLGDLISRRQQLVEMRTAEKNRRERARGKALADIEAHLEYLDNCLEKLNQEIEELTQANQQWLEKVNLLKTVPGIGQVISTTLVSDLPELGQFSRLVGVAPINHDSSQHKGKRMIQGGRAQIRATLYMGAVVAMRHNPVIKTFYERLVGRGKSKKLALTACVRKILYQFSKV

SEQ ID NO: 412560 - protein, 489 aa, unidentified
MSTARKQQGKKKDPMLNARAPQRKVRGSHCQQGKGNQRGSELTITNPDAAGIDVGSQVHYVAVPEGRAQESVRSFGAYTAQLDELVQWLKDCRIKTVAMESTGVYWIPLYQKLEEAGFEVLLVDARQAKHVPGRKSDVQDCQWLEQLHRYGLLRAAFRPEDSVCRLRTLQRHRKDLVESAAMWIQHMQKALNEMNLHLHHVLSDISGLSGLAILDAILAGQRDPRKLASLAHYRVQKSQAQIAAALTGDYRPELLFVLRQSLQNYRQIQQQITQCDLSIEKQLAKMTDRQNPNQASEPTPPSPDLGGGKPRKRKSPVILEISLAGHLKRILGVDLTTIPGLDVLAILTLVSEIGTNMTKWRNEKAFVSWLGLSPNNKISGQRVLSSRTRKVVNRAATILRLAAMIVGKTNTPLGSFYRRKRAQLGGPKAVTATARKLGCLIYRLVKNGQGYHEPDLHTYELKYKDQILNSLRKRANTFGFDLVELPKAA

SEQ ID NO: 412561 - protein, 310 aa, unidentified
MDAIVIGIDVSKDALDVHVLPAAQAFAVARNGAGIEELAARLAALAPAVVAIEATGGFETIVAAGLAGAGLPVVVVNPAQIRAYAKAIKQRAKTDPIDAAVIAKFARATRPEVRPLPDEATRQLADLVARRRQIVEMMAAEGQRGRRVDHKRVARSIARVKKTLEAELAELDQEIGDQVRGSPLWREKEDLLVSVPGVGPVVARTLLAELPELGRLERREIAALAGLAPFTRQSGRWRGRSFIGGGRATVRTVLFLAAMTAARHNPTLKAFRDRLVAAGKPNMVALIATARKLLTILNAIIRDNRPWQNA

SEQ ID NO: 412562 - protein, 427 aa, unidentified
MNETESNKVDEFRQFKSQIRGCREYLIVGLDIAKRKHHGFLGDANGKTILKGLIVENNAEGFGHLLSQVRFYMQRDGFSRVVFGLEPTSVYHKPLAEHLISQGHLVVYATNEAIKKNRSLIDGRWDKNDTKDSANVADLVAQGKCHYYDLPDQRLRDLRSLLLLRKRLKKQVHSCRVRIRNNLVAQYFPELDLFWNNAEAENLAIVRGYLDPARIRQLTCEQFIARVSTHNGGLRQRRRLRHIWEAAGNSIGCLPGAAMQLEADLLVTSLKSIQEQLDHVGKAIQELAEGFEEYDYLKSIPGFGPYVSAVTLAAIGNPHRFENRAQLIRLAGFDLCASRSGEKSNTAVPVISKKGKADLRYALYQAALVASSLTSHFRSHYTRLLEGRQREKGIRTKMLVKIAAKMLVIAWTLMKRKEPFNPAHIQA

SEQ ID NO: 412563 - protein, 412 aa, unidentified
MQDILTCAMGLDVHRDVIVACLAKGELGTDPEIEIRSFSTLIPEMRKLRDWVIETGCHHIAMESTGIYWQPIYETLEPCFDGQINILVVNARHMKNVPGRKTDMRDAQWIATLLRAGLLKGSFIPDKTFRELRHLTRYRKSIVHDITAQKNRIDKFLQSSGFRFTAFLSDAFGASGRNIIRHLMEYGDISREALNKCLKTQTRKRIDEILVALNGSLSEHQRSFLRIIFEHLESLERHRHTVEDAISEEIVKHEAALNLLCSIPGIDVTAAASIIAEIGTDMSAFPDSQHICSWAGLSPGNNESAGKRKSTHIKKGNPYLKSMLCEVGWVIAGKRTLYLSGWYWRIKQRKGAKRATIALARKLLALIYTMLKTGTPYNEECFEIRRKQSERKRASRMVNELQKLGYFVVVPD

SEQ ID NO: 412564 - protein, 363 aa, unidentified
MNATAALPVVAVDVAKSVFQLAIADHTWRLVEQHRLSRTQFERWFINRAVGLVVMEACGSAHHWARWLSGLGVEVRLLPAAYIRAYVKRNKTDAADARALLEAARCAEITPVKIKSIEQQALQGVHRTRSLWMATRTSRINALRGFCREFGIVIAQGSRLGVEQIGRVLADPRSCVPPLIRGTMTLLVEEIRLLEVRIAQLERELTTLARQSPACTTLLSIPGVGLLTATAMVAATSGEVSHFRDARHFASWFGLTPKEHSSGSTRHLGRISKRGDRYLRMLLTHGARSVLRAASVAVRAGKTVDRLRQWALGVQHRSNHNKAACALANKLARICYATLRNHEPYSAARLNKKIARTAFALPA

SEQ ID NO: 412565 - protein, 304 aa, unidentified
MTAIGCDISKAWIDVQVLEPDSRFRLSNSIKAIDRFISTFPAGTPVGMEATGSLHELLADRLAGAGHSVYVLNPRWVRQYARSVGARGKSDRGDAMVIARFVAAEAPRLHAYVSPSPEQRELRRLLLRRAEMVKLRMATRQSLGALGRTVVVQFSQLIGKIDRDIAALLATNDQWKALAHRLRSIPGIGPATTAHLVQVFTRIPFAAVKSFIAHTGMDPRPNDSGQKRGRRRLTHHGDGALRSMLFMAAMAACKTRHWRVLYEAQRAKGLPSTAAFIVVARKLATIAFSLFKSGQTYRAELMAS

SEQ ID NO: 412566 - protein, 388 aa, unidentified
MIQVDDLSRSLIAFEQISTLVIVFELSQSSWLAAGVVPGIERRPLKKLDPDPTALLHLVEGWRDRATKAGRAITRTVLAFESGRDGFWLARWLRVHGVETFVMHSTSVAVSREPRRAKTDRLDTEMLIRVFLGWLRGEPRHCKMVAIPTLEEEDARRPSRERESLVGERTRIINRMKAALVRLGIRGFKPGLLTAPQKLDALRTPEETPIPPNMLDEMRRDMARLAWVREQINAIEQARLERLERAPATGRHAMVRMLARVIGVGVETADMLVQEALSRNLRDRRAVARYAGLTGSPDESGSKRREQGLSKAGNARVRRGLIQLAWRFLRFQKESALAQWYRGRTEDAAGKRKRTMIVALARKLLIALWRLATIGEIPVGVALRPAVA

SEQ ID NO: 412567 - protein, 338 aa, unidentified
MDRQYVGIDFHRRRSVIVRVSASGERLGLHRIVNEPFELAEVIALCGEAPQVVIEATYGWYWAVDLLQELGAVVHLANPRALNWGDRRVKNDVNDATDLADMLRLNRLAEAWIAPPTIRELRELVRYRAKLVQLRSGLKAQVHAVMAKEGVLPAVTDIFGPAGTRQLDQLELGAPFARRIGSLRQLIVAYDAEVTALEREIHEHLRHHAGYRAVQAINGIGPISAAVLVAEIGDVTRFPTPAHLCSWVGLTPRHRESDLKTRRGRISKQGSRLVRATLIEGISRYHGGPHLDAQYHKLAKRRGRNKARVALARKVLTLVYYGLRDDEIRCLAPVETAA

SEQ ID NO: 412568 - protein, 356 aa, unidentified
MTNTKLTRSYVGEDVYIGIDVHKKTYAVVARVNQTLVKKWTTVANPEALARQVVNYFDGARIHSAYEAGFSGFVLHRVLVEVGIDSRVVHAAAVEIAAYQRVKTDKRDADKLSKQLEAGRLRGIRIPSEAQEQRRLLSRTRAQLVHERAAVTQKIRMKAHQFGWIAPEDRREMSAQMVKELLARSPSEAFGLTVTAHWRIWQALDQEIQRLERHLKHQAQTDALDEVYRSAPGVGAISARVLANEFGDMSDFANERQLFSYSGLTPSEQSSGEHVHRGHITKQGNRHLRGILIEVAWRALDQDATLQSYFARLSPRMGANRAIVAVARKLIGKIRAALRKGERYQLNYPNAGLAAA

SEQ ID NO: 412569 - protein, 402 aa, unidentified
MNAVGIDVSKGKSMVAIMRSFGEIVSAPFEIKHTASDIHSLVELINSVEGESRIVMEHTGRYYEVLAHQLSKANLFVSAINPKLIKDFDNDSLRKVKSDKADAVKIARYALDKWQNLKQYSVMDELRNQLKTMNRQFGFYMKHKTAMKNNLIGILDQTYPGVNTYFDSPARSDGSQKWIDFASTYWHVDCVRKMSLNAFISHYQSWCKRKKYNFSQSKAEEIYGKAKELVPVLPKDGITKLIIKQAVDQLNSASTTIESLRTLMNETASQLPEYPVVMAMKGVGTSLGPQLMAEIGDVSRFTHKGAITAFAGVDPGVNESGSYEQKSVPTSKRGSSDLRKTLFQVMDVLIKTHPQDDPVYQFIDKKRAQGKPYYVYMTAGANKFLRIYYGRVKEYLSSLPES

SEQ ID NO: 412570 - protein, 349 aa, unidentified
MSKDKPKGTVAVLGIDLAKQSFQLHGIDANSEVILKKKLTRKKLSEFIAQLPKCLIGIEACNGSNHWRRVFERFGHVVRIIAPQFVKPYVKSNKNDAADAEAICEAVQRPSMRFVPAKSIEQQDIQSLHRIRSQAVARRTAQSNQIRGLLTEYGIIIPRGICYVRKQLPAILEDADNELSFLFRELLIELYDEMVHLDRRIKSLEIKLEALCNHNEDCQRLLTIPGIGLLSATALVAAIGDIGVFKSGRELAAWLGLVPKQHSTGGKPTLLGISKRGDTYLRTLLIHGGRTVVRVAKKHQDRRNGWVCKLEERRGRNRAAVAVANKNARTAWVLLSQKTTYKTFELVSA

SEQ ID NO: 412571 - protein, 385 aa, unidentified
MKTVESPVKSASRHVGFARFPVNGMVRRGTLEVVECGARRHLMKIHALGIDLGKTVFHLVGLDASGQVVVRKRCSRTQLPAFTANLQVGLIGMEACSGTHFLGRALRAQGHEVRLIPAQYVKPYVKTNKSDYIDAEAIAEAVQRPRMRFVPIKTEEQLDLQALHRVHERWVMRRTAVVNQIRSLLLERGLTLPKGRSHLDQQLPRILEDAQLNLSDSFRVLLAQLKLELEQLAERIEEMDRVIQKTARENEACQRLTEIPGVGPVTATALIGAVGNASAFGKGRNLSAWMGIVPGECSTGGKQKLLGISKRGNKYLRRLFVQGARSVLQQRHKQALGLREWLAQLLARTHQNVVVVALANKMVRMAWAVLCKNERYRAPVFAGTT

SEQ ID NO: 412572 - protein, 359 aa, unidentified
MKAQVKQIDFTGQNIYAGFDAHLKNWKVTVMAEDIVYKTFTQPPDPETLYNYLKNNFPGGTYHSAYEAGFCGYWIHDKLTSFGIKSMVVNPADIPTTDKERVQKEDKRDSRKIAKSLSSGTLTPIYIPSIKTQRDRSLLRTRAMLVKDMARYKNRIKSFLLFYGISISDPFSNPQSHWSNRFIKWLESIDIDGGSGKEALLILISECKNLRASILKVTKQIRELSQTATYQEQFTLLKSIPGIGLITAMTILTELETIDRFNNLDKMCGYIGLIPSTKSSGEKDRTGDITSRGHGVLRSAIIESSWTAIKYDPALMKSYIIYCKRMDSNKAIVKIAKKLLSRIRFVLANKKPYECLIEK

SEQ ID NO: 412573 - protein, 400 aa, unidentified
MNAVGIDVSKGKSTVAIMRPFGEVIAEPFEVSHTDTELRKLACFLEKLPGETRIVMEYTGSYWQPIAKVLHDAGFFVSAVNALLIYKYGNNSIRKGKTDKLDAVKIANYCLDRWTDLERYSPTDQIRQTLKTCRRQYDQYIRLKVNLKNNLIALLDGTFPGINTLLKSAPRDTDGHEKWVDFAGKFWHRQCVCGNSEKSFANQYRKWCAKAGYRFNAEKAVAIYSHAGSQVDTLPMSSAIQSLITHAVAQLNMIIETISAIQHEMLTLASQLPEYPIVMRMFGVGPVLGPQLMAEIGDVRRFHCKQSLVAFAGVDAPPYQSGTFESKNRHISKRGSPRLRKTLFQVMSTIIQHAPADDPVYQFLDRKRREGKHYYVYMTAAANKFLRIYYGTVMAYFEKP

SEQ ID NO: 412574 - protein, 362 aa, unidentified
MTNTMPRCGLDVHANQTHAATLELATGELRRRRVQGPPERALDYLESLGPGLLAVYEAGPTGFGLARAAEARGIELRVAAPGLIPRGPSDRVKTDARDAERLARLLAAGELSFVSVPTVEGERFRDLVRCREDLRGDLMRARHRLSKLLLRRGIRYPGPGKNWTRAHRDWLGRLDFEDEASRVTFADYLAAVEALGQRRSTLDAAIERCWPESPHAQTIARLRAFRGIDTLTAAGLAAEVGEFGRFRKPALLAGHLGITPSERTSDEKRRQGAITKAGSTHARRLLVEAAHHYAKRPAVGATLARRQQGLDPRVVAVAWRAQQRLHGRWVNLRDRRRKPAGKVAVAVARELSAFCWEAATLA

SEQ ID NO: 412575 - protein, 401 aa, unidentified
MTKHTLYVGLDTDKRHIDVAVAEPLPGGEVRYWGQISNDPTALDRVIRRLQKGGRELEVCYEAGPCGFGIYRRLNHKTGVRCQVVAPSLTPRRPGSRVKTNRRDSLTLVKLLRAEELTAAWVPDMKHEAMRDLTRARSATMQDLTRCRQRITGFLLRQEIVYVGKPWTKKHRIWLGRLEFAAPAHRLMFDELLSAFDATRARCDRLLADLVELLPNWSLCWLVTALQALRGYQLINAVTLVAEIGDPRRFENPRELMAYVGMVPSEHSTGDSVRRGGITKTGNRRARKALIEASWTYARRAKSLSRAQGQPEEVRVIAEKALHRLSGRYRRLMAQGKLAQVAVTAIARESLGFIWAIAHAAGAVKEAASGATVARPSSLGGRSWPSGKPSQGGPLAPAAGG

SEQ ID NO: 412576 - protein, 362 aa, unidentified
MKKGIKRASQMEAKHNINAAMTVGLDLGDRFSRYCLVNALGEVVEEGRIQSSLEAMRRHFEGELRLRVALECGTHSPWVSRLLSELGHQVVVANARKIAMITASTSKNDRNDAEQLARLAAYDPRLLSPLRHRSQQRQQDLNLIQVRATLVRARTMLINALRGLVKSAGSRLPSCSTESLAVRAPAHIPSALAAAGRPLLEQIVALNGQIAGLDREIEKLREKYPEIGVLRTVPGVGPVVAAAYVLTLDRCDQASNRAAGAWLGLRPRQKQSGDSDPQMRISKEGDRYLRSLLVQSAQYILGRFGPDSALRRWGMKLAQSGGKRGKKRALVAVARKLAVLLHSMWRSGKRFEPFPQPAAAAA

SEQ ID NO: 412577 - protein, 458 aa, unidentified
MDVLYSHVAGIDVHKKQVTVTARTPDPRRPIRWEKTRTFRTFYADLLVMGSWLVELGVTRVAMESTGPYWWPVYAALREVGGPGLAIDVVNAAHVKAVPGRKTDVKDSQWLAQLLEVGLLRGSFLPPDDIREIRDLTRYQTKLTEERSREKQRLLKVLEAAGIKLDVVASDTFGVSGRAMLDALTAGERDPQVLAGLARGVLRNKSDDLRLALSGRFTAHHGQMIGFHLARLDHLDQMISQVREKIGHPGSPGTGRRAGAGPSGLVAPFTEQIRLLTSIPGIGDRAATVIISEIGVDMSRFPSAKHLAAWAGLAPGNNESAGRRRRARHRKGNTHVQSILIEAALAASRTRTRLGARFHRLHRRFGGRANKTAGKKAAFAVAHTLIKVIWTVLSTGRLYTDLGHDYYTRSVDPQSHTRRLIAQLEALSGKKIILVDHDDRGGPDDGSPPDGLSRETAA

SEQ ID NO: 412578 - protein, 336 aa, unidentified
MVVGVDTHKDSHSAAAVDGQGRVRATLEVAASGSGYRSLLRWAARLPGSRCWAVEGTGSYGAGLASYLAAQGELVLEGDRPKRRARGAAGKSDQLDAIRVALEALSREHHAQPRSRGQREAIRVLLLARQGAVSGYKQGLNQLYALVVTAPEPLRERLIRLHGERLVSACSRLRPQGDLETSVTATTLHAVARRLGELRAEAAAYERQLAGLVASTAPDLLAEPGVGTLVGAQLLVFWSHAGRIRNEDAFAALAGVAPVPASSGRVVRHRLNRQGDRQLNRALHVVALTRSTCHRPTQAYIARRRGEGKSSREIRRCLKRYLSRRFFRLLQRLDKT

SEQ ID NO: 412579 - protein, 376 aa, unidentified
MNYVGVDVHKKYSVLCALDERGRKLREARVEGNASCGFAQFFRSLDGPSKAVVEACWNWGLIHDELERLDQVEEVMLAHPAKTRLIADAQIKTDRLDAHALGTLLRGNLVARAHVPRRETRARKNLLRQRLYWARLRTMLRNRIHALLDRQRGLELPQCSDIFGQRGLFFLRQLQLPEPDGTLLREQLALHDLIAQQMKAQEKRIAAEFKSEVIHRQLLSVPGIGTTLAAVIACEIDQIERFSTSEKLCAYAGVVPSTHASGGKVAHGRLLPFCNKWLRWALIEASWVAIGCSPYFGALYRQHRARGKKANTAITIVARRMCRILWQLLSEKRDFEKRPFSHRIRTFPRLLRSKTDGEIGRKALTRVLGQNGEPGI

SEQ ID NO: 412580 - protein, 334 aa, unidentified
MQNITLIGIDLGKHSFHIHCQDKSGKALLRKKFTRTKLMQFLATCPPSVVVMEACAGAHFMARRISDFGHETKLISPQFVRPFVKSNKNDFVDAEAICEAASRPSMRFVQPRTETQQAMRALHRVRESLIRDKVKTTNQIHGFLLEFGISLPIGDAVIRRLSLVLAEHEIPEYLSRLLVRLHTHYLYLVEQIAELESELSQSINADDTAQRIMTIPGVGPITASLLSSQLGDGKQFSCSRDFAASTGLVPRQYSTGGKSTLLGISKRGDKNLRRLLVQCARSFMMQLERQHGKLAEWVREQLNKKHSNVVACALANKLARIAWAITTQQKEYQA

SEQ ID NO: 412581 - protein, 364 aa, unidentified
MITIGIDPHKRTHTAVAVSGVGELLDELTIQADDAGHRELLAWAQNLDVGESRRFALEDCRGVNGRLERFLLEVGEYVLRVPPKLMANARKGGREVGKSDAIDALAVARAALREESKLHPAITDARARELKILVDHREALVHDRQLHSLRLRWHLHDMDLDLEPAGRTLERPAVRRSLAQRLAHREQTVQVRICRDLLARIGELTRRERELAAEIGALAKSYAPGLFEVPGIARLTAGKLIGEIGGIERFRTDSQLARHAGCAPIPASSGNTQRLRFDRHGNRKLNATFYLVALTQIRVHPRGARLPGQEARGGQDDQRSAPLPQAPPGAGCLAGDAAASGVGCFSRTFLIDIPASPSSLRGVP

SEQ ID NO: 412582 - protein, 221 aa, unidentified
MKEVSIIGLDLAKNVFKLHGARSDGSVAFRRKLSRAKLLSFLAATPRCLVAMEACASAHHWAQQIFALGHDVRLIAPIYVKPFVKRNKNDAADAEAIADAASRPTMRFVAVKPVEKQAAGFAFKTRDLLVRQRTQAINAVRGHMAEYGVVAPNGPPPESFAKGRDFAAWLGLTPKQNSSGGKTRLGGTSKMGQRDLRRLLVSGAITQVRWAGARRGRGWRE

SEQ ID NO: 412583 - protein, 355 aa, unidentified
MNATTVAVDLAKNVFALAVADGNWKIVECAHLTRAQFERWFDNRKVYLVVMEACGSAHYWARTLRARGIEVRLLPAQYVRAYVKRNKTDAADARALLEAARASDIKPVAVKSIEQQALQALHRARSGWMSTRTGRINTLRGFCREFGLVVPEGASTGLACMARYLADEHSGLPELLRPSMRLMIEEIRLLEARIGQLEQALSQLVKHSPACQVLQSVPGIGLLTSTAMVAAVSDPKSFDSGRRYASFFGLTPREFSSGNSRYLGRISKRGDRYIRMLLTHGARSVLRAATVARRTGRPLDRLRTWALEVQQRTNHNKAACALANKLARIAWAVWVKQENYRATRVPSPSTEAFSV

SEQ ID NO: 412584 - protein, 365 aa, unidentified
MQSVFYVGMDVHKDSVRLAVLKGTEKAPVYEATLKNDIPRIEKAIKRFSAQGTVIAGYEAGCMGYTLQRSLGASGIECRVIPANRVPRLGSERIKTDARDAVLIARMLKNNEAESIYVPSAEDEAARDLIRCREDLKAELHRAKQQLSKFLLRLGFIYDSELRPWTKAHRAWMQSLELGQALTTETYKQYYSHVTELEERIGRIEALIVEVAQSAAYSERIAKLRCFKGIDYLTALAFTCEIGDFRRFPSAASFMAYLGLVPSEYSSGTKRRQGGITKTGNSHLRKLLIEASWQYRYRCAPSAALKARRAGMDELVVSYADKALRRLQTKFAKLVLRGKSSKTAIAATAREFAGFIWGAMNEAYC

SEQ ID NO: 412585 - protein, 416 aa, unidentified
MNAVGIDVSSRKSTVAVLRPLGEVVCLPFDVTHDIAGLASLVEKLKALDGETRVVMEHTGRYYEAVAKALHEAGLFVCAVNPLLIKEYGANSLRRVKTDKADAVKIARYALDNWADLRDFTPMDAIRYDLKTLNRQFQLASKQRTASANNLIALLEQSFPGIRKCFDSPVRSDGTQKWVDFAHSFWHVDCVRKQPFPAFCERYRKWCKRHAYLFKLSNAEEVYALAKRAVVLTPKSKVVKVLVQEAANQLSSISRSVEVYRAEMDRLAAMLPEYPVVMAMYGVGKSYGPQLMAEIGDVRRFERKQALVAFAGIDPMPNQSGDKNVRSNKSSKRGSPYLRKTLFNVIRTYLQCAPQDEPVFQFLNRKRAEGKPFYVYMLAAANKFLRRYYAKLRDYFASLDTLQSVDPIPATLKASL

SEQ ID NO: 412586 - protein, 392 aa, unidentified
MSQQHCHFDASRSLTALEQDSTIIAVIEMSQSKWLVAALVPGVERQPLKKLDAQEEELLKLLHRWRNEAGQAGREIKRIVVAYEAGRDGFWLARWLQARDVEVYVIHPTSIAVSREHRRPKTDRLDTELLTRAFLGWLRGEKRHCSMVAIPSIEEEDARRPNRERQNLVTEQTRIVNQMKAIFARLGIRTFRPTLRKAEEKLKGLRTAERTPLPENTRAELRRHLARLHVVREQIRAVEQERLRKLAAAPAAENGSHAMVRLIARVLGIGVETADMLVNEVLSRHWRDRKAVARYAGLTGSPDESGRRRRERGLARAGNARVRCGMIQFAWRFLRFQKDSALAQWFAARTADRRGSTRKTMIVALARKLLIALWRLATTGEASDGIVLRPAS

SEQ ID NO: 412587 - protein, 343 aa, unidentified
MTRFVGLDVSQKMTAICIIDNAGRRLWRGQCSSVPEQICDVVLQHAGANVRIGIETGAMTPWLVHELRNLGFEVVCLDARHARAALKMQINKTDQNDAEGLAQIVRTGWYRSVHVKSLDSHRARALLGARTQLVGMTTGLSNHIRGILKTFGLLPGSMRGLPFDRKVEALLLDRSDVALIVRPMLVAWRQLREQIAAFDKAIRVLVRSNCACRLLMSVPGIGVLSALVYVSTVEDPARFIRSRSVGAHLGLTPRQYQSGEIDRSGRISKCGDTLARTLMYEAAGVVLTRLKRASSLKDWAQAIAKRSGNGKARVALARKLSVILHSIWRSGQRFRWPEQANPA

SEQ ID NO: 412588 - protein, 343 aa, unidentified
MEESQGLVVGVDTHKDTHSAALVNELGGVVASTDVGANQRGYIQLLEWARQRSSHRTWVVEGTGSYGAGLASFLAGCGEVVYEGDRPQRRKRGASGKSDQLDAIKVAREALAREHHALPRQRGKREAIRVLLSTREGAVSASRQALNQLYALAVTAPEPIHERLIRLRGDSLVDACLRLRCTAQDIEASVTIRVLRQLARRISTLRAEAADYAAELAELVAVAAPALLAEPGVGTITAAQLLVSWSHAGRIRDENAFAALAGVAPVAASSGRVVRHRLNRQGDRRLNRALHIVAVCRSSFHPPTKNYIARRTAEGKSSREIRRCLKRYLARRFFRLLQGLDNP

SEQ ID NO: 412589 - protein, 429 aa, unidentified
MQNESTPGARGPVFCGVDTHADSHWLCVLDWRGRKVLSRRFPADAAGYEALAGAIAAAGEPACVAMEGTSSYGAGLTRHLASLGMPVREALSPARMQRRRPGQGKCDESDAERAARAAMSGSKLGTPKSQDGWVDGVRCMLAARSGAVKARTSAINTARSLLTTAPEGLRSRFRGMAGPRLMEELPSVRAEGALGAALGALADLWAAARDAALDMERAIEASLEENCPALLAMYGCGPVSAAKLAVAAGDNPGRLRSEASFAAICGACPIPASSGKTVRHRLNRGGDRQANSALHEIARQRVMRDPETAEYAERARARGKSDREVMRCLKRYVAREAYRALMRPHEVRRPEDASGLVAARRAARVSQVRAASILGTSEKYISMLERGQRELKPIRRAYEAWVEAGLPLDWDRQAFEAERKMDSKKHLAK

SEQ ID NO: 412590 - protein, 407 aa, unidentified
MGAISGWRFFRKHGVKLCVGNGELLPCAGQGRLNLKALVPVRAIRKLGPQFLVPRKHQEVRMSAFTIGVDIAKRVFQVHAIDHETGEVTSKKLTRGEFLAHFKKLPPSHIGMESCGSAHHWARELGALGHGVRMMNPMYVKPYVKRGKNDAVDAEAICEALTRPTMRFVPVKTIEQQSVLVVHRTRALLIRQRTMLVNALRGHLSEFGIVAPLGIERIPELIDRVLGREGDEFGITPLVRSIVVMYAEQIENIKEQIRKLERELRIWHRTSEASRRVASVPGVGTITATALVAAMPDPSAFQSGRAFAAWLGLTPKSSSSGGKERNGRITKAGDRHLRVLLVLGATSVLRRVRAGQPTPLYGWVKKLLDRKPPRLATVALANKMARIAWAVMARNVNYQPELAAAVG

SEQ ID NO: 412591 - protein, 328 aa, unidentified
MAMTAVRRAVVKTTATVIAVTGKTAGAVTAAALSAALRAELAGVAVESTFNWYWLVDGLQAAGYPMRLVNTTAVQQYAGLKYTDDRYDAYWLAHLMRLGLLPTGYIYPKEQRGIRDLLRRRMQLVQTASKQLISLQSQIWRRTGEKISSPRLKRPDFVVDLPGAAERLSAETTLKVYRAIQDELELLESVLLQVVKPRPDYQVLTSMTGVGVILGMTIALETGDIRRFPEVGNYASYCRCVKSEKLSNGKKKGEGNAKSGNKYLSWAFSEAAHFAVRYEPLARRFFERKQRKTNGIVAIRALAHKLARAAYYMLRDQVPFDAEKLFAN

SEQ ID NO: 412592 - protein, 401 aa, unidentified
MPQLWAGIDAGKTHHHCVVIDDEGTRLFSQRVANDETDLLELIGSVAALGGGGEVVWAVDLNHGGAALLIALLAAHDQHLLYIPGRTVHHVSRTYRGDGKTDAKDAAVIADQARMRRDLQPVRGGDDISIDLRILTARRTDKACDCTRPINRLRAQLLEYFPALEQAFDYSKSKAELLLLTRYNTPDGLRRLGQKRLHTWLRGQGARSSADVAEKAIAAAKSQHTTVPAQRIGAPVVAELAQEVLDLRNQIQALDKRITERFREHHHAGIMLSMPGFGPVLGAEFIGATGGDLAVFENADRLAGVAGLAPAPKDSGRIRGNHHRPRRYDRRLLRACYMAAMSSLRSSTASRTYYDRKRTEGKTHVQALLSLARRRLNVLWAMLRDGTTYGPRPAVPAHMAA

SEQ ID NO: 412593 - protein, 366 aa, unidentified
MKKNSTVAVGRKQILKQARLTIGLDLGDRTSYYCILDAAGNVIWERSVPTTLNGIRQGFGRMPRCRIALETGTHSPWVSRQLSEMGHEVIVAHAWKVRLIGQSSRKDDQLDARTLARLARIDPGLLSPVKHRSAQAQIQLTVIRARAALVSTRTALVNAARGLTKSYGQRLKKCGTEQMNRDSSEGLSQELREALDPLLREIESLNERIAEYNRRIEKIAKEVHPEVARLKQVQGVGTLIALTYVLTLDDPHRFRRSRDVGCFLGLRPGRRNSGQSEPQLHISKEGDRYLRTLMVQGAHYILGPFGQDSDLRRWGLKLAERGGKNAKKRAVVAVARKLAVLLHKLWVSGEAYEPLRNNHKGARAVA

SEQ ID NO: 412594 - protein, 278 aa, unidentified
MNTHPASTQGIVYIGVDVCAQWLDIHGLPCKRLANNKAGHAKLISHLPASAHVVLEASGGYEHALWLALLNANKAVSRVNPGRVRHFAKATMKLAKTDQIDAGVLSSFGEKLHPKTDRLPSQWEQELADLVSRREQLVAARAVQKTQLHQLSHAQLCKQAMSLIKIMTQQIRDLEKLIVTLLKSPEAQAKAQRLQQMQGIAAVSAATLLAELPELGSLSDAQVSSLAGLAPHPYDSGPMRGQRHIQGGRRKVRRVLYMASLRGVRLNPILKTFFQRLV

SEQ ID NO: 412595 - protein, 360 aa, unidentified
MTGTMTWAAMDVHARSTCAASLDVLTGELTRQRFDTGAVEPVVGWLAGLPGPVRCCYEAGPTGFGLYRAAVAAGIDCQVIAPSKTPRPSGDRNKSDRRDTDLLLRQLMAGALTPIAVPSVTFEAARDLARAREQVRLDVMRCRHRLSKLLLRHGRVWDRTAWTKAHREWLAAQRFDQVNTELAFIDNLAACDGLSARRAALDERLSWVATDPEFWPIVRRLRAFRGIDTLSALIIVLEVAGFERFPRAVQLGSWLGLVPSRQQSGEHDVHGSITKTGSKYARRILVEAAWHYARPPRTGRTLYQRQEGLPDHIVQIALRAQRRLHRIHKRMRERNKPGNVITVACARELACFLRAAATAP

SEQ ID NO: 412596 - protein, 338 aa, unidentified
MTIYAGLDVSDKTTHICVVDAEGAVLKRDVVASDPDLMAKWLSRHCSGLARVVLETGPLSTFLYHGLVERDVPVECICARHAKGVLSARVNKSDVHDAEGLAQLARTGWFKRVHMKASATHIDRAALRIRAQLITARTAMVNQLRGLLKLFGLRMGTARTAGRRSERLAALYSQRPDLQPLFAPLIASMETIEEQLRASTRLLENRAAAEPTCARLMTVPGVGPITALTYTAAIEDPHRFARGEDVGAYAGLVPRRSQSGERDISGHISKAGDPMLRKMLYEAANVVLTQVKRPFALQQWGRKIAEAKGAKRARTAVARKLAALLHSLWLNETEFRWV

SEQ ID NO: 412597 - protein, 457 aa, unidentified
MNKNSKKNVLDNPKVKKVTQFDVIRHNVAGVDVSDNSGMMVAYAVNETEVVIEEFECFTRDLRRLSQTLKLHGIVSVAMESAGIYWIPLFLLLQEDGFEVYLVNSRHVKNVTGRKKDEDDAEWIQKLHRCGLLSASFQPDNQTRALRSVVRHRATLVQTRSAYLNRLQKALGLMNLKIHTVLSDIDGVSGLRIIDAIIAGERDAEALADLCDGRVKASREEIVKSLEGFWSDEHLFELSQCYELYKFHNKMIRECELKIEKILQETIKSRHGGVIPEVAKLERKNRYKNDISIDLVNYLYILTRADIASVDGITGISGVTALTLFAEIGLNLHRFKNAKHFASWLGLSPNNKISGGKIISSRVMKKKHHAGQAFRMAAVSLQGNKGPLGDYYRKIRASAGSPKAVVALARKLAIIYFNMMTNQTKYNPQTLIDYQKKHNERKIKNLESKLKRLKATA

SEQ ID NO: 412598 - protein, 352 aa, unidentified
MIIIGVDFHPEFQQIASVDTDTGEVQEKRLAHREEAEKFYRALAGQKVRVGMEASGHGRWFERLVAELQFELWIGDAADIRTRRVRKQKTDRQDAQLILRSLLEDRFPKIWVPSWENRDLRQLLWHRHRMVQARTRIMNQLQAVALNEGLRCKKRLWRIHGREQLESFRLAPWASRRRHDLLELMDRLNPTIAELSQAIEQEVEKCPEARRLMTHPGVGPLTALAFVLIIGEADRFQCGKQVASYLGLVPLEDSSGNRRRLGHITKQGSSMLRFLLVEAAQVTVRSLPEWRSKYLHLMMRRGRKIAKVAMARKLAVRLYWLMRQGWDYQQWSKFGSHAGQPGNRHGVQSNTE

SEQ ID NO: 412599 - protein, 405 aa, unidentified
MQVLYGRCCGIDVHKKMLAVCLKTGKKQELREYVTHTKELRELANWLIENECEKVAMESTGNYWKPVYNVLELMGLDIMVVNAQHMKAVPGLKTDMNDAQWIADLLQHGLLKGSFIPDRDQRELRDVTRYRKSLVEERAREINRLEKTLEGCNIKLSSIVSHLTGLSSRNLIGAVIAGSVTEERIDELSYGKVKEKKAELLLALDGVLSPVQKRLITAILDHIDDMSRRIGDVDDIISGEMKKYEDAIKSVDEIPGIGRQSAEVILAEIGIDMSRFPTAAHLASWAGVCPGNYESAGKRKSGRTNKGNPTLKTTLVQCAKAAVKKKDTFFRSQYERISIRRGANRASMAVAHSILIAIYHMLKFNQPFHDLGRDYYHQFNPKKKINNDLKKLSDLGWKPPVSVAG

SEQ ID NO: 412600 - protein, 338 aa, unidentified
MNAVGIDVSKGKSMVAIMRPFGEIVASPFEVKHTASDIKSLVKLINSIEGESRIVMEHTGRYYQVLAHQLSQTNLFVSAINPKLIKDFDNDSLRKVKSDKADAVKIARYALDKWQNLKQYSVMDELRNQLKTMNRQFGFYMKHKTAMKNSHSKAEEIYGKAKELVPVLPKDEVTKLIIKQAIDQLNSASVTVEELRSLMNETASKLPEYPIVMQMKGVGPSLGPQLMAEIGDATRFTHKGALTAFAGVDPGVNESGSYEQKSVPTSKRGSADLRKTLFQIMDVLIKTMPQDDPVYQFLDKKRAQGKAYYVYMTAGANKFLRIYYGRVKEYLSLLSESE

SEQ ID NO: 412601 - protein, 391 aa, unidentified
MSMYFIGIDISKYKHDCCIISAVDQQIVSKFTITNDKDGFEQLLISLNSLSNPEDIKIGFESTAHYALNLELFLENANHSFMEVNPVLIKEYKKSTTLRRTKTDSVDCESIARWLMTVEYKPHSKGFYHAYSLKSLTRLRDRLIRQRSFYLVKITNVLDHTFPEFKPFFNERLSKTAIYLLENYGSAEKMAHMNSASYDKLRCISRGKFSIQQFLHLKELAANTVGVNNSIFDIELNSLLTLYNSLCKEIKNLEAEITRLIEEVHPHYMSIPGIGPISAAVIYAEYGDISNFSNPSQMLAFAGIEPGINDSGTESHGGRMVKHGSSQLRYVLLNACLPLIRFDLTFATYYAKKRAEGKKHRVAITHVAKKLIRVIYALERQDVDFNAQKIR

SEQ ID NO: 412602 - protein, 371 aa, unidentified
MKKQTKTTPSVVPTPTPAGVAASGFTIGLDLGDRSHYVCVLDAAGQILHEGPLPNDRVALTLLLTQYPAATVALEAGTHSPWISRHLTGLGATVIVANPRKLHAISRHERKCDRRDAVMLARLARADVALLHPLQHGTAQAQHDLLGLKLRDALVRTRVGLINTVRFTLKSLGYPVANPSSESFHKHIVSEVPADCLPVVQPLLAVLALITTQIKTLERDLVARSKKAYPVTQRLQQIAGVGPLTALCFVLKIGEPTRFGRSRDVGPYLGLCPGRDQSGGTDKQLRISKCGDGLLRRLLVSAAHYILGPFGPACALRAYGQHLIGTSTREKKRAVVAVARKLAVLLLSLWKHGTDYEPRVPAPAPLVLVAA

SEQ ID NO: 412603 - protein, 338 aa, unidentified
MNITTLAIDLAKRVFQLHGIDSEGKTILKKRLGRSELVEFIANLPPCMIGMEACGTAHYWGRKFQSLGHEVRLINPAFVKPYVKSNKNDYNDAEAICEAMTRPTMRFVPVKSVEQQDMQCLHRIREQLVGNRTALVNQIRGLLSEFGIIFPKEIQNIRKQLPFIFDECQNELSDFTKQLFRELYEDFLYLDKRIKACNSKIVMLFKADKRCQKIGEIPGVGVITATALVSAIGDPAMFKNGRALSAWIGLVPKQASSGGKNILLGISKRGDRYLRKLLIHGARSVVLRAANKDDPRSQWITELKNRRGMNKTIVAVANKNSRIVWAVLAKDQDYRHAA

SEQ ID NO: 412604 - protein, 364 aa, unidentified
MAARRQARTHAGFPTLVLLNKASSLHPHIPPMIASSPLLILPRLGIDISKLTFDVHLCMLDGRTHSAKFANNQEGFAQLDAWLAQHRATKTCAGLEATGPYGVLLLWHLHTGGHTVHQLNPRRVKDYARSQGRRVKTDATDAAVIAAYLKASEDLQPWQPASKALQGLQDLVRRRAQVITSLDAERNRKEKDTCKVVSASLDRLIKHLKAEVAELDKAIEAHVLKHTALQKSVRLLRSIDGVGLKVAVTILAEVPQISAFERARDVAAFAGLTPSLSQSGTSVKRRGRMTKEGSALLRKMLYMAALQAVKRTNNAFHECYQSFVQRGKPKMCALGAIMHKIIRVAFGVLKHDTPFVKNFAKVEA

SEQ ID NO: 412605 - protein, 365 aa, unidentified
MATMRMAREGAVHVTVGVDTHKDAHVARAKDQLGRRLGEKIIPTTPRGYRALLAWAKSHGEVATFGVEGTGSYGAGLARYLRSEGHVVIEVIRPNRQARRRHGKSDPADADAAASAVLAGDATGQPKAADATVEMIRALRVARQTAIKARTQAGNAMKALVVTAPDDLRECLRELSTIALVRTCARLRPGKLVDPTTATKVALRSLALRHEALDTEAKVLEAQLTRLTAGVAPELLAVFGLGTDSAGALLVAAGDNPRRLRSEAAFAMLCGASPVEASSGKVARHRLNRGGDREANCALYHIVMVRLRWHQPTKDYMARRTTEGKSKREIIRCLKRYVAREIYAVLRSMQLSDVAIAGQAQGEVA

SEQ ID NO: 412606 - protein, 400 aa, unidentified
MLSIGIDVSKGKSTVCGMKPGGEIVYTPFEVQHTREGMSELVSLLRSSGEEVRAVLESTGSYHCPVVAALLENGIFVSVVNSLRMKRFCSQSIRKVKTDRIDAMQIALYGLAYWQELQPTKLPEDTYRELQLLARQYYQMTSLLIKAKVDFNAICDQVLPGMQELMNDHAGRHKLSDFVLRYRHTTHILEMGETRFRKDYCKWAEKKGYRNCERMAVLIFATAQNGIPVLPNAPSTQIVITEAIRVLHTVEASRDAILTQMQALAKTLPEYSLVREMPCIGDTLAPRLIAEIGDVRRFHSKRALIAYAGIDAPPYQSGKFCANNRHISKRGNRYLRKTGYEVMQSYVMHKPANDPIFTFIEKKRGEGKSGKLAMVAGLNKFLRIYYGKVTELYRSLPAIE

SEQ ID NO: 412607 - protein, 321 aa, unidentified
MTSIHDQPAQTFASLDIGKDVFHIVGFDTSGKVVLRKKFKRLALEAEVAKLPPSVVGLEACLSAHFVSRTLRRLGHSPRIIPAIYVKPFAKGQKNDYNDAEAIAEAALRPNLRVVQEKTQDQLDLQALHRVRARLVSRRTATINQIRAFLIEHGIAVRTGANALRRSLFAILEKRADELSPRMRDLIVGLYEDWLWLDERIETLTGDIEQISLQEANCKQLMSVPGIGPMISTAMVAAIGTGEAFERGRDFGAWLGLVPRQYSTGGKPILGRISKRGSSYLRTLFIQAAHVILMRPQNWERFSFGPWLKAAQPRPSQHISP

SEQ ID NO: 412608 - protein, 374 aa, unidentified
METIYIGVDFHARQQTICYLKTETGELVTCELQHQDKAAVRAFYEQFPRPVIVGLEASGYSPWFERLLEELGCEVWLGHATEIRRRARWRQKNDRRDAELILDLMLHDEFPRLHRPAVQSREVLRMLRYRQKLIKMRTMSKNSLQALALQAGLAKGSGLFSKDGQQQLGTAEMSPVLQWQREHWLQLLQPLNQQVLEAMVWLKAQSKGDVAVARLRTHPGIGLLTSLCLAHTLPPLDRFRNTRKVAAYAGFDPVERSSAEHKRFLGISKAGSRLLRHLMVEAAHVAVRKDEDLKCFYQRLADRRGRPKAKVAAARKLLIRAYIMLRDEIDYAEFRRRAVAARLARLGHGPKVPEVVIGQPASTERQEQLTRARK

SEQ ID NO: 412609 - protein, 429 aa, unidentified
MNLRPIAGIDVGKFFSEMAILSPSNEVVARMRIHHDSSADVKRAVELLRKMEKDFASRPFVVMESTGHYHKILFHSLCKAGFEVSVTNPIQTDSIKNIGIRKVKNDKVDARKIALLCRFQELKSTNIPNEDIECLRSLCRQYYKLNDELTVYKNRLTGIIDQVMLSFRDVFPNAFSKAAIAVLEKYPTPEHILKANKGDLVSLIRENSHKSLEWSTAKYGLLVSKAREFAPLSINNHSNVAMMGVYISMIKTLDGNLAKILKAIRQLITEDMAKDTPMLSLTLELLQSIPGIGLLTAATILAEVGDFSAFSKPGKLVAYFGVDPSVMQSGEFIGTRNRMSKRGSKLLRRVLFTVALANIRTKRDKKPCNPVLMEFYKRKCQSKPKKVALGAVMRKLVCIIFAVLRDRKPYELRSPQEHAQMLAAKRIAA

SEQ ID NO: 412610 - protein, 405 aa, unidentified
MVDIMVSDFMKGRYNLMKIFVGIDIAKLNHFAAAISSDGEILIEPFKFTNDADGFQLLVSKLESFDKNSIIIGLESTAHYGDNLVRYLVAEFYQVCVLNPIKTCQMRKNNVRKTKTDKVDTFVIAKTLMMQDDLRFITFFDLDMMDLKALERFRQKTIKQRTRLKIQLTTYVDQVFPEIQYFFKSGLHQNAVYALLKEAPSPKEIASMHMTHLANLLKVNSHGHFTKEQAKELRVLAQKSVGANDSAISIQITQTIQQIELLDSQLDKIEAEMTDIMKFNDSVIMTIPGIGYINGGMILGEIGDIHRFSNPNKLLASAGLDPSVYQSGNFQAKTTRMSKRGSRVLRYALVNAAWNVVRNNATFKAYYDAKRAEGRSHYNALGHCAGKLVRVIWKMLTDEVEFNLE

SEQ ID NO: 412611 - protein, 309 aa, unidentified
MDAKYVGIDVSKDRLDVHVRPTGEAFAVARDGEGLADLITRLKPLAPRLVVVEATGGFEMTVSAAIAGAALPLVVINPAQVRHYAQALGRRAKTDAVDAEIIARFAEATRPEPRPLPDEATQALADLVTRRRQIIAMMVAERQRAGRLPKRLKRSCERVVRLLEKELAALDQDIDDTVRGSPAWREKEDLLASVPSVGDITARTLIAELPELGTLDRRKIGSLVGIVPFTRQSGRRQGKAFIGGGRPKVRAALFIATMSAVRHNPIIRAFRERLLAKGKPKMVVMVACMRKLLTILNAILRDRKPWQPA

SEQ ID NO: 412612 - protein, 397 aa, unidentified
MYIVGIDIAKRKHEAAVIDGEGAVIIKPFSFTNNCSGYNRLLAMLAKAKLPLDEVSFAMEATGHYWLALFTRLQKEGFRVQVINPVQTNSIRSFYIRQAKTDPRDALLIAEVIRFGHFSESTLHPENIYELRELCRGRHAIVSMQADVKRKVVALLDQVFPEYETAFTNMFSDTSMAILQTCPTPKELSEMPLEELCHLIEVSSHKRFRMAKAQELQALARNSFGFAMAGDVFSTMIRLYAKHLVFLKQQVREMDRKIAEIMETLDTPITTITGIGPTLGAYILSEIGDISRFSSAAKLAAYAGIDPTMRQSGEYNGVRNRMSKRGSPYLRHAIWLVASSAVLHDPALKLYFQKKRDEGKPYMASVGHACRKMVSIIYAVMRDNKAYTPHIPNEISA

SEQ ID NO: 412613 - protein, 412 aa, unidentified
MEVVYPCCCGLDVHKKSITACVLWAQARGKSRKEKRRFGTFTHDLLQLADWLGECGVTHAAMESTGVYWKPVWNILAEQFEVLLVNAQHIKAVPGRKSDQKDSEWIADLLQHGLLRGSFVPPRPTRELRDLTRYRVSLVQEINRIANRIQKVLEDANIKLASVATDALGASGRAILEAMLAGEQDPARLAEMSKGVLRNKIPELKLALEGRMTEHHRFLLRQLFDHLRFTEAKQDEIEREIDRRMRPFEDQVARLCTIPGVDRVTAWGMLAETGMDMNQFPSAEHLSSWACLCPGSFESAGKRLSGKMRKGNVSLRRCLSQAAWAISKTKNNYLSALYRRIAARRGVKRAIMAVAHALLVMAYHMLKRKEDYRELGADHFDRIDVNRTRRSLVRRLERLGHRVILEPLAQTA

SEQ ID NO: 412614 - protein, 406 aa, unidentified
MKIEAQFAGAPTGGQNGTLYGSVEMGSTGWLITSRPGGQDKVQRRRVASNDWRATISTLRRQQKACQAQRVVCCYEAGREGFWPYRALQAAGIEACVLDPASIAVNQRGRRTKTDRIDGVQEVDAVEALELGLRTAARAVVVPSEEQEEARQLSRTRSRLVKERTALIAYIKSGLARVGADLPPATQPGWLEHLATVRQWDGERPLPRQLVRDIELAHERLMLVCRQIGELEAEQRVAVLSRETSGKRRLIKTRQAAQAWDAQASPAQRRLAEQAERLSRLVSIAPVTGYVLAGEVYWRDFRNRRQVGGYVGLGGTAQSSGAQQRELGISKAGNRRARHVLIEVAWTWVEHQPDSPITQWFRRRAPKGASPRQRRVAIVAVARKLAVALWYYLNDGIVPEGARMKA

SEQ ID NO: 412615 - protein, 421 aa, unidentified
MAQQVFDRLFERVAGLDVHKAQVTAAVRVPDGDGGRVQHVAEFSTTVRGLVALRDWLEAHQITHLAMEATGVYWRPVWAILEDRFKCILVNPRDVKQVPGRKTDVGDAAWIAQLLEAGLLRASLVPPKPIRTLRNLTRYRKTQIEERQREANRLHKILEDTGIKLDCVASDILGKSGRAMLDALVAGTTDPAILADLAKGRLRAKIAALTEALEGRFDSEHALIVSAILAHLDFLDEQIDRLSDAIGAQLGPFATAVELLCTIPGVQRRTAEVIIAETGGDMTVFPTARHLASWAGACPGNDQSAGKRRSGRTRKGSRWLGIALTEAALASTRTKDTYLAAQYRRLRARRGHKRALGAVKHSILVAAWHMLSTGELYREPGGDYFERRRDPQREINRLIARLERLGANVTVGPATSTPAPA

SEQ ID NO: 412616 - protein, 325 aa, unidentified
MPPRRELVTNKAEFNPNFMSEKIYFGVDVCKESLAFCGANVAGQVPNNAPGVRRLLARLPQGAHLIIEASGGYQRELVKVAQQSAVLLSVVNPRQVRDFARGVGRLAKTDPIDAEMLARFGAEVNPPPDAVPTTAELALQELVSARQQLVEQRTVLLQQQSQHLNKVVGRLDRARLKLLQRQIGQLELAISSILEEQSALKQKVERLQQVKGVGFITAVTCVALCPELGSLSKRQTAALVGVAPYDEDSGARKGWRHISGGRPKLRRALYMASISAVRSNPILRRFYQQLRQRNKPPKVALVAVIRKLAILLNRLLRNASFLPAS

SEQ ID NO: 412617 - protein, 339 aa, unidentified
MKVSTLGIDLAKNVFQLHGVGCNGQTVLKKKLTRDKFLPFLMQLEPCLIGMEACASSHHFARVLRQYGHEVKLIPPQYVKPYVKTNKTDAADAEAICEAVARPNMRFVQIKTAEQQAILVLHTERNILIRERTACANSMRAILAEFGIIMPRTLSQLYKKVPEILEEYDNELSPFVRCSVARQLEHLQGVEDQITLIEQELSSWAKTQPACQRVLKVPGVGLMTATYLVASVGNGQQFHSAKQFAAWLGLVPREFSSGGKQRLGRISKRGDRYFRYLLVHGARAVAAVIERHKDNMPWLYRLLSKKAYNVAVVAQANKTARILWSMLVHHTEYRTLSVV

SEQ ID NO: 412618 - protein, 402 aa, unidentified
MRDAWVTLLLGRNYNAEPQAERNRSMKKLRFLGLDVHAETIAVAVAETDGEVRSLGIIPNREESIRKMIKKLGPAEQLRACYEAGPTGYVLYWQLTALGVSCEVVAPSLVPVKAGDRVKTDRRDASKLARSYRSGDLTPVWVPNQEHEALRDLVRAREAAKQDQLRARHRLGKLLLRHGRRAPAGIKAWTHKHLEWIKEHVHFEQVALEYTLWDYWHEVEHVSERIRRLEQAITEAVRLAPSRMQEVIRGLQALRGIAQLSAVTIVAELGEISRFEAAGQLMAYSGAVASEHSSGKHIQRGPITKTGNAHLRRIVIEAAWSYRHRPSCGWALRQRQQGLSEEVKEIAWKAQHRLHQRYRHLLGRGKDKPKVVTAIGRELLGFIWAIAVHVERKPSQPTVAVV

SEQ ID NO: 412619 - protein, 315 aa, unidentified
MHEDVFVGIDIAQERLDVHVLPQGDAFKYQNDANGIERLVIHLQKVAPTVIVVEASGGFEISLAAELGAANLPLAIVNPRQVRDFARGIGKLAKTDAIDAYVLASFAQTNKIEPRPLPSEEEQLIKDLVRRRQQLISLRATEKNRLHRVRSKPVRESILVVIQTLDEQIRNIDRDLDNILRSSPLWREKEDLLKSFSGVGPVTARTLLALLPELGKANRQQIAALVGLAPLNRDSGKMRGKRTIAGGRTDVRNALYMAAVSASKHNSTIKAFYERLKQAGKPAKVALTACMRRIIVILNAMIKAKRPFEYILLDK

SEQ ID NO: 412620 - protein, 339 aa, unidentified
MSIITVGIDLAKNVFAVHGVDETGKPMLVKPKVPRAALLELIAQLPPCLIGMEACSGAHHWARQFQPFGHTVRLMAPKLVVPYRMAGKRGKNDAADAAAICEAVTRPQMRFVPIKDQEQQAVLCLHRTRQGWVEERTATYNRIRGLLAEFGIVLPQKVERLRREIGAHLEDLPGWANRCIGDLLQHASQLDERINAYSRIIEQLAHQDQRARRLQTQPGIGPTTASALLASIGSGHDFASGRQLAAWLGLVPGQYSSGGKARLGRITKAGDGYLCSLLVMGARAVLAGLGDKQDRYSRWVRSLQERRGYWKTIVAIAAKNARMAWAILHYGDDFSVLVD

SEQ ID NO: 412621 - protein, 319 aa, unidentified
MSKAILGIDVAKKKLDVALMFDQKTLVRKFANSPVGFKLLGGWLASLHIEQVHACLEATGVYGEAVAEYLHEKGHRVSVVNPLRIKGYAKSDLQRNKTDPADARTIADFCLVKDPVPWHPLPAAVKHLQALTRCIEALEEILTAERNRLEAAPPSVRPSLKRIIKTLETEIKDLQRLIKEHIDNHPDLKDQSDLLQSIPGIGAKTAQVLLGELEFAAFPSARSLAAQAGVTPHQFQSGTSINRTRLSKLGNGRLRKALYFPAITALKYNEIVKTFASRLSHNGKAPMQVICAAMRKLLHIAFGVLKNNRPYDPNLASSV

SEQ ID NO: 412622 - protein, 345 aa, unidentified
MQPMYYIGLDVHKRTISYCVKDGSGVIHAEGTLPATRLDLDRWMKTLPQPWTAAMEATVFTGWIYDHLQPHAAALKVAHPLMLRAIAAAKKKNDRIDAKKICDCLRCDFLPECYMASTAIRERRRTLRYRNLLVRQMVQMKNKISMLLMEARVSYNKQRLHKAGYFRELLTTNPDIPEGLRSLLRLCRETVVRLSKTESALVRSLEQDSLLMDRVERLMTIPAVGPITALTWALEVGDVKRFSSIKKAVSYCGLCGAEKSSGNTIQRTPLSKQRNKHLQTTLIEAAKMAPRYNSSLALLYDGEKQKGNANRATLAVARKLVAYLMAVDRGQRNFQVMETSNCVAA

SEQ ID NO: 412623 - protein, 307 aa, unidentified
MTQNTYIAIDISKDSLDIRSDLFTGKIEYTSTGLTQLRKHLQRAEHPLVVCEATGGYERELLHMLWKHQLPVALINPRRIRAFAKSEGIKAKTDALDAAMILKFAEHKELRKTPAPSEHQQALQELMDRRAQLTETIAREKNRLHRATKRTKTSIEKVIRFLERELKGLESTIKELINEDESMRTQRDLMLHVKGVGETTVWNILAYLSEITSLNRNQLVALAGVAPYNQDSGKSKGQRRIEGGRAKVRTCLYMAAQSAAVYNPHIKTYVDGLRARGKSYKMAIVAAMRKLLIYIQSILKNPQKALA

SEQ ID NO: 412624 - protein, 338 aa, unidentified
MKLYGAIDLHSNNNVTVLIDEQDQVVYQKRLPNDLSLIAQQLSGYQDALQGIVVESTYNWYWLVDGLMDQGHRVHLANTAAIQQYEGLKYTDDHTDARWLAHILRLGVLPEGYIYPKEERAVRDLLRKRGQMVRQRTTNLLSIQNLITRNTGSSIRSNRIKTLDAEQVDDLLPNPDLALAVKANLAMIKCAAEQIEILERTVTDRIKLREEFSFLKTVPGIGQVLALTIMLETGQVQRFPTVGDYASYCRCVGSQKLSNGKKKGSGNTKNGNKYLAWAFVEAANFAIRYNARIKSFYQRKKAKSHGVVAIKAVAHKLCRACYYIVRDQVAFDVAKAFA

SEQ ID NO: 412625 - protein, 342 aa, unidentified
MHRIKAGDAAALLRLLEGIRERRSTISGFPATVICCFEAGRDGFWLHRLLTAHYIPTHVVESTSILVSRRAKRAKTDRLDAEGLLRVLAAYLAGDTQICRMVRVPTPEEEDGKRVHREREYLVQERTRIENRILALLATQGIRRRPSLRTWAQDMAILKTGDGRMLPRHLAAELDRLRRRLVLTMELIRELDAERSDLLAATPNDALSNKIIALQRIRGIGENFSAVLVREVLYRPFANRKQLASYVGLAPMPHQSGNMDRDRRIGRAGNARARKTLVQMAWLWLRYQPESGLSIWFRERVGELQGRTRRIAIVAMARKLLIALWRFTETGEIPDDVTLGTA

SEQ ID NO: 412626 - protein, 315 aa, unidentified
MHLGIDVSKNTLDCCLISDGIFYERKFPNDSSGIDKLQTWLQEHGADSNLHCCCEATGTYYEESARALARRYKMSVVNPRTIKGFGTAVMNRSKTDRQDAKLIARYCQAMKPEQWQSATPEHRQLQELVRYIARTKRQRAAEQTKRQTAPDYLKPHIQSTIEHLTELLSRLEQDLKAHYRSHPEQDSRRKRLKTIDGIGENAAAVLCSVITDRFTHAKQLVAYLGLDPKEHQSGTSIRGRTRISKIGKSDIRAALYMPALVAYRMGAFPDFTARLEAKGKPPKVIIVAIMRKLAVIAFHLLKNGEEFDRSRHRKI

SEQ ID NO: 412627 - protein, 418 aa, unidentified
MLRIVHPICCGIDVHKKFVVATVGITTKSGVTEYQTRKFSTFSEDLHHLLDWLKSQSCVHVCMESTGKYWHPVFNVLEHDCQVVVANPKYVKGIRGKKTDVKDSVWLCDLHKHGLVPGSFIPPLQIRQIRDLMRYRFKLINFKSSEKNRVQNSLTVSNIMISSVVSDTFGVSSMKIIHHILDDPDDTNFDVSEMLHGSMKDKTDIITKSIQGNLTKPQADKMRVSLQHMDNIKKHIADIESVVLKLSQPYLPQIEILLSMPGIKDIFTAIAILGEIGVDMSAFLSQKHISSWAGLTPQNDESAGKKKSVRVSRAGVYIKPLLVQCANAAIKSKDFPYFKNRYHQIKKRRGHKKAIIAIAHKLLICIYHMLDKNEPFNEELYQIDSKPKQTYSPKITEDMAIRYLETLGYQVTDKGVKT

SEQ ID NO: 412628 - protein, 393 aa, unidentified
MIYVGIDVASEKHDCAIVDSETGEVCETFVFPNNRVGYDTLLSKLTLYSKNKDFSDIEIGLESTGHYSNNIVNFLHEKRLSVKVFNPLTVQRLQKAQTLRRTKTDKSDAKFLACMLIGDDSKSYEKSLPQIEELKTLTRHRFRLVKEKTKHKLHISRLVTIVFPELTSVFCTTSLATVRELLLQFPSATAIATVDIRKLTNLLWATSKHRFGRDKAEEIRNLARTSVGTSNRGADFELKHHLQSMQFLEQQIKEVDAQIKAIMVELNSPILSIPGTSFTLGAMIISEIGDIKNFRNPAKLLAYAGLDPSCYQSGKFTADRTPMVKHGSSYLRYAIMQAASCVKRYAPEFRVYHDKKIAQNKHYYVALSHVAKKLVRVIFSLLKYQKQYASQVA

SEQ ID NO: 412629 - protein, 457 aa, unidentified
MRKKNNRTPGMEEAHPFSGMSRIHLHAAGVDIGAIEIVACIPGDENTQIVKAFGNYTVDLQALAQWMKGYHIKTVAMESTGVYWIPLFEELERQGFECLLISSRSLRRVAGRKSDISDAQWIQTLHSYGLLEGSFRPQGELVALRTLLRHRSQLVEHRSPHIQHMQKALLQMNVQLSQAVTDVTGLTGLKIIRAILAGEREPQALATLREPGCKKSAEEIGKALTGTWREEHLFVLKQSVMLYDFYTEQIQSCDEEIERQYGLTRPDWHSGEVQPLTKRKKNSHSKNLPHHPEEVRKHLKRISGVDLSLVDGFGVSLAQTVIMEVGTDMSKFPDEKHFCSWLGLAPKHEISGGKVLKNNTLKTKNRAGQAFRLAANSVKQAECMFGVFYRRLRARLGPAQATVATAHALARVVYRMLRYKVEYEPLSVNEYQKHYEEQQIKYMRKKAAKFGFQLVPT

SEQ ID NO: 412630 - protein, 343 aa, unidentified
MEYGAIDLHLRRSQIRILDEDEGVVLERRIDTTREAVTQLFGARGRMRILLESSTESEWVAQHLETLGHEVVVADPNYAPMYGGRSRKIKTDKRDAAALAIACRRGIYRAAHRASRPARTLRQQLRVRRHLVQVRTGLISLLRSTLRQEGLRLPSGSAERAVARLDRLAVPATVAAVVAPLRTALADLTATLATIDTAVEAHATGDAAAQRLMTAPGVGPILSLTFTAVLDDPARFGGDAGRASAFLGLVPSEDSSAERQHKGHITKTGPGDLRALLVQASWVIWRGRSTAAHALRTWAHTLGARRGRRIAIVALARRLTRILYAMWRDQTPFAPPGRVAVAA

SEQ ID NO: 412631 - protein, 319 aa, unidentified
MKESSLPVIVGIDVSKDNLDVYFNSENQHQRIPYKEDALHNLANRITKMNQPTLVVMEATGGYEKKLVRCLQSHGIKCAVVNPKQLRDFARGCGKIEKNDAIDSKVIAFFGEVNQPKPLANTDENREKLKSLTSRRDQVQSLITQESNRLQQTDDQEIRKFIQQAIDLYKNQLKELDKQILNRIEADPAMSQKATILQSVKGIGPATTANLIAGLPELGSLNRQQIAKLVGLAPIVRDSGKFKGRRRICAGRSHIRRALYMATLVATRWNERIKQFYQSLLANGKPKKLALTACMRKLLTILNSMIKNNQSWKENQPTT

SEQ ID NO: 412632 - protein, 340 aa, unidentified
MTIVMGFDQHRAQITTEWIDTVTGEIGRARVAPAHREGVRRFLHRFAGQKIEVALEATTGWRFVVEELRRAGAEVHLAEPAQTSALRGNKKRPKNDRADARHLRELLMIGRLPESWIPPDHLLDLRAKVRLRHTLVDQRGEWQQRIRAVLYHHGLAHRRELHLLSGEGQAWLEQVELSDAAREQVTVAIAMTDALNVQIAPLDRQLRLYARRQAGCKALMGHYGIGELTSVAILAELGDCRRFSSSRQAVRYAGMDITVYESDKRRSPGHLSRQGPPALRWALYEAAQVARHAGSPDRGYYDQAAERLGSNRACLAVARKLLMRAYHTLRELGEEGLQPA

SEQ ID NO: 412633 - protein, 347 aa, unidentified
MLADELDYVIGVDPHRDTHALAVVDVRSGGVVFEATAVADGEGYASVLRLADQHAPGRRAFAVEGTGSFGAGLARFLVSHEERVLEVGRLRRERLSGKSDALDAIRAARSVLGQTRPAGPRAGGEREALRALSAAREGAVTARRAGLCQLRGLLVSAPEPLRAELRSLTRAQLLRRLAAVRPEGRQDPELRGTLLALRALARRVKALTVEERELAREIETLTRKLAPQLLEQPGVGPLAAAQLLISWSHRGRITSEAAFARLAGCAPIPASSGQTVRYRLDRGGDRRLNRALHMILVTRRRTHAPTIAYIERRIHEGKSRREAIRCLKRYLARNLYRLLENGSPLPT

SEQ ID NO: 412634 - protein, 365 aa, unidentified
MLLRSCLFSSTPYMEILGMERMLNHQWCVGVDLHKDTLTACVFCGCCGEVSFQKLSCKCRRQIAEYFAALPRPHTVAIESVGFYRWLWEMLEPLVEKLVLADATQARALAGRRLKTDREDSLNIAELLSAGRLPTSYAPPLEVQLLRDITRHRNGFSRQHARVLCRVKSIMNANNRPGPARLQSDGLIRYLKGQGEKLPARHVAMLWQCVDSLALTERQMQEAERTIGEVVRRDLFREVHEILVSFPGVAMLTGATVIAEVGDFRRFPDAKAIGRYAGLNPRVFASGGKQRIGHIAKTGSADLRWILQQAAWTAIRTDEHVRRVFLRIAKRSGRKAAAVAIARKLLTWMWSAVCKGEPYRTRVAA

SEQ ID NO: 412635 - protein, 355 aa, unidentified
MEKLQANLTNLQLYVGIDVHKRQWSVTILSQHVEHGTFSQQPYPDTLRCYLDKHFPEAEVMCAYEASKFGFWIQRSLSTFGYQCMVVNPADIPTTNRDKVTKTDPIDSRKIANCLRSGLLKPIYVPSIDTEGDRQLFRYRKRLWGDLVKIKNRIKDKLIFSGVTTPPCFDNSYWTKDFLVWLQEVELPSTSARLTLDLLLEQYQMVYGHFLKVSTQVRKLQKKARYKQDAKLLRGVPGVGPLTTVQLLTEIETIDRFASFKHLNSFVGIKPTTHASGEHDWNGRMTYRQHKGLRSAMVECAWVAIRKDPALLVRYEQLVKRLTAKRAIIVVARKLLSRVYHVLKTKEEYAIGIVK

SEQ ID NO: 412636 - protein, 332 aa, unidentified
MNYVETIGIDVSKETLDVIIHTVGLTDQFENSLQGYKKLTKWVEKHVTSARESLLFAFEHTGLYSYPLSVFLAENGYSFLMIPGLELRRSLGITRGKDDKIDAKAIALYTFRRKEEITPYVMPSEELTELRRLLSLRERLVKHRAGYEASLMEHERFLKKTDNPVFFEVHKKIISELNKQILIIEKELEDLIKHNQQMKHMYDLITSIKGVGPQTAMFMIAFTNAFTLFKDWRKFASYSGIAPFPYQSGTSIRGRTKVSHLANKKLKSLLSNCAATAIIHNPEMRLYYQRRIYNGKHKMSTLNIIRNKLVARIFAVIERNTPYVNTYKFATC

SEQ ID NO: 412637 - protein, 383 aa, unidentified
MIYVGIDVAKDKHDCFITNSDGEVLFKPFTITNNLDGFNELYQKIESVTEDATKVKVGLEATGHYSYNLLGYLIDKGLAAYVINPLHTNLYRKSLSLRQTKTDKVDARTIASMLMSDVNLKSYSDTSYHNEELKSLTRYRFDKVKERAKLKSSVSRLVCILFPELEKLVPTLHMASVYSMLSEFPGAKHVASAHLTRLTNLLSEASKGRYSKDTAITFREAARASIGSNMPAKSLELKHTIKLIQELDSEIDEIENEIKVIMDEINSPILSIPGINYRMGAMIIAEIGDFSRFDSPDKILAYAGFSPSTYQSGQLDGAYAHMEKRGSRYLRYALYNAAKYVCHWDPTFAGYLAKKRAEGKHYNVAISHAVKKLVRVIYHLEKT

SEQ ID NO: 412638 - protein, 448 aa, unidentified
MDSFPIINLNAAGIDIGSEEHWVCVPEDRDEEPVRRFSCFTADLYAMADWLKKCHIDTVAMESTGVYWIALYQVLETRGFEVKLVNARHARNVPGRKTDVLDCQWLQRLHTYGLLAGSFRPEDDVCVLRSYWRQRDRLIRYTSAHVQHMQKALTEMNVQLHKVISDITGTTGMRIIRAILDGERDPLKLAQMRDPRIKSSVETIAKALQGDYRQEHLFALRQSLELYEFYQHQIQSCDREIEAYLEQMDSKVDPDSTPPPASKRGNKKPRGNEPDFDLRTHLYRISGVDFTQIDGLHVLSVQTILSEVGLDPDKFPSAKNFASWLGLCPNNRITGGQVKSSKTRKVVNRAADAFRLGAQAVANSTTALGAYYRRMRARLDPPKAITATAHKLARIFYHLWKNHALYHDPGADYYERQYRDRVINNMKKKAKNLGFEITLNPIANIQVS

SEQ ID NO: 412639 - protein, 355 aa, unidentified
MQSNKISFKGQNIYVGIDVHLKTWHVTTLTESGYKYSFAQHADAKELFDRLNKKFPEAHFMSAYEAGFCGFSAHYALIEQGIENIVVHAADIPTTGKEKAMKTDAVDSEKIAWGLKRNELTGIYIKDKRYMDDTNLMRLRQRFIMDLSRQKNRTKHLLYTQGVTYPERFRNCRTHWSRNFMKWLREEVEFLSEQKLSLLLLCEQVENTRKAILKVTREIRRLSTTDRYKENYDLLITVPGLGLITSMSMLTELDNDIVRFPNERNFVSMLGLIPTCHDSGEKKVSGEKINRGNKNLGPLIVEASWVAIQRDYQLGAYYSSCCQIMKPNKAIIKVARKLACRAYAVLKTKTKYELS

SEQ ID NO: 412640 - protein, 395 aa, unidentified
MIRLFVGIDVSKDSSSARGLDENGDDCFAIEFDMDSDGFAKLYKSITQHCTDASEVMVAMESTACYHINLFSFLTTKGINTVIVNPLLIANFSKLSLRKTKTDKKDALTIAQFLMANKDSITQLAVSPDIQDLRDIARERESVIQMISLQTVEMKRLLQTTFPELEKLCNITTKVMLDFIEEFPSARLVRAAKSKRIEKALNRKGVSTRLTFSANDIITAAKKSIATTSPAKELILKGKVSTFQHLVKRRDELTKALTEYCGQTMIEDLEIVTSVTGINKGTATTFLAEIGNIDKYMSYKKLIAYAGIDPSVYQSGRYQGTGKISKRGNRHLRRVIWIMTKNVIHHNALFKRFFLKKRKEGQAFKKAMFATSHKLIRVLFALLSKKIYFDQTVHS

SEQ ID NO: 412641 - protein, 347 aa, unidentified
MTIVKDARAITGGVDTHADTHVAAALDPIGGLLGVQEFPATAAGYARLLGWLGGFGTVCLVGIEGTGSYGAGLARHITTAGVQVVEVDRSDRQDRRRQGKSDPFDAVSAARAALSGRARGASKGRDGAVEAIRALMVAKRSAAGERTQTINQARALIVTGPEDLRARFTGHTVAALAAELASLRPRPGSTVGYATRIALRELGRRAQFPGAQLERRDELIRPLVAAHAPGLLARHGIGAHTAALLLIAAGDHPERLRSEAAWAHLCGVTPIPASSGKTVRHRLNPGGDRQANHALWRIVFTRIGSDPATRAYVDRRTKEGLPKKEIIRCLKRYAAREAYPCLRPPAG

SEQ ID NO: 412642 - protein, 332 aa, unidentified
MLTESGYKERHPQQASAKTLFDFLKKHFPDGEYHAVYESGFSGFSTYYALKEYGINCVVTHAADVPTTQYEEVMKTDKVDAAKLARSLRAGDIRPIYIREKENIDDRSVIRIRKTIQKQLSGYKARVKHLLHCNGVEIPERFARPGTHWSRAFIKWLKEDVVLLSSSRLSLDLLVKQVETIRQTLLDATKSIRRLAQTDRYRNNYELLMSIPGIGVSVAMCILTEIYDVKRFRNENQFASYLGLIPTCHNSGEKTASGEKTFRGNKHLGPMIIEAAWIAIYRDYGLGMTYARYKQSMKPQEAIVKIARKMSNIIFSVLKNSRKYEPYRWDKE

SEQ ID NO: 412643 - protein, 418 aa, unidentified
MRVNEKIERITEQTLICGIDIGKTMCCARFCDYRGLEVYKTVWFDKTKDMDIIGCQITAAMNQAVKTDIIVSFEPTGHYWLNVWEYFQKCNIETVLMPTYTVKQAKGIYDQDPTKSDPKDAMLIARLTSEGKYVKPIERDEIFQNIYSGYHIYCDIQKEINRIKNKIHVWNDKYFPELEHVYKIGSVAIKPIYEKKLLPEEIAKMSDEEFISLMIENNHYAKKSLIIKVKELASKTSGIKQDKYTKKEIEDLYKRYQELSTELEELKNELIELASQIDYVEKAVEMSGIGYISMVGIIAETGDLNNYEHAKQVLKMSGLSLKENSSGQKKGKKSISKRGRSILRRNLKQIGIALVGNNNFFLQLHNYYTTERSNPLKKLISINAIIRKFVYILMAIVKNKESFNEEKARRESCILNSI

SEQ ID NO: 412644 - protein, 387 aa, unidentified
MKKAYIGTDAHKEQNVIAIAFAGREDPELYGKAPADLDGFERVLRRVLAKYGLEKADVAICYEAGPTGFVLCRRLRSLGFECEVVAPSKIPKAAGDRVKTDRRDARKLARMFRAGDLVFVNVPDVADEVIRDVCRGRTDAAEVRGRARQQLGALLLRNGYRYGDKTNWTEAHMRYLRELVLPDPAQKFVLEEYLQRVDASVAQVERIEAQMARLLPAWQRRKFVEALQGFRGFQLVAAMTLGSELGDLLRFDHPRRLMAYIGLVPGENTTGERRRQGPITKCGNSHVRWMLVEAAHHYHYPPKVSKELSKRQEGLSREVRAVSWRAQERLHRRFWRLLKRGVHRNKVVIAIARELTAFVWELAQVLERERAAADPRQPARPAARKAS

SEQ ID NO: 412645 - protein, 350 aa, unidentified
MTVIKQVIGVDIAKDTFEVRFGSITDHQEERFLGSATFPNEKRGFRKLLEWVKNQLVSQDAPVWFVMEATGAYYEHLAYFLTGYHKQVVVLLPNKMKHFAGTLDAKSKTDRLDARSICQFGLERPLSPWQPPSPQMKLLKELTREYNTIQEMATQVKNQLHAKDHSYHPSVETTKRLRVQLRLFQKQLKSIEQQLRSVVNDDDNLRTRIANITSAKGIGFMTVVTAVAETNGFALITSEKQITSYAGLDIVVRESGKRQGKPALSKKGNKHLRRAVFMPALAACRFNPLLKAFYLRLVRTKANKKVALLAVARKILCLIYTLWKKNVPYDPNYRHPNIRSCSNNLILQTT

SEQ ID NO: 412646 - protein, 343 aa, unidentified
MAIVGAFDVHRAQLTYDYVSTETGEVQGGQIRPADRQHLRAWLARFEGETQVVFAVEACTGWRYVVEELKRVGCEVHLAEPADLSRDKGSKQRAKTDAADARHLRELLVQDRVPESWIPPAEVLEARGLMRLYMDLTEERAGWRQRISATLFHQGAGKLESVLDASGRSLLLDVGLSPVGRQAVEVGLRQVARLSAELEVLGKEIVALARARPACRALVDAHYGVGWILAFAIWAEMGDPRRFSSSSDAVRYAGIDITVYSSDGKRSRGHLSRQGPPLLRWALFEAALQASRAASPDHAYYESVKARRQGDAKIAALAVARKLARRCYHTLRELGPEAWPAAA

SEQ ID NO: 412647 - protein, 377 aa, unidentified
MQRDAKEVLAEVLEKLTGKLDVPAVSTSAKENRRANTVGPNRDRLTVGVDLGDRWSQYCILGLEGETLAEGQLRTTQDDVREFFQALTAARVVIEVGTHSAWVQDVITEWGHEVLVANPRLMEGSKRRKRKSDRIDANKLARLGRVDPQSLYPIRHRSREVRQDLVVLRARDALVSVRTELINTTRGLVKSMGTRLPGCSSPSFTDKVKDAIPVEVREALLPLVQLVETVNDCIAKYDQKIEELGREKYGHTTLLRQVKGVGPITSLAYVLTLEDPQRFSSSREVGPYLGLVPKQEDSGDSQPQLGISKTGDRMLRRVAGGEFAIHVGSLRTGHRLTAVRTAIVRAGRKECEEASRGGGGTKASRVAASPVGDRGCL

SEQ ID NO: 412648 - protein, 295 aa, unidentified
MRFYQQQHGFYCGVDLHARTMHVCVVDDAGQTREHVNLPCDAGRFLKLIEPYREQVVVSCECMFSWYWLADLCREEKILFVLGHALYMKAIHGGKTKSDKIDSQKIARLLKGGNLPQAYVYPHEMRATRDLLRRRMKLVRLRAQATARVKNTFTQYNIPAPAAKLSRASNREGLAEQFTDESVQKAVGSDLALAGHLDEQLRGIELYLVQHAKIDDPQSFAQLQTVTGIGKILALVILYEVHDIRRFGSVQQFVSYCRLVKCQHESAGKKTSGKGNKIGNASEVCLLGSGTPDAA

SEQ ID NO: 412649 - protein, 362 aa, unidentified
MPSTNLQNSIDFDGQIFYVGLDVHKRSWAVTVRSLDIQVAHFTQPPSAQALYTTLTRKFPGGVFYSAYEAGFCGTGPHEQLCKLGITNIIVHAADIPITDKQKKNKTDVHDSRSIAEQLERKNLHGIHILTHEQQELRSLFRLRENKVKDITRVNNRLKSFMFYYGIEIPESISKKEYISKRVLDWLVNLELNSDPGTLAKQGLIEDLEYQRKQGSKVTKLLRQQIQISHTDAYKRLLTVPGLGPVTSMGLLAEIGDFARFDDPTEYIGYLGLTPWNDSTGDTIKTKGVQPRCNKHLRPLLIEASWVAIKNAPHLFAYYSRHAVKNNKHAIIKVAHRLALIARSVVLKKQDYQADYPQNKQQ

SEQ ID NO: 412650 - protein, 344 aa, unidentified
MSEATTIGLDIAKHVFHAHGADATGRAVFSRRLTRGKLLDFFVRHPRCLVALEACGGAHHWARELRAMGHEVRLIPPAYVKPFVKRHKNDAVDAEAICEAAQRPSMRFVAVKTEEQQAAALVFRTRDLAVKQRTQLGNALRGHLAEYGWVAPQGTAHLAMLADLLEGGEIGETLPEAARPMFAMMADMLAELDKRITALDKEISRRAREDEVARRLMTIPGIGPITATAIAAIAPPAETFTKGRDFAAWLGLVPKQASTGGKQKLGAISKMGERTLRRLLIIGSSSVVLQASKRGAPAGSWLEGMLARKPRMLVTVALANKMARTVWALLVRHEDYRAPVAVAV

SEQ ID NO: 412651 - protein, 354 aa, unidentified
MTSVKYIGMDVHTESISIAVRNSIGKIVMECVIETKASTLVQFLAGLRGDLRVTFEEGTWAAWLYDLMKPHVTEVLVCNTRKNTSKGGSKSDRIDARKLSELLYMNNIKSVYHGEHGLRTLKELARSYLTISKDLTRVMNRLKALYRSWGIPCAGKEVYAPRHRAEWLAKISEAGVRRRAEHYYQQLDVLRPLRQEARRDLLLEAKKHKAWKLLRQIPGIGPIRAAIVIAVMQTPHRFRTKRQLWTYSGLALETHDSAQYRVAEGQLQRSKKPATVRGLNKDHNHDLKDIFKGAATRVSGSRGPLRDFYENLLAKGRKPTMARLTLARKIAAITLVVWKKEVRFDANYLKPQAA

SEQ ID NO: 412652 - protein, 395 aa, unidentified
MISVGIDVSKGKSTVCFFKPGGEVLVAPYEVAHTKDELGRLADRINAYGEEIRVILENTGYYHWPVVKFLVECGIFVSAINPLKMKRFCSQNIRKVKNDRIDAIHIASYGLTYWHELIPVQSSEDTYRELLLLSRQYHNVIDLLIKAKMNFGNLLDQVMPGITSVICGSKLREFTTKYMHFQYIDSMGESRFVRDFCKWSKKQGYRVDHERQAKKIFALVQNGIPVLPHTPTTKIVVLEALRRVNELENSRDIILAQMNELGKTLPEYSLISEMKCIGEGLTPRIIAEIGDIRRFHNKHSLIAYAGIDAPPYQSGSYNATERHITKRGNKYLRKVIFEVCLSYIQHKPEGDPVYEFIEKKRSEGKCGKEALVAGINKFLRVYYGKVTELYRELEL

SEQ ID NO: 412653 - protein, 429 aa, unidentified
MNVVDDIRLEKFRQMRKEIRGSKDYLIVGIDIAKNKHYAFFGTATGKTLLKKFIFENTIDGFERLLIQEDALKVQHCLKKVIYGLEPTANYHKPLGEHLIRCARNVVLVSGVAVKRNRESMDGRWDKNDSLDSSVIADVVSQGKFLFYEYSTMPIRDLRNLLALKRRLKKQEQGQKVRIRNQLLAQYFPELDGYYKTLSAEGLAVVRWCLDPSAIAGLEYEEFVRIVAPNRRGGIRQQERLKAVWNKAVDSIGCRAGTSLYFEAKVMVEGLKEIRKVIRVTEDEIEDICNKLPEYSYILSIPGFGPDISSKVLGAIGNPFRFNTGKQVLKMAGLDLNARRSGTKSDTVTPVLSKKGKADLRYALYQAALIASYKNKVFMRYFTNKLRGREKEKGIKTKMRIKLAAKLLIIAWTLMKKQEAFNPHYINIE

SEQ ID NO: 412654 - protein, 361 aa, unidentified
MTQAKTLVGLDVHVSGTVAAVLDRDSGEVRRRRLSGRGEEIAAFVTGLRGPVRATYEAGPTGFALARRLESAGVDCLVCAPGLIPRGPSDRVKTDQRDAERLVRLLVAGELHRVAVPTVEEEALRDLVRAREDLRGDLMRARHRLAKLLLRHDVRFDGPERNWTQAHLRWLSTVRFERSGSQRAFADYLGGVEALLVRRSQLEADIAELLPGSPWAQTARRLRCLRGIDTLTAAGLCAEIGDFARFRHPEQVMSYLGVTPSEHSSGTQRRLGPITKSGSQHARRLLVEAAWHYRRPPGVSTNLRRRQSDADPKIVALSWKAQRRLHHVWSRMEQRGKRRTIIAVACARELAGFCWAVATTH

SEQ ID NO: 412655 - protein, 366 aa, unidentified
MKKTSTVQAFRSEIFKEQKLTIGLDLGDRWSFYCVMDEAGQIILEQTLPTTPEAMKQTFGKIPRSLIALETGTHSPWVSRLLTELGHEVIVAHAQKVQLITKSNRKDDRHDARTLARLARIDPELLGPVRHRSVQAQLHLTVIRARAELVSARTALVNAARGLVKSYGQRLPKCGTYQVSEKLAEGLSAELREALVPLLKEIESLNEHIKEYDERMEKIAKEVYPEVSLLKQVKGVGTQIALTYVLTIEDPYRFPKSRQVGCFLGLRPGRRNSGESEPQKGISKEGDRYLRTMMVQGAHYILGPFGEDSDLRRWGLKLAERGGKNAKKRAVVAVARKLAVLLHRLWVGGEVYEPLRNSQKAMREVA

SEQ ID NO: 412656 - protein, 410 aa, unidentified
MRYYLGVDWADQTHAVWVVEEDGTKIAARTVPHTAEGLSEWGRELDEWRAQGIERWAAIERREGRVVDFLLDHGVVVYPVNPKALDRARDRFRQSGAKSDPFDARVLADFLRTDHAHLQALQPSSEAAQELKLLTEDYQRQIRQQTRLVNQLTHTLKAYYPRALEIAELTTALTREFLHAYPTPQAVTALTPRQWQRWARAHHLSEARTRDLWAVLQSPQLPVPAHVVRAKARLMLTLVAQLMPVVAAVGHYREAIEDFFARMPEAQWARTLPIGNHGITAPTLWARLGDAPGRWESFRHLQAHAGTVPVTKRSGKQQRVVHFRFACDKALRYVVDQVAYLSLLSSVWARAYYDQQRARGHAHRHALRALGAKWLKIIFVMWQRQVPYDEQYHLATMTRQQLRQRQERIA

SEQ ID NO: 412657 - protein, 400 aa, unidentified
MAQQLWAGVDAGKSDHHCVVIDTDGQRLVSQQVANDEAALVDLIEGVATLADGGEVTWAIDLNAGGAGLLITLLIAADQRLLYIPGRTVYHASGGYRGDGKTDAKDAAVIADQARMRRDLQPLRPGDDIAVELRILTGRRTDLVADRTRAINRLRAQLLEYFPALERAFDYSKSRAALMLLTGYQTPDGLRRIGHARLETWLRKRKAYNASAVAAAAIEAANAQHTTVPGQQVAAAMVARLAKEVMILDTEIGDTETMIEDRFRRHRHAEIILSMPGFGVTLGAEFLAATGGDMSAFGSADRLAGVAGLAPVPRDSGRISGNLKRPRRYDRRLLRACYLAAHIAIRTDPTSRRYYDRKRAEGKRHTQAVLALARRRLNVLWAMLRDHRVYQPIAPNAAAA

SEQ ID NO: 412658 - protein, 433 aa, unidentified
MLDRPLGGSTCNWPAPFEFTHEELQVELIPIHQRVISLDVHQQSLSACAMIEHEGGRVEVVERKFGTFKRDRRELAQWARGIAPQVVVMESTGVYWKSPYAALETVGIVALVVNARHVKNVPGRKTDTSDAQWLATLARAGLLRGSFIPPTQMRQLRLVSRQRQKLVGVASAEKNRLHKVLSDAGIRLNLLVADIHGSAARAMIKALLERLPMHEVLNRKGRLKATREQLFEALSTEDLSDAHVYTADIIVRHIEMLEDQIAQMDAYLRRALAPLEPQLKLLQTVPGIDEAGAAMLLVEIGADMTAFGSAERLASWVGICPGNNESAGKRKRTGIRKGNAWVRRLLCEFAQAAARTQSALKAKFDSIVIRKGHNKSVVALGHKMLRTIYAMLANGTYYQDRTVDYERLSVSRNAPRWIKMLRKYGFMSTAQPA

SEQ ID NO: 412659 - protein, 475 aa, unidentified
MGNGSGMTRGDRRRNARRERLRGLVPLDGAVIGIDLADEKQALAVVDRDVRVVARRTVRVKAFRLGEALDWAAGQARAGGFGPVTVACEPTGPRWLQVQRLCAERGLPMVCVQPLVTHIARQQQDFTRHKTDEADCVMIARLAFELHCYVPEELDEAWADLRHLGRRRAALITSCIASEQRVRDFLSVAWPAVTEACARPFRSVTWLAALQVVASRSGSQPGELAGLGAEAFAGLARSALGGWGGQRLCGPVCQAVFTALAGAEGVVRAHRRGLLRRVAAELGDLQRARDQLRDTEAAMAAALGELGLARLGDIPGLTATGAAAILAETGDPGRYDSSSSLVKHAGLSPSDNASGAFAAQARISRRGRPGLRLTAWRAVWPMLVHNPVMAARYQAMTAAADQAAASARQDSAGRAGHASAAAGAARSRRARARVACAAALLRWIYSIVVHGTSWDPDVAAGRKDHQAARRCPQAA

SEQ ID NO: 412660 - protein, 321 aa, unidentified
MIASSPSSPSSPFLGIDVAKASFDISFDASPAAPVERFDNEPKAIGRLVRRLRAATPTPRLIAMEATGGYERNLLHALVDAKLPVVRLNPLRVRRFAQSRGILAKTDAIDARVIADFARLNADKLSPMLPVGDTARVLRELTTRRRQLVEQTVASKGQREHVTLPALRRSIDRTIKHLCAEIAQVEALIQDLIDNDADLKARQTKLLNVKGIGPRVSRVLVSELPELGRIDKRKAAALVGVAPFNDDSGTHVGRRRIQGGRATVRAALYMATLVATRHDPVIKARYEHLKARGKPKKVALVACMRTMVNYLTSVLADKKTS

SEQ ID NO: 412661 - protein, 409 aa, unidentified
MNASTPIPPRRPTAGIDWASDDHAVAVVDPAGVAVKRSTFEHTGAGLRALVKTLQFADVDAVGIERPDGPVVDALLAAGFTVFVIAPNQLKNLRSRCGSAGNKDDRFDAYVLADTVRTDRQRLTALTQDSPQTITLRMTVRARKDLIAARVAMANQLRAHLQSTLPGAIGLFRDIDSPITLAFLTRFPSQTKADWLSPARLQNWLRSARYNNPTNAAALHAHLTAAPRGTTGPEATARAAVTLALVAALSAIRAQIKALEDQITTQLAGHPDGHIFTSLPRAGTVRAARLLAEIGDARGRYPTPESLVCLAGAAPSTRQSGKTKVVSFRWAVDKQLRGAVTDFAGDSHAANAWAADLYRRARDRGHDHPHAVRILARAWLHVIWRCWQDRVPYNPANHRAPQRILAAAA

SEQ ID NO: 412662 - protein, 393 aa, unidentified
MVCVGIDVAKDKHDCFILSSEGKVLTDVFTIANTRDGFELLLQTIRSCTRPADNIKVGLEATGHYSYNILGFLLDKGLATYVINPLHTNLYRKSLSLRQTKTDRIDARTIASMLMSDVDLKSYTDTAYHNEELKSLTRYRFVKVQERAELKQSVSRLVNILFPELEALVPTLHMASVYAMLSEFPSARQIADAHLTHFKTVLSDASRGRYDREKAVEIREAARRSIGSAMPAKSLELQHTIRLIRELDKEIKEIEAAIKAIIDEMAPPILTIPGISYRMGSMILAEIGDFSRFDSPDKLLAYAGLSPSTYESGKLKATGPYAHMEKRGSRYLRYALFNAAKYVCIWDPSFSAYLAKKRAEGKHYNVAISHVAKKLVRVIYAMQKSGQPYRSAA

SEQ ID NO: 412663 - protein, 351 aa, unidentified
MKTMTKQLQGEELFVGIDLHKHRWHVTIRTADVEIFSNSIVGRWEDLRRVISRYKDCRIHAVYEAGYFGFWLFDHLTQYGVECIVTPPSLIPQEHGNRVKTDRLDSRKLARLLAKGLLKSIWVPSAKERFHRQVIRRRRQLVGDRVRTQNRIKSELCFYGIDLPAARSKWSQVYFANLQRIKFKNHWMQKSFNQLLEQYEFLSTQINKQTQLLKQLSQLPLYCDRVKILCSIPGIGILTAMEILLELQDFSRFRRAQQLAAYVGLTPSQYSSADKIRMGRITGAGKNSVRSALVESCWHLIRKDKAMRKKYEQIKARAGGKRAIVAISRKLILCIRRLLLDNRPYEYEPVR

SEQ ID NO: 412664 - protein, 317 aa, unidentified
MCNSFIGIDISKEKLDICILRNNKLTTKIYDNNVGGYELLISFIKSKKLSPHICMESTGKYSLGSATHLHEAGYKVSILNPLRIRAYRNTQLLRNKTDKYDAQIIAEFCKLYIPEQWYPATSEFSELKELFRCMQSYQEDKIRYQNKLELVSKDSKMRKLMQKSIKHTENQIKELEEIIDLHIASHCEMQKNCKNLQTIPGIGKKTAIAILAEIPDLRNYKSARKLASHAGLTPMHNQSGSSVKGRAKISKIGSGNLRKALYFPAITAINFNKTMITFSKRLEERGKRKMVIIAAVMRKLIHVIFAILKNGVEFKEI

SEQ ID NO: 412665 - protein, 313 aa, unidentified
MAQMVATVGIDVSKDRLDVSLHPTDEQFSVTNDREGWRELVRRLEPLQARAIGLEASGGYERGPIDALLDASLPVRLVNPWKLRRFAQAAGVLAKNDRLDAQLIARFVASMPSREVHRDRDVDHLAELVQARRQLVDAAQQITCQIEHLRDPDLRRLMTRRIRQIERDVERLDQLIVRAIEASPTLSARRDLLCSMPGVGPVLAATLIALLPELGSLANRSIAALVGVVPYDFDSGRMKGLRCIFGGRAAVRRVLFMAAQVAARFNPTLKAFSQRLKAAGKKPKVAIVAVMRKLIVTLNAMLRHNAPWTPAAA

SEQ ID NO: 412666 - protein, 324 aa, unidentified
MQKSIVGIDISKKDFTVSLLREQKHSVRSFQNHREGYEKLLAWLKELQVTPDIFCMEATGSYGEALADFLYAHDHHVSVVNPFQIKSFAHTLLKRHKTDKVDCKVIAYYAERFEPAPYIPLDPNIKELRQLYRCALALNKHLTGFRNRLEHRDRLCDEVTACWDDMIAQAEQKLLVIQQRMTELVRISQSTQQDFDHLQTIPGIAKKTALALLAELPDITMFDNARQLAAFAGLTPRHCTSGTSLQRKARISKVGSATLRKALFLPAITAKNHNPVMKAFAQNLAEKGKPAKVIIAAIMRKLLHIVFAIIKHKIPFNPHFQLAN

SEQ ID NO: 412667 - protein, 406 aa, unidentified
MKRFFAGLDWAAQTHALCVIDAHGAVRQRLEVAHSAAGLHELLGKLRGVARDAAQLAVAIERPSGLLVDTLVEAGYPVVPIHPNVVKATRPRYRSHGAKSDASDAYLLADLLRTDGARFEPLKPQSDAIRALRALVRGRDDLVATRLQLANQLRSLLESFWPGAAALFADIDSPIALAFIERYPTPQAASHLGEKRLAAFLAQRRYSGRRTPAELLERLRAAPAGHSAELELEARGELVRALVRTLEPLVAQITELSARIEHTVTELPDGHIVMSLPRARRLCAAQILAELGDVRERYPTDDQLASEAGVCPVTYASGKHRSVTFRWACNHRLRRAITCLADNSRRACPWAASRYAAARARGCDHPHAVRILARAWIRVLWRLWTDRCSYDPAQHRAALAFHAPGG

SEQ ID NO: 412668 - protein, 405 aa, unidentified
MYYVGIDWADEEHYVYIADDSGEKLDSFKIEHSEKGMSKLQDRVYKFSRKLDNVLFSIETDKGLVVSILMDWGYTVYPINPKSVDRYRDRYKVSGVKSDEFDACVLANILRTDRSRFQPILSDSQLARELKVLTRDRDKLVGDRTRLSNRLTAILKAYYPAALELFSEVAQPITLSFLRKYPTYDDAKKTSFAEFSRFLSENHYPQPKKARGIYEKLQQPHLECEDMLVRTKSRLMLATLSQLQLLIDEIKSYEKEIEKLLKSHPDSNIFLSLPGSGNILSAKFIAEFGDNRDRYQKAEDVQAESGSAPITIQSGKKKYVRFRRSCKKPFRKTIHSFAFCSTNECAWAREHYDQQIATGKTHSQAIRSLSNKWMKIIFTLWKRDETYDEKHHLQMKAKHAIVAVL

SEQ ID NO: 412669 - protein, 390 aa, unidentified
MSQSFDASRSLTAFEQDSTLVAVIEMSQSKWLVAAVIPGVARQPLKKLDANADALLKLLQRWQDEARKAGRTVRRIVCTYEAGRDGFWLARWLQARAIETYVVHAASIAVSREHRRAKTDRIDTELLMRSFLGWLRGEKRHCSMVAIPTMAEEDARRPSRERESLVGEQTRIVNRIKAVLALFGIGGFNPRLRKAAQKLETLHTTEGTPLPENAHAELRRDLERLRLVHDQIHVIESERLRRLALAPAAATGPHAMVRLIARVFAVGIETADMLVNEALARKLRDRRAVARYAGLTGAPDESGKRRREKGLARAGNGRVRRGMIQLAWRFLIFQKDSPLVRWFRERTADGRSTSRKTMIVALARKLLIALWRLVTTGEMTEGLKLRPAGT

SEQ ID NO: 412670 - protein, 456 aa, unidentified
MSKQSKSTMPAVHAKPTQRKHAAGIDIGATSIYVAVPVDRDPQPVRSFQTFTEDLHRLADWLQRCRIKTVAMESTGVFLVPLFQILEQRGFEVCLVNARHVKNVPGRKTDVADCQWLQYLHSVGLLQASFRPAQQVCALRSLLRHRDSLVQTASTYAQRIQKALDQMNLQLHHVISDITGVSGVTILDAIVDGERDPLKLANLRDYRIKATTETVAKSLVGDYRPEHLFTLRQSLEAWRYHRKLIAECDDEIQRHLVQFASKADPKQNPLPRPRKVSSSKVYSSAPDYDLRTEHYRILGVDLTEVPGINTLLVHTLLAEVGPDLSKFRSAAAFASWLGLCPDNRISGGKILSVRTRHVQNRAALALRIAAHTLHHNQSVLGHYYRRMRAKLGAPKAITATAHKLARILYHLLTTGQPYQESIFEERETQHQQRTLFSLHARARALGYQLIPLAPTT

SEQ ID NO: 412671 - protein, 386 aa, unidentified
MQKLNDLSRSPSPLDPDGTLIAVIELSLSSWLVAGIVPGVERQPLKKLAVDESALLKLLHRWREEAAKAGHRIKRIAVAFEAGRDGFWLARWLRARDIEAHVIHASSVAVSREHRRAKTDRLDTELLKRSFLGWLRGERDHCKMVAIPTTKDEDAKRPSREHESLVGEQSRIVNRMKAALIRLGIRGFNPKLKKAAGRLEDLRTPEDEPIPPNTLAELRRDMERRRLVSDQIRQIENVRLEHLKQAPSDGPHAMVRLLARVIGVGIETADMLVQEVLARNMRDRRALARYAGLTGSPDESGTKRREKGLARSGNARVRRGMIQLAWRFLIFQKNSTLAQWFRARTENARGTRKLMIVALARKLLIALWRLVREGVVPDGVVLRPAQ

SEQ ID NO: 412672 - protein, 386 aa, unidentified
MQKLNDLSRCLTPLEPDSTLIAVIEMSLSSWLVAGIVPGVERQPLKKLAVDESVLLKLLHRWREEAEKAGYMIKRIAVAFEAGRDGFWLARWLRARDIEVHVIHTSSVAVSREHRRAKTDRLDTELLKRAFLGWLRGERDHCKMVAIPTIKDEDGKRPNRERESLVGEQSRIINRMKATLVRLGIRGFNPKLKKAAERLEGLRTPEGEPIPPNTLSELRRDMERRRLVRNQIRQIESARRDRLEHAPGEAAHAMVRLLARVMGIGIETADMLVQEVLLRNLRDRRAVARYAGLTGSPDESGKKRREKGLARSGNPRVRRGMIQLAWRFLLFQKDSALAQWFRVRTENARGTRKTMIVALARKLLIALWRLVREGVVPDGVILRPAQ

SEQ ID NO: 412673 - protein, 334 aa, unidentified
MDNIALIGIDLGKNSFHIHCQDRRGKAVYRKKFTRPKLIEFLATCPATTIAMEACGGSHFMARKLEELGHSPKLISPQFVRPFVKSNKNDFVDAEAICEAASRPSMRFVQPRTESQQAMRALHRVRESLVQDKVKTTNQMHAFLLEFGISVPRGAAVISRLSTILEDNSLPLYLSQLLLKLQQHYHYLVEQIKDLESQLKRKLDEDEVGQRLLSIPCVGTLTASTISTEIGDGKQYASSRDFAAATGLVPRQYSTGGRTTLLGISKRGNKKIRTLLVQCARVFIQKLEHQSGKLADWVRDLLCRKSNFVVTCALANKLARIAWALTARQQTYVA

SEQ ID NO: 412674 - protein, 466 aa, unidentified
MKPFYMGIDVSKGYADFMIIDAQKKPVIQGFQLDDTFVGHQALYNIVGRFLSKHSDSMLFVGMESTGGYENNWYNSLVAFQGSLGIQTARLNPLGVKRNSQADLKKNTTDKISAQNIAEYLVAHPEKVTYQQQDQLVGLRKQWGFIQTLTKQRTQFLNQFKGLLYTSNPELLRYCQTETPAWILKLVVKYPSAAKLKRAKVKTVAKIPYLPKTKAQQVVADAKRSVASATDMATEQLVVATAQQIIHLNKTIDGQTRRMIEACAVPEVELLKTFSGINDKSAIGLIIEIQTVERFENAKKLASFFGVHPVYKISGDGVGGIKMSKQGRKEPRHILYMVTLSALNCNPLIKKIYEKHQKNGKHNMAAMGICMHKILRIIYGMLKHNKPFDPRIDIANRRRGMQARKASPKRNPSRRFQAYDTKAPVSRRQKKKRLERDRSHSVPDTKSGITAPVPVGDIIANILPEL

SEQ ID NO: 412675 - protein, 358 aa, unidentified
MDYFAGLDVSLETVSICIVNAAGDILLEKKIEAEPAAIIALLKHFGRPFKRIGLEAGPTSSWLYSELRCVGYPAICLECRHVKAGLSAMRNKTDRNDARGIAQLVRLGWFRQVHVKSKGAQQIRMLLVNRQQLLTKALDLENSVRGSLKVFGLRIGTVTRRTFEARVLELVAEDRSLIAITEPMLRVRRALIAGFERLDRLCRQLARRDPVCHRLMTVPGVGTVVALTYRTGIDAPERFSRSRDVGAHFGLTPRRYSSGQTDYDGHISRCGDAMVRTALYQAANVLLHHGRWSSLRSWAMRIAKRGSVKAAKVALARRLAVVMHRMWVDGTDFRWSAVRCRQATFVGRSCVRANFLRS

SEQ ID NO: 412676 - protein, 413 aa, unidentified
MDILHANCAGLDVHKKTVVATVIVSKERGKPLKATQTFGTMTSDLLALSDWLMRYEVTHAAMESTGEYWKPIYNILEDNFNVWLVNAQHIKAVPGRKTDVKDSEWIAELMRHGLIRASFVPPKGQRELRELTRMRSTFVKERATLVNRLQKVLESANIKLASVASDVNGASGRAILQAMIAGRSTPEEMAELAQGRLRGKRELLSRSLQGFVKPHHCFILSELLLQIDVLDEGIARFDEQIQVFCRPFEEAVALLDTIPGVARRTAEVIVSEIGVDMSRFPNANHLASWAGVAPGNNESAGKHLSGKTTKGDQALVSALTQAAHAASRMKNTYLSAQFHRLAGRRGKKKAILAVAHSILIIAYHMIKDKKPYKDLGSDFFDKRNVQATTRRMVRRLEQLGYKVNLEALHPISV

SEQ ID NO: 412677 - protein, 370 aa, unidentified
MLDTTTFIGLDVHARSIKAVSLDVMTGEVRCATFGYDAGAVAEWVRSVDPRARCVYESGVTGFDLQKRLSGLGVDCVVGAVSKMIKPSADRRRKNDRNDAEFLARMLSVGNVVEVWVPDDECEAARDLTRALEDARDDLSRSKQRLSKFLLRHGLAFDERTPTGRRKGNWTRAHWSWIESIRFAEGADNDVLAYYVDAVRRAAEEKARLEGLVEAEARKPRWRKRVDSLRCLKGVDTASAADLVFEAGEFSRFGNARSFAAWVGLTPSEHSSGESDRRGAITKAGNKHLRKTLVEAAWHYLTCSGRPKGLAKGQAPDRGARRHAAKGVRRLVERREALLARGVHGNKANVATARELACWVWAVGLMAEEA

SEQ ID NO: 412678 - protein, 481 aa, unidentified
MAEKLLCVGIDVSSRSLDVGCCDGSGAPIGPVQSFPNDAVGAAALCEAVVAAARAMGRGTQVMAAVESTGEYHRVAVKALRAEKRRAIQMHVLNPREVKWFRKLELKDTKTDRVDAELIARFLAKIRPQPRAPMPEGFEALQDATRTRRRCVEERTSLKNRLHRLLRTHFPGYREALGAKFCVRTLVALAACPSPQEVLRRGVTRLGELRNSDGKRIGVAFAQKLIALAKAAPARQLPVMARLSIQDAAARILQLNHFIQGMDAAIAQELERLFPDSVLASIPGLGAVSVASILAEVADIHRFPDKETFVGYCGLYPIAWESGATKLRFRMTRKGNRMLKMTLLVASAAARQYNPAIRHFYARLRARGKSKKAAGGAIARKMAEIIWAVLTTNRPWSEEIALRGIARGEEMLQTPKGAGPKQSRGERCLTGDAAGQAPVAPERPHKAASRSRTPQRNSTIRTGRSKSHPQSIRYAAGPSSP

SEQ ID NO: 412679 - protein, 344 aa, unidentified
MDTIGLDLHKRESQLCVLTEVGEIVERRIVTSRERFTAVLGGRPPARILMEASTESEWVARHLEGLGHEVVVADPNFAPMYATRRRGVKTDRRDARTLAEACRLGAYRPVHRASASQRHVRAQLAVRDALIRTRTRYVSVVKALARRDGLRLPPGNPVHTEAKLTALPLPAPLAGEIAPLRAILDPLNREIATADERLAAVAAADPVVARLRTTPGIGPVTAVAYVATLDDVTRFASAHHVAAYLGLTPREYSSGERQHRGRISKTGSPRMRALLVEAAWRVLRSDAPAAAPLRTWAERIALRRGRSVAAVALARRLAGILYALWRDNAAYRTPAPHPDVAGEA

SEQ ID NO: 412680 - protein, 345 aa, unidentified
MTVYIGVDFHPHQQTVCYCDTADGVMHWQTFEHDKRTELRAFYMQFGGEVVIGLDAGGPSQWFEAMIETMSYKLLYGDPTKIRQRARSRHKNDKRDAELLLELLIKGEFPSLWRRSAENERVLGQLRFRHRLVQQRTRVCNQLQSLSHGAGLPRQNMQTRVARKRMEQTELDKPQSIQRKHWFEMLDDLSTRIAEVEQWLTKKVAESPQARLLITQPGVGVLTALCIAHTLGDVSRFSNSRKVVAYVGLDPLEDSSGDRRRFGRVSKAGSRHLRFLLGQAGQVAVKGDPEMRQFYQQLSQRRGKSAAKVAVARKILVRSYVMLRDQIDYTEFLRRGRRSQSVRVA

SEQ ID NO: 412681 - protein, 384 aa, unidentified
MNPDHTDTPAATEYATVFVAFELSKAKWKLGVIVPGSAKMSRHTIDGGDLVALSKLLGVARTKAGRSGRPVRVLSCYEAGLDGHWLHRWLTDQGVINHVIDASSIEVNRRARRAKTDQIDLDLLMRAFLAHLRGEPRACSVVRVPSVEDEDRKRRTREREHLVKERTRHINRIKGLLHGQGIRDAMPLMPGFLSTLDQVRTGDGRPLSPRLKEEIRREHERLVLLCKQIKTIEAEQLAAHRAPAPRSVEAKVVQLAELKSIGPVIAQVLVGEVFYRRFDNRRQVGSYLGLTGTPYDSGNSRREQGISKAGNSRARTVSIELAWLWLRHQPDSELSRWFRERVGNIKGRIRRIAIVALARKLIVALWRYLETGLVPTGAVMRQSF

SEQ ID NO: 412682 - protein, 353 aa, unidentified
MEITTIGIDLAKNVFAVSGAERRGRVVVRKQLRRAQLMGFLRTLRPCVVGMEACGGAHHWARALTKLGHQVRLMSPALVAPYRKGNKHDRNDADAVLEAVSRPSMRFVAVKTIAQQDVLALHRVRARLLKQRIALSNQIRALLHERGVAARLGAAGLRAAVAAALADDHNELSAELRQVIAELLDELRQLELRIKAFDQRLARAAQGDERCLRLREVPGVGPQIATALVATVGDAREFKSGRELSAYLGLTPRQHSSGGKTVMLGISKRGDRYLRTLLIHGARSLLYRNRRLAHPRARWAARLSAARGPNVAAVALANHNARVLWALLSRGDRYRPDFQPRGFPSRPSAGAVN

SEQ ID NO: 412683 - protein, 353 aa, unidentified
MDNEKYIGMDVHQASISIAVIDAAGKLLMECVIETKAATILDFIHGVRGSLWVTFEEGTSAAWLYDLLKPLVTKVIVCDPRKNALLKAGNKNDRVDARKLSDLLRAGLITPVYHGESGIRTLRELGRSYVTVNQDLTRVMNRLKAIYRSWAIPCAGQEVYSPRHRAVWLEKLREAGVRRRAEQLYQQLDCLLGIRKETRRELMAESRKHPASALLQQIPRLGPIRVALLIALIQTPHRFRTKRQLWNYCGLGLQTRSSGEYRYKEGQLQHTRKPPALRGLNVNHNHELKNIFKSAATSASKDPLGEFYQNLLARGMEPPMARLTLARKIAAIALKVWKKGERFDPAKLKQQAA

SEQ ID NO: 412684 - protein, 378 aa, unidentified
MYRILKIGMDVHTTNYTLCVAEPILGAEESILAQIQIEPDYRLVIQFINCLKERLGVTNKECDILCGYEAGCLGYSLYHQLTNAGVKCVILAPTTMMSEKGKRIKTDKRDARLIAKCLCYGGYHAVYVPTADDNAIKEYIRMRDDHKIALKQKKQQMNTLCIRYGYIYEGNNWTQAHLQWMRKLELPTLIRETLNEYLATYDELTAKVERFDKRIQELANQPQYQEKVKKLECFLGIKPHTALSLIVETGDFARFGKGNIYAAYLGLAPGEHSSSDDCNKLGITKAGNSHLRRLLIEASSGICKGVIGQKSKALKARQMGNPAEVIAYADKANIRLRRKYYKLIHRGKKRNVAVTAVARELACFVWGMMTDDIYGNAA

SEQ ID NO: 412685 - protein, 369 aa, unidentified
MENNNTVVGLDVHKETITIAVLRPDKDRPEPSITFENQPSTIEKKVKELNRRHAPLEFVYEAGPGGFALYRQLTQMGHRCAVIAPAWMPMKPGDRVKTDRKDAEKLSWYWRMKDLKEVRVPTPEEESVRDMLRVREDVLANQLRARQRLLKFLLRQGRVYRGSKNWTQAHREWLRQQKFELEYLTKTYEANYRILAEIDAHLADLDREVESLAENEKHRTAVSYLKCLKGVNTLTAMTLLAESGDFRRFKNARSYMRYTGMVSWEDSSGSRVYRGGITKSGNAHIRRVLVQGSWTYQLRSLGSPTLANRRKGCPLEVIHLARRADERLHLKFRRMIGRNKRSQVAVVAIARELAGFVWAIGQMIPSDQQ

SEQ ID NO: 412686 - protein, 418 aa, unidentified
MLYVGDDWAENHHDVEIQDATGRRLGKARLPEGIAGVARLHELIAEHLPAATGAGSEAVAEPEQVLIGIETDRGPWVQALVAAGYRVYPINPRQVARFRERHSNAGAKSDARDAHTLADMVRTDGHQLRAIAGDSPAATGVKILARAHQTLVWERTRHQLRLRSGLREYFPAALVAFDDLVARDALELLGKAPDPTAAARLTRAQIVAALRRARRRDVDAKAAAIAAALRTPALTQPAAVVAAFAAVARSLTAVISAVSGEIDRLAREMAAAFDRHPDAQIYRSQPGIAAVVGPRVLGEFGDDPGRYADARARKNFAGTSPITRQSGKKQTVHARYVHNARLVDALSRQAQAALSGSAGARAYYDRQRARGLGHQAALRQLANRLVGILHGCLRARTLYDEATAWAHTARPGADPVAA

SEQ ID NO: 412687 - protein, 370 aa, unidentified
MKKFIRFVGLDVHKDSISVALAEDGRGGEVRYVGTIGATTAALGKLVARLSEDGVELRFCYEAGPCGYGVYRHLTALGVDCVVVAPSLIPRKPGDRVKTNRRDAEMLAVAHRAGTLTAVWVPDADHEAMRDLVRAREAAVRDVRKARQRLGGFLLRHDRTHGRKAWTQAHRRWLAGQAFAHPAQQIAFQESVDTVTTGEARRDRLMAEIEALVPGWSMAPVVAALQAMRGMGLITAVTLITEVGDLRRFEKPPQLMAYLGLVPSENSTGDHTRRGAITKTGNGRARRALIEAAWTYRWPARVSRGLHDRIEGQPEAVRCIAWDGQRRLCARYRRLGRAGKKPQVVATAIARELLGFAWAIAQHVPPRTAA

SEQ ID NO: 412688 - protein, 344 aa, unidentified
MSKVIMIGLDIAKHVFHVHGADERGRAMFSKRISRGKLLDFFAAQQSCTVALEACGGAHHWARQLTQLGHEVRLIPPAYVKPFVKRQKSDSIDAEAICEAAQRPSMRFVAVKSEQQQAAGLVFRTRDLLVRQRTQLINAIRGHLTEYGWIAPKGPSHVAMLADLIEEEEMVSSLPEAAHAMFRLMLNLLAGLNGKIADLDKEIARRAHEDEVSRRLMTIPGIGPISATAIAALAPPAETFAKGRDFAAWLGLTPLQRSTGGKQKLGATSKMGERTLRRLLIIGSSAVVKQASKRGAPKGSWLAQMLARKPRMLVTVALANKMARIVWALLLKQENYRAPVAAKA

SEQ ID NO: 412689 - protein, 369 aa, unidentified
MSTSVIYVGLDVHKDSIAIAVAREGQEAAENWKTIPYDGVRLRKALKMLGKDGTLLKVCYEAGPTGFGLCRHLRKAGIDCVVVAPSLVPGKPGDRVKTDRRDARRLAHYLRSGDLTAVYVPDEAQEAIRDLERARDDAKCAERVARHQLSKFLLRHDRHWEHTTWTRRHRQWIRGQKFDYPAQQRVLEDYLKAVEDLAERVERLTTQMEELVQDTVLAPLVQALQAFRGISMVSAVTIAAEVGELRRFGTAQQFMSYVGLIPSEDSTGQRRRQGPITRCGNGHLRRILVEAAWHYRHIPLMSEELRRRNRGVATGVQRIAWEAQKRLHKRMYHLIHAGKSANKAVTALARELAGFIWAVAQEETLLEAK

SEQ ID NO: 412690 - protein, 341 aa, unidentified
MKEYIGLDVSLKETAVSIRRDGKRVWRGKCASDPKIIAELVRKRAPAVERIVFETGPLSVWFYHALILEGLPAICIDARHAAGALGMAPNKTDANDADGLAQLAEIGYYKAVRVKGFDSMLARTLVTVRTRLVRITVELSNQIRGIMKTFGLVVPAGQGNVFDQNVRHLVDDQDELAKIILPLLAAWRNMRERTAELSRKLVADARQSEACQILMSIPGVGTITATSFVAAIEDPDNFRKSRSVAAWLGLTTRRYQSGEIDYDGHISRRGDKHLRGLLYEAAVVILTRSFAQSGLRIWGLKLKERIGFKRAATALARKLAVTMHAMLKSGELFNPSIGAEA

SEQ ID NO: 412691 - protein, 406 aa, unidentified
MLFIGDDWAEDHHDVEVQDEQGRVLRRERLPEGITGIRGFGELVGRFVDDDTEFSDVLVCIETDRGPWVQALLAAGYRIFGVDPKQAARHREILGNSGAKSDRGDAHALADMVRTRRHQLREVAADSEVAEAVKVVARVHQTLIWERTRHMLRLRATLRDYFPAALEAYTPFGLTCTPVLTLLVKAPTPEAAAKLTHRQIAVTLKRRRDIDTKAAAIQQVLRAEHLGQPAAVTAAYAATVRSLVAILTTLNSEIANLEKDVKAHFGQHPDAEILLSQPGLGVVLGARVLAEFGDAPDRYVSAKARKNYAGTSPVTRASGKTRIVSARHVHNDRLVDALHMQATCAILHDKHVRAYYDQLRAREIGHNAALRQVGNRLVGILHGCLKTRTVYDQATAWSHREVGVAA

SEQ ID NO: 412692 - protein, 349 aa, unidentified
MVEHKQVATFVGIDAHFENCTIYAIDANERVLLQTDIGTSQRKLRAAFRPLPGPVWAMVEASQITAFVKRCLTPVVDRVIACETRHNRWISHSDSKSDALDAQRLATLLRMRYYKEVHVPTPDRQELRELMAAYQKVVQDLTRAKCRLRAVYGSQGLIRAGKDMYKPKERATWLGKVRSANTRIVLETHYDLLDAAEAAQEKLAKRLRQKLADVPEYDLLHTIPGVGDIVAAIFVVVIDRPERFDNKHKLWSYAGLGVRQHSSGASGKVKTGGAHNGNRLLKYAAMVAAHAAIKGDNRFARHYRQMLDRQLNPGVAKKTIARGILAAAWSMWKSGELYRDDIQRPETEN

SEQ ID NO: 412693 - protein, 362 aa, unidentified
MLQQRNELDFKGQNIYVGIDVHLKSWTVTILTETQPHKTFTQPPKPEVLASYLEKYFPNGNFHSAYEAGFSGFWAHYRLMSLGINNIVINPADVPTTQKEQYHKNDPVDSRKIAKSLRSGLLTPIHILGTETMEDRSLVRTRSTLVKDMTRFKVRIKSFLFFFGINYPEYFENTRTHWSRNFMQWLKEIKLETWSGRAALDMLIQEAENQRQLLLEIDKKIRVLCRSDRYKHNVELLQTVPGIGITNAVVFITQIENVERFRTIDDLASYVGLVPTSHSSGEKENKGEMTFRGQKILKSMLVESAWVAVRIDTALSLSYNTYIKRMQPNKAIIRIARKLLNRMYYTLKNKRPYQMGIVGQNL

SEQ ID NO: 412694 - protein, 348 aa, unidentified
MLADELDYVLGVDTHRDEHVIAVVTAPTGAVVAGASAPTNVRGYRELVRVAQQHAPGRRAWAIEGTGSFGAGLCRYLQARGETVLEISRIPRGERRLRGKDDALDATRSARAALASDTLALPRRGERREALRLLLVARRSAVDVRREALTQLRAVIVTSAEPLRQELRRLPEGKLLDRCSRFRQTSKASPGELATRLVLRSLARRIQAATEEAKQLEREILTHVRALAPVLLDEPGVGPIVAAQLIVAWSHPGRLRSEACFARLAGVAPVPASSGQTTRHRLSRGGDRQLNRALHTIVLHRRQHDPATRNYITRRLAEGKSRRDATRLLKRYLARHLYRLLQQEPAMA

SEQ ID NO: 412695 - protein, 338 aa, unidentified
MEWTVAIGVDTHKHMHVAVALDRFGTQLGSREVATTESGYRSLLAWALELGLPAFAVEGSGSYGAGLVRFLQLAGVAIWECERPRRRERRRGKSDLIDAALAARRLLSGDGLCLPRGGGRREELRLLMIERRSAIQARTAALNQLSAIVVTAPEPLRQRLGRLSGERLAGAAARLRPGDDVRTAVVHRLGRRAERLSHEVTEVDRRLLEILTEVAPALLAECGVGPVCAAQLLVSSGDPNRMASEASFAALAGTSPLDASSGQQRRHRLNRGGDRQLNRALHVIALARIHHHAETTAYYQRLLATGKTAREARRCVKRALARYFYRRLREIPTPALTT

SEQ ID NO: 412696 - protein, 341 aa, unidentified
MNIKRVGIDLAKQVFQIHGVDGQEKVVLRKQLRRAQLLDYFNKLPPCLIGMEACGGAHYWARELQKLGHTVKLMAPQFVKPYVKSNKNDANDAEAICEAVGRPTMRFVAIKTIAQQDIQAMHRIRSELVQQRTAKVNQIRGLLAEYGIVVGRRVDVLRNALPQLLEDAENGLTADFRVLLDGLKQDLVTLDERVDDLDKKIKTLANSNPAAKRLQQIPGIGPIIATALICAIGDGKQFKRGRDMAAWLGLTPRQHSSGGKDRLLGISKRGDAYLRTLLIHGARSALKVAGKKDDPRSRWLQNLCSRRNKNIAAVALANKNARIAWALLSKETDYLPEGEPA

SEQ ID NO: 412697 - protein, 312 aa, unidentified
MSSIAAAGGVTYLGLDVHRDTISVAVLRPRRDAAEVDRIANDEPSIRRLVAQFPDRRRLRACYEAGPTGYELARLLDRLEVGCQVIAPTLIPKAPGDKVKTDRRDCRRLARLYRAGELTPIRVLTVAEEAVRDLCRARANMLADQSRARLRLGGFLLRHGRIWRDGSTWTYGHERWLLAQHFDDPALSTTYAHYRATLSARDAALEAIEADLATWYAKAPFADAVARLSAYRGVTRLGALTLASEVADWRRFASAPQFMGFCGLVPSEYSSGSSTWRGRITKCGGGHLRAQLVESAWAYQHRPGVAPILGTH

SEQ ID NO: 412698 - protein, 342 aa, unidentified
MDITTAGLDLAKNIFQVHGINAAGDVIALRRLRRSQLREFFSDLKPCLIGMEACGTAHFWARELVALGHEVKIMPPSYVKAYVRRGKNDAVDAEAICEAVTRPNMRFVPIKSEDQQAALMLHKTRELLVRQQNMLINALRSHMAELGMIAPQGRGKIKDIIAVIEDAEDESIPALAKVALRPLVAQLRATEENTSVLSDEIMIWHRNNEDSRRLATIPGIGFLTASAIVATVPDPSFFRSAREFAAWLGLVPRQNSSGGKTRLGRISKQGNRYIRRLLVTGATAMLRYVRTKTTPGADWVNSLLERRPPRLVTVAMANKSARIAWALLMKRETYRVPDVMTS

SEQ ID NO: 412699 - protein, 398 aa, unidentified
MTESSDYESVQVFIGVDVGKDTHHAVAINRSGKRLFDKALPNDENKLRSLISDLKQHGQILLVVDQPATIGALPVAVARSEGVLVGYLPGLAMRRIADLHAGEAKTDARDAAIIAEAARTLPHALRTLKLADEQIAELSMLCGFDDDLAAQTTQASNRIRGLLTQIHPALERVLGPRLDHPAVLDLLQRYPSPEKLASLGEKKLAAQLCKLAPRLGKRLAADIAQALAEQTVVVPGTNAAAVVLPRLALQLITLRKQRDEVALAVEQRVLAHPLYPVLTSMPGVGVRTAARLLTEVAYRAFASVAHLAAYAGLAPVTRRSGSSIRGEHPSRRGNKALKRALFLSAFAALRDPLSRAYYTRKMSQGKRHNQALIALARRRCDVLFAMMRDGTFYTPQAS

SEQ ID NO: 412700 - protein, 373 aa, unidentified
MTTPKEVFVGIDVAKLRNAVAIADAGRDGEIRYLGEFDAAPESMKRLITRLAAKYERMHFCYEAGPTGYGLHRLITELGHSCMVVAPSLIPRKASDRIKTNRRDATGLARLLRAGELTPVWVPDPAHEAMRNLIRSRTTAVETIRAHKQQVSAFLLRHSRIFPRHKQWGARYRRWLQEQSFEHPADQIVLQESIEAVRLAEERLRRIEKAIAEFLPDWRLAPIVEALQALRGVDLVVAVSFVVEIGDIRRFTSPGQLMGFLGLVPSERSTGETVRRGSITKMGNARIRQLLVESAWTYRFPPRVGVKKQRKLDQVSPKIREIAWKAQSRLSARYRAFVARGKKSTVACTAIARELVGFMWAIAMEVQPLSPPA

SEQ ID NO: 412701 - protein, 359 aa, unidentified
MVCYPLTSENYTKEVATMYYIGLDVADKSSYVYVLNARGLRVENREIPTDKDSYRQYFGSWAKKRATVAVEAGGNSRWIHDVLTRLGLGVYIVNPNKVKLIAKSKKKTDKIDASFLAKLLRIDELPERVHVAEGESRALRDLLRSRYHLIKSTTGLMNHLRGMLRQEGIKLKARAFHDGSVFVGLQENRSVPAHLRPILESYERSIAELKKQRKELDEVIADYRNKDIALLKSIPGVGEIASKTIYAAVSTIKRFKRAKQLTSYCGLVPSVRSSGETATYGHITREGRSEVRHVAVQSAHAVLRSRNAESKPLRCWHERLAKRRGFKTAIVALARKLTEIIFYVLRDRKPFDARLLSAS

SEQ ID NO: 412702 - protein, 485 aa, unidentified
MGDRRLVGVDLGIASAHTVRVLDGQGNVVAKRRAWPTVESLSDIERAALAGAVEGTRLEVVMEPTGPAWLPIAVFFTSRGHVVHRVSSAKSHDLRKFLSRHTKTNGIDADTLARIPLFDPSGVQPLVLATEERAGLDRRVRATDRLTRAGADHKRRIKDLTRQVMPMTPLTGAITRSDLAVLERYADPNALVRLGAKRVAKIIAKASANKHGTDRAVEWIAAATSALELYRDHPAVAFVAIAEEIATEVRLLRAVEAERARHAAAREDRYLVVDPDQLARSIPGFSTIGGPSLVACMGDPARFAKGKQFRSFTGLTPKASETGNTDRKGQPMSKAGSSLLRTTLIRAADIGRRHDPQLARIYYIQMVERGKTHLGALCVVAANLAERAWTVMNRNSPYIVCDVDGTPVTNEQAKAIIADCWTVPAEVRARRRSAKATPKGKAPQAISTRQPTPYANGADTRDDLPRSTSSTPRPHQIKTLAESPA

SEQ ID NO: 412703 - protein, 356 aa, unidentified
MIAMKYYTSTTQFNCGIDLHARQMYVCVMDRTGKKLVHTNIRNNDFIFFLKLVAPYRHDLTVCAECMFGWYWLADACQAANIHFVLAHALYLKAIHGGKNKNDRIDSEKICHLLRTNLIPPGYVYPAAKRPLRALLRQRLLYVWNRSELLSRIQSHQLAYNRPTTRQTLYNREPWEKHLLASEPDPVRQLALQNDLALIGHYDTQLASLEKELLHLTKQTASRDFTLLKTTPGIGDYLGLTILHEIGDIARFPTVKDFLSYCRLVKGTVASAGKIKGLRGAKLGNPYLRWALGEAAIIAKRDALLGPLAQRLEARLANKFKANTVLAIKLARAVYFMLKTKTVFDPERLVAALSKN

SEQ ID NO: 412704 - protein, 364 aa, unidentified
MRKKNTSTSSISAGHTMGIDLGDRFSHVHVVDAVGGGVFDGRVPMSPASVESFLKSLPRLRVAMEAGTHSSWVARIAAATGHEVIVANPRKVRLIGQNTRKSDRADAERLARLARMDPALLGPITHRDVQAQRDLAVVRSRDALVQSRTMLVNRVRGTLKSFGLHPAKCSTANFAKKLAADVPDELKPAILPLLEILFELNLRIACFDREVERLSEEQYPVVQGLREIAGVGPITALAYVLTVDNPRRFAKSRDVAAYLGLVPRQRQSGERDPQMHITKTGSTLMRRLLVSAAHYIIGPFGKDCDLRRFGLALAARGGAAGKKRAIVAVARKLAVVMHRLWSSGEVYDPNRNRRGETRNQPAAA

SEQ ID NO: 412705 - protein, 393 aa, unidentified
MFNPLKVRLMRAVCGLDVHKDSVFLCILNEDGELIERVFGVLTFQLQQMRDLLLTHHVDEVSMESTSVYWIPIWRILAPHFHLRLVNPYFIKQLPGHKSDVADAQWIAECTMKNLVSSSFVPPEDIQQLRQYDRRIFDLDEEIVRKLSKLDAVMQRCNIRLSNYVSNVDCKSYKDVVRKISEGVTDPKVLIEEIHGRIIKHHGRETILASLTGVISQAETDVLRQLREELDMAEKHKQECLEKMLEICQEKYPDELRRLQTIPGVKERTATSLIAEIGTDMSKFETANHLAAWSGLRPRNDESNKKFKSRRITHGNVYLRKNIIQCAWAASRTKDCFFSRFSYHQTQVRKKNKMKVIVAVARKLLVATWHVINDRTDYVDFQKQDRQASVTNG

SEQ ID NO: 412706 - protein, 349 aa, unidentified
MAMLADTADAVIGVDTHTDTHTACLLDRLGRQLAVITIPADDRGCRMLLAWAQRNAPGPRLAWSVEGTRSHGLGLTRYLHAHGQLVAEAGRPARASRRPGGKSDPADAARAARDALSAQRLAQPRSDGSREALRILLTARAQATTARTAAVNTLKALILGAPDDLRRQLRGLSTPRQASRCRSLRVHASQPIAERVLRAELRRLATHIGGWDKELRANKAQLRQLVAQAMPVLLEQPGVGPMSAAQLLVSWSHKGRCRSEAAFAALAGVSPLEASSGRITRHRLNRFGDRQLNRALHVIINWRMLHHTKTQDYTTQRRAGQKTDPEIRRCLKRYAARQLFRLMETAATT

SEQ ID NO: 412707 - protein, 331 aa, unidentified
MREKLRFLGLDVHAETIAVAVAEPDGEVRSLGTIANREDSIRMLIRKVGPPEHLRACYEAGPTGFVLYWQLAQLSVECTVVAPSLVSKKPGDRVKTDRRDALKLARSHRSGDLTAVWVPDEASEALRDLVRQREAAKQDQLRARHRLTKFLLRTGQRPPLGLKAWTERYMRWLTQVRYTQPAQEVTLRDCLNEFEHMSARVKRLEEAILEVVKLAPQPMQEVIRGLQALRGVAHISAVTIASELGNISSRFESARKLMGYCGVFPSEDSSGKRIRRGGITKAGNAHLRRIVVESAWCYRHWPRVGEKLRKRLQGGSGGDHRDCVEGAESPA

SEQ ID NO: 412708 - protein, 386 aa, unidentified
MQKLNDLSRSLTPLKPDGTLIAVIEMSLSSWLVAGIVPGVERQPSKKLEVDENALLKLLNRWREEARKAGHGIERIAVAFEAGRDGFWLARWLRARDIEAHVIHASSIAVSREHRRAKTDRLDTELLKRSFLGWLRGERDHCKMVAIPTIKDEDAKRPTRERESLIGEQSRIVNRMKAALIRLGIRGFNPKLKKAADRLDGLRPPEGEPIPPNTLAELRRDMARRRLVSDQIRQIEDARLERLKQTPSDGPHAMVRLLARVIGVGVETADMLVQEVLSRSMRDRRAIARYAGLTSSPDESGRKRREKGLTRSGNARVRRGMIELAWRFLRFQKDSVLAQWFRTRTENARGTRKTMIVALARKLLIDLWRLVREGVVPDGVVLRPAS

SEQ ID NO: 412709 - protein, 341 aa, unidentified
MSEAFIIGIDLAKRVFQIHGADAAGKVLYRRKLSRPQFNKFLNEHPSCIFAMEACASAHHWGREALAAGHEVRLVPARYVKPFVKRHKSDVVDAEAITEAAMRPSMRFVPVKAPEQQAQAMLFRTRELFVRQRTQLINSLRGYLAEFGIVLRLRIRNADILKREVEEQAHKLPDEAKRLAERLLAQIETISAEVEGLDHSIKMHAKTSEETRLMQTMPGVGPMSAIAISAFCPPAKNFRTGRDFAAWLGLVPRQHSTGGKERLGRITKMGQKDVRRLLIIGAMSVINSIERWKRCAEPWLARMLETRPRMVVAVALANRMARRLWAMLMTGQIYRIRGAVA

SEQ ID NO: 412710 - protein, 352 aa, unidentified
MITLGVDAHKAVHVAIAVDESGRELGEWRGPNAVDAWASLARWAAAFGPECWWGIEGAWGNGRGLAQYLVAQSFTVFEISPHWTTRLRRNNRRQGKSDRLDARAVARCVREEAPKLPLVHAEDDSVVLDLLSTEREAAIAEATRLRNQIHALLSQVDPEYERHLPSLTSASGLRALVSYSARDGTLIQQQRAACIRRLAERLQLATAQADDVAEQIRLLAAARYEPLTRLCGVNLLTAGTLAGMLGPGCRFESEAQLAAYAGTSPLEASSSGLTRHRLNRGGNRRLNSVIYRIALTQAYFHPGARAYIERRVSEGKTRREAHRCLRRYIARAIWRLWQECLQQPTAKNTEAA

SEQ ID NO: 412711 - protein, 327 aa, unidentified
MINQSVGIDISKATFDAAIYNGMGYIVAEFTNDIKGFHDLTRWLKTHCDNTTIHACLEATGRYGDALAHYLHQQQIPVSVVNPARIKAYRNSQLRRNKTDREDARAIAHFCATQTPRLWTPPPPHIQQLQALTRRLNALKQSRTAEKNRLKSGEMPDIVRDSLVDHIAHLDKEIDALHAHIHQMIDQHPDLKEQKELLLTIPGIGDITAAEFISEVPDVHQFDSASQLAAFAGLTPSHRQSGTSLRTKGRMSKMGNKRLRNMFYMPATSAKRYNPIVKRLADRLTERGKSPRTIRGAVMRQLLHIAYGVLKHRRPFDPNYSNLQSAS

SEQ ID NO: 412712 - protein, 438 aa, unidentified
MSNKVIFNLDELFISVGIDVGADFSWMSIALPNQQFVGKPYKILHNSIDSLTTAVSKIKEAEELYSLESRIFLESTGIYHYPLFCYLRDKGFNCSVINPIITKNSTNINIRKVHNDRFDSKKAALVGLKPDLKVSLMPSDLALNCRNLCREYYDLIDNRSAYVNKLQGELRIAFPQYLGIFSKVTINTSLTLLETYTSPSAFLKADKQEIIDIIKSTARFGLTYAQNKYNAIIQAATDANQFGYIIDSNIKRIRLYISFIRKYDEEINSILESLHELVDANEDSDFVKQIHLIETFKGAGFLSAVSIMGEIGDFSAFSKPKQLFAYFGLDPAVKQSGKFEGTKVQMSKRGSAIARRVIHTLTLQSISISRNREAKNPVLREYYLKKCDSKPKLVAMGAVSHKVCNMIFAILRDNKPFKIIAPQEHIKQYNSAKCDIAA

SEQ ID NO: 412713 - protein, 355 aa, unidentified
MESVKYIGLDVHQSTISVAALNGEGKLLMQSVIATKATAVLDLLKGLRGVLHVTFEEGTYSAWLYDVVVRHVARVVVCNPRKNALLKSGNKSDQIDARKLAELLRAGMLSPVYHGEQSTRTLQQLVASYTALTEDTGRAMRRIKALYRSQAIGCAGKKPFGTRHRGEWLARLTDSGQRRRAQWLYQELDAVQVLRREARQAVMEECHKNQAAKLLRSMPFLGPLRAAVLIARVQTPHRFRTKRQFWTYCGLGLETRSSADYVEKDGQIMRRRRPVYIRGLNWNYSHELKNVFKSAATTASAMDGPFRVFYESRVNNGMLPAMARLTLARKMAAIALILWKKGESFAAEHLKRQAA

SEQ ID NO: 412714 - protein, 427 aa, unidentified
MNCNTQNEKIEMLTDEWLIVGIDVGSEKHFARMFNNRKVELSRKALGFENDEKGFTQLEGWISNQLRTSGKKFIMCAMEPTGHYWYNLAAYLQAHGMVVVHVSPSHVKKSKELDDNNPNKNDRKDPKTIAGLVTEGRYMIPYMPNGIYASIRELNNMRMRATESLVVVKNRLARWFSIYFPEFTAVFGDLKAKSSRLLLAEAPLPEDVINLGAEGVNRIFRNAKLRSVGMKKALQIVEAAEHSIGRKENPWAAREEISELLEDLDRYLAREEKLMARLHEEVMKVPNVERILEIKGIGIRTVSGFIAEVGDISRFEDAKSIQKLSGYAIVADESGKHNGQSSISYRGRKILRYFLFHAAISVIGKNPEFAAIHEYYTTRKKNPLKKMQSVVAVACKLIRVFYTILTKGIRYDGQKMLNDIVRPEAIA

SEQ ID NO: 412715 - protein, 345 aa, unidentified
MKYYVGLDVAMKETFMCVVDEEGRRVFESKATSAPQAIYAELAKSGVSLEKIGLESGSLSKFLTKGLQDLGLRAICIDARKMAAILAVTINKTDKNDARGIADAMRCNHYKEVNLRNCEDNAMGIFLNSRTTLVESRGRLKNTVRGFLKTYGLHLGEVSHDKFSKTVREALCELPEETICGIEGLLKSYDLINEQIKKMDKKLNGLCRKDEEVQRLMTIPGVGMVVAMSYKTDIGDPTRFKKSESVGAYYGMTPRQYSSGETVKMGRISKCGSRDIRTLLTEAAIVMMTRSKAWSSLKVWGLKLAKKHGLKKAAIAVGRKLAVIMHQMLMKGESFRFSNNTRATA

SEQ ID NO: 412716 - protein, 343 aa, unidentified
MTIDILGIDIAKNTFQLHGADWTGKVVLKKRLPRPKLSAYVANLPVCTIVMESCGGANYWARVFQRSGHTVKLISPQFVKPFVKTNKNDANDAQAIVEAASRPSMHFVPIKQVEQQDIQSIHRIRTRIVKNRTALINEIRGLCMEYGVVLTAGAANIKRSLIAVIADGDNELTVLSREGMQDLYDELIETEGRLRLLNSKIRRLCRDNEQCRRVLKVPGVGELTATAMVAAVPNPQEFRNGRHMAAWLGLVPRQSSSGDKRVLLGISKRGDRYLRTLLIHGARAVLSHSKNSDTHYGHWVSRKRATLSHNKAAVALANKNARIIWSILNTGEEFDAGLRAIAA

SEQ ID NO: 412717 - protein, 338 aa, unidentified
MDKSAECGIDVAGKELVAVLRRNGLCEAERRFLNTPAGHKELKRWLVRAAHRVRVCLESTGLYGLDVALYLQADSRLEVMVANPRAVKDFAKALLQRSKSDPLDAWVLAEYAGRMPFRAWQPPSSVALALSALARRIHALTETATREKNRLHALSVTDTSLKILVTELKRSLRWIERSQAKLTQAARKLIASDARLERRFQLLLSLPGVGETSALQLLGELALIPPDADVRQWVAYAGLDPRECSSGSSVRKRPRISKVGNRHLRRALFMPALSAARHNRAFAAYYQLLQQRGKCKMVALVAVMRKLLHAAFGLFKHDALFDASRVFRLPLASAGAAA

SEQ ID NO: 412718 - protein, 335 aa, unidentified
MRHIGLDVHRDFCEVAISEAGDVRSPGPIDTTPEVLELFARSLDRKDEVALEVTGNAWEIARIIEPHVKRVVVVSPSDTGIRQARAKTDRLDARTLAKLLATGSLDALWMPDERTRALRRRLSRRSQLVRARTRAKNEVHAVLVRRLIAKPKVSDLFGVAGRRWLKRLELPVEERETLDGCLRQIEFLDQEIAEVERVIALDALARGDVKRLMSVPGVNVITATTFLAAIGKANRFPSQRKLVGYLGLDPRVRQSGSVPATHGRISRQGSAPARHALVEASWSAVRQPGPLRAFYERLRVRRGHQVAIVAAARKLACLSGACSHVKRTTPSRSPR

SEQ ID NO: 412719 - protein, 370 aa, unidentified
MTYITSIGLDVHARSVSACAFDPFTGEVAQRRFGTDAGEIAEWIPGFESPKAVYESGPTGFALCRELRAPGVDCVVGAVSKMQRPSAEKRRKNDRRDAAFLARLLATRNIAEVWVPPVEAEAARDLSRALDDAREDLQRARRRLSKFPLRRGPVFDETDALGRRRGAWTRAFWRWAESCRPSDPAAAAAFDRYVACVRCAESDKRALEKRVLAEARADRWRGAVEALSCIKGIDAVTAFCLATEAGCSSGFPTAGAYASWLGLAPSEHSSGEKEAKGGITKTGNSASRRALVEAAWHFKSCSPKPKAPPAGSAVPAAVKRRCDDAAARLRRRHESLGAAGKRPCVANVAVARELACWVWEVGRRAEGALA

SEQ ID NO: 412720 - protein, 354 aa, unidentified
MLAELVDHVIGVDPDRDWITVAALDSRTSGVLATDRFAATRDGYRDAMAWADAHTVESERAWVIEGTASYGRGLTMALQARDELVIEFDRPMRKATKDGAKSDALDAIRAAREALGRDKLNQPRTHHGIREAIRVHTVARAGAVRARTAAVNELKAFIVTADEQLRSELRGLRTTNIVDRCSRFRDSTKRPVDERCTRNAMRALARRVRHLEAEIAEHDAALKTLIDRAAPQLIAERGIGYVTAAAFYLAWSHPGRCHSEAAFARLGGTAPVEVTSGQSQDRHRLNRGGDRQLNRALYFVAVTRQRCCPATQEYLARRASEGKTEREGIRCLKRFIARRVWRLLEHPEIHLDTT

SEQ ID NO: 412721 - protein, 367 aa, unidentified
MKKISTVMAKKVEKNASQKLTIGLDLGDRFSWYCVLNEAGEVVLEQKVATTPKAMKEVFGGMPRSRMALETGTHSPWVSRILSELGHEVIVAHARNVRLIGESRKKDDRLDARMLARLVRIDPQLLAPVKHRSAQAQADLMAIRARAGLVRARTSLINTARGLAKSYGERLRGCNPRNMNLEKAQELSPELKTALEPLLGEIESLSERMGEYNERIEQIAKQSYPEVARLTQVKGVGTLIALTYVLTLEDAHRFGKSRDVGCYVGLQPGRRNSGQSEPQLHISKEGDPYLRTLLVQGAHHILGPFGADSDLRRWGLKLAERGGKNGKKRAVIAVARKLAVLLHRLWVSGEAYEPLRNQREVALPAAA

SEQ ID NO: 412722 - protein, 411 aa, unidentified
MRLFLGDDWAEDHHDVEVMDERGRVLARARLPEGVAGMARLHELIGEQLGEGADDAEVVIGTETDRGPWVGALVAAGYTVYGVNPLQASRYRERHGVSGAKSDRGDAHMLTDMVRTDSRQLRAVAGDSPDAEAVKVVARTRKTLIWERTRQVQRLRHQLREYFPAALEAFDDLDAPDALELLGKAPDPAKAAKLTRAQISAALKRARRRDIPGKATVILAALRSAQLGQPPAVTNAYAVTVRSLVAVITVLNEQVKTLQGQVEADFGRHPDAEIYLSQPGLGPILGARVLGEFGDDPDRYASGKARKNYAGTSPITRASGKRKIVAARFIRNNRLTDALMAQAFAALGVSPGARALYDAERASGTEHNPALRKLASRLVGILHGCLKTRTLYDEATAWPYREKTPQSDIAA

SEQ ID NO: 412723 - protein, 460 aa, unidentified
MKREAYRSVDVKQILIESLAAGKPGASVVVGIDVAKSESLAVVRWQSGDFERPWRVKTPEEIPMLVDRLRDLSKDRPLLVAMESTGTYGDALRQALTDAGLVVHRVSGKAVRDYAEIFDGVPSQHDGKDAAIVAELAALGKSSPWPYRTATEFDQELRYWVGRGDVQQRIGMLWLCHLESLLARHWPEATELLELNSETLLQVLAVYGGPAALAADPGAAKRMKAWGGPFLMKEKIECFLAAAARSVGVRQTAFDCRRVQECAEAALAAKHEVQKASSALEKLAQSNAIIARQAAVIGWATACVLWAHLGDPRNYHCAEAYRKAMGLNLKERSSGRHKGQLKITKRGHGAVRRWLYFAAMRLVQKAEVVEWYAVKKSKHAKGGGTRALVAVMRKLALGLHAIGTGEEPFDARRLFSPAVKRSRSAAKHARRQLARQALERQKQKAGRKKEPASVSPGHEL

SEQ ID NO: 412724 - protein, 333 aa, unidentified
MSIETEYDHYIAVDWSHSSMAISRSTAKREGIQTFEAGADLSDLRAYLRSLKGTKILVIEESTSSQWIYVELKDEVDRFFICDPRRNHLLKEGVKTDKIDSVKLVKLLKAGLLKEVYHSTEDYIYLRRLVSSYDDLVRMIVRAKNQKSAILKLVGKAKDESLPEGTPLFTRFIHEDKMQIISMLENRKKLYEREFDQCSKKYPDLKLLRDIPGIGVIGSVKIVSRVVDPRRFKNKGHFLSYCGLVKLERSSGGQVYGRVNFKYSRMLKGVFKTAALSGLLSEKSELGQLYHYYRRQKSLADFDARHAVARHVATVAYGVLKSKEKYRPRMTRT

SEQ ID NO: 412725 - protein, 339 aa, unidentified
MHVTTIGLDLAKNVFQVHGITPDDEVAFNRPLRRAQLLPFFSKLNPCLIGMEACSSAHHWARELTNFGHDVRLIPPIYVKPYVKRGKSDAIDAEAICEAVTRPTMRFVAIKTVEQQSLLSVHRARSLLVRQRTQLINGLRGMVAEFGVYIARGLARVIGFAENILTGEVLELPDIANEVIHNMCEHLMALHARVHWYEDRLKQVAKEDARVRLLRTIPGVGAVTASAIIASIGDGHQFSNGREFAAWLGLTPANKSSGGKEKLGRITKMGDQYLRSLLVVGMTSLVRQTKSHPERASKWLTSLLERKPARVATVAMANKTARIVWAVLTRNEPYTPHTA

SEQ ID NO: 412726 - protein, 340 aa, unidentified
MNVTTIGMDLAKNVFQVHGADAKGRMVFKKRLSRGKVLSFFANLPPCLIGMEACAGAHYWARELQALGHEVRLMPPQYVKPYVKRNKHDQADAEAICEAVTRPSMRFVAIKSTDQQAVLMLHRSRELLVRQRTMLANALRGHLSEFGIVVAKGLQNVQKLVAIVGDYSDNRLPDVAREVLTTVIDQLRDTTRKIDDLEKRIYGWHQSNEVSRRLATAPGIGPMTATALVATVGDPRHFKSGRQFAAWLGITPREDSTGGKSRPGKISKRGDGYLRCLLIHGARSVVQAHRRKATEASSSSWLGQLLARRHVNVATVAMANRNARIAWALMVHGTVYQPRA

SEQ ID NO: 412727 - protein, 443 aa, unidentified
MALSDSTAPPPTTPEFTAFIGLDWGDKKHAWSLQEQGSKRIERGQVENTPEAIDLWAVDLAQRFAGRLIAVALEQARGAVIGVLGKYAYFYLYPVHSTTSANYRKSFSPSGAKSDPSDADMLLDLLLKHREQLRPLRPDTEETRSLQILVEERRKQVDLQTSLSHRLTMHLKQSFPQIVNWFDDVKAPLVANLLERWPTLEQLQKARPETLRKFFHKNNCRSQERIEERLVQIRQAVPATHDRAVLSMGTLIAHGLLQILAALREVITGLDERLATLLKAHPDFFIVDSLPGAGPVMAPRLIAVLGTDRDRFGSASELQCWTGIAPVVERSGKQFWVHWRWACPKFVRQSIHEWAQHSMKNCEWACQFYDLQRSRNKSHHAAIRSLAFKWLRILYRCWKNREPYNQARYEESLRKHAPKAAENAKKTTLELQWKNCGGFSKLV

SEQ ID NO: 412728 - protein, 421 aa, unidentified
MTPPNGMVWAGIDTHTDTHTIALLDERGRPLGSETFAANPDGYDRLIDMLPGPGAVAAVGVEGTNSFGAALARRLAAAGYEVREVLRPKRNVRRRNGKSDPIDAVAAARSVMAGDDAGPPKSSDGWVEALRHLNAQRAQLVSAMTAISNSTNGLLVTAPEPVRERYRGLKGGARMNRLAECRPAGGLVEHSALVALKSAAKAWKALKRQSGLLEERMRAILEEHARPLLDMYCVGTVIAAALAIVAGDNPERIRSEAAFAKLCGACPLPASSGRTSRHRLNKGGNRQGNVALHRIAIVRLRYHQPTRDYAARKTREGKGKLEIIRCVKRFIAREAYRALIAIRNGGNGRGTSGERGARLRELRMNHGITQQQVGEALCVPSSRISEIERGRRDLPELEQRAIQWIHSITDPKQHAQTLDNV

SEQ ID NO: 412729 - protein, 462 aa, unidentified
MIIDHNTPQVCTGSSQIAAFNATYSSAIGIDVHSRLMVACFQKGEFGCSSFTEEFKESGTSLKAIRNLVIWCNSKNPEIIIMESTGIYWKTLYTELEKSGFPRDRIVVINPRILKPLKGRKTDRSDARNLSKHARMGSFTNSFIPKKDIRELRSLWASFQQIKHQYENNRRSLLNSLADYGCQFANIVSDSRGVTAQRILEAILSGDTGEALRKHIRKILDDMHKRRGRKLSAGLDEICEAIESNITPAIRMALNLRSNQLKIYEDHMKTVFDTIKVMVLKSYKELYDLLLTIPGTEDMSVIGIICVVGDDLSSFSSIKKFASWTGLAPGNNISAGVSYSSRITHGNRYFRRTILAIAQGCANQKKNKSGLGNLFQRLRERKGYNKAKVAVAHKIVRIIYVIITRKVKYEDSPNDQSLAKFRMDQVKRAISRAKITEGLCVLSETSNQGKVICASVSMTQPT

SEQ ID NO: 412730 - protein, 276 aa, unidentified
MLHVGLDLSRKRVDVCVFDTEGEVRCRLTVPPDADGLRQLAARFPGERVRAVVESMTGARFVHDTLEGCGWVVEVADAQRVKALAPLTAKTDRIDARVLAGLSYRDLIPAVWLPPPEVRGMRELARFRLHLVRHRTGLKNRIHSSLITWGIAVPVSDLFGLGGRNLLGRLELPPAWRETTQATLEAIDHLDGQITECDRQLRHAGQGDPTVRLLQTIPGIGPILGFTIAAEIGDISRFPTAKHLVGYTGLCPRVHQSGDSDWRGPLAVITGEVVPG

SEQ ID NO: 412731 - protein, 349 aa, unidentified
MNEYIAFDSHKRYTLAEREDARTGRARQQRVEHRPGAIREYLRDCPAGASVAVEALGSWYWIVEEIEQAGLVPRLVHPRKAKLMMGMINKTDKLDVHGLNRLQRNGTLPTVWIPPAGLRDQRELTRTRMVVVRERTRLKNRITSSLAKYGLAVEGQRDSFAPGAREELEGLMKRLPEHTRWTSELLLGQLEVVGEQIGQLEGRLEAVLEPTAAMQLQRTLPGFGPILSAVAVLEMGQVERFPDAEHFASYSGVTPRVHSSGGKTRYGPFRPDVNRYLKWAFVEAGNVVALHADRHPDRHVTRLYRRLAEAKGHSKAIGAVARHLAEATYWVQVRRQAYRDPGLDRVRKA

SEQ ID NO: 412732 - protein, 348 aa, unidentified
MESIYHNKHLFVGIDVHKKRWVVTVRTYDLELKTFSMFPSSEELESFLDTHYRLALFHIVYECSFSGFWIYDYFKEKDYDIIVTPTNRIYRDGSHVKTDKIDSRKLAFQLSRGLLKEVIVPTEKIREYRTIFRIHDKQKEREGVILREIRCILEQRNHPLKWERWNKAFVAKLKTIKFQEEIFNRKFASVIKEYEFVCQQIKDSKERIREMTEDEELREHILRIEKISGVGIISAVRMVVFFFDQKDRFKTGNQLTHHIGLTPSEWSSGDEIRKGKTGLSGDKQLRSIIIQLAWVAVRKDGSLLGKFEKVYKNSGCKQKAIVAVARKLMMKIHAITIKEEDYEVNKAA

SEQ ID NO: 412733 - protein, 344 aa, unidentified
MKALKSHVAGIDVHKEMLAITVLIGELDGEPKEYQFESSTFTDDLMALGLKLKEMGFTDVAMESSGIYWKPVFNVFNPLGLKVVVANAAHIKNVPGRKTDMNDSRWIAELHRFGLIRASFIPDGEFQRMRLLSRHRTNLTEDLARVKNRIQKVLEDGNIKLSIVVSDIFGVSGLKVLKHIAGGYTHPNILITEVTTKIKRMEEMKKALTNCLTTEHCFVINVLMKQYEELKNRIEEVENELCKKVEPYAHLVEELDKIPGIDAILAMGIIAESSANMSSFKDERAFAAWSGVASGNNESAGKKKRAKCRKGNPALRKMLIQAAQKATTARNPFIDLNTTNSAFA

SEQ ID NO: 412734 - protein, 349 aa, unidentified
MEAYDGPQIVGMDLHRRRSVLVRMTEDGRKLATVRITNSVARLAAEIRRAGLHPQVVLEACYGWYWAADVLAAAGAEVHLAHPAGVKAFSHRRVKNDELDARDLADLLRMGRLAEAWIAPPEIRELREITRYRQKLVQLRTSCKDQVHGVLAKLGIEVTCSDIFGAWGTRWLDELPLPQPYSWKVASLRQLIGWLTAEITVLEQVTAELLAGHDAYRAVQQLPGIGPVLAAVIVAEIGDITRFRHPARLCSWAGLTPRHYESDTTVIRGRITKQGSPALRWALIEAVQRTPAGTPIHQARDAIIARRGIQARNIAKVAAARKLLTYVFYAMRDGHVRSLDTPAAEHEAR

SEQ ID NO: 412735 - protein, 365 aa, unidentified
MKPNFKPGMLFMQCVGIDIAKGTFTACLCMYDFNQGCSTTPVVFNNDKTGFNQFVRWSRKEALKGYPLRYVMEPTGVYYEQLAAHLNKLSLDVCVVLPNKAREFAKYEGILTKTDDMDAYTLGMLGCLDKRLKTWVPPSPIYRELRQMTRFVADINKVKTELKNHLEALAHSQTAEKSIVKHYRKLINDIDKQLESNQKAIREKIKQEPGLLERINRITTINGIGFMTVVTVVAETNGFALITNRKQLARYAGLDVPAHQSGPVDSKRHISKQGNVHIRTALYFPAIVSTQCNPQMKDFYGRLCARNTQSKMIGVTATMRKLLLLIYSLWKSGEEYDPTRDRQKKEAETTEGQPHGIDVGTLAEE

SEQ ID NO: 412736 - protein, 351 aa, unidentified
MKVTTIGIDLAKAVFQVHGVNERGQAVLKKKLKRAQMAEYFAQLPPCLIGMEACGSAHFWARKLRGYGHDVRLMAPQFVKPYVKTNKNDAADAEAICEAVARPNMRFVAIKDVEQQALLALHRVRQGCVKARTAQANQIRGLLAEFGVIVPKGLAHIALRVPELLEDASNELPGAFRVLVQDLLEQLKGLSKQVSELELRIKAAHQGSATSLRLQQVPGIGPITASAVLATVGNAKNFANGRQLAAFLGLVPAQHSSGGKQTLLGISKRGDTYLRTLLIHGARSVIRAVNNKAQANETGWLHKLLARRNPNVAAVALANKNARIIWAMLAHDQEFCPDGTRAGAQASSAAA

SEQ ID NO: 412737 - protein, 391 aa, unidentified
MVCVGIDVAKDKHDCCILDSDGTIRADCITIPNNMDGFKQLLQTIRDCTKKSDKIKVGLEATGHYSYNILGFLLDNDLAVYVMNPLHTNLYRKSLSLRKTKTDRVDARTIATMLLSDVDLKSYTDTAYHNEELKSLTRYRFDKVRERAKLKQSVSRLVTILFPELEKLVPSLHIASVYALLSEYPGAKQISEIHLTKLTNLLVTASKGRYGKDKAIQIRDAARTSIGSVMPAKFLELKHTIKLIRELTSEIDEIEVSIQKIMDELNPPILSIPGVGIQSAAMILAEIGDFSNFESPDKILAYAGCSPSTYQSGKLTNCYAHMEKRGSRYLRYALYNATKYVCHWNPVFAEYLAKKRAEGKHYNVALSHATKKLVRLIYALQKSGKAYLVAA

SEQ ID NO: 412738 - protein, 350 aa, unidentified
MTIVGCDFHPSWQQIAALDVETGEITERRLMNGNGEAEGFYQALPVPSLIGIEACGNNQWLIELWQRLGHEVWIGDAAQIRASYVRKQKTDRRDAAHILKLLVEDRFPRLWTPNAEQRDLRQLLIHRHTLVSLRTRVKGGLQHLALNRGLQKKNQLWSAAGHKALCELPLDPWAACRREDLLGLLATLNQLIGKLDAAVERAAEENSQARLLMTQPGVGPITSLAFVLTLGDVSRFKRGKQVASYLGLIPRERSSGGKQRLGAINKQGNMFMRTLLVESAQTVTRLDEGFRKQYVQRCHRMARGVAKVAAARRLAVRLFWMLRPTPSIRRSFVSRAARHWPWSAKARPKN

SEQ ID NO: 412739 - protein, 344 aa, unidentified
MHIASIGIDLGKTTFHLVALGERNKVLIRKKFSRAQLLAYTANLPSSLIGLEACAGAHCLGSKLREQGHEVRLIPAQFIKPYRKSNKNDFLDAEAIAEAVTKENMRFVQIKTEEQLDVQAMHRVRDRLVQRRTALINEIRGFLLERGITFAVRPIQLRKNLLGVIEDAEQNLSSRLRWLLERLWQEWKQVEVDLKTITDEIECISEENALCRQLRQIPGFGPLVSTATVAAIGNGAAFRRGRDFAAWLGVVPRQYSTGGKQKLLGISKRGNIYLRRMLIHGARAVLFRVKYETGSFGQWVHRLAQRAPRNKVVVAIANKLARMAWAVLSSGKDYRHQSLQPVAA

SEQ ID NO: 412740 - protein, 365 aa, unidentified
MVYVGVDLHRKSSYVAVLADDGELLASRRIASQPDEFLRVFGELEAEPTGVAFEATYGWGWFADLLSDIGIPAHMAHPLATKAISSARVKNDRVDAKTLAHLLRTNLLPEAWAAPPEVRDARKLARTRVSLARISSRLKCQTHALLADQAIEVPVTDVFGLAGRAFLEEEVLLRPVPQARLQANLRLIDLLAPELAQAERELRELFQADPRIPRLTPIPGIGFTTAALIVAEVWDVSRFPSPQYLCSWAGLTPTERSSADHTRRGHISKQGSRWLRWAMVESASRPYLKDPTLRRFRDGIARRRGAKIAKVALARRLLTLCYYALRDEDGCRAFPVPPTRTNRPNRGRARSPQVMASSGTAAPSD

SEQ ID NO: 412741 - protein, 329 aa, unidentified
MVELGIDVSKAKLDCTLLLDVNTLRCRSKSVPNTPDGVKALLHWIERHSGCAVEQVRAALEPTGVYHEASALALYEAGVRVFVVNPAQLRDFAKGHAVRTKTDAKDSLVLALCVAQVKLIPWQPAPAEIRELRALMSRLDAVEGDLRAELNRQEKAQIAADPVLVLRSIAQAISFWQAERERLQQAIDEHIDRHPGLKSEQERLLSIPAVGEKTANRMLCMLHGGQFRSASQLAAYLGLVPVEHQSGSSIRGRPRLSKAGNARVRAALYMAAVTAIRHNPDVRALYERLLSRGKAKMSALCAAMRKLVHICFGVFKNAQPYRPQIGRLA

SEQ ID NO: 412742 - protein, 506 aa, unidentified
MKVLYERVAGIDVHKDMVKVAIRSPGEKPWTRKTEILEFRTFYGVLQEMARELRRRGVTHVVMEASGVYTEPVYYALCEQDFEQVAVINPAHAKALRGHKTDAKDCARLAELFECGLLRGSYIPPAELKEMRDLTRYRMKTVQARTSEIQRLGKALESAGIKLGSVASSITGVASTAMIEALIDGERRGGVLADLAIGRMRAAGKLTDLSMALAGRFTEHHALLCRLHLDRIAVFDDAVDGLDKRITGKAARWQREAGLLTSVPGFGDVVAQAWLGEIGPAPHRHFATHEKLASWVTLCPGNNISARKRKHGRTGDAGTYIKPMLVQAAWAAIRVRGRLQARYNRLVRRFGGDKNPGAKKKAITAIAHTLLKIAYQVLKSGTPYQEPGADFYTRRESPEHKQAWLERQLQKLHPGCTITVTISPPEAALPAGTKTTSPIPTAPEPPPTQAPRPSRRTSQRHCPALATAQARVHCRAPTGDPVIVSGTDGERTGGRRRMGCGELAGP

SEQ ID NO: 412743 - protein, 480 aa, unidentified
MNKPAEIVDEDHELVIERVCAIDVAKASGMVCTRLPQGAAAARRVSRVWEVAATTRAITELADHLVAVGIEQVTVESTSDYWRIWFYLLEARGLDVQLVNARDVKNLPGRPKTDKLDAVWLAKLTEKGLLRPSFVPPAEIRVLRDYTRLRVDLTRERTRHWQRLEKLLEDALIKVSSVASKLDTRSVRDMLEALIAGDRDPRRLAELARGRMKTKRAALVEALSGRFDQHHAEIARMLLVQIDGLSAAIEKLTIRAELLLQTLLAAQPGAQPAGGAVHAPGSGDPCPAPTKTTEVPAEAPTGASVPADGTLAHRGGDGLSASQRLDEIAGIGPLAAQVIIAEIGLDMSCFPTAGHLVSWAKLCPRTIQSGATRRRGAAGKGNPYLKGVLGEAAAAAAKTNTFLGERYRRLVKRRGKLKALVAVARSILVIVWHLLSDPTARFYDLGSDYHTHRIDTTRKIRNHISGLTALGFRVTLEPAA

SEQ ID NO: 412744 - protein, 350 aa, unidentified
MEFFVGLDVSLDETHICVVDEGGRIIKETRAASEPDAIAKAIRHKGRRIEHVGLEAGNLSQWLYEGLVKEGFSVSVMEARHVRAAFAAMRVKTDRHDARGIAQLVRLGWFKRVHVKSLDAQETRALLTARGFLVEKVTATENSLRAALRNFGLKMGSVTRKTWEARARDLADGNSVLEGLVEAMLRVRTLLLDELASIDGQLTALAKSDPITRLLMTTPGVGVIVALTFRSAVDNPDRFPRSRDVGAWAGLTPRRWQSGKTDIAGRITKAGDPRVRVMLFEAAASILGRARVMSPLKAWGLRIAKRTSMKKAIVAVSRKLATILLAMWKSGTAYWAAGRPPASAQDFAAA

SEQ ID NO: 412745 - protein, 429 aa, unidentified
MNESESIRLKGFRQLRKEIRGSEKHLIVGIDVGKDKHHAFFGTATGKTVLKRMVFENTIDGFEKLLRHVEADKVKQCLEKVVFGLEPTANYHKPLGEFLIKCDREVVLVAGGAVKHNREMLDGRWDKNDTKDPGNIADLISQGKFLYYDYPCEALRGLRELLALKRVQKKQEHRVKVRIRNNLLAKYFPELERYQSKWGSEILSIVKWCIDPAVIAGMEYEEFVRLVVPGCRGVPSQKERLRAIWEKAIASIGCDAGECVDFEAKMMVKGLHQIREAIRETDDEIEKVCLEFPEYSYLLTIPGFGPDVSSKVLGYIGDPFRFENRSQVIKMAGFDLSASRSGKRSDNVVPVISKKGKADLRYALYQAALIASTRDRYFMVYFTNKLRGREREKGIKTKMRVKLAAKMLVIGWTLMKKQEPFDPSYLKTE

SEQ ID NO: 412746 - protein, 341 aa, unidentified
MKNLFIGVDFSKEKVDVAILFADGLVETAARVFNEFKTTVSGYRQLVKWVEQNSCGIDSSLWLFCGENTGDYSKGLCNFLYGKGYDMWLENAKSIKDASGLRRLKSDRADASMIAEYAMRNYDKAVMYEPLSESLTQLRELFLYRQMIVRHRCSFQVRRGEKRLTMEKSPVKTMISQSGRHIVSELNKEIEKIDKRIADLIKSDEELTEVFTIVTSVPGIGTQNAVCLMVYTDNFRRFNYDSRKIACYYGLAPFGKDSGTSVHSDPHVHYMANRQIKAMLTQAALAAVNFNPIMARYYMRLVKRGKKKQVALNNVKNKLVHLVTAMVRNRQTFTPEYKISA

SEQ ID NO: 412747 - protein, 438 aa, unidentified
MSNKVFFNLDDLFISVGIDVGADFSWMSIALPNQQFVGKPYKILHNSIDSLTTAVSKIKEAEELYSLESRIFLESTGIYHYPLFCYLRDKGFNCSVINPIITKNSTNINIRKVHNDRFDSKKAALVGLKPDLKVSLMPSDLALNCRNLCREYYDLMDNRSAYVNKLQGELRMAFPQYLGIFSKVTINTSLTLLETYTSPSAFLKADKQEIIDIIKSTARFGLTYAQNKYNAIIQAATDANQFGYIIDSNIKRIRLYISFIRKYDEEINNILESLHELVDANEDADFVKQIHLIETFKGAGFLSAVSIMGEIGDFSAFSKPKQLFAYFGLDPAVKQSGKFEGTKVQMSKRGSAIARRVIHTLTLQSISISRNREAKNPVLREYYLKKCDSKPKLVAMGAVSHKVCNMIFAILRDNKPFKIIAPQEHIKQYNSAKCDIAA

SEQ ID NO: 412748 - protein, 344 aa, unidentified
MSAITVIGVDLAKNTFQLHGVVANGKVGLRRKLRRDQVANFFANLPECLVGLEACGTSAYWARVIESCGHTVRRIHPRFVKPYLVADKNDANDAAAICEAVQRPHMRFVPRKSQAQADIQSLHRVRQGFIQARTATINQVRGLLAENGIVFRQGANAVRNLLPVVIDDPNNEISGVMRQLIRSLYDTIVFLDVKIAEQDVALKAIVKTNEICQRLMRVPGVGIITATILLAEAGAINDFKNGRQFAAYLGLVPRQHSTGGKQRMLGISKRGDSYVRTLLIHGARSVLRSVAMGGSPFGNERWTGWLNELSERRGMNKASVALANKTARVVWSMMARGTEYGAAA

SEQ ID NO: 412749 - protein, 330 aa, unidentified
MSDHSVLKRFSQSPEPEALHKYLVINYPGANYFSVYEAGFCGFWIHERLTDLGITNIVVNPADVPTMSKEKLRKTDAVDCNKLARELRSGSLVGIYVPGVETLELRSLIRMRNLIVKDSTRAKNRIKSLLRFHGIEIPEEFTRCSIGCWSKRFLSWLQSLELSTEYGKKTLELHLEQFLRLRMMLLQETRAIREISRKSPFEKPIRLLTSVPGIGVTTAATLMVELDDIVRFKNADHLASFIGLIPMCHSSGESNGTGDITVRRHFMLRSLLVEAAWIAIRKDPAMTVAYTEYRKRMNPQKSIIKIARRLVNRIYYVLKHEKEYVPCVVQ

SEQ ID NO: 412750 - protein, 410 aa, unidentified
MKLIHERCAGLDVHKDSVVACVRIQRRGRTEHEVRTFATTTAALLTLADWLAERQCTHVVMESTGVYWKPVWHVLADGEVKLMLANAEHVRNVPGRKTDVKDAVWLADLLAHGLVRGSFVPPAEIQELRDLTRTRRQLVRQRVQHVQRIQKTLEDANIKLDSVISNVVGVSGRAMLDAIVAGESDPAKLADFAHARIAASREDLVTALHGRITPHHRFMLRLHLDQVDAAEKMISVIDTEVERLLVPFRGQVELLKTMPGISDQVARTLIAEIGVDMSQFASAGHLVSWAGLCPQLSESAGKRRSTRLRKGAPWLKPVLVQAAWAAARKKDSYLRGQFGRLKTRRGPKKAVVAVAASMLTAVFHMLHDGTCYSDLGLHYLDRVDRPRTAKNLVRRLQKLGYNVELTEQVA

SEQ ID NO: 412751 - protein, 412 aa, unidentified
MEVIHSRCAGMDIAKRDAKVCIRLAGSGRRRTVATVTTWGATTSQILALREHLVAERVTCIVMEATSDYWKPFYYLLEDLVGVEVMLVNARHVKNLPGRKTDVADATWLAQLGAHGLVRGSFVPPAAVRQLRDLTRTRTAVTRERGREIQRLEKVLEDAGIKLSSVASDITGVSARAMLEALIAGNSDPTAMADLARRRLREKIPALTEALTGRFTGHHAFLTRTHLNLIDQHTAAIDELTARIEVVIEPFRRFRDLICTIPGIGGNTADVIVAETGADMSRFPSAEHLASWAGTTPGNNESAGKVKSSRTRPGNPYLQGALGIAAISVSHTKHTYLAAKYRRIASRRGPLKANVAVQRAMLIAIWNMATTDTAYLDPGADYFTRLNPEKARTKAIRQLEAMGYHVTLEQAS

SEQ ID NO: 412752 - protein, 352 aa, unidentified
MEQFIGCDAHKNFSVFVAVNEKGHAGEALRVIHDRTVFREFLSRLPARSAIAVEASRNYSWIVDEMELAGHRPKLCNPLEAKRRMGLTHKTDKLDARGLAILLRNGTLPEVWIPPGELRDQRELLRLRIFLVRLRTRVKNRIHGTLSRHNVQVPGADLFGAGPRVELARRLPELPQHSREAIEQQLATLDFLEMQIEAAEHRLEAIMEVSVEADLLKTLPCVGPILSMVMMLEIGRVDRFTSAAHLASYAGLVPRVHSSGGHTRMGQVCGSVNRNLKWAFVETANLIVINQRRLCGTHVVRLYQRIKRAKNHQKAAMAVARHLAEAAWWVLTRLEAYREPNNAHKALSSTHG

SEQ ID NO: 412753 - protein, 317 aa, unidentified
MNSINNQNEINVGVDTGKTQLDIYIRPLGIYFVVTNDEDGIKEAITVIKKHKVTRVVIEATGRLEQPFIMACAKAMIPFVIANPVNIKRFAGAINQKAKTDKLDAQLIAHYAEVIKPKLSQLKPEQIRLMSDLLSRRRQLMEMQTMEKNRLQIMPKEITSSIKPMLTVLKNQLEKVDNKLHKLIESCDEYKIKNDIIQSVPGVGKVVAFNLISEMPELGYINNKEASSLVGVAPFNRESGSYKGKRMIRGGRAQIRTAMYMAMMSAIQCNPTFKAVYQRLVASGKPKKVAIIACIRKLVITLNSMVRDGVYWDPKMN

SEQ ID NO: 412754 - protein, 346 aa, unidentified
MTIDTIGLDLHKRETQLCILTADGELVERRIATTRTRFTEVLGTRPRARILLEASTESEWVARHLETLGHEVIVADPSYAPMYATRSRRVKTDKRDARTLAEACRLGAYRAVHRVSDAQRHVRSELAVRDALVRTRTRYVALIKARVRSEGLRLPQGEPERTVAKLDALAELPQATRDELAPLLLLLAPLNTAIAAADRHIAELVATDPVVRLLTTAPTIGPVTAAAFVATLDNVTRFASADQVSAYLGLVPSEHSSGERQHRGRITKTGDTRMRWLLVEAGWRILRSTNPDVQDLKAWGQGIAERRGTRVAVVALARKLATMLYAMWRDGAPYRAARPHATEVAA

SEQ ID NO: 412755 - protein, 339 aa, unidentified
MQVTTIGLDLAKNIFQVHGITEDEVVAFNRPLRRAQLLSFFSKIEPCLIGMEACSSAHHWARELTKFGHDVRLIPPMYVKPYVKRGKSDAIDAEAICEAVTRPTMRFVAIKTVEQQSLLSVHRARSLLVRQRTQLINGLRGMVAEFGVFIPKGLARIIDFAENILAGEVLELPDIANEVIHNLCEHLMALHTRVRWYEDRLKQVGKEDARVRLLRTIPGVGAVTASAIIASIGDGHQFRSGREFAAWLGLTPANKSSGGKEKLGRITKMGDQYLRSLLVVGMTSLVRQTRSHPERASKWLTSLLERKPARVATVAMANKTARIVWAVLTRNQPYTPHTA

SEQ ID NO: 412756 - protein, 348 aa, unidentified
MLADELDYVVGVDTHLDEHVLAVVAAPSGAVLARRAVPANARGYSAALRFAGEAAIGARVWAIEGTGSYGAGLARYLAGRGETVLEISRTPRAERRLRGKDDSLDAARTARAALASETLALPRGGQRREALRLLLITRRSAVDVRREALGQLRGVIVTAPDGLREQLRRLPVGRLLERCSRLRRSGSASPDELATRLVLRSLARRIEAATLEAAQLEHEILGHVRALAPRLLDEPGVGPIVAAQLIVAWSHHGRLRSEAAFTRLAGVAPVPASSGQTTRHRLSRGGDRQLNRALQTIVLHRRQHDPTTKDYIAQRIAEGKTRRDATRLLKRYLARHLYRLLQQEPLMT

SEQ ID NO: 412757 - protein, 306 aa, unidentified
MEARYVGVDVSKDRLDVHVLPEGAAFAVARDGKGLAELVERLSALQPQRIAVEATGGFETIVAAALAGASLPLVIVNPAQVRHFAQALGRRAKTDPIDASMIARFVEATKPDLRPLADEATQLLADLVARRRQIIEMIVAERNREKRVAVRRIRKSIARLIAALEKELSEIDAEIDASVRGSPAWREKEDLLASVPGVGPITARTLIAELPELGTLDGKRIASLAGLAPFTRQSGQWKGKAMIAGGRKSVRSALFLASLAACRHNPVLKAFRQRLIDAGRPKLLVAIAAARNAILRDKQPWRPETA

SEQ ID NO: 412758 - protein, 350 aa, unidentified
MRYLGVDVGKKRCQACVMDEEGTVVEEFPFTNSIEGIQRLLKRAVGDCKAVVESTGNLWLRIYEALEGHGVEVKLANPYKTKAIASARIKTDRLSARILAHLLRTDLIAECYVAPREVRQVRALLRQRASLVKMRTMVKNRVHSHLDRQGLRSPWSDAFGAGGLEWLRGLELDPVDRCILDTHLRHLDCLNCEIGFLDSRIAGQALESADTLLLMTLTGMDYHSATLLAYEIGDITRFPSPKHLVSWLGLCPSLYQSGNTLVMGRMKKDSNGRARWVLVQAARTASRRDPRMRELYLRVSSRKGTGKAAVRVANKMAVIIWHMLTERKPYLQVKERLYKSKLKKMKRLAS

SEQ ID NO: 412759 - protein, 321 aa, unidentified
MQPVTVTVYAGVDVAKASLQLHLQGRQAEFPNQPAGLVQLCQQLQNIPRVHVVCEATGGYERPLVQALHQAQIPVSVANPAQVRAAAQAQGKRAKTDRIDAALLTDYGQRYQPKPTPPTTPSQDQLVALTQWLTQLVQVQALAKTQAEHHEAAFVCKQHAKLMAHYQCQIAAVEKQIRALLAQDAVLQQRVDCLDQIKGVGPRTAWLVLAHLPELGQVNRQEVAALAGLAPWTRESGTMKGMRCIGGGRPEVRLALYMAALSAARCNPVLQPFYQRLRAKEKPAKVALTAVMRRLLVYMNHQLKALAASQADKETAHGKTP

SEQ ID NO: 412760 - protein, 420 aa, unidentified
MSPDQKAAFARTFPVHVGVDTGKRFHVLVARGPDGLRRKPLKVLVSREGFERADAELQALFPDTERSRMLVGLEFAGHHGFTFAHFLASRGYPIVNVLPAHTKRTKELEDNSPLKTDAKDAGVICTLVANGTFVRFPFLETPYAELRVLVSYRHRLAVEATRFKNRLQGLLDLAWPEFVAQFSTLAKHTPIGLLERWPLPQDLLSAHKATVRAYSRKISKGKFVAERFERLYVSAQETIALPQATTERRMEIQATLARWRLVRKQMVEAETRITELMGQLPSAQALLTVPEVSAVCAATILAELGTPGDYEHPRQVLKLAGMNLIEKSSGSSQGRRRQSKRGRPMLRRQLFLLAGRWCQRRGLYRSYYEALLARNGGLKTKAVCAIARKLVPLLLAVLQRGEAFDQTRWQAARHQPALTH

SEQ ID NO: 412761 - protein, 360 aa, unidentified
MKIVGCDFHPSWQQVAVFDPETGEIAELKLLNGDGESERFYRELEAPALIGIEACGNSQWFIELAEQLGHVVWVGDAAQIRASYVRKQKTDRRDAGHILKLLMESRFPRLWTPTAAQRDLRQLLIHRHKLVEIRTRVKNGLQHLALNRGFPKQSSRLCGVRGRAYMEKLPLTGWTARRREDLLKLLAELDKHLGELDDAVQRAADEHPQARLLMTQPGVGPITSLAFVLTIGDVSRFKHSNQVASYLGLIPREHSSGGKQRLGSISKQGNRFMRQLLVESVQTVNRLDEGFRKQYAARCHHKAKGVAKVAAARKLAVRLYWMLRQNVGYPEIARIESSPRVALRGESHLETVNGRSRIQQ

SEQ ID NO: 412762 - protein, 316 aa, unidentified
MANHVTKITLGIDVAKDQHVIYNWQTGQTTKLRNEISDIKTWLKTFHGPVRIAIESTSNYHLTLVDEALALGYEVYLVNPRQLAHYREAVNVRNKTDPLDAWLLARYLEHEVDQLRPFQPRDLRAQRVWRLVLRRATVVKSRQQLQQSFAEVQMSIRGVLSQLQSLLVRIERRILTLIRELGWWPDYQHCLSIPGIGSSNASALVVAYHRGAFSGSDAFISYLGLDVRIRDSGCFKGRRKLTKRGEPELRRLLFCASHPARHYHRFAEYYQRQLDKGLCKIAARVALSRKLARIAFTLMRNEETFKKEEKNYCVGS

SEQ ID NO: 412763 - protein, 441 aa, unidentified
MQVSSINFSLRENGMNSSTNTFTAFIGIDWADTKHDVCLQASNNDKREFAVIPHQVDHIEQWARAVHERFGGTIAIALELTKGPIVYALQKYDFFVLFPINPSTLAKYRETFKPSRAKNDPTDAELALDLIMRHPERFKPLKPQSVAMRTLAAMVEQRRALTDDKTRFTNRLGDTLKQYYPQALEWFDHRDTILFCDFVIRWPTQMHAKKARKSVLEAFFKAHNLRSATLIATRIKAIKASKPLTQDVAVITSHRLLAQVLVEQIRITLQAIDRFDQEIAALAPTLPDYKLFSNLPGAGQALAPRLLAAFGEQRERYATAGELQMYSGIAPVLERSGQKSWVHWRLRCPKFVRQTFVEWAAQTVNKSFWAGAFYQQQRGKGSSHQAALRALAFKWIRILFRCWKNRTPYDESRYLNALKKRSSPLLALLGPENTEPKLAKA

SEQ ID NO: 412764 - protein, 343 aa, unidentified
MELYVGMDVSLKETSICVVDGKGEIVSEGTVISEPAAIAAFIEAKAGSALRIGLETGPTTTWLWHELRALSLPVICIDARHAKAALSLQINKSDRNDAVGLARIMQCGWYKEVQVKSVSCHEVRAVLNARAQLVKIKRDLENQIRGLLKNLGFIIGKAGGTVFRRRVEELLGRHDLLWEAVRPLLEVREKVRREIAALYRKLLDLARNDADSRRSMTVPSIGPITALAFRSAIDEPARFRRSRSVGAYVGLTPRRYASGEVDWTGRISKCGDRMLRTYLFEAAGVLLTRVQHWCKLKAWGHRLWKRIGFKKAKVAVARKLAVILHRMWRDGTDFIWSTKEAAA

SEQ ID NO: 412765 - protein, 308 aa, unidentified
MESFVGIDVAKENLEIFAMPDNAHMSFPNDDEGRIALARLLADMKPGLVVMEASGGYEIPLVEALVLRHVNVVVINPRQVRDFAKATGKLAKTDVIDAEMIARFAEAIKPEVRPLKDMDAQRLQALIARRRQLVQMLVQERNRLQISPSCTRPDIEAHIEWLTGCIDKVGKDIASFIKKTPLWREKENLLKTFKGIGSVSACTLLARLPELGQLNRQKIAALAGLAPINRDSGKYRGKRTIFGGRADVRSALYMAALSAIRYNPAIKTFYDRLLHAGKLPKVALTACMHKILTILNAMIKTNTPWCAR

SEQ ID NO: 412766 - protein, 422 aa, unidentified
MHEERRWFAGIDWASQEHVVTLCDGQGKKIGQRKFAHGGTGLAEMVDWLLKASGGEPGEIHVAIETPHGPIVEALLERGFNVYSINPKQLDRFRDRFTVAGAKDDSLDAYVLADSLRTDMPLFRKLTIAEPLIVELREWSRVDENLKVERLRLANRMWDQLWRYYPQMLELADDLGAYWVLELWEAAPTPEKAARVSKKAVSRILKSHRIRRFDAAYVISELRKPALSVAQGTIEAATSHIRVLVEQLRLVNHQLADAGRQLDRLCKKLAEPVAGNDGESVPGQRQEHRDVTILHSLPGVGRNVLVTMLAEAPDALRRRDYHALRNLCGSAPVTRRSGKSCIVMRRRACNRRLSNAAFNWGRVATQHDPVSKAKYEALRARGHGHARAIRSIVDRLLYVACTMLKNGSPFDPALARKENAAA

SEQ ID NO: 412767 - protein, 388 aa, unidentified
MQTVADRPEAPNAIRNDLGAIFVSMELSRSTWLITSLLPGGGEKMSKHGMPAGNVGALLARFADLRRKAFTRTGESLPIIVIQEAGLDGFWIHRVLQQEGIEDHVVDPASIATSRRRRRAKTDRIDGETLLRALLAYKRGEPRVCAMVKAPTVEEEDRRRLCRERKALIEERVLHVNRIKGLLFSQGVSGYEPLRRDRRRRLDELQTGDGRPLPKHLKTQIGRELDRLELLLEQIKAVEAERDALLGARQVATPTPAAMLLAIKGIGPEFAAILWSEGLFRHFDNRRQVASYAGLAPTPWQSGSVDREQGVSKAGNPRLRTTLIQLAWLWLRNQPQSALALWFKDRVSRNGGRLKKTTIVALARKLLVALWKYVTAGVVIEGAIVKSA

SEQ ID NO: 412768 - protein, 319 aa, unidentified
MAQNDLVVAGIDVAKDKVDVCIRSLSLRRTFASTAQGRRELATWLRRKKVGKTVMEASGGYERDWAKALRGAKIEVRIVDPKRVRSFAQSAGRFAKNDTIDAEMIAWFAETFGEARGQAYDAAREQLHQMVHARQALKDMQSRLASQGEHAVPAAVQRIHARISKTIAVELVKIEAEITTLIQATPRFAELAEIIESVPGLGRTTSAALIADMPELGQANNKIVASLLGVAPYDDDSGRRRGERHIKGGRRRTRNIFYMACLGAATQHNPVLKAFYDRLVAKGKLKKVALTACMRKLISILNIMIERRQKWDTKRYAVS

SEQ ID NO: 412769 - protein, 342 aa, unidentified
MLYVGIDVAKNKHDVTALNVQGKTVLKPLTFSNNKAGFELLDLSFRQLNQDCLIALEDTGHYAFNLLNFLHEQGYKVYTYNPLLIKEFAKSLSLRKTKTDKKDAHGIALKLLSDPNREQFQHDNRQVELKILARHIHRLKKKQSDWKVQYTRCLDIIFPELDKIVGKHSEYTYQLLTRYPNPQKRLEAGFDKLIEIKRLTASKIQDILSVAPRSIGTTSPAREFEIIEIIKHYKRLIDKAETCVNDLMAEFNSVITTVTGIGGRLGAVILAEIRNIHAFDNPAQLQAFAGLDSSIYQSGQIDLAGRMIKRGSPHLRWALIQAAKACARFSPAFKAYLKTKLE

SEQ ID NO: 412770 - protein, 340 aa, unidentified
MRMFAGLDVGFKRTAVCVVDEAGRIVWRGMVDTHPEALSRALQHWGEKLAKIGLESGSMTPWLARELAKVGFPVVCMDARAAADAVRSRRVKSDKADAHALAEMLRTGWYRTVYVKSEDSHRLKAMLGARDQLVRAKRALGNQVRGVLRPFGIRLPSREGTKKFAEAAHQAVRRDNMLHASVTALLEALAAIEGQIARLDEQLKELARRSPVCWRLMSVPGVGPIVALAFMAAIEDINRFRRMRSVGAYLGLTTRRYQSGETDVVLGISRQGDAMARHYLYEAANVLLTTVRRPSALKSWGLKLMKRRGPKRARVAVARRLAILLGRIWKDRTHFDAVPA

SEQ ID NO: 412771 - protein, 347 aa, unidentified
MKDITRIGLDTSKSLFQLHGVDAAEQPVLRKQLRRSEMIKFFEQLPPVLVALEACGASHHWARLLSSFGHEVKLIAPQLAKPYVKRGKNDPADAEALCEAASRPTMRFVPVKSADQQAALMLAGVRTRLIKTRTRLANTIRGFAAEFGVTIAKGMCRIEPLLERIAGDEAVPQLARELFALQAQEYAQLKREIEIVELKLMEWHRSDECSQRLAQIPGVGPIGASMLMMKTPDPHSFKSGRDFAAWMGLTPKDHSTGGKTRLGGITRAGDELLRSTLVCGATALIRQVQRTHGRNASPWLVKLLERKKPKLAAVALANKIARIAWKLMVSGERYRRPVEQAIPALAA

SEQ ID NO: 412772 - protein, 341 aa, unidentified
MCDYIGLDVSLKETAISVRRGGRRVWRGKCPSDPAAIAAVLRRHAPEAKRVVFETGPLSVWFFHALSAEGLPAICIDARHAKAALDMAPNKTDANDADGLAHLAEIGFFREVRVKGYDSMLVRTLVAARRRLVRISTELSNQIRGLMKTFGLVVPGAKGGRFEAEVRRLLAGQVSLETVILPLLEAWTAVRGRAAELGRQLLRLARHSEACQRLMSIPGIGAITATSFTTAIEDPANFRNSRSVGAWIGLTTRRCQSGEVDYDGHISRRGDAHLRGLLYEAATVVLTRTSAESALRTWGLKLRERIGFKRAAIAVARKLAVIMHAMLKSGQPFNREAEAMS

SEQ ID NO: 412773 - protein, 362 aa, unidentified
MSKSTTIIAFDHHAATTVAAVLLPGQRTPALHTLTSDNATILRFVDRLKRQGPVTCCYEAGPCGFELQRALTTHQVPCEVIAPALIPRRPGDRVKTDRRDAGQLAVLHRAAALTAIHIPTEQEEAARDLLRCREDIRADLLRARHRLSKFLLRHGRRFTATKKTWTKRHDAWLQAQRWPLPALEQTHRAYVRAVDEAGARLQAVDTELRDLLSLEPLKARVARLRCFRGIDDLTALTIAAELGDPRRFPSAPSLMGFVGLVPSEHSSGTKQARGAITKTGNAHLRRVLVESAWHYRHHPFAGRSLTLRQRGAPATVVQHAWTAQHRLHRRYRRLAARGKPKQLIVTAIARELTGFLWAALTQ

SEQ ID NO: 412774 - protein, 376 aa, unidentified
MSKVLFVGLDVHAETIAVAVAETGGEVRSMGVIPNRLESIRKLVHKLGPVQHLRACYEAGPSGYVLYWQLTQLGVVCEVIAPSLVPTKAGDRVKTDRRDAEKLARCYRTGELTAVWVPDAAHEALRDLVWAREAAKKDQLKARHRLGKFLLRHGRRPDGIKAWTKQHREWIKSHVRFEEPALEATLADYLEEVDHVAARIVKLEKALDEAVRQAPPEIRVVIEALQALRGVAQTTAATIVCELGSLSRFQSPRQLMGYSGLVASEHSSGNRVRRGGITKTGNGHLRRVLVEAAWAYQHRPNVIGFLLRRQKTLAISDEAKRIAWKAQQRLHKRYKAMAARGKNKNQIVTAIGRELLGFIWAIAVETEKQHKLAKAA

SEQ ID NO: 412775 - protein, 437 aa, unidentified
MKKRKERVCGADVHKDLIVATITGDDVPPIRENFGTTKAELERFRNWLIKNKCEQVAFEATGVYWIPIYDALSSTIDTIVANPLQIKTIPNDKSDSKDSKRIASLCLNGQIKRSRVFSNEDRDLRTLTRARSGYVKTRTQFRNRIHKYLSSSGIKLSSCMDDIFCKSGAHIIKGLAEGKSIEEILKGIPSGKIRKKQDLIRAALDNALGETNRMLVTDALEILDDIESKIEKTSHEVLKKIQQRSKDLAIVMSIPGVGFVSGSVILSEIGNYRDFQTPEQLVKWCGLNPGENESAGKKKKCGITKRGSKQIRVVLVQAAQTISNMKNTRLSRFFQRLSKKKEHNVAIVAVARKLICLIHHLLINQEFYQEADCRKRRLRRDKSCKEPSFQEEHLTDKVAAIVDAFYGLSDSNRKKALMRAIGDISAIDQKRSLDGGG

SEQ ID NO: 412776 - protein, 422 aa, unidentified
MSEVTFPRLVSRGCGIDVHQKVVVATIDGEGLTKETREFETFTSSLTEMRHWLEVNGITHVAMESTGVFWVPVFTILEKSIPNVWIVNARHIKYVPGHKTDRKDSGWICKLLLAGLLKPSFIPPLEQRNLRELTRRRRQLVQEISSEKNRMMRLLEQCNIKLKSVMSHMDGKVATQLLDKLCSGEEVTMEYINSVYHGRLNATPEELYKACQGKIDNDNLFLMYVIKAHIYEMEKLVAQLSERISAKLSPQRAILDMLKAVPGLDLRTSENLVAEIGFDMSKFPSAKHLGSWAGLCPGNNESAGKRKSGRITHGNKQVKAVMTEAAWASTRTKNTFYSERYHRIAARRGKKRALIAVAYSMLTTVYNILANNVTYKELGAEFVTLLIEKKRKKYLTTELTKLGYEVQIVKKQPPLKTEGCST

SEQ ID NO: 412777 - protein, 337 aa, unidentified
MEYFAGLDVSMAETHVCVMNRDGAVVYEVKVPSTPADIAAGLAKAPACGRIVFETGRMAPMLYHGLRQLGLPIFCIESRQAHQALKSLATHKTDRNDARGLAHLARTGFFKPVYVKSLPAHAVRALIIARKKLVGQRVTLENQIRGLAVVFGVRLPRALRPAFVRQALQASEGIPGLSAAMRGLVAARAAVLAAVSAIDADIRQLVRASAACRRLMTIPGVGQLTALAFTAAIDDPSRFRRSRDIGAYLGLVPRRYQSGEVDYTGSISKCGDRRVRTLLYEAANVMLTRYKSALKLKDWALAIAKRSTMRKARIALARRLAIIMHAMLRHGTEFSPV

SEQ ID NO: 412778 - protein, 393 aa, unidentified
MICVGIDVAKDKHDCFILSSEGEILADVFTIQNNAEGFDTLLQTIRRCARPEDKMKVGLEATGHYSYNILGFLLDKGLPTYVINPLHTNLYRKSLSLRKTKTDRVDARTIAAMLMSDVDLKPYTDTAYHNEELKSLTRYRFDKVRERAKLKQSVSRLVTILFPELEKLVPTLHLASVYGLLSELPGAKQVAGAHLTHLKAVLSDASKGRYGRDMATTLRDAARCSVGSVMPAKSLELQHTIRLIRELDAEIEDIETAIQSMMDEMQSPITTIPGIGVRMGAMILAEIGDFSRFDSPDKILAYAGMSPSTYQSGQLSLSGPYSHMEKRGSRYLRYALYNATKYVCLWDPAFAAYLAKKRGEGKHYNVALSHAAKKLVRLICALEKSQQSYRNAA

SEQ ID NO: 412779 - protein, 453 aa, unidentified
MTKRKTGGHPDLKMVNPNAAAIDIGSTMHMAAVNPDTDIMPVRAFGTFTQDLHDLADWFRLCGVTSVAMESTGVYWIPAFEILEAHGFEVILVNARYAKNVPGRKTDVSDAGWLRQLHSYGLLRGSFRPEAEIATLRAYMRQRERLTEYAAAHIQHMQKALMEMNLQLHHVVSDITGATGMRIIRAIVAGERDPEVLAAFRDVRCRSSIDTIKAALVGNDREEHVFALTQSLELYDFYKAQIEACDRRLEAAVGALTVRADGDLAPLPKARIKGNQHNAPSFDVRSALYGVLGTDLTQIHGLGPSLVLKLVAECGTDLRAWKSAKHFTSWLCLAPGNKISGGKLLSSRTRRSSSRAAALLRLAAVTIGRSDTALGAFYRRLSARIGKQKAVTATARKIAVLFYNAIRHGMTYQDQGAAAYDERHRQRVLSNLQRRAKTLGFALAPIPETAAVS

SEQ ID NO: 412780 - protein, 418 aa, unidentified
MTSHLTKTNYKAFVGIDWANDKHDLCVQDPSTGKREFSIIKHDVNEIDKWVKGIHKRFGSPIAVAVELTKGPIVYALQRYEFVVIVPINPTTLAKYRTAFKPSKAKDDPTDAELALELMLRYPNHFPPLNQQSVNMRKLMFLVEHRRKVVDDKQRVVNQMINAIKQYYPQANEWFCKKDTHIFCDFIARWPTLQQAKKAHKSTLVKFFNDHGIHNSTIVDHRVSLIKKAKPLTDDKAVIDSHTMLVIFYIERIVNSMKCIQQYNKSILKLMDKLPDAPIFNSLPGAGAALSSRLLAAFGEQRDRFKSAKEVQQYAGIAPVTERSGQKSWVHWRWQCSTFLRQTFIEWATHSRLKSYWANLYYLQQREKGSSHQAAIRALAFKWIRIVYKCWQDGKPYNETQYLRALKDRGSPLLSDKV

SEQ ID NO: 412781 - protein, 406 aa, unidentified
MELVPIHKRVIGLDIHQAQITACAILEEADGETRIEQRQFGAFKKDRRALAAWAAALDPEEVVMESTGIYWKSPYAALEAVGIRATVVNARHVKQVPGRKTDVGDAQWLATLARAGLLRGSFVPPAKLRELRVISRQRQKLVSLLTAEKNRMHKVLTDAGIRLGVVVSDLHGQSARAMIKGILDGQAPHEVLNLASRRLKASREELHDALQGELTASHVFVLDELLRHIEELEARIARFDARLLGELASEHNALALLQTLPGVDVIGAAMLLVEIGSDMSVFGTPDRLASWVGICPGNDESAGKRKSGRIRKGNPYVRRLLCEFAHAARCTKSAFQSRFQSLMVRRGYKRAIVALAHKMLRTIFFMLKRGEYYRDSATNYEQLSVQRNASRWIKALTRFGFISAAA

SEQ ID NO: 412782 - protein, 354 aa, unidentified
MSQTLNSAMAVIGIDIGKNSFHVVGHDARGAIVLRQKWSRGQVEARLANIPPCLIGMEACVGAHHLSRNLASLGHDARLMPAKYVRPYSKGQKNDFNDAEAIAEAVQRPTMKFVATKTVEQLDLQALHRVRERLVSQRTGIINQIRAFMLERGIAVRQGIGFLRTELPTILATRTDTLSPRMLHVIEELAGDWRRLDQRIDGLSGEIEALARQDQACSRLMTVPGIGPIISSAMVAAIGTGEVFSKGRDFSAWLGLVPKQISTGDRTILGKISKRGNRYLRVLFVQAAWVVLVKIKNWERYGLKSWIEAAKRRLHHNVLAIALANKLARIAWAVLAKGRAFELTRTDDAGVRPA

SEQ ID NO: 412783 - protein, 425 aa, unidentified
MNYKQNEKINQVKESTLVVGIDIGSTTQYARAFDWRGIELGKVFTFSNSREGFESFKAWMQHLQDKYRKSDVIVGIEPTGHYWFDLGAYLEDEGILLVMVNPYAVKQTKELDDNSQSKNDRKDPKVIAKLVTEGRYSAPYTPDGVYADLRIMVANRKRLIREMTQIKNRFARWFAIYFPEYTDVFGDYEAQSSMLLLKKTCTPEAIVELGAEKINQIWRDAKLRAVGMKRATTLCETAKRSIGLKKGSSAAQYEMKLLLEDYEYKKAQLDAVMEEIEKLCRKIPESEQMLAIKGMGVITVAGFLAEVGDVRRFESPRQIQKLAGLSLRENSSGKHKGQTTISKRGRSKLRAVLFNAAIPLIAKNPEFKSLHEYYTTRANNPLKKKQSVIAISCKLIRVFYAILAKGVTYDAQKLISDIHRQPQAA

SEQ ID NO: 412784 - protein, 391 aa, unidentified
MEVYSKFVGMDVHKETIAVSVAEAFGGEVRYLGEFHNTPEAVVKLVRQLRKGDAKLSCCYEAGPCGYGLHRQLLEMGIANQVVAPSLIPKKPGDRVKTDRRDSLTLARLLRAGELTAVWVPDTNQEALRDLTRAREDMKHLERQTKQRLQAFLLRHGKRYGGERRWTKMYFHWLEEVKFDQPVQQIVFQEYVDTVQAMTRRVAALDKQIESAESESSFGPVIKGLTALRGIQRLTATTIMAEIGDLHRFATAPQLMAYLGMVPSEHSSGPHQSKGGITKTGNGHVRRVLVEAAWTYHHPARKTADLQRRAKQAPEAVQEIAWKAQTRLCGRYRLLEGKGKLKVKVCTAIARELVGFIWAIGQAYPRPEVSASGPTKGRSVSAAERATVGEP

SEQ ID NO: 412785 - protein, 343 aa, unidentified
MLRTNVIGIDLAKNVFQVCNISRQGELLSNKAISRQKLKELLAKAKPSLVALEGCATCHYWGRYAESFGHEVRIINPKKVKAYVEGHKTDANDALAIANAALQIGIKYSKPKSMEQQTLMSLEANRQFLSKTIVSLGLHIRSIINEYGIVRAKGTKGLAALVTSALDERDVLPASLIATLSMLWQQYLNLKEELNHLQKSMNATTRQIEPCKRLMALEGVGEITASMLYANLGDGTQFTNGRQASAFIGLTPKQYSSGGKVTMMGIDKFGGVKDLRSMLYLGAMAYIYRLPDSPTNQKQAWLIKLVNRVGFKRACIALANKTVRTAWAMLRYETKYQSKTLSC

SEQ ID NO: 412786 - protein, 340 aa, unidentified
MEKRYIGIDLHRDQFTCCMRLENDRTYLTEWRLAELPRFVKKLRPCDEVAVEITSNTRLFHDAVAPQVARVVVVNTNQFRVISQSVKKTDPNDARLLSLYLSKGLLPEVRMKDKQHGQLASLTQTRDTLVKQRSALKNKVNNILSARGLNLAKEALSSEKKLAEVLELPFDEIVCIELRVIVAQIRSLNKSIAELEKTIGEEGAKLEGHKGLSSIKGIGKITGAILLSVIGDVNDFSDEGRLASYFGIVPRVSNSNETERSGHIHKRGTKLGRTALVQSALIAANYSPYLKSFYERVKARRGAGKAIIALARKFLGIIYRTLKNKWVFEDFPNFVLAEAS

SEQ ID NO: 412787 - protein, 452 aa, unidentified
MSLVVGIDLGRKSPHDAVILRRKTGLEIGRGFRFTSSPSGFRKLFRKIEAVRNAEEPVDFVIDSPGRAWIPVATVLKAGGFRVYRPSAYRVKNVRQAGHRKNKTNRIDALALARCLIGFPKDTALVFLPQGDHAQLDQIVRQRDRVVDSLARRKQRIQDLCEAVNPGLTKLPDGFLLNEAGRAFLRAYIDPRSVLRLGKKRLGLFLQKRYRLELEPDTLDKLFLACENAVELYRAVRDANSMPFDERILQDELNWELDQLEREEERRGLLEHEIKKLNRKLDPTDSLISLPGIRHILAAGIRTCVGDIDRFETLNKHKGFAGFYPSVRKTGDHASSPMPMSKMSCNRYKRCLYLAAENAYKWDLEMAAFYHKRRRAGHTHTQAVCAVANAKLLPRIHHLMKELKQAEARKTTRPHYVFRDLSGNPISKTEAKAMITATWGDVDYSKKGLATA

SEQ ID NO: 412788 - protein, 351 aa, unidentified
MKMKTTTNHTAPDNNLYYVGLDVHMKFTAICILNPRGAIVKEQKVYGDSEKVCRLLRGDVPGPFAVVIEASDSYGVWYDRLAPIARSVRVAHPTDLKNIWNCKRKNDRIDARKLALMLMLGTVPAVHVPDREVRQWRSTIQHRKKLVQKRTGIKNQIRALLRRAHIKAPRNLWSKKNLRWLAAVIFPTEGEALQRDMALEDLEHVNAQIRRVEAELDARAEAHPGVMLLKTIPGVGNRTAEAVIAWLDDIKRFSRAKQVGAYFGLVPTEDSSADRRRLGHITRQGPGVVRQLLVETVWRMMRCNPLVRGWVERFQHGQAKRKHIAVVATAHKLARCMFAMLRTGEVWNPAA

SEQ ID NO: 412789 - protein, 315 aa, unidentified
MVDVPCFVGIDVAKAQLDIAVRPSGERWAVPNDAGGVVTLVDRLQALHPTLIVLEATGGLERAATAALAIAGLPVVVVNPRQARDFARATGQLAKTDALDARALAHFADVIRPTPRPLPDAQTQELRALLGRRQQLVVMRTAEQNRLAGTRGRLQTDIEAHIVWLNARLATLDDDIETLIRASPLWRENDDLLQSAPGIGPVCARTLVLELPELGTLTRQQIAALVGVAPLNCDSGTLRGRRTIWGGRAHVRTVLYMGTLVATRYNPRIKAFYERLLAAGKVKKVALTACMRKFLTILNAMLKHRTPWQSQEVPG

SEQ ID NO: 412790 - protein, 349 aa, unidentified
MGLHSPIADKISINRIDGGDTDKLLALIEKKREQAARQLGRPVRVVSCYEAGRDGFWLHRFLIGHGIDNRVLDSASILVDRRARRAKTDRLDAAALLRVLMALVRGEEQVCRVVQVPSIAQEDERRLSRERERLLHERNSHIARIKGLLALHGVRDYRLVVGVWKERLDAIRTANGHALPARAKTEIERECRRLWLAKEMLAEVEREIEQMIERDSAAAGKLIRVRGIGPTFASVLTHEVFYRSFDNRRQVGSYLGLVSIPWQSGGVRRDQGITRSGNARARRCAIELAWLWLRHQPGSALAGWYRTRIGTMTGRMRRIALVALARKLIVALWRYLQTGTVPEGAVLKA

SEQ ID NO: 412791 - protein, 403 aa, unidentified
MLHDHPKNPTAIRVQFGAIFVSLELSRKTWLITSLSPGKGEKMSKHAVTAGDIAGLMARFAELQRKAAVRTGKSFPIIAIQEAGLDGFWLHRVLQQEGIESHVVDPASIAIPRRRRRAKTDKIDGEALLRALLAYKRGEPRVCSMVIAPSPEEEDRRRLCRERDTLITERVRHVNRIKGLLFAQGIAGYEPVSRNRRKRLDELCTGDGRLLPQYVKAQISRELDRLELVLEQIKTVEKERDRVLLSPAPVAAVNTGPEAACDNPTGASGVAMLTALRGIGANGATKLWSEGLSRHFSNRRQIAAYSGLAPTPWQSGGIAHEQGVSKAGNPRLRTTMVEIAWLWLQHQPQSALARWYFARVGVGATKARKKVAITALARKLLVALWKYVTAGELIEGAIMKPVA

SEQ ID NO: 412792 - protein, 426 aa, unidentified
MISVGIDVSKGKSTVCILKPYGEIVSKPFNITHTHKDLSELSSMLFRLNDEVKIVMEATGIYHLPVLTYLQEKGFFVSVINPYLMKSYRNESLRKAKTDKIDSRIIANYGIDHWFKMKEFQTSGEIYEELKLLGQQYRHYMKLHLLSLAELTHLLDLTMPGIKNLLASWNETNRKDKRSDFVERFWHYDVITSMSEQEFTEEYILWAKEKKYVPSQEKAKVIYTLAQESIPTLPSETSSVKILVTEAVRVLKEVDATLGLILSRMQEIAKTLPEYSVVREMGGVGNTLAPKLIAEIGDVRRFRNGKALVAFAGIDPPPYESGQFVGCNRKISKRGSASLRKVGYETMRSLKMRSRPEDPVYRYVVKKESEGKSKKSAKIAGLNKFLRIYYARVQIPLHRITDSASNGSVFPVVTEHFSASSDHAFL

SEQ ID NO: 412793 - protein, 326 aa, unidentified
MNLPAVVLGVDIAKLKFDVCLIKENQKVKHKVFANTKHGFEQLVAWLNSHQVGSLHICLEATGSYGEALALHLFDEGYQVSVVNPAAVKAFAASRLTRTKTDKVDAELIARFCLAQQPQAWTPPASEVRQLQALVRRLESLVEMRVAEQNRLSSGIMVNAVRQSLQEHIAYLVEQIKQTEQMICEHINNHPDLKEQSHLLDSIPGIGNTTAALLLAEIVNIKQYKSARQVAAYAGLVPRERRSGSSVRGHVQLSKIGNARLRKALYFPAITALRCSSFFQQWASGMRERGKCKMAVIGAAMRKLIHLAYGVLKTGKPFDPNWAKTA

SEQ ID NO: 412794 - protein, 416 aa, unidentified
MNHSIGIDVGKAELVACIRASDGKTAIPAPFPNSIIGLKKLIVHFSKNNIGTDDPILLESTGPYHWKAARTLTDKGYLVKVANPLHTKQMARHSIRKRKTDKVDAGHLSFLASQEYGYRFVETEEMARKKALVRHYWKLRLTATNHSIHERYLKEYRGIGTHSISDLILKKCEKLKQEIIDEWDKGNDVKYLDSIPGLTPFLAITILAELLPIQRFERIDQIIAYAGLDPSVKQTGGKKGAATRWGKDDRPHKGGDKGGHEMVVTKPSPTVSPFDDTPFPSPFPSPVTTKTTTASISPNDGETRPTRTGEVTPADRPVKKARRPDTWLTPIGAAWERVNGPGSFPYAQAARELKPLVDAGIGPDEIARRLAWYLENKGSASVLPPDQLARKAFTPSVRDFRLRHGQFDPSAPSEAA

SEQ ID NO: 412795 - protein, 350 aa, unidentified
MKKFIIGIDFSKETVDASIVQKEQPETLIAYKKFRNNLKGVDGLIAWVKSKVAQDGEIIFCGENTGTYSTLFSDELTDRGFIIWIEHSMNIVRGMGDVRGKDDKTDSLRIASYAARFYDKMKPYVRPKDETRVLKTLLAKRDRLKSFLKAEITNTKENPLMLQDSNIASSINEFFKRLEESLRKELKELERMILDVVMSSSEYAKNFNILTSMKGIGLINAVALIVYTDNFTKFNFNHRKIATYWGVVPFKNESGTSVRRGTHVSPKCNSWLKALLTEATLCAIRYNSRIKAYHDRLMARGKAIGIVFNNCKNKMLKILVAMVRDSKIYSDMDVSKDPHTTTTTSSIVVC

SEQ ID NO: 412796 - protein, 421 aa, unidentified
MIAVPANLSEEPVQTFQAFTADIQRMTDWLKTIGVETVAMESTGVYWVPVFEILESAGIHVIVANARETRSIPGRKSDVNDAQWLQRLHACGLLRASFQPDRAIAALRAYLRHRERLLDYAAAHIQHMQKALTFMNLQLHHVVQDITGVTGMKIIRAIVAGQRDSQVLAEFRDVRCKSSVETIRAALVGNYQPEHVFALKQSLALYDFYQAQVDECDIEIEQALVVLKADKPEPEDPLPKARHRTKQPNAVNFDVRASLYQMVDVDLTQIHGIDPFLALRLIAECGTDLSKWPTAKHFTSWLTLSPGCKISGEKVLSAHSRKSNNRLTAHLRLAAVTVGKTNTALGAFYRRLAARIGKAKAVTATARKIAVLFYNAMRFGMNYRDPRADQYEQKYRERVIKQLHRRAAEFGFELKNIECVS

SEQ ID NO: 412797 - protein, 338 aa, unidentified
MTIAYIGIDLAKNVFQLHGVDGDGQQVLRRRLRREALLPELSALAPCVIGIEACTGAFYWQRRFEELGHKVKVIAPQYVKPFLKHQKNDQNDAEAICTALQQPNMKFVPPKSEAQQDVQALHRARRRLVNHRTALVSQMRGLLLDRGVPIALSIGRARRAIPEIITDKNNELSPMTREIIGDLFDFMAQLDARIKTFDRRIDAVFRSDPDCQRIARICGVGPKTATAVVAAVGDGAEFKNGRHMAAWMGLVPRQRSSGDKRVLMGISKRGDKHLRTLLVHGARSVVRVAAAKTDPFSQWVNALRERRGMNRAIVAVANKNARIIWAMLRRNEEFRANF

SEQ ID NO: 412798 - protein, 343 aa, unidentified
MSITMIGLDTAKSVFQIHAVDQAGNVQLRRKLRRSELIPFFEKQDRCTVVMEACGAAHHWGRVLTGLGHDVKLIAPEAAKPFVKKGKKNDPADAAAVCLAASRPDVKFVPIKSLEQQGMLALHSARSLLVKQQTMLVNAMRGLATEFGLTVAKGRDKLEDLVALVKADKAFPSRARRAFTELFVQCGALAESIATFGAEIVAHARHDEAARRLMTIPGIGPITASLIAVTVLDFSVFKSARHFAAWLGLVPRQHSTGGKTRLGRITKTGNREIRRLLVIGATSMVHRAPRWNSAAGVWIRGLLERRPVRLVTVALANKIARIAWALMTRKEVYHAKGRIAAVA

SEQ ID NO: 412799 - protein, 339 aa, unidentified
MMIIGCDYHPSFQQVAFVDTESGECGEHRLMHRAEAAEFYRGLRPGSVRVGMEATGHARWFERLLAELQHELWIGNPAAIRAQQVRKQKTDRQDAGLLLQLLRENRFPRIWVPSAEHRDLRQLLWHRHRLVQMQTRVKNQLQALALNEGLRRGKGLWSKAGREQFKALELAPWSARRRQDLLELLDGLHPRIQQLSLAIEQAGEQRAEVQRLMTHPGVGSITALAFVVILGTPRRFRCGKQVGSYLGLIPSEASSGGRQRLGHISKQGNALLRFLLVESAHALVRYEPQWRRQFLHLALRRGRAIAKVAMARKLAVRLYWMWRQGVDYQQLMKFGSHVE

SEQ ID NO: 412800 - protein, 346 aa, unidentified
MRIIGCDLHARQQTISMLDTESGEVTEKTLAHEGETVREFYAALPKPVLVGLEATGSMFWFLRLLEELGIEYRVGHPAAIRKAETRKQKHDRRDAALIRRLLEEKRFPQIWLPTPEQRDLRTLLRHRHQLVRMRVMTQNGLQGLALSQGLRRGAKLWSQAGQQALDSLPLAGYSHTRREQLQELRQELNQRLQQLDQAVSEQAEQRAGARRLLSHPGVGPITALATEVFLGDAQRFPNAKAVASYAGMIPSEHSSGGQQRNGSLSKQGNPLLRQLWVEAARVAARKDARLKQFYRKKLVQKGLGKAVVATARKLGIRLWIMLRDQIDYTEFCRRAERRCPYAGMPE

SEQ ID NO: 412801 - protein, 431 aa, unidentified
MLTMVYPNCAGLDVHKKFVVACRLVVDEQGNTLQELREFSTMTADLEHMAEWLSAGHCTHVAMESTGVYWQPIHNILEDRFEIFLVNAQSIKRMPGRKTDVKDAEWIATLMHHGLLQRSFIPCRAQRELRDLTRYRQSLVEERNRFANRLQKVLEGTNIKLSSVVTDIQGVSAKAMLRALLNGEEDPKVLVELARRRLRNKRAELERALVGRITACHRFMLSELLEQLDFLDKQVAEVEARIEEQLTQMPEYLAAIELLDTIPGVSRQLATMIVAEIGVDMSRFPSDRHLTAWAGVAPGNNETGGKRRSGKTRKGNRYLQRGLVLAARAAARKKHTYLRSLYHRLAARRGKSRAAVAVGRTILQAAYYMLKRGEVYHELGEHYLDRTDRERISRRLIKRLQALGFDVAVQDQTVQAGDDPHAPEPALPRAA

SEQ ID NO: 412802 - protein, 413 aa, unidentified
MIFCGIDWAERTHDVALVDESGQLLAKRHITDDAAGYKILLDLLAEYGDTEESPIPVAIETSRGLLVAVLRTGKRQVFAINPMAAARYRDRHSVSRKKSDPGDALVLANVLRTDMHAHRPLPQDSDLARAVAVLARAQQDATWNRQQISNQLRSLLREYYPAALAAFEPWKNGLCRPEAHQILKLAPTPAKAARLTRTQLQAALKRAGRQRGIAAGAERLREVFRAEWAHQPPLVEDALGKQMLALLLQLEAACTAADNLAEAVEEAFAQHRDAEIILSFPGLGTQFGARVLAEIGDDRKRFADARGLKAYAGASPITRASGKKSSITRRWVKNDRLNAAGYLWAFSAITASPGAKAHYRRRRDNHADWHAAAQRNLFNRMIGQLYHCLQQGQQYDEELAFPAPPVQMGTAAA

SEQ ID NO: 412803 - protein, 339 aa, unidentified
MKQIRTIGLDLAKKVFEVHGIDGSGEPVVRRGLRRGQVLGWFGKLPPCLIGMEACATAYYWARELSRLGHTVKLIPPSYAKAYVRRNKNDAADAAAICEAVSRPAMRFVAIKSEAQQAAAGVHKVRELLMKQRTMTMNALRSQMAEFGIVVLEGTRHIAELAAILDDPDDKRIPALLRDALRKLAESLRGLEARIAAIDKQIVAWGRENANCRHLMTIPGYGPILSSAMAAMVVDPCAFRSARDFAASLGLVPRQDGTGGKVKLGPISKRGNGYLRRLLVNGAMAVLCTKRAKQDPWLAKLLATKKRKLVAVALANKMARIGWAVMTRQEDFRATPAAA

SEQ ID NO: 412804 - protein, 431 aa, unidentified
MKGGDFMKNNFLSTLFVGIDVSSKTNVLCALDFQGDKLLNLKALNNQPGAESILRSILDCLNSSSLKYVVIALESTSFYSTHIANFLSSNEELLAYTPMVYCLNPKTIANYRKSFVDMDKTDPLDAFIIADFARCGRITSQPWRGAQFLALQRLTRHRLHLIESISREKTYMVSNIYLKFSQLAVVDKEDKPFSNTYGATSKAILTEFLSLDDIAYSSLEVLVEFIRIKGKNRFSNPLKTAKLLQKAARDSYRLDKVLYEPLNISIASSFNVINALETEIKAIDKAIDKAIKGINTTEYQSLISIPGIGPVFASGILAEIGSITSFGSNDALAKYAGLTWRTNQSGDYTSDETNMTKTGNKFLRYYLIEAANSVRNNVPVFNEFYRKKYGEVTTHQHKRALALTSRKLVRLIFGLLTKNQIYSSNKAGEIQ

SEQ ID NO: 412805 - protein, 349 aa, unidentified
MSQNLNNAVSVIGIDIGKNSFHVVGLDDRGAIALRQKWSRGQIEARLANMPPCLIGMEACVGAHHLSRKLKAFGHDARLMPAKYVRPYSKGQKNDFRDAEAIAEAVQRPTMKFVATKTADQLDLQALHRVRERLVSQRTGIINQIRAFLLERGVAVRQGLRFLRAELPRILAAPPDVLSPRMVRLIKNLAEDWRRLDERIDQLSNEIAALAQQDAGCERLMSVPGIGPIISSAMVAAIGTGDAFSKGRDFAAWLGLVPKQISTGDRTILGKISKRGNRYLRVLFVQAAWVVLIKPMSWDRHGLKHWIEAAKKRLHRNVLAIALANKLARIAWGVLAGGRTFEASKLQAA

SEQ ID NO: 412806 - protein, 347 aa, unidentified
MPRATSNANVIATIGIDIGKNTFHLIGLDDKGAIILRHKLSRGQVYARLANIPPCLIGMEACVGSHHLGRQLSALGHHTRLMPARYVRPYSKGQKNDFRDAEAIAEAVQRPTMKFVAIKTVEQLDLQGLHRIRERLVCQRTSVINQIRAFLLERGIAVRQGLRALRTEMPIVLAKTDKLSQRMIHMLEDLCTDWRHLNGRIEAVSKEIETLSEQDDGAKRLMTVPGIGPIISTATVAAIGTGEVFSKGRDFGAWLGLVPKQMSTGGRTILGPISKRGNRYLRMLFVQAARAVLLRPQSWEKHGLKLWIEAAARRLNRFKLAIALANKIARIAWGVLHGGRNFEVRPM

SEQ ID NO: 412807 - protein, 387 aa, unidentified
MYFVGIDISKFKHDCAIIDELCDTVMPSWSFSNDREGFSHFKALLDSLEGEKKIGLESTGHYGQNLKQFLESNGFAFMEFNPLLVSRFVRSKSLRNTKTDSIDALSIAQYVMTVEYKPYPSSFYHLDKLKSLTRFRNSLVRQRSRQLVELTNVLDKLFPEFKPFFKDKFSVTALYILAHYQTPERIANMNARSYEALRKLSRGRFTLSNFTQLKALAKNTVGTQSDYLLDQMNILLELYSQLDSKVDELDAQIKECVRGIDPPCLSIPGVGELSAAMILSEFGDFSKFQNPSKMLAFAGLEPGYFQSGQSEYTGHMVKHGSSRLRYALMNCCLPLISNEPVFAAYYTKKRSEGKPHRVALTHVAKKLLRVIYTLQTKNIRYDPTMIH

SEQ ID NO: 412808 - protein, 370 aa, unidentified
MLYVGLDVHWKKSNLCILNEQGRQIKNQQVAGGWNRMLEVLGQIQEPFSLCFEASCGYGHLYQCIARHPKAQRVLVGHPGQMRLIYKSKKKHDRIDAAKIAKLLYLDAVPQVYVPSADVRSWRGLIEWRVKLLHKRVATKNQIRALFKNAGLQTPRGLWTKKGAAWMQTQRFTTAFEIVRRDMLLEELADHNRRIKQITAALNQEAKKHPAVALLRTIPGVGPRTAEAVVAYIDQPARFASVRDAGVYFGLVPCQDASADKNRLGHITREGPASVRKLLIEAAWQGVNRCSAIRDHYQKIVGDHPDQRKIALVATARWLVVVMLAMLKSGETCRWKRDLIFNPRVRGNVPTFSPPVGDALQAADASPTGR

SEQ ID NO: 412809 - protein, 371 aa, unidentified
MEESSKTLYVGLDVHKESIAVAYAPEERGTEVVSLGAIGTRQCDIDKLIRKLQSKGAPLVFVYEAGPCGYWLYRYLRRKDLRCHVVAPSLIPRKPGDRVKTDRRDAVLLARLMRSGDLTSIYVPTLEDQAIRDLSRGREDAMRDLKATKYRLKAFLLRQDIRYEGRATWTAAHLRWLSEVVCPTPAQQIVFQEYVRAVTEQQERVQRLETELHEHVKTWRRFPVVEAIQALRGVELTGAVILIAELGDLTRFDTPRQLMSYLGLTPSEYSSGERRRQGGITKAGNTHARRALVEGAWAYRYPAKVSRHLQLRLEKLPAEIQAISWKAQLRLCKRYRQLTARGKHANQVVVAIAREMAAFAWAIARTVPLTP

SEQ ID NO: 412810 - protein, 319 aa, unidentified
MLYAGIDYHKRYSQVHVVDQSGQTRATARLANDGLTVEKFFKSLGEPCAAVLEAGWNWGVMYDWLAAIDNLEQVELAHPFWVRAIAAAQVKTDAIDAHTLAQLLRSNLIPRAYIPGVETRRLREVVRQRVFLVRVRTMVKNRIHALLDRYHVPPPAVSDIFGKRGRDYLAKVELPAGAQEMLRQDLALLEALSREVHATEQWLRDSVRGDHRVELLRTIPGLGDLLATVVALEIDRIERFTSAAKLAAYAGLVPTTYASGGQTFHGKLMPQTNKWLRWALVEAAWVAIRLDPYFRTHFANRRAHKPAQSAIIATARRLL

SEQ ID NO: 412811 - protein, 415 aa, unidentified
MDASKDIVLVVDYHAENIAFRWLNEATGEERTGGYPTTRAGIERQVEGAAGELAPGGRVVWVMESTTGWARVKDLLGERVKFVLANILQMPLPPKARRRKTDKIDTGRLLREYLHGSLPRSFQPPAWWRQVRRLVDCRQDLVERQTAIKNWIVSLLHHETWYVRANLWSAAGLRRLAAMKLPPGDRMLVDLKRRQLELLAEQIDRVEAEMLEIYKGWPEAQWVDAVRGVGMVTAVSLLAHIGPIKRFATPEELISYAGLAPGMWQSDATCHHGRIGGKGTDSHLRYLLIEASRWLCQIPRYRPTYERVLKKRGRKIARIVVARLLLRSIHKMLTDGVQFNPAPARQSAVRSAAAVNPPSTETPGAGDNAADAFSALRLPAEKEKARTPSEPSPLCSHRVGARVARQRCPVLRSGR

SEQ ID NO: 412812 - protein, 316 aa, unidentified
MTTNPVVVGVDVAKDRLDVAVRPSGETWSATNDEAGITALVARLRPLGPALLVCEATGGFERAAIAALAAAGLPVVVANPRQVRDFARATGQLAKTDQLDAAILALFAERVRPTPRPLPDAAAQLLDAVLTRRRQLLEMLVAEKNRLGFAPKPVHRGIQAHIRWLERQLDDVTKELAALIEASPAWRAKDDLLQSVPGVGPIVSYTLLGELPELGTLSHKQIAALVGVAPLARDSGTLRGKRLVWGGRASVRTALFMAALCGRRWNPTLKVFYERLKAAGKPTKVALIACARKLLTILNAMMRDQSRWTSNVQYSC

SEQ ID NO: 412813 - protein, 372 aa, unidentified
MGHHTEAFVGIDTSKTSNAIAIADGGRGGEVRYLGDFPATEAAIRKLVAKLAAKYRDLMFCYEAGPTGYGLYRLLKSLGHECLVVAPSLVPKKAGDRVKTNRRDAVSLAKLLRAGELTAVWVPDERHEAMRDLSRARQAVKKDLQGKRQQILSLMLRLGRIYPGKTTWGPAHMKWLMAQKLEHREQRITFEELLDGIRQESERVERLEKAIREAVPEWSLAEVVAALQAMRGIDLIAAVGVLAEIGDLSRFQNPRELMGYLGLVPSESSTGDKVKRGGITKAGNGRARRILVEAAWSYRYPPRVSREKQPKVQAAPRRVREIAWKAQTRLCGRFRSLERKGKRRTVIATAVARELSAFIWAINCELMAHRQA

SEQ ID NO: 412814 - protein, 356 aa, unidentified
MQTQVTKKIDFTGQSLFIGLDVHKKSWSVTVVVDGIEHRTFTQPPDPKALNNYLQRMFPGGAYNSAYEAGFCGYGIHRELNSLGIRNIVINAADIPTSQKDKLQKRDPVDSRKIARSLEKGSLHGIHIFDRELEELRSLNRTRFYLMRDLRRSKTRIKSFLQYYGEPIPPEFDNNQWTLKFVSWLKQVKMQTLSGQDAFSNLISSYEYHRSQLLTLSRQIRERIREYDRELYTLLKSISGIGPLTASALITELGDINRFSNIDQLGSYVGLIPRIRESGETTHTGGITFRCNSFLRTLLIESSWQAIRMDPALMQYYHSHLINNKGHKVVIKVARKLLNRIRYVMKNRQPYVTGVV

SEQ ID NO: 412815 - protein, 460 aa, unidentified
MNRNRSKSRVDRTMPMVHPNAAAIDIGATMHMAAVRADRAPEPVRSFGTFTADLHRLVDWFTECGVETVVMESTSVYWIPIFELLDARGFAVFLVNARDAKHVPGRKTDVSDAQWLQRLHSFGLLRASFRPKGQIAELRAYVRQRERLLEYAASHIQHMQKALTEMNLQLHHVVADITGATGLRIIRAILAGERDPEALAGLRHYSCHSSAETIAKALTGSYRTEHLFALEQALSLYDAYHEKASACDVRIESVLKELIIHRGHDHGSAPPVSRRRNRTDQANALAFDVRAALFGLLGKDVTTIDGLGPYLSLKLIAECGDDLTSWPSAKHFTSWLGLAPSNKVSGGKMLSSRTRRSGGRAAALLRLAAVTVGRTDTALGAFYRRLSSRIGKAKAVTATARKIAVLFYNAVRHGMDYVDPGASSYETRYRTRVINNLHRRAKTFGFVLQPLEPKAGATVS

SEQ ID NO: 412816 - protein, 448 aa, unidentified
MSRKDNKRKGATNNTMLPVMRADAAGIDIGATEIYVAVPADRAEENVRCFPTFTQDLYALADWLTQCGVKTVAMESTGVYWIPLFQILEERGLEVCLVNARHVKNVPGRRTDVSDCQWLQFLHSVGLLRASYRPEQEICAVRSLLRHRESLVQMAATHVHHMQKALDQMNLQLHHVISDITGQTGLAIVDAILAGERNPQALAALRHERIKAPGEVIAKSLVGDYRPEHIFTLRQSLAAYRSYQELIAECEREIRHCLDDVHTSPPSDSASPDQAQNLEGTLHSQLKRIFGTDLTKIPGIRVGIAQTLLGEVGPNFTKFRSASAFASWMGLCPDNEISGGKVLWVGTRKVNCRAAKALRMAAQSLHHSKSALGDFYRRMRAKLGAPKAITATAHKLSRIIFHLITTRQEFDDSRFAADQLRHQKRQEIKLRAKAKAMGFELIPLQPAA

SEQ ID NO: 412817 - protein, 312 aa, unidentified
MTDQIFVGVDVAKDWLDIHHARQGAKRIDNSPAAARAFAARCAKEGAWVVFEASGGYDHQLRDALETAEVRFSRINPRQAGDFAKAMGVMGKTDRVDARMLAELGARLTPAPTQPLPPERRALQAQATRRRQLVEMRKQEATRLQQTTDPVARADIRGVIALLDRRITKIEARMSKLVAADPELADIDRRLQTAPGVGPIVATTLIAELPELGKIDRRSIAALAGLAPIARDSGRRSGPRSIGGGRPIVRTILYLAAIQASRRSPEFVQFRERLQAAGKSVKAAIIATARKLVVTLNAMLASGTDYRSTTLA

SEQ ID NO: 412818 - protein, 371 aa, unidentified
MNKFSKFVGLDVHKETIAVSVAVMDGEVRFQSEIPNTPEAVAKLVKQLKKEGALLSFCYEAGPCGYVLYRQLVELGQDCQVVAPSLIPRKPGDRVKTDRRDSLTLARLHRAGELTSVWVPDCTQEALRDLTRGREDLKHIQNQARQRLQAFLLRHGKRFEGKSHWTQAHFRWLETVKFDQPVQQILFQEYVDLAQALSKRVAALDEQVGKAGAASVHAPMIEGLSALRGVDHLTATIIVAEIGDLKRFAKAPELMSYLGLVPSEHSSGGTKSRGSITKTGNGHVRRVLVEAAWTYRFPARKTAALRRRAERTPEAVQEIAWTAQKRLCGRYQLLYTIKGKKKVQVCTAIARELAGFIWAIGQALPRPGAKA

SEQ ID NO: 412819 - protein, 324 aa, unidentified
MQGKVMPEQGGAMAAVYAGIDVCKERLDIHLHPIGEHFTVANDAGGWRRLKRELGRHQVVRVVMEATSKYHRRAHRSLDAGGFAVAVVNPLRARLFAEAIGALAKTDAIDARILALMAERLDPAATPPIREIVEAVQELTRARTAAIAERVAIGHRRTTAITSFLRAELARRIRTIDTHVDRLEAEIASLIAEDPGLARRYAILLSIPGIGPVAATAIIANLDEIGQLTDKQATALAGLAPFARDSGPVQGMRRIRGGRPNLRSPLYMAALSAARCNPDLKSFYQRLIANGKAKKIALIAVARKLLILANALVSSDRTWSLVRP

SEQ ID NO: 412820 - protein, 381 aa, unidentified
MRHIAYCEVVDGKVVIRATVKSLSQLESRLGPASPPARVAFEACREGWHVYDKLKAWGNEPHMLDTTRIRQLGVAQHRRKNDPIDAEVIAQALDTGRIAEAHVLSPERRKLRAQLSVRGALIETRSQYVTTIRGLARAAGILLPACKTENFPRTVDAAKLDEETKTLIAPLMTVLRSLETELAVVEELLARMAQADSILQLCATVPGVGLIVAATFVSVIDDARRFKNAHAVGAYLGLVPSETTSGGPDKRRLGSITKQGNRMARAMLIQSAWTILRLRDTSDPLKRWAEGVAKARNKRIAVVALARKLAGVLWAMWRDGTVYDPKTEAQAAAHGVRVAARQHERRADALERAARKLRREPKMLAPAKSPKRRKTSQEIAM

SEQ ID NO: 412821 - protein, 422 aa, unidentified
MNKHRYQAKGLQQVDWEKLAEAAADRRLVFAVDVAKEGFYGAFLVSAQEVLVTITWRHPQETRILEEHLRALGAVRIEAAMEPSGTYGDSVREVLRALGCSVYLVSPKRVHDAAEVYDGVPSLHDAKAAYLIGRLHLEGASRVWREDSPERRDRQALVAELDLYHSEQRRNLNRLEALLSRHWPELGRVTELNRAGVLRLLASYGSPQAVCAESAAAEALLYRVGRGLANAQSIAAILDSAEHTLGVTCTCGEQHLLQVLAEELLRTRQALREVERRIAKWIERDPPLQPLADTLGKTTALVLDTAVGSPLDYPNAHAYLKAMGLNLKERSSGQHQGRLKITKRGPARARHYLFLSALRFVQRDPVIRAWYLGKLRRDGQISRCNALVAVMRKLALALWHVARGSPFDSSKLFDLKTLALAA

SEQ ID NO: 412822 - protein, 342 aa, unidentified
MKNTTIAVDLAKSVFEVGISHHPGHVAETHRLSRAQISEFMAKQKAATVVMEACGSAHYWGRTFEGFGHEVRLLPPLYVRPYVQRSKTDRADVKGMLEAYRNRAIRPVPVKSESQQQLTSLHRMRSGWIAARTARINSARGLLREFGFVFPLGAGTVSGRIRTLIEDADTPVLMPLRELLHQMVLEIGELETRIKAVEKQLEALATQTPVVGLLRTIPGIGLLTSTALVGFVGDVGRFHSGRHFACYLGLTPREYSSGSRRRLGRISKQGDDYLRTLLIHGGRSVLVAAKSSSQPDRFRAWGLEIQLRCGHNKAAVAVANKLARIAWAVWKSGKPFESRPQA

SEQ ID NO: 412823 - protein, 353 aa, unidentified
MTDIVTHNDRIATIGMDLGKRSFHLIGMDARGKVIMRQQLSRGRLERHMANLQPCLVGVEACAGAHHIGRRLSAFGHNVRLIPGQYVKPFRKGQKNDYRDAEAIAEAVQRPTMRFVPIKSAEQLDLQALHRIRSRLVGHRTAVINQLRSFLLECGVIVPQGPARLREILPSVLAQRTDVLSPRIIRLIEELADDWRRLDDRVDAVTSEVHALARQDECCRRLTSVPGIGALTASAVVATIGNGAAFSKGRDFAAWLGLVPKQLSTGDRTILGRLSKRGNKYVRTLFIIGARAVLAKPGSWAKFGLQGWLAAAAKRLHHNVLAAALANKLARIAWSVLYHGRSFARNFEPQSVS

SEQ ID NO: 412824 - protein, 372 aa, unidentified
MLIHYIDIAKRNFVIAVSSLSKTKTETNNPKGIAHTIEYLKKHKVALVVTESTGGLEIPAAKAIRRAGIAVIIANPRQTHQFAQSQPLTKTDAKDAKMPAFFTQMMTQKEDWQTMPYQPPTEAEEVLEALVNRRNQSADMRTAEKNRLHQVHETQVGSVKQLIAHFDRLIDESDKQIDDHTHTHFDGKAQVAEQIKGIGSITTATLMAMLPELGRLSHKRIASLVGIAPHPRKSGEAKFKSRCFGGRSAVLKALYMATVAATRFEPLIRDFHQRPLSEGKPYKVAVTACMRKLLETFAKFLSLTTTEIPTQVFGCFRPKYRLILPKHPLNPARIPDNQASGLLFRRQRAHLACWPLSTGSNTSPSDGFAHSL

SEQ ID NO: 412825 - protein, 410 aa, unidentified
METIFERVAGLDVHKAQVTACVRVPEAGRGREEHLAEFPTTVRGLVALRDWLEAHGVTHVAMEATGVYWQPVWHVLEDACELYLVNARHVKQVPGRKTDVSDAAWLSRLMEAGLLRPSFVPPKPQRALRMLTRYRKTQIQERAREANRLHKALEDTGIKLDCVATDILGASGRAMLDALCRGTTDPEILSDLARGRLRSKLPALREALEGRFAPHHALLIGAILAHLDFLDEQIEGLSDAIEAALAPFAGGVRLACTIPGVARRTAEVLLAEIGTDMGRFPSAGHLASWAGQCPGNHESAGKRRSGRSRQGSKWLGIALEEAALAATRTKGSYLQALYQRLRPRIGHGRALGAVKHSILVSFWHMFSTGEVYTELGGDYYRRRDPERLTRRLVAQLERLGHHVTLEVAAA

SEQ ID NO: 412826 - protein, 379 aa, unidentified
MKQFSRYLGLDVHSREINVAVVEEDGKERYLGAIPNRPESVRDLIDRLGAKEQLRAVYEAGPTGYGLYWELERMGVSCEVAAPSLIPTKAGDRVKTNRRDALKLARYHRSGDLSYVWIPDEDLEALRDLIRAREAGKRDEKRARLRLKSFLLRHGLRAPKGVRAWTAKYRAWLDAMTFERAALTGTYQDYLHEVHHQELRVKRLEAAIEEAVEQAPEQFREVVGALQSLRGVGKTTAIGVTAEVGSFSRFPHPQQLMGYSGTVPSERSTGDKHHRGAITKTGNSHLRRLVGESAWSYRHRPALRYALKKRQEGQAAEVVEISWRAQVRLCGRFHRLVARGKTKQKVVTAVARELLGFMWAIGVEVERRRTNATAQEKLG

SEQ ID NO: 412827 - protein, 349 aa, unidentified
MNRTTYGLDIAKNVMQLHWVDTETGEIGRKKLARAKLSDYFARLQPVRVVMEACGSAHHWARVLSGLGHQVELLPARQVRPFVRSNKDDAADARAIWVAAQHSDIRRVPQKTLDQQAVMGLHRTRAHWVSVRTATVNALRGTLYEFGVILPGGKNAGLKALGKHRAEVDAKVPATIQRLIDGQLATLKDIERCIDELEAEIGAQQRQLPKANTLRQVPGIGLLGATALAATLGDGKAWKSGREFSASLGLVPAHSGTGGKARVGHLSKRGDPYLRTLLIHGARSVITHAKTKPKWLEQLLARRPTNVAVAALANRMARTAWALVAHGREYQREWKSAPPTGCVAQAAAA

SEQ ID NO: 412828 - protein, 321 aa, unidentified
MTQIANGVAGIDVAKDKVDGCIRKLGIRQTFPSSSLGHRQLVALLRKHKVTKAVMEASGGYEREWAKALREAGIEVRIVDPKRVRSFALSAGRLAKNDTIDAEMIAWFAETFDEAPSQTYDAPREELAGLVKARRNLMDLKTRLQNQNEHVVPGLAQKAHSQVLKTLAAQIAKLEAAISAKVKATPEFAERAEIIESVPGLAGTTSALLIAGAPELGKVSDRIAAALIGVAPYDDDSGKRRGERHIKGGRRWVRNGLFLPCLGAATQHNPVLSAYYERLIAKGKEPKVALIACMRKLIIILNTMIARGERWNPKPLRTAVS

SEQ ID NO: 412829 - protein, 438 aa, unidentified
MSNKVIFNLDELFISVGIDVGADFSWMSIALPNQQLVGKPYKILHSSMNSLTTAVSKIKEAEELYSLESRIFLESTGIYHYPLFCYLRDKGFNCSVINPIITKNSTNINIRKVHNDRFDSKKAALVGLKPDLKVSLMPSDLALNCRNLCREYYDLMDNRSAYVNKLQGELRIAFPQYLGIFSKVTINTSLTLLETYTSPSAFLKADKQEIIDIIKSTARFGLTYAQNKYNAIIQAATDANQFGYIIDSNIKRIRLYISFIRKYDEEINSILESLHELVDANEDSDFVKQIHLIETFKGAGFLSAVSIMGEIGDFSAFSKPKQLFAYFGLDPAVKQSGKFEGTKVQMSKRGSAIARRVIHTLTLQSISISRNREAKNPVLREYYLKKCDSKPKLVAMGAVSHKVCNMIFAILRDNKPFKIIAPQEHIKQYNSAKCDIAA

SEQ ID NO: 412830 - protein, 332 aa, unidentified
MNHCGIDTGCKTLDVVVRKKGKSLTCRSFENTPAGHKELLKYLRKHKVNRVGLEATGYYHLDIAIELDDATDIDVMIINPRASKNFASALMTKLKNDAVDAEVLAIFVERMDFIIWSSPDHQVFALRACGRRLITLTKEKTKAKNQLHAFSMTKHTPAFIINDIKLTIEQLENQILNIVKNALAIIHENNKLAKRYNHLVSMKGVADKTAIKLLGELGVLEADMKGKQWVAHAGLFPREFQSGTSVNKKTRIGKIGNRYIREALYMGALSASRHEPHVRAFYLHLINDNGLTKLQAICAVMRKMLLAIHGMLINDKPFNGQLFYRLDEAQAN

SEQ ID NO: 412831 - protein, 419 aa, unidentified
MSKSNIARQLAQVQPGTLHAGVDLALENNVVEVINEKAERLDRFSFPQDRGGYDYFERRLEGLRRKNQASEVVVAMEPTNYFWKLLAQELEEKKVIYHLVNAYTVKKHREGDQLYRSKDDPRDAGQIAELSRNGKYTETHLQKGAYEDLRLYAPLYDQVQRSIWREKQVLWGLVGQVFPELFKVFKDLEGETSQALVAACAPAAVIRQMTVETFTAQVRAVYTGKRLLVSKLHRLYPLAATSIGLTEGLEAIQLAIQLHLAHLQALQQQLQQVKSAMTACLATLPEAPYLLSVKSLGAVSAALFMAEVGDPNRYQAAAQWIKLAGIQPTPNTSGKKQRSLTPMSHQGRARLRTMLYYTCLRLIQHDDHFAQIYAQLQRRQKNPLTKMQALGVLMNKLLHILWALIHNQTFYNPSFGQSI

SEQ ID NO: 412832 - protein, 470 aa, unidentified
MKYKQRRKDTWSKRRGPLSLLERIQPDAAGIDCGEKSHFVAVPPDRDAMPVREFRTFTPDLHQLADWLVRCGVKTVAMESTGVYWIPVYEILEQHGLEVVLVNARHVRNVRGRKSDVLDCEWLQQLHSVGLLQASFRPAAAIVPLRSYLRERGILVEEVAARIQRMQKALTQMNVLLHTVISDLTGATGLKIVRSILAGERDPEVLAAHRDSRCHASREEIVAALTGNYRAEHLFSLRQNYTAYQFHLQQIGECDSAIEALLNTLAAQQPQPSAALPPARRKSNPKGHEPRFDIRTPLHRLTGGADISQIDSIGAQAGLQLIAEIGTDMSRWPSENHFTSWMTLAPNNKVSGGRLLSSRTTPSANRAAVILRRCAMSLARTPTALGAFYRRLAARTSKPTAITATARKLAVLVYRVLSGKLIYNDPGAAAYHELNRTRELKSLRKRASLLGLELVDPCTGAIVLKPDTVS

SEQ ID NO: 412833 - protein, 343 aa, unidentified
MDHFAGLDVSVKETSVCIVDDTGKIVREVKLASEPAALLAVLTNPTYHFKRIGLEAGPLSQWLFSALAEAELPVICVETRHMRAVLKAQINKTDRNDARGIAQMMRVGLYRPVHVKTLRSQKLRMLLTHRKLLQSKAIAIENDLRATLRNFGLKVGIAGKVKFEARIKELVENQPDLAVLVEPLLIVRRVLREQIGILHRRLLAVVRDDEVCRRLMTVPGVGPVVALTYRATVDVPARFRKSKAVGAVFGLTCSKYQSGEIDRSGRISRCGDEMMRVMLYEAAQSMLFHSTKWSWLKAWAMKIARHRGMKKAIVALARRLAVIMHRIWVDGTEFRWTKEVVTA

SEQ ID NO: 412834 - protein, 372 aa, unidentified
MRRRQRAGDSPTCPGSKRPAFSRGVVRRLLVASPNSCLGPQARIVQGRVETSRFRVGGLMIAPTVFVGIDVSKDSLDIALRPSGERWQVAHESRGIEGLLQRLGTLPAALVVLEATGGYEQALAAALASAGVAVVVANPRQVRDFARATGQLAKTDAIDAAVLALFAERVRPEPRPLPDEARQGLEALVTRRRQLIEMLIAEQNRLLHARRAVRRSLTDHIRWLERQLGGVDRNLDHAVRSSPLWRAQDDLLQSVPGIGPITSRTLLAELPELGRLSRKEIAALAGVAPLARDSGTLRGRRTIWGGRASVRAVLFMAASAATRWNPVIRIFYQRLRAAGKPAKVALTACMRKLLTIANAIMRSQSPWRVATA

SEQ ID NO: 412835 - protein, 420 aa, unidentified
MTRGDDSRIIGIVHPICCGLDVHKESVSACVIFPDKDGVDQYDIKEFGTFTDELMRLRLWLLDHECPVVAMESTGIYWRPVHNVLEDAFRVVLVNARDIKNVPGRKTDIGDSKWLAGLLRYGLLKSSFIPPQDVRQWRDLTRLRKKYVQSVGDYKKRTHKLFESANIKIDSVVSDLFGVTGRNLMHLLVTDRERLTLSNIQFCVRGKLKGKEAELFRSIQGFFTDHHRFILNELLSTIATLEAQIEALDHEICCAMKEHEPLLNRMKKAAGIADVSSREILAEIGPTLDTFPNAASLASWSGLCPGNNESAGKRKSGRSSVMKHHLKTIMIEVAWAAVKKKGSYFKDKYYRLKARRGAKKAIVAIAHRILLGIYHVIKDGVDFRDLGEGYLTLRNKSQKVFHLRKQALALGFDLVPQTMP

SEQ ID NO: 412836 - protein, 395 aa, unidentified
MKQSSVNQPSFGERRSGAGNVHAAYIGLDVHKATIAVSIAEAGRLEPEFRGEIPNESKAIDKMIRQLSQRFNGQPLLFSYEAGPCGYGLYHQIQASGHDGEVVAPSLIPRRAGDRVKTDRRDAVMLARLSRAGELTPVWVPTPEQEAIRDLTRAREDMKAIELKARQRLSAFLLRHGKVYTGKSKWIPVHFRWLETVRFDNRIQQIVLQEYIEAVREAQRRVAGLEKQMEAALMEWSLASVVRSLMAMRGISLITAMTVLAELGDISRFDSPRQLMAYLGLVPSEHSSGGSRRQGGITKTGNGHVRRVLVEAAWSYRFPARKTRIIEKRAEQTTPTVQAIAWEAQKRLCGRYRRLAATGKMKQQVITAVARELTGFMWAIACEAMGKPHGSRATA

SEQ ID NO: 412837 - protein, 425 aa, unidentified
MNFTQNDKINQVTDKTLVIGMDIAKRTHYACMVDERGLLLKKSFPVYQSRQGFEFFYNRILECMKEFGKTDVIVGIEPTGHYWLNLAYFLEERGIPLVMCNPLHVKRSKELDDNLQTKNDAKDALVIARLVKDGRYSFPRILKEMEAELRVGATLRGNLVEEMNTMKNKMIRWTDRYFPEFQQVFPSFGKMALAVLECTPFPSDIAGKEPMELLELFRKVEGLKSPQMPKTKQLIDYASISIGITEGQMMARTEITTLVQRFRQIEKELESLQGKLTELIQGTEEYKYLQTVPGLGDATIIDLLSEIGSFAHYNHPRQLLKLAGLTLRENSSGQHKGQKRISKRGRRHLRALLFRVMMPMIRHNKAFRQLHEYYTTRQVNPLRKKQSIVVLCGKLLKVLHAICTKHMAFDAEQMMGDIPKLERAA

SEQ ID NO: 412838 - protein, 332 aa, unidentified
MRNNACGIDVSYKTFDVEFMINGKPTDIKSYTNDNKGRKSFIKKLKAKKITHVCLEATGNYHLDIALMVDKIKEVKLMVINPRISHNYSKVLNQRAKTDAQDAHVLAHYAAYMEFNQWNAPDEVIFSIRACGRWLSQLSKQTTKLKNQLHAYKSTKFTPEFIISDVKLSISNLEAQKKNLIENALELILNHEKASRMYKLITRMSGFADKTAIKLIGELAVLDPDMKPKQLVAHAGLNPTVFQSGTSINKKARLSKAGNKYIREALYMSAMQMTFRNPNVQAYYEHMVNDNGITKRQAICAIMRKVLMSIHSMIRDNVDFDANKFYKISANQ

SEQ ID NO: 412839 - protein, 319 aa, unidentified
MGTVMNQTSSSLYIGIDLSGSTLDVAIHDTTEHFSVDNETAAIEQLVQRLIALGPTLIVMEATGKLELAVLRALCQAGLPAVAVNPRQVRDFARATGKRAKTDRIDAFVIAHFAAVIKPVVRPLNDVQTEQLQALLLRRAQLIDMLVAEKARLERAHAAAKESLNDHIKWLKQQLTVADRDIDSFLRASPAWRQKEDLLRSVPGIGPGAAATLIAFMPQLGSLNRREIAALTGVAPFNSDSGKHTGKRRIQGGRAIVRRALYMACIPALRFNPTIRAFYDRLRQAGKPFKVAMTACIRKLIVTLNAMVHNSTPWSPSTN

SEQ ID NO: 412840 - protein, 344 aa, unidentified
MANLNQFCNFTKIIGIDIAKSVFQIYSCDTQTGEITNVQVKRDKVLESFANCGKCLIGMEACGSSQYWARQLQALGHTVWLMDPKLVKPFVRHNKSDKADAEGIYHALVSGVRAVTVKTETERDIQTLLTMRALLVKQRTARINHVRGLLAEYGHVMPRNVNQFDTKVDECINSLEGDAVQLVINMMRDTVKSIRDDQDRIKTLQREISRLANQTRNAKHFLTVPGVGDTIMAYMCVLLADPTQFSSGRQFAAYLGLVPMHTGSGGKTVTTKIPGRCDKALRALLVQGAHAVARSKYRTDWVKNILAKKPKKVAMVAIANRMARQCWAVASKGQDWRRMPVTAA

SEQ ID NO: 412841 - protein, 356 aa, unidentified
MAEGSWVGLDVHARSTVAGVLDGRSGELRVRRVPPESGQTVEWLRALPQPVRVAYEAGPTGYGLARACAAVGITCTVAAPSKIPRAPGDRVKTDRRDAERLVRLLRLGELVPVRVPEPHEEAARDLVRAREDARGDLMRARHRLSKLLLRHGIVYDASAWTHAHDAWLRQQRFPSRPLALAFDECYGAVLQAKTRRDALDAAIGEIAAEPPFADVVGRLVCLRGVSTLTACALTVELGDWRRFQPQSLGPFLGLTPSEDSTGERRRLGAITKTGNTHARRLLVEAAWHQRRPLRASATLERRRQGQPAVVRARADQSARRLHQRWQALESRGKRRTIVAVAVARELAGHCWALATM

SEQ ID NO: 412842 - protein, 524 aa, unidentified
MVTTTSLRKSRGAKQRFIGKPTGQIQERVQAAKPERFGIVAVDCAKRRSKWMLCNFYGQVIVEPTTVEHTAGGLRAMTQEIAQACQAAGLRDTIVAVEMTGIYHKPVYRACRRAGFDTRIVHPFASHHYRRPLHPDEKTDDHDLEAIFHAAVKGYGLAALPVGETYQSLQAVSRHRHNLVKQHARLMVQMRRLLHQTMPGFADLFEDDKLFRKSIAMPVALALPSAAAIREAGVDGIARHLQRTKVRFQTRTIERIVAWARTAAEPSELAAMYTRQWRELHEIRQLFDQHIAAAEREMAGFLVKTPYVLLLSVTGINVVSASRLAGEAGPIEHYASSRAITGRAGLFPSRYQSDEVDRPDGSLVRQCNRKLRGAAMQIAENLIKCHAYYRGLSALWMRRKVDPRDRRCRVANRAMRMVYQLVGGRQLWRGRGVDREYLLAKLQEFHRLHHTPLEQTIRDLNEAFAWLPRSAYAAEAEPLAELARKRHRGPQRIGDLLIPLLLRLGVAFAPEKLQSNTSEARSSG

SEQ ID NO: 412843 - protein, 343 aa, unidentified
MDHFAGLDVSVKETSVCIVDDTGKIVREVKVASEPEALLQVLKNPTYRFKRIGLEAGPLSQWLYTALAEAGLPVICVETRHMRAVLKAQINKTDRNDARGMAQMMRVGLYRPVHVKTLRSQKLRMLLTHRKLLQSKAIAIDNDLRGTLRNFGLKVGMVGTARFEARVKELIENLPDLAMLVEPLLIVRRVVREQLGILHRRLLAVVRDDDVCRRLMTVPGVGPVVALTYRATVDVPARFRKSKSVGAVFGLTCAKYQSGESERTGAISRCGDEMMRTMLYEAAQSMLFRSTKWSWLKAWAMKIARHRGMKKAIVALARRLAVIMHRIWIDGTEFRWTREAVTA

SEQ ID NO: 412844 - protein, 316 aa, unidentified
MNTKTDQNINVGVDTGKSQLDIYIRPLDIYFTVSNDGKGIREAIIKLKKFNPVRIVIEATGRLEFNFIVACAKADLPFVVANPIHVKRFAGAIGQRAKTDKLDAKLIAHYGEAIQPNLSALKPETMQAMSDLVTRRNQLLTMQTMEKNRLNIMPKYLAMTIKPILTAFKNQIEKIENKIAALITSCPDYQAKSDILQSMPGIGKIAAASIISNLPELGYINNKQAASLVGVAPMNRESGRYKGLRTIQGGRPQVRTVLYMAMMSAMQCNPVFKTTYQRLIAAGKPKKVAIIACVRKMVVILNSMLRDGVMWEAPKA

SEQ ID NO: 412845 - protein, 317 aa, unidentified
MTQISMVTAGIDTAKDKLDIAVHGRATRWQVENGLAGWRRLASELAGAGVARVGIEATGGYERGVVGHLRAAGFTVIVLQPIQVRAYARLRLRRAKNDALDAALIAACAAAVDQPRIAPDVRLEELAGHLTFVEQIEEDMARFKTRIEHVGDQRLRRIVETDIARLKARRAAELLRIASKLRAHDDLAQRLDLVLSVPGIGERTALAIIIRMPELGRVSREEAAALAGLAPFDDDSGKHKGQRRIAGGRGRLRRSLFAAALPAAFRWNKALVNLYARLTARGKAHNVALVACARKLLIYANAVVQRATPWTERPRVS

SEQ ID NO: 412846 - protein, 346 aa, unidentified
MKILALDLGKYKTVGCAYESESGAHEFKRGFSTPAGLARMVQEVKPDRVVIEICSIAGWVCDLLRGMGIEVQVANTSDDAWRWRKVKQKDDRRDALKLARLSAVNQLREVYIPQIDVRQWRALITYRQQLVQRRTKLKNHIRDLLLREGQLLVRGSKCWNKLNLELLSSLARPLNEVGLAELWRGELHEELQQLQVIQQRIALVEEKLNALGAADGRVQLLRTVPGVGPRLAEAIVALLDQPQRFRKASQVSGYIGMVPKALDSGETERRGRITRQGSRLVRSLLVEVAWAGLRHSAWVRQTYQRLSGGKKARKKIAIVAVGRKLLVRCWAMLRDNRPWDWQPQIT

SEQ ID NO: 412847 - protein, 442 aa, unidentified
MSELAVLDRRAAFVDVGSEKMHVSIGGGPPQVFGAVTSQLQALRDFLLEHRVRSVAMEATGVYWLPLYSVLEAAGLDVRMVDGRQTRHLPGRKSDMQDCQWGSTLHAHGLLRAGFVPPAHIRRLQDYLRLRGEHIAAAGGHVQHMQKALERMNIKLHDVISSLTGASGLAVVRAILGGERDPAALLELCDVRIRKAKAERVVEALRGNWADEHLFALGQAVQSWDHYQAQIVDCDRRIAAVLARMPGGDGPAAGAEQPATRRTQPGVNTPQIDNLRDLLQRMCDGKDATTLPAHSEYTVLQLVGEVGTDLTRWPTEKHFASWTGLAPGSAQSGKRRAAVRRRRNRAGKIFCVMARALARSKYIALGGYYRRMAARRGGLVANKALAHKLAILFWRVMVKGMDYVEKGLAHYEAQVLETRQRLLRKLAKQFGQQLVPIQANPS

SEQ ID NO: 412848 - protein, 402 aa, unidentified
MNAVGIDVSKGKSMVAIMRPFGEIVSAPFEIKHTASDINSLVELINSVEGESRIVMEHTGRYYEVLAHQLSEANLFVSAINPKLIKDFDNDSLRKVKSDKADAVKIARYALDKWQNLKQYSVMDELRNQLKTMNRQFGFYIKHKTAMKNNLIGILDQTYPGVNTYFDSPARSDGSQKWVDFASTYWHVDCVRKVSLNAFIDHYQNWCKRKKYNFSQSKAEEIYGKAKELVPVLPKDAITKLIIKQAVDQLKSASTTVESLRTLMNETASKLPEYPVIMAMKGVGTSLGPQLMAEIGDVSRFTHKSAITAFAGVDPGVNESGSYEQKSVPTSKRGSSDLRKTLFQVMDVLIKTHPQDDPVYQFLDKKRAQGKPYYVYMTAGANKFLRIYYGRVKEYLSSLPES

SEQ ID NO: 412849 - protein, 290 aa, unidentified
MDTEVLISVDPHKASSTLVVFDPVTRTPIDGARFANTTAGYRDLVRFAHRWRQRRWAIEGCHGAGRSLAQRLVADGERVVDVPAKLAARVRVFSTGHGRKTDHDDAISIGFAALDATGLHEVALDDATVTLGLLSDRRQELVALRTQTVCRLHRLLAELTPGGVSGELSATKAAAVLARLRPGDEPGRIRRQLAKEHLADIRTLDRRIKAIGVQIAKVVTATGTSLVDIFGVGPVLAARILAEVGDVTRFPDKDHFASCNGTAPIDASSGDNNVIGSLVPATAGSTTRCT

SEQ ID NO: 412850 - protein, 319 aa, unidentified
MDGSITRFAGIDVSKKSLDLCLLPEDRRQTFTHDKAGIQQLLAALPVGGTCLIAVEATGGYHRNLVAELVNAAHQVAVVNPRQVRDFARGLGILAKTDRLDAHVIACFAQHVRPRVDAPPSPAQAELEQLVTRRRQLVDLRTAELNRMQTVSSKSVRKSVQQMVDMLRKEIRRVEHDILTLLQSDDDWKAKMDRLGSVPGVGPVSVASLLADLPELGQLNRQEIAALAGVAPFNRDSGRFRGKRTIWGGRASVRSVLYMAALTARRHNPLLRTFAQRLEAAGKPFKVVITACMRKLLIILNTILKEQTQWQPEKSLANT

SEQ ID NO: 412851 - protein, 400 aa, unidentified
MTSVFRFLEKKITRQQIKQSPEALNQWIGYLRNRFRNGPIAVCLEQSKGALINFLICHDLFVLYPINPKTLAKFREAFRPSGAKDDPDDATKLLEIVANHRNQLTPWKPAEEIVRIIDILARNRRDAVDRRKQVINQLRSVLKAYFPQAIDLVSEDICSPLTWDFLMKWPTLQKLQKVKDATLRKFYHDHHCYKKKVVETRLQLIRQTQPLTSDEGILKTSPIEVKLLCQLLKQYTQSIAEYEQQLKELYPQHPDAEIFRSFPGAGTVHSARLASAFGADRERYKSAESLQKYSAVAPITISSGKSKVALARYKCPKHLRQSFIEYAGQSLQYSLWTAAYYRMQIEKGETHNVILRALAFKWIRIMFRCWQDKIPYNELNYLQSLTKKGSKILNYMTAAT

SEQ ID NO: 412852 - protein, 427 aa, unidentified
MKEQSGTIVGIDWSADSHTCYDLKADKSFKIPDSVEGYGKLLNDYPDAVFVIEEANNRIGDYLLINNREVYVLPPCRSKEARKYHFSSGAKSDSLDAKAIALTFKEHPSYCLKARYSGVGAKITKLVTMYNIVSKTHSQQCNRLYSVLLRYFPEYLHIMDKQYRSNTSLRILSICPTITELKKVSNEELRKILNKENYRMTSILRKKLDRIRSEGISWGDTSCEGNLIMFLANQILALRGTAESLRKEMGETLENSPYRIILSIPGVKAVIGSYIVKAYLTHDFRSYQEMQKYAGTVPFLFQSGRKSIMLMRKKCDNDLRSMIHIAAFASLKTCGWARNYYKRKRKEGKTYGHALRALGNIILKIAFSMLSKMKEYDETLFLNAKGIKTTQQNNTTIPEAFTNPEYSQDAHPSLAATKDVVENLNVT

SEQ ID NO: 412853 - protein, 342 aa, unidentified
MELHTIGIDLGKTVFHLVGLNLRGEVVVRKRFSRSQLLRFTANVRVGLIGMEACGGAHFLGRALREQGHEVRLIPAQYVKPYVKTNKSDYIDAEAIAEAVTRPTMRFVPIKTDDQLDLQSLHRVRERWVMRRTAVINQIRGLLLERGITLRKGRHHVDAALPLILEDADVKLSGAVRMLLAQLKLDLDQLAVRIDEADAVIQKTAHENEACRRLVAIPGIGPLTATALVAAIGNGAAFRKGREFAAWVGLVPREHSTGGKQKLLGISKRGNSYLRRLFVQGARAVLQFREKQSSGLSAWLAQLTSRTHYNVAGVALANKLARIAWAVLATGEAYRPTVLACR

SEQ ID NO: 412854 - protein, 444 aa, unidentified
MAFDLPTIHNRVVSLDIHSRQITACALIVEENTIRRLIHQQFGTFKCELDEMVQWIQELRPDAVSMESTGIYWKAPYNALEKAGIIPIVVNPRHVKNLKGHKTDVSDSHRLALLTRADLLRGSFVPPKKMRDLRMLSRQRKKYVDQLVSLKNRLHSILTEIGVRIGTVVSDIHGKSARAMIKAIIDGKEPEVVIRLASNRLKASKEELFDAVQGDMTPWHKFVLTDLMQRIEQAEAGIAQYEKKLLEGLEEERPYLEILQTIPGIDRVGAAMLLVEIGTDMSVFGKDDRLAMWVGLCPGNNESAGKRKSGRTTKGNRHARSLLVEFAHAASRTASVFKTKFQSLRGRIGFKRAIVATAHKLLRTIFAVLKNRVVYRDSSVNYEALLAKRNAPRWIRELKKAGYLDKIVEDYLREKDAETFREKDAETFREKEGTHDRKKVGARF

SEQ ID NO: 412855 - protein, 356 aa, unidentified
MEKNNKLDFAGQPVFIGLDIHKKSWEVSIYTRHGEYKSFSQPPRAAALAHYLRHHFPGALYYAVYEAGYCGFWIHDQLVQETIHCLVVNPADVPTKNKEQRRKRDRVDCRKLARGLRNNELEGIYVPSRAKLEDRSLIRTRLSMGGKQRRCKNQIKSMLLFYGIVIPEQREIGHWSRRFIQWIEGIRLERASGDLALRIHLEELSHLRQIIAKLNRAILALSRTGEYRAWVSLLRTVPGISTLTAMILLLELGEITRFPSLDQLCTYVGLIPDTQGSGEKEHVGGMTQRGHSYLRWLLVEASWVAVRKDPAMMMAFNEYCKRMKKSKAIIRIARKLLNRVRYVLKNQAEYVPCVIE

SEQ ID NO: 412856 - protein, 438 aa, unidentified
MSNKVIFNLDELFISVGIDVGADFSWMSIALPNQQFVGKPYKILHNSIDSLTTAVSKIKEAEELYSLESRIFLESTGIYHYPLFCYLRDKGFNCSVINPIITKNSTNINIRKVHNDRFDSKKAALVGLKPDLKVSLMPSDLALNCRNLCREYYDLIDNRSAYVNKLQGELRMAFPQYLGIFSKVTINTSLTLLETYTSPSAFLKADKQEIIDIIKSTARFGLTYAKNKYNAIIQAATDANQFGYIIDSNIKRIRLYISFIRKYDEEINSILESLHELVDANEDSDFVKQIHLIETFKGAGFLSAVSIMGEIGDFSAFSKPKQLFAYFGLDPSVKQSGKFEGTKVQMSKRGSAIARRVIHTLTLQSISISRNREAKNPVLREYYLKKCDSKPKLVAMGAVSHKVCNMIFAILRDNKPFKIIAPQEHIKQYNAAKCDIAA

SEQ ID NO: 412857 - protein, 393 aa, unidentified
MCLHMYSYFIGIDIAKNTHWASCLSSDGEIVSEPFSFSNDNNGFQKFISKFESLPKEKILIGLESTAHYGENIISYLFNLNYNIGLINPIQTANLRRSNIRKTKNDKVDTKIIIKALTLGNYSPITSRDINNLKLKGLCRSRRNLVTMRSKAKIQLVSDMDQLFPELAQFFKGNLHLNVSYQLLKDFSSPKEIANLHLTKLSNILHDNSHGRYNKQDAICLREIAKNSVGIENPSLSLQVKHSILQIELYDEQIVEVEALYQSILDEMNSPILSIPGMSYNQAAVIIGCIGDINRFNRSCQLLAYAGLDPSVIQSGNFQARSTRMSKRGSGMLRYSLVYAAHNVVKNNQTFKDYYELKRSQGKSHYCALGHVAHKLVRIIFKMLKENVTFNLD

SEQ ID NO: 412858 - protein, 408 aa, unidentified
MNSITNQKINQVTEKTLVIGIDIAKRTHYACAVDERGRVLQKSFPFSQSREGFDAFYERLLVLRAAHEKSEVLVGFEPTGHYWMNLAAYLSAHGIPFVMVNPHHVNRSKELDDNLQTKNDQKDALVIARLLRDGRFSYPRLLENVEAELRNGATLRSKIQEDLNALQNRIIRWIDRFFPEFTMVFKDFGKMAYAALEMTPLPSDIQGKAPEELLFLYRQVEGMKSPQLPKAKQLVEVAQHSIGLTEGLVMARIEIATLLTQYKLMQSQLVTLTEQLTEIAKEMTDYEYLNSVPGISDVTIVELLSEVGSLTHYEHPRQLIKLARLTLRENSSGQHKGQKRISKRGRRKLRALLFRVMMPLLRHNEAFKKLHEYYYTHYQSPSKEAIDCRTVWKVTEDFTHFVQEESVF

SEQ ID NO: 412859 - protein, 312 aa, unidentified
MTQYTIGVDISKAHLDAHRLPDGIARQFTNDRPGFSAMIKWIGNLDIERIVYEPTGIYHRHFEDALAKAGLPLAKVNPLQARRFAEARGTRAKTDKVDAAVLAHMGIALQPGICTPPSRMLRDLKELQVARQALIKDRTAARNRSKSLRMTILKKQGNLRLRQIERSLEVIEKTMLALINDDHKTARAFEILCSIPGISKITAATLLVEIPELGTLEQKAVASLAGLAPFSRESGKWKGKRFIGGGRKFLRDALYMPALVACTYNPDMKVVYQRLKGAGKPFKVAITAVMRKLIILANTLVKNNRMWEEIRT

SEQ ID NO: 412860 - protein, 347 aa, unidentified
MVTLGGDCHKRTHTLVAVDDNGQQLGAKVVPAVSAGHLEALDWARQWAERRWALENCRHLSRRLEADLLLAGEVVVQVSPKLMAGARRSAREWGKSDPIDALAVARAALRESDLPVAQLEGKSREVKLLLDHRDDLVGERTRVQNRLRWLLHELDPNLNVPERSLDRKVVLKRIAKVLAVHRGVAADIAVEQLERVRQLTKRINELEGQIRALVSDLAPTLLKLEGCAALGAAKLIGETAGITRFKTPARFAMHNGSAPIPVWSGNTGRHRLNRGGNRQLNVVLHRIALTQMRLGGRGYDYIQHRRAGGDTMREAMRALRRRISDEVYRRMWQDSMRTTRHRAQAAA

SEQ ID NO: 412861 - protein, 347 aa, unidentified
MRKIAYLAIDVHARNCVLGDMDGNGNFRGNRSFTTNEINIIKAIKAIKAKKKYLVIEAGPMSNWVAQVANDHLTKVFICDPRENALIYKSSQKRDKIDTKKLCRLLRLNEFKAVYRPESDQRAIFKAAAQHYLDLRDQLSALKQKIKAVYRQWGVIDVFTDSVYSVSGRDQFLKQLKHRPIYLQLKRLYALLDTTADMKQDAQESMTSLGRKYPEIKEFKKMPGMGIVGSHTFDAYIQTPHRFAKTNRLWKYCRLGVTDHSSDGKPLGYKRLDKAGIGELKAVSYRAFISAMKGDNEVRRFYLKSLQHTHDKKHARLNTQRKILSVMLGIWKKGSAYRSELFLDPSL

SEQ ID NO: 412862 - protein, 413 aa, unidentified
MKLFVGIDVSSEKLDVCVLDSEQNKLAQQSTTNDLNGASEIKALVLKTNASVNYQRIVIGMESTSVYSFHPAMFFHEDQELKALPLDVVTLNPTMIHRYKGLFDEDKTDTIDAFRIADFLRIERYRVPIIKEEKYIALQRLTRTRYQLIHQMTECKQHFLENLYYKCNTLTRELPTSVFSASIMDILSDSLSLDDIAQMDVADLATRLNQAGKGRFSDPEKLAQVIQKAVRDAYRLGKVLQDSVDIVLASYARIIAGLKKQIQSLDKNIEAMYQIIPETQSLLSVPGIGPVYAAGLIAEVGQIDRFDHEAQLAKYAGLYWKVSQSGHFQAERTPRTHTGNEYLRYYLIEAANSVKNRDPVYRAYYLKKFHEVPKFRHKRALVLTARKLVRLVDVLLRDHLLYTPKGSETTETK

SEQ ID NO: 412863 - protein, 368 aa, unidentified
MGRKSSKLFVGMDVHKESIDITLAEEGGEVRHYGRIGGEQSALIRTVRKLESLGKSLVFVYEAGPCGFWIYRLLRERGHECWVVAPSNTPRRVRDRIKTDRRDSLKLAGLARAGELTPIYVPEAADEAMRDLVRAREDAVATQRQARHRLAALLLRNDIRYCGKTAWTEAHRRWRARLPLPGAAQRIAFEEYVLTVNEATASVQRLTASMEQELVHWRWQPVVHALQACRGIQLIHAVRIVAEVGDLSRFSHPRQLMAYLGLIPSEDSSGERRRQGPITQAGNRSARRALVEAAWAYRHHAAMSPIIVRRQSGLAKPVLDIAWKAQLRLCARFRRLSARGINRNKIVVAIARELAGFVGAIGQRVKLN

SEQ ID NO: 412864 - protein, 488 aa, unidentified
MEVPITELPILFPTKELKMMAYTLLNHIQGKNGSRWAQFVRETGTDSMLIVAIDAAKYTHKAIICTFYGDVLVKPFEFDASMTGLEKVKEQIRIEKDRNGMKEVVVGVETTGHYYEDLVRRCQSEGYHVRILNAATTAQERQALLNWSKTDNLDLMAIVQSMIHGRGTSNELSVGDVHNLQKLTRARRVLVGERTSTENLIRVHVDHIFREFQGKSIWVNGKREHVSPFSKLFAKAPRYLMRHSLHPSDILSLGEEGLRELSIRENLKLRDKTIKILIDYAQNSISQPKEFLEADQFLLRLELDRLDLLDKQIQILEREIEDLFIQTEGAVILSVPGIGVVTGAELYAEMGDISDFDHAGQLIKMAGTNPIVKQSGGKKPSYFGVSKQGRRTFRNVTYQVGRSLAVNNPEMKQKYLAFKERGKHPRQAYVALGNRMIRLAFSMIRNQTLYRTDQPNYVLFDELSKKLRMPNVKRFYSNFVSSTVCQSA

SEQ ID NO: 412865 - protein, 334 aa, unidentified
MTDYSAFVGLDVHKDTIAVSVADAGRAGEVRFWGEIANTPDAVANMLRKLSGRYRRIHFVYEAGPCGYGLYRQIMATDHHCEVVSPAQTPRKPGDRIKTDRRDAIILARLSRAGELTSVWVPDETHEAMRDLIRLRQAMVKDLRAARQRTKSFLLRHGRVFKGTAWKRSHRVWLGNQSFAHPAQQIAFQSYLNAVDQAQARRDEVDVQIRLFTADWSMAPVVEALQALRGVAFITAVTIVCEVGDIRRFAKPRQLMAFLGLVPGERSSGETRRQGGITKAGNVLARAVLIEAAWSYRTPAKIGAQMMLRQEGIPRLRKISDGKRRSACVAVTDA

SEQ ID NO: 412866 - protein, 343 aa, unidentified
MQTITTIGLDIAKSVFQVHGVDAGGRVIVRRQLKRRSVLAFFQKLPPCLVGIEACASSHHWSRELQALGHTVRLMPPAYVKPYVKRQKNDATDAEAICEAVTRANMRFVPTKTPEQQSGLVLHRTRHLFIRQQTAVINAIRAHLAEFGIVAPVGRHGVEELLNVVADPSDRRVPEMARACLLAFGAQLRRIKEQILEFDRLIRAWHRSNEMSMRLDEAPGVGPVLATAVVAAVADPKSFRSGRNFSAWIGLVPKQHSSGGKNRLGNISKQGDRYLRGLFVAGALSVIRYAKIHGTKHRPWLTALLARRPTKVAAIALANKIARMVWAMMARGERYNYPAALRV

SEQ ID NO: 412867 - protein, 458 aa, unidentified
MSRSNTHPHPRVPEALPHLNPDAAGLDIGAEEIWACVPADREAQPVRRFGTFTPDLHALADWLAQCGVKTVAMESTGVYWIPIYEELETRGFEVYLVNARHLKTVPGRKSDVQDCQWIQRLHSYGLLTASFRPAEEMRVLRAYLRQRALLVEHRAAHIQHMQKALQQMNVQLPQVVSDITGHTGLQIIRAIVAGERDPHVLAQLRHGRCHASQAEIATALSGQYRPEHVFALKQALALYDCYTQQVQDCDAYIEQHYAAIRPTYDDTTPPPPLGPAPKPTAHAKNAPSFDVRGCLYRILGIDLTAVHGLEASTAQTLLSEIGTDMSPWPTEKHFASWLGLAPHNDISGGKVLRSHPLKVRNRAAQALRLAAQALGRTQTALGAYYRRRRARQGPKAAVTATAHKLARIIYHLLKHRDPYHPLSPEAYEHHLRQRELALLKRKAARLGFTLLPRPATAA

SEQ ID NO: 412868 - protein, 412 aa, unidentified
MDVIVERCAGLDVGKDEVVGCVRTPAASGRGRSAELRTFLTFTSGLEELADWLTANGVTEVVMEATGQYWKPIWYVLEDREFDLRLVNAKHVKMVPGRKTDLADAAWLAQLLEHGLLAGSFVPPAPIRELRDLTRYRKRLIQTHTAECQRVQKVLEDAGIKLDSVASDVLGVSGRAMLAALIAGERDPDALAELARGKLRKKIPMLRQALRGRFDDHHAVMLGVIVEHIDYLDRAIAALDVEIDRVIAPFKGARDRLDTITGVGKRAAECIIAEIGVDMTQFPTAAHLASWAGVCPGNNITGGKQRSGRTNHGNRWLGEILYECVGAARQCRDTYLAAQYWRLRRRMGHNKAAVAVGHSILVICWHLLTNDCDYDDLGGDWFARRTDTDKRRDHLIRQLHDLGYGVTLTKVA

SEQ ID NO: 412869 - protein, 404 aa, unidentified
MSENYAVFVGLDVGKSAHHACALAQDGSRLYDKPLVQDEVALRKVFVELQQHGPVLMIVDQPNTIGALPIAVARDCGCEVAYLPGLAMRKAADLYPGRSKTDARDAFIIADTARTMPHTLRAVDRDSEVLSALKMLAGFDDDIARDCTRAKNRLRSVLTQIHPAFERVLVGEILARAIVLDLLIHYGGPTKLAAAGRGRVLKWARNRSRKDPVELIDRIFAALAEQTVTVPGTDAAELVIPQLAANIKALHQQRETIAGQVEGMLDEFPLAEVLISMPGIGIKTASNILLAVGDCSDFASASHLAAYAGIAPVTRRSGTSIKGEFPARSGNKRLKNAMFRSAWIASNCHGPSQAYYQRKRAEGKKHNAAVMCLARRRSNVIYAMLTNREFYREPPAPNDVAAAA

SEQ ID NO: 412870 - protein, 335 aa, unidentified
MYTLGIDLHKDESHVVVLDNNDEIADEVRVQNANLEEIARQYAGCKAAIEATSNYYTVYDTLNEYLDVVVADPNQTKALGVVEAKNDRLDAKLLAQLRSAGMIAESYVPSKELRERRALVRGRKQLVEKRTDFKNQVHAVLEQQGISYDWNPFTQKGREILADEDLPLNSVSRTLIWSYLEVIDTLDEQIDQLEDVIQERAASLKETQLLMSIPGVSFFSSLLITSELGDIDRFDRDKEVVSFAGLDPVVRESADSRTEGGISKRGNPRLRSILVQCANVAVHTCNDEYLSNFFERLKRRKNYPIAIVATARKLLVSIYHMLDREEVYDPPGVSS

SEQ ID NO: 412871 - protein, 422 aa, unidentified
MMGKERRWFVGVDWGSQEHVVSLYDDEGEKIAQRRFAHGGTGLTDMIAWLLKASGGKPGDIHVAIETPHGPIVEAVLERGFNAYSINPKQLDRFRDRFTVSGAKDDSRDADVLADSLRTDMRAFRKLSIADPIVVELREWSRIDEELKVEHVRLTNRLKHQLWRYYPQMLELADDVGANWFLDLFEAAPTPEKAANVREKTIARILKSHRIRRFDAAYVLAELRKRALTVAPGTIEAATAHIRSLIERIRIINGQLADAQRQLDRLCKKLSEPVADENGETTQGQKNEQPDAAILDSLPGVARTILATLLAEAPDPLQHRDYHALRALCGSAPVTRRSGKSCMVVRRYACNRRLTNAAYHWAQNAIQRDPTSRAKSDALRASGHGHARALRSVIDRLLGVACAMLNNGTLFDPEFASKRAAA

SEQ ID NO: 412872 - protein, 438 aa, unidentified
MPNNVIFNFDELFISVGIDVGADFSWMSIVLPNQQFVGKPYKILHNSMNSLALAVSKIKEAEEMYSLESRIFLESTGIYHYPLFCYLRDKGFNCSVINPIITKNSTNINIRKVHNDRFDSKKAALVGLKPDLKVSLMPSDLALNCRNLCREYYDLMDNRSAYVNKLQGELRMAFPQYLGIFSKVTINTSLTLLETYTSPSAFLKADKQEIIDIIKSTARFGLTYAQNKYNAIIQAATDANQFGYIIDSNIKRIRLYISFIRKYDEEINSILESLHELVDANEDSDFVKQIHLIETFKGAGFLSAVSIMGEIGDFSAFSKPKQLFAYFGLDPAVKQSGKFEGTKVQMSKRGSAIARRVIHTLTLQSISISRNREAKNPVLREYYLKKCDSKPKLVAMGAVSHKVCNMIFAILRDNKPFKIIAPQEHIKQYNSAKCVIAA

SEQ ID NO: 412873 - protein, 317 aa, unidentified
MSRTPIGVDIAKAKFDVATFVNGKYTTKSFANTPAGIQAFQTWLAAFPEPHVCLEATSTYGEALSERLADAGVMVSVVNPARIAAFAKIELSRTKTDKGDAKLIARFCALHTPEPWQPQPRSIRELRALVRRLENLLEMYQMEANRLQTADVAVQDSLQTVMTALQRQIDHVRAQIVQHIDNDPDLRGRRDLLDTIPGLGKATIPVLLSVLADPSRFGSAKQCAAYAGLTPSERQSGKYRGQTRLSKTGDPLLRKALYLPALVAWRHNPVLRPFCERLKARGMNGKAIVCAAMRKLLHIAFGVLKSNRPFDPKINLA

SEQ ID NO: 412874 - protein, 344 aa, unidentified
MIIGCDFHPSWQQVSWLDTETGDTGERKLVQISGDAERFYRQLPVPSLVGMEATGNCHWPVDLLAEIGHELWVGDAAQIRASCVRQKTDQRDAEHILKLLLEGRFPRIWMPSSEVRDLRQLLLHRHKLVTIRTRVKNELQHLCLNQGVQRKYKLWSKAGLQVLRELPLKPWATRRREDLLGLLAMLDQQMEPLDRAVQEEAQRDKMALLLQTQPGVGAVTALAYVLTMGDVSRFSRGKQVASYLGLIPREHSSGGRQKLGAITKQGNRMLRTLLVEAAQMAVRCDPGLRKEYLHRCHQKPKAVAKVAAARKLAVRLCWMLRTQKPYPEVVRIESSSTEALVSES

SEQ ID NO: 412875 - protein, 319 aa, unidentified
MAQDDLVVVGIDVAKDKVDACIRRLKLRQTFPNTLQGHRKLVAWLRKYQVGKAVMEASGGYERQWRNVLYNADIEVRIVDPKRVRNFALSAGRLAKNDPIDAEMIAWFAETFSQAPGQISDAAREELAALAKARKALVDVNVRLQAQNEHAAPEPARKAHARVLKSLRAEIDKLEAAISAKVKATPEFAERAEIIESVPGLAQASSAVLIAGMPELGQVSDEVAAALIGLAPYDDDSGKRRGERHIKGGRRWVRNAIYMPCLGAATQNNPVLKAFYQRLIAKGKEPKVALVACMRKLIIILNTMLARHQKWNPGRHAVA

SEQ ID NO: 412876 - protein, 349 aa, unidentified
MDNHTQYSGFAGVDLAKKVMQIHFVTGDGEITDKQVKRAEFLDFFRNRTKCLIGMEACGASQDWARKLEAMGHEVHLMSPKAVKPFVSGQKNDYNDAIGIYKAMFNGVRRVPVKSTEIRDLQTLRRIRSQVTKDKVKEINHVRGLLAEYGIVMGKSITAFNKGISSALESLKERGDVSPLVAEELQTTVESIKTKIERQKRLDREIEQLARGCKNYENFLKTPGVGPFTAAMLCVLLCDPAIFANGRQFAAYIGLAPRSRGSGGKNFIIGIPSKFNCDSESRAVFVECAQALARYKNKSPWVDGILRRKPKKVAVIAIANKLARQVWAMANKGESFKEPLHKRWVICYN

SEQ ID NO: 412877 - protein, 350 aa, unidentified
MDRYIGLDAHSSSCTVAVIGPSGKRLQTQVLETNAKVLIDFIRAIPGTRHLCLEEGTHSNWLYEVLSPHVQEIVVAGVRQERGPKSDKIDAFGLAEKLRIGAVERRVYKEHGAFGALRELCQAYNVLVADSIRVQNRIKSLFRSRGIPCSTRQVYSTGRREKWIEKLPARSQPLAETLYLEYDALEQLRKGAEKAMLDEARKHAMYRILKTVPGIGNIRAAQVLPIVITPYRFSNKRSFWSYCGLAIVMRSSSDWIRTQDGSWARAMTQQTRGLNRNYNRVLKYIFKGAATTVIGRSKDGPLYQHYQMLLDGGTKPSLARLTIARQIASIVLSIWRSEEVYDPKKLSHTT

SEQ ID NO: 412878 - protein, 309 aa, unidentified
MEHFVGIDVAKDRLDIHVRPGGESFAVARDGDALAVLVKRLQTLAPALIAIEATGGYETVVASALAAAQLPLAVVNPRQIRDFARATGKLAKTDRLDAAAIAHFAEAIRPPARPIADAQAQALGELVARRRQVIEMMVAERNRRRMASQRRVIRAIERHLALLQAELSELEGDIDDAIRNSPAWQADADLLQSVPGVGPATLRTLIAELPELGHLTRRKIAALVGVAPINRDSGMLRGRRSIAGGRPAVRTALYMAALVASRKNPIIAAHYQKLRAAGKTGKQALTACMRKLIVTLNAILRDRKPWQSA

SEQ ID NO: 412879 - protein, 315 aa, unidentified
MFVLGFDVAKDKLDVALVNRLGKLVERYLVRNTRKDLIKLIKTVQTKHPKLIAGCEATGSYHYGLIKVCLDMDIELRILNPVMTKQYTKSTIRGRKTDLDDALSIARLILRGEGKLATASDLSLAKAYGRLATKVTQTKQALDLQRQFLVRLGASKDITELFMPATAALDQLAKDLRSIAAMDVDPKDFKLIQSIVGIGPTTATSILAEIGDISRFPSSSKLIAYSGLDPRVKQSGKTLSRNTKLTKRGPPELRRALFLSANIARMYDPEMQVYYQNKRAQGKAYTPSVVAVAQKLTNRIYAVLTRQSPYITKTT

SEQ ID NO: 412880 - protein, 418 aa, unidentified
MKVVFPTCCGVDVHKSFLVATIIKTSQNSLQPSYQKKRFSTFNSDLNRFADWLRENDCLDVCMESTGKYWVPVFNILEKQAIRVVIANPKWVKAVKGNKDDTKDSKWIGDLFRIGLVKSSFIPNKDIRILRELTRYRYKLISMKSSEKNRFQNAFTVCNVALDSVVSDMFGKSATAITDYLTSDVEFDAQHCISLLQRSLKKKAPAILEAVEGHEIAPEQKTRIGIVRDHLHYIDKLVERVDDCVEGMVQKHEGSITLLRTIPGVDRSSAITILSEIGIDMAQFGSSKRLCCWAGLTPGNNESAGKKKSVRISRAGVYLKPALVQVAHAAVKDKSSTYYAVKYERISKRRGKKRAIIAIARMILTAVFCMLSTGEVWSPVDLCKVDMPEHLKEKQLAKAVKQAVHFLETQGLTVLDFA

SEQ ID NO: 412881 - protein, 348 aa, unidentified
MGGVDTHKDLHVAAVVDSHDRVLASECFPTSRHGYKQMLLWMRSFGELARVGVECTGTYGAGLLRYLQQAGITVLEVTAQDRSDRRRRGKDDTIDAENAAHAAFAGVRTVTPKTRDGMIEALRVLKVCRKTAIAARRVSLQLIQNTIVSAPDELRESLRTMTRMQLIRTLAAWRPDLTDYRNLTSAYRITLKTLARRYLELHDEIADLDVMIAGLVDELAPGLIARNSIGYESAAQLLLTAGDNSERLKSEASFAALCGVSPVPASSGKVTRHRLNRGGDRAANSALHIIAIGRLRTDPRTKAYMAKRVSEGHSKLEAIRCLKRYIAREVFYLIRRRNREIGSTQIAA

SEQ ID NO: 412882 - protein, 416 aa, unidentified
MNAVGIDVSSRKSTVAVLRPLGEVVCLPFDVTHDIAGLASLVEKLKALDGETRVVMEHTGRYYEAVEKALHEAGLFVCAVNPLLIKEYGANSLRRVKTDKADAIKIARYALDNWADLRDFTPMDAIRYDLKTLNRQFQLASKQRTASANNLIALLEQSFPGIRKCFDSPVRSDGTQKWVDFAHSFWHVDCVRKQPFPAFCERYRKWCKRHAYLFKLSNAEEVYALAKRAVVLTPKSKVVKVLVQEAANQLSSISRSVEVYRAEMDRLAAMLPEYPVVMAMYGVGKSYGPQLMAEIGDVRRFERKQALVAFAGIDPMPNQSGDKNVRSNKSSKRGSPYLRKTLFNVIRTYLQCAPQDEPVFQFLNRKRAEGKPFYVYMLAAANKFLRRYYAKLRDYFASLDTLQPVAPIPTILKAAL

SEQ ID NO: 412883 - protein, 429 aa, unidentified
MRTESAPGARGPVFCGVDTHADSHWLCVLDWRGRKVLSRQFPADAAGYEALAGAIAAAGEPACVAMEGTSSYGAGLTRHLASLGMPVREALSPARTQRRRPGQGKCDEADAERAARAAMSGSRLGTPKSQDGWVDGVRCMLAARSGAVKARTSAINTARSLLTTAPEGLRSRFRGMAGPRLMEELPSVRAEGALGAALGALADLWAAARDAALDMERAIEASLEENCPALLAMYGCGPVSAAKLAVAAGDNPGRLRSEASFAAICGACPIPASSGKTVRHRLNRGGDRQANSALHEIARQRVMRDPETAEYAERARGRGKSDREVMRCLKRYVAREAYRALMHPHEIRRPEDASELVAARRAAKVSQVGAASILGTSEKYISMLERGQRELKPIRRAYEAWVEAGLPLDWDRQAFEAERKMDSKKHLAK

SEQ ID NO: 412884 - protein, 484 aa, unidentified
MANRKQSTFERLTSGRLNRKQRRELERKLTTEDPGLEIVNRNVAGIDVGNESHFVAVAPDRDAQPVREFGSWTADLERMADWLKGCGVQMVVMQSTGVYWIALYDILEARRFKVCLTNARHTKNLPGRKSDVQESQWLLKLQTYGLLRDSFHPPEQIRSLRSLWRLRDRHVKEAGRTVQHMQKTMTTMNVQLSNAISDISGVTGQAIIRAILKGERDPWKLAELRDRRIKATEEEIARSLEGNWRDDMLFELKQAVDAYDFIQKQIAECDQRLQKLLAELPHREVKMTDMQPGAADGKSVKRKPKRSRTDGNAPKFDLQAEMERICGVDLTAIEGIDIMTAQTIVAELGTDFSRWKNEAHFTSWLGLIPTRDISGGKVVKQESRKIKNRVAMALRIAASSLIRSESYLGARYRFLRTRLGAPKAIKAMARYLACLVYRMFIHGQAWVDRGTQEFEHKRTQRELSSLQRKAAVLGYQIVAQPASA

SEQ ID NO: 412885 - protein, 393 aa, unidentified
MFNPLKVRLMRAVCGLDVHKDSVYLCILTGEGELIEKVFGVLTFRLQQMRDLLLAHNVDEVSMESTSVYWIPIWRVLAPHFHMRLVNPYFIRQLPGHKSDVADAQWIAECTLKNLVSGSFVPPEDIQQLRQYDRRIFDLDEEIVRKLPKLDAVMQRCNFRLSNYVSNVDCKSYKDVVRKISEGVTDPESLIGEIHGRIIKHHGRETILASLAGVISQAEIDVLRQLREELALAEVHKRECLERMLEICQEKYPDELRRLQTIPGVKERTATSLIAEIGTDMSKFETANHLSAWSGLRPRNDESNKKFKSRRITHGNIYLRKNIIQCAWAASRTKGCFFSRFSYHQTQVRKKNKMKVIVAVARKLLVAAWHVIHDKTDYADFQKQDRQAPASNG

SEQ ID NO: 412886 - protein, 469 aa, unidentified
MADYFGNLLIEPQTLQHRGVNFKLAVELIHQVQQKHDIQDTIVVLERTGNYHLPPKRAFASAGFETRVVHPFATKQYRMPANPGNKTDETDLYAQHRAAVAGFGLCELELEPPYRELQLRARHRRNLVERAAAMACQIREHLHLGMPGYASLFDRLFESPTALVIAARCDSPAKLIELGQAGLSHHLRENKIGHQVRTIDKVLAWAAQAVTDHIQDGPMHHAIWTDLHELYQHFHRTIAVLERDLAGDLVQTPYVRLLAIPGINVVSAAELAAEMGPIAQYANANAITGRSGLYPSRHQSDQTDHDSGPIIRQANRRLRCVLMRIADNLACHCGYYRGQADVDQARGIDKRASRVKIAKRFSRLALACVAGDEPMRHPCFQKPDSILEKLRRFHHEHQTRIDLLLANLETAVGQLPYNTRNHEAEIVADVLQQHTHRRRGAGPIGDVLPAVLARLNIKPTEANTNGDRS

SEQ ID NO: 412887 - protein, 425 aa, unidentified
MMGKERRWFVGIDWGSQEHVVSLYDETGKKIGQRKFPHDGTGLTDMIAWLLKASGGKPGEIHVAIETPHGPIVEALLERGFNVYSINPKQLDRFRDRFTVAGAKDDSRDADVLADSLRTDMRAFRKLSITEPIIVEVREWSRIDEELKVERVRLANRLQHQLWRYYPQMLELADDVGANWFLDLFEAVPTPEKAANVREKTIARILKDHRIRRFDAAHVLSELRKPALVVAPGTIEAATARIRGLIERIRLINGQLADAGRQLDRLCKKLSEPIAGEDGETAPGQKNEQRDAAILDSLPGVARTVLATLLAEATDLLQRRDYHALRAVCGSAPVTRRSGKSCIVVRRYACNRRLRNATYHWAQNAIQHDATSRAKYDALRAKGHSHARALRSVIDRLLNVACAMLKSGTLFDPEFASKRATEVHV

SEQ ID NO: 412888 - protein, 370 aa, unidentified
MEQGIRAYVGLDVHKDSIAIAVAEAGRSAGRMVGQIAHDVPKLLKALARLGEPGELYVVYEAGPTGYGLQRALFAKGYRCEVIAPSLIPRRAGDRVKTDRRDCLRLAELSRAGELRTVWIPDRGDEAIRDLSRAREDAVNSRTQARHQLKAFLLRHEIRYSGKTAWTKSFYRWLGELNFGDASSQVAFTEYHLAVQAADQRLERLTKALAASVTGWRFEPVVQALQALRGIDVVSAIGLVAEIGDIARFDHPRKLMAYLGLVPSEHSSGDRVRKGSITKTGNAHARRLLTEAAWNYRFTARIGRAAQARQEKLTEAVKSIAWKAQLRLTARYARLNGRGVHHNKVCVAVARELAGFVWAIARASVAATPH

SEQ ID NO: 412889 - protein, 346 aa, unidentified
MEQITTIGLDLAKQVFQVHAADAGGVQIFNRKLRRAEVLRFFEKTPACLVGMEACGSAHYWAREISALGHDVRLIPPVYVKPFVKRGKTDAADAEAISEAVTRKTMRFVPVKSADQQAAAVVLKTRALLVNQRTQVINALRGHLSEFGIIAAAGTTKVAGLISIVRDETDLRLPKAARHALMEIASQIEALKAQIEKLEKVIVATVKRDDDARRLVTIPGVGAITAASVRALVPDPGGFKSGRHFAAWLGLTPKPHSSGGKERLGRISKMGNPALRSLLVVGATAVLRHARGNPNASKWLTALLARRPYRIVAVALANKTARIIWALLVKGGTYQDNGASNQRATA

SEQ ID NO: 412890 - protein, 352 aa, unidentified
MKPHVKGLDSAEALFVGIDLHKVSWHVTIRTADVELFSGSVPGRWEVLRMLLQRYRGSSIQVVYEAGCFGFWLHDRLIEYGVDCMITPPSLIPQESGNRVKTDRKDSRKLAHLLAKGLLKRIFVPNKQECYHRQVPRRRRQLIGDRIRVQNRIKSELRFYGIDLLDPAGKWTKKYVENLARFRFEDKFMQESFNRLLEQYRFLDEQIKKQDALIHELAEKDLYRERVEILKSVPGIGTVAAMELLLELQDVGRFRQADQLAAYVGLTPSQYSSADKVRMGRITKVGKHSLRAVLVQVAWQLIRKDPAMKEKYERIKIRSGGKRAIVAIARTLLLRVRRIWLDAVPYQLALSA

SEQ ID NO: 412891 - protein, 355 aa, unidentified
MDSKKYIGMDVHKESISIAVMNGAGKIVMECVIETKASMILQFIDGLRGDLQVTFEEGTSAAWLYDLLKPRVTKLVVCDPRKNASMREGNQNDKIDARRLAELLRLNHLNPVYHGEHGLRSLKELVRSYLTITKDLGRVMSRVKAIYRSWAIPCTGKQVYAPRHRVEWLGKIGEPGVRRRAEFYYQQLDALRTVRQGVRRELLAEAKKHQAWKQLCQVPSIGPIRAAVLLGILQSPHRFRTKRQLWTYSGFGIETQSSADHRSVNGQLQRAKKQISIRGLNRNCNHDLKNLFKGAAIVASSKPGPFQEFYTALLTKGIRPEMAPLTLARKIATIVLIVWKRGACFDAQHLKPQAA

SEQ ID NO: 412892 - protein, 387 aa, unidentified
MPQFNDQSRSHTVLKQDSTLIAVLEMSQSSWLVAGLVPGIERHPLKKIEPDEAALLRLLRRWQEEATKAGHAITRITLAFEAGRDGFWLARWLRAHGIEAHVIHPTSVAVSREHRRAKTDRLDAALLKRAFLGWLRGERGHCSMAEIPTLEEEDAKRPTREREGLVRERTRLVNRIKGALARLGIRGFKPTLRHAPERLSALRLPEGAPLPPNTLAELRRDMARLRFVLDQIREIEAARLEQLEQHPEEGTHTMVRVLARILGVGIETADMLVHEVLSRNLRDRRAVARYAGLTGAPDESGRRRREKGLAKAGNARVRRGMIPLAWRFLRFQPESALTRWYRARTADARGTTRKTMIVALARKLLIGLWRLVRSGKPLEGVVLRPAA

SEQ ID NO: 412893 - protein, 416 aa, unidentified
MKIVRPICCGMDVHKNIIVATIGITNKKTRITEYIQETFSTLNPDLLNLKQWLINHKCFDACMESTGKYWIPIFNILEDEINIYLTHPKYVKAIKGKKTDKKDSKWICDLFKHNLIKFSFIPPKEIRALREISRYRYKLVGMRSSERNRYQNCMTVSNIGIGSVFSDPFGKSAQAIMKEVLESDIIEDEKILKCIHRSCKNKDKILDSIKHCNIETDQRFKMNESMTHMEELQVHIDNCEIEMMKRAAPMFDQFMHITQLPGISTLSAILIISEIGVDMKQFESDKQLTCWAGLAPANNESANKKKSVRISKAGQYLKPLLVQCALGAIKDKEGYFGIKYSRIKKRRGHKKAIIAIARMMLVSIYHMILTGETFNPSDYESFRNPKPPIKQQVLTEESAIEFLKKSGFDVSKLTKP

SEQ ID NO: 412894 - protein, 407 aa, unidentified
MDLLHPQCAGLDIHQRTVVACARVVAGSSVTHDRRTFGTTTADLEALRDWLTAHGCTHVAMESTGVYWKPIWQILEGRFELVLANARHIRAIPGRKSDVNDATWIADLLAHGLIRGSFVPPAPVQELRDLTRTRKQLVREIAQHTLRIQKTLEHANLKLTGLLSNILGVSGRAILQALVAGEQDPERLADLVHGRLKASRAELVAALHGRVTAHHRFLLQLHLTHVEALERAVHEVEARLGEALAPFRTALDRLITMPGVSETVARVLVAEIGFDMTRFATAGHLVSWAGLCPRLDESAGKRLSTRTRPSNPWLKTTLVQAAWAASRKKDGYLRAQFLRLKSRRGPKKAILAVAASMLTAAYHMLKHDVDYRDLGADHFDRRDKAQLAHRLIQRLQALGFAVEARAA

SEQ ID NO: 412895 - protein, 415 aa, unidentified
MLKIVYPICCGLDVHRDFVYACIATTENGITTYKSHRFSTFTKGLRELLSWLLQNNCCDVCMESTGKYWIPIYNILESDCKIVLAHPKYVKAIRGKKTDKKDAKWIADIFKHDLVSGSFIPPADIRQLRDLVRYNVKLTNYTTGEKNRAQNCLTVSNLKLDSVFSDVFGKASSNIIGRILANPSEKISDVSVFRTKGMKATDEEVLAAVDGEMCAEQAEKLRIIRSHMDGLELCKANLMSLILSTAEKYIPEVDLVSTVPGLTAYSAIAVIGELGVDMSVFPTSKHLCSWAGLAPQNDQSAGKKKTTRISRAGVYIKPLLVQCALAAIKSKNKHPEIVNRYNALRKRRGHKKAVIAIARILLTAIYNILKKREPYNPELYRNSDTTPEHRNVTIEEAVFILQRQGYIISSPTSVG

SEQ ID NO: 412896 - protein, 375 aa, unidentified
MKEKVRFLGLDVHAETIVVAVAEADGEVRSLGTIANRGESIRKLVGKLGAPEHLRACYEAGPTGYVLYWQLAELGVACEVIAPTLAPVKAGDRVKTDRRDAERLARSHRAGDLTAVWVPEEGSEALRDLVRAREAAKQDQLRARHRLSKLLLRTGQRPAVGVKAWTLPYMAWVRQLRFPQAGREATRLDYLHEVEHMGERVKRLEQAIAEAVKVASPALREVIQGLQALRGVAQISAVTMAAELGNISRFQSARQLMGYSGTVPSEDSSGQRTRRGGITKTGNAHLRRIAVEAAWSYRLRPGVGPALRKRQQGVPEEIKEMAWKAQHRLHKRYMRLAAAGKDQRKIVTAVGRELLGFIWAIGVRAEAASKQKMAA

SEQ ID NO: 412897 - protein, 414 aa, unidentified
MDVLVERCAGLDVHRDSVVATVRVPGKGKSRRRREQQTRTFGTTIARLEQLADWLASFEVTLVGMESTGVYWRPVFHVLERRFECWLINAQHLHNVPGRKSDVIDSVWCCELVEHGLVRPSFVPPSEIRRLRDLTRLRSTQTEERSRAIQRLEKVLQDAGIKLSSVASKTYSVSARAMLEALLAGVSDPRQLAELAKARLRTKIPELQEALQNRFELAHHGVLVAGLLAHIDALDHGIATLDASIELALAPHAELIDLLCTIPGVGRYTAEVLIAECGLDMSVFPTAGHFVSWAAICPGTNQSGRRRRSGKTRRGDSWLRSALTEAARGAARSKNTYLASHYWQIRGRRGDAKAIGATRHDILIAYYHIVRDRVPYRELGPDWLARRYSPEHRTRRLVKQLEALGHKVTLEAAA

SEQ ID NO: 412898 - protein, 300 aa, unidentified
MRRSRSWKGVPLNVGMDVHKGTIVVAERDPSGSERERTLPNEPKAVSRGIRKVVREAPGPVRCAYEAGPCGYALQRQLESEGVHCVVIAPSLIPRKPGERVKTDRRDARELAELFAGGLLTEVHSPTPEAEAVRDLCRAREDAKLDQTRTRRRLGKSLLRHGLIWGRKNWTQAHQQWLRGLLLEHPAEQATFDAYCTAVDQAANRLHAIGRELAVWAEMGPYASPVARLRCQHGIDTTTAMTIVTELHDSHSFRRARELMGFVGRVPSEHSSGEQRARGAITKTGNAHVRRVLVEAAWPY

SEQ ID NO: 412899 - protein, 410 aa, unidentified
MLFIGDDWAEAHHDIEIEDESGRVLARRRLPEGLAGITTLHELVAEHLDPTAEPDQVQVGIETDRGPWVQALLAAGYVVFAINPLQVARYRERHSPSGAKSDAADAHLLAEIVRLDRAHHRRIAGDSEIAEHIKIAARAHQMMIWSRVRQVNTLRSLLREYYPAALAAFGTNLAGRDALAVLTVAPSPELGRRLSQLRIETLLRRAGRQRNVSTAAAKIRAALTSEQLAARPGVIPAYTASASALLAVLTAMAAQTEVLAGQVEQGFGQHPDAEIYRSQPGLGDILGARVLAEFGDDPGRYMDAKARKNYSGMSPITKASGTKRVVLARFARNRRLGDALFLQAFAALNNSPGARAFYDRQRSRGATHYQALRTLANRLVGILHGCLRHQTLYDEHLAWHSEPDKLSPAA

SEQ ID NO: 412900 - protein, 458 aa, unidentified
MTRKRSNRKAAVRDVPTLEALKQINLNAAGLDIGDDEIYVAVPEGRDEVSVRVFRTFTVDLYALAKWLGSCGVDTVAMESTGVYWIPIYEILETLGFEVHLVNARHVKNVTGRKTDILDCQWIQQLHTYGLLRASFRPPEEICALRSLTRHRDTLIRSCAREIQHMQKALQQMNVKLTNVISDITGTTGMLIIRDIVAGERDPHTLARHRDPRCRKSEEEIAKSLHGHYKPEHVFALQQALEIYDFYQKQVKVCDAEIEKRYALFEPQVDVSEKPLPPSKKKKNRPRNAPAFNLRQYLYQWAGVDLTQIDGLNTLTIQKVLTETGVDMSPWPTVKHFTSWLSLCPHNDKTGGKVIKSHTKKTQNRAAAALRVAAQTLLRSKSALGSYHRRMRTKLGGPQAVTATAHKLARIIYSMLKNQTEYVDLGESHDEEQARQRAIKGLKRKAKNLGFELVSATD

SEQ ID NO: 412901 - protein, 343 aa, unidentified
MQMVTTIGLDIAKSVFQVHGVDAAGQVVIRRQLKRRYVLTFFEKLPPCLVGIEACASSHHWSRELQSLGHTVRLMPPAYVKPYVKRQKNDTTDAEAICEAVMRPNMRFVPTKTIEQQSCLMLHRARHLFIRQQTAVINSIRAYLAEFGIVAPVGRRGVEQLLEVVADVADRRLPEIARVCLAALGSQLRRLKAQILEFDRRIMAWHRSNATSKLLDAIPGVGPALATALVASIADPKAFRSARDFSAWVGLVPTQNSSGGKDKLGSISKQGDRYLRSLFTTGALAVIRYAKIHGTRHRPWLTALLARRPTKVAAIALANKLARMAWAMMARNERSKEPAALTA

SEQ ID NO: 412902 - protein, 386 aa, unidentified
MRYFIGIDISKFKHTAAVIDQDGVVHIEPFDFDNDIIGFNSFFTSVSSFIQDDFIIGMEDTGHYADNLQKFLLSKNLKVAMFNQLATNHIRLAFNLAKNDRLDSLTIASALAMPRLYRIIEDEHFTYHEIRELSRYHQTLSKTMNRYKNRLQKFIDIAFPEFNKLFDTKYSKTYLKILKDFQSAQNIANTDIRTLRKALLSKGRCVSITAEELKSAARDSIGHSHIALDLEIQQTVEMIEKIDSDLNIVDKKIEEFSLQLNSPILAIPGISHISAMSILSELGDFTQYESAKKIIKLSGTNPYIYESGTYSMPRTRLEKKGSKYLRCTLYNIIQAVINNNPVFKDYYDRKISQGNRCAQGHCVRKLLRVIYHILTTGCKFDPSLLR

SEQ ID NO: 412903 - protein, 337 aa, unidentified
MKYYVGLDVSVKETSVCIVNQDGDIITEKSVLSEPNSIAQYLQSQKLEYKRVGLEAGCITPWLYHELMALGFSVVCIETRHAKAAMEAQNMKTDRNDARGLAHIMRTGWYKEVHVKSHDTHKTRVLINNRKCLQTKMMDITGQVRGTLKVFGHKVGNVSSKNYEGRIRELIGDDQELLSYIEPLLLVRDQLHKQFQKLEKMILDIAKDDPVCEQFMSIPGVGALTALTFKTTIERPERFKKSKSVGVHLGLTPRKYASGEIDYNGRITRCGDAVTRHHLYIAAQCLLNRVKKCCPLKAWGLRIAKRSSAQKAYVAVARKLSIIMHRMWVDGTYYQHA

SEQ ID NO: 412904 - protein, 338 aa, unidentified
MIVIGVDVHKHSLTAVAVDETGRLLAERTLQSAEDGLLAWASELDSERLWAVEDCRHVTGALERELVAAGERLRRVPPKLTAPERRVGRARGKSDSIDALAAARASLREPRLDRPRAGEERLRELKLLVVHRDDLVDERRRAQQRLRWHLHELDSTLAVPPGALDRAAQLERVGRWLARREQTVLVRIARDLVGRCRSLTRAILELERELAAMTAQIAPALLELPGCGALTAAKLLAEIGPIERFQTDAQLARHGGVAPLEASSGRVRRHRLDRGGNRQLNCALHRIAVTQARVHPAARAYLARKQTEGKSRREAIRCLKRQLARVVFNTLKAGPVLT

SEQ ID NO: 412905 - protein, 382 aa, unidentified
MQLINTVDPTIHLAIELSASSWLIAARVPGSEKPHLHRIDGGNTAALLALISSLRARVARRLDAAIGVICCFEAGRDGFWLHRLLTAHGITNYVLEPTSILINRRARRAKTDRLDAIGMLRVLAAYLRGDRQSCSMVRVPTPEEEDAKRIHRERENLVQERLRIENRIEALLFAQGIRKRPSLRSWERDLANLRTGDGREMPRHLRAELNRLRRRLVTILELIREVEAERDELVVTTPQDRTSRKIVALCRIRGLGENFAAVLTREVFYRSFGNRRQIASYVGITPMPYQSGGMDRDRRISRAGNPRARTTMIQLAWLWLRYQPGSELAEWFRKRVGTLAGRTRRIAIVALARKLLIALWRYVETGVVPAGVEIRTETVVAA

SEQ ID NO: 412906 - protein, 409 aa, unidentified
MKLFVGIDVSSKDLVTSMISEGNHEVVFQGNFVNDLKGATELKNVIINTANSNHLDQIIIGMEATSIYSFHPAMFFQEDSDLKKLNTQSVVIDPKKTKRYHDVFAEDKNDQIDAFYIADYLRVGHYSVGLVRQDNYIALQRLTRSRYELVQSLVRAKQHFIENLYYKLNELVISDELNTSVFGSTMMSLLTEDMTTDDLLNISLSDLTAYLTEHGRGRFANPEALAKTIQKAVRSSYRLDKVVANSVDTVLSVYAEEIKAFQKMIKDLDKAIEKIVKVIDEEQILRSIPGIGPVYAAGILAEIGQIERFDNEAKLAKYAGLSWKEKQSGNYASDNTPLKRTGNAYLRYYLVEAANRVRIQDPVFGEYYQRKYKEVKRTPSKRALVLTARKLVRVIFFLLKNHQIYQEKR

SEQ ID NO: 412907 - protein, 496 aa, unidentified
MGCCALEGGDAVSAIPIRNLMNCAAQPFRWHQQEELEMNPKRSKSRHGRKMPMVHPNAAAIDVGATMHMAAVRADRTPEPVRSFGTFTADLHRLVDWFTQCGVETVVMESTSVYWIPVFELLDARGFTVFLVNARDAKHVPGRKTDVSDAQWLQRLHSYGLLRASFRPKGQIAELRSYVRQRERLLEYAASHIQHMQKALTEMNLQLHHVVADITGATGLRIIRAILAGERDPEALAALRHYSCHSSAETIAKALTGSYRAEHLFALEQALALYTAYREKASACDVRIEAVLKELSIHRGRDHGAVPPPRRRHRTDQVNALAFDVRAALFALLGKDITAIDGLGAYLSLKLIAECGDDLSSWPSAKHFTSWLGLAPSNKVSGGKMLSPRTRRSGGRAAALLRLAAVAVGRTDTALGAFYRRLSSRIGKAKAVTATARKVAVLFYNAVRHGMEYVDPGASSYETRYRTRVVNNLHRRAKAFGFLLQPLEPKAGATVS

SEQ ID NO: 412908 - protein, 400 aa, unidentified
MRAVFGIDVSKTSSEVAILVNGEKVHGYTILNDAFGFNRLLGDLKTVHNPEIIFEATGVYSRCLQAFLEECGYAYTRLNPLEAKKQLDSLRVRKTDKIDAEKLAKSQLVHNRKPTYVQEEVYQHLRDLSCFYQNMTEDLVRTKNRLHKVLQVTFPELENLLSTPTGEQYWNLVMAFPCKEFVLSLSQSDLYEIIRQSTSKRISEKRIAYLTDKLIKLAKQSFCAVKKTSPMLEEVRYYAQELLRLSERRQVVLNDMVALAQPLPEYDILRSITGIAETTATSIIGKLGDIRRFHSANQINAFIGIDLRHYESGNFLAKEHITKRGNPYARKILFKCIHNIASASHTNPCHIADFYEKRKRQSTIASTKPHTIASIHRLIRTMYYLITHNKLYNYSLTQNR

SEQ ID NO: 412909 - protein, 296 aa, unidentified
MLIIGCDFHPRYQQIAMMDTETGELVERRLEHENGEARAFYASLPKPVLVGMEAPGYAQWFERMLAEFGHELWIGHASEIRAGVVRKQKTDARDAQHLLRLLLEKRFPRIWIPSPAERDARQLLRHRYKLVCFRVSVKNQLHGLAMSQGVCRKKKLFTAQGREELEKLSLGPWGSRRRQELLGMLDQLNPVIDELDRAVRQEAESRADAARLMIHPGVGPVTALAFVLTLGPVARLRRSKQVVSYLGLNPKERSSGDKQHTYAISKQGRRNAVELARGRAVNFSESRREPHKFGQR

SEQ ID NO: 412910 - protein, 304 aa, unidentified
MFGIGIDVSKATLDVAVHEQQFRQFSNDKRGVQRLIQWLKQWPTKQVVLEASGGYEVAALDALHAAGLPMVRINPARARRFAQGTGRAAKTDRLDAEVLAQMAHLLSLTRYTPPAPWQRRLAEFAQCRRQLVQMRVSEIQRLRQLGEPTLIAMKQRHIDELSIDIKELDSAINEQLSAQPAWKNIGTLKGVGPVLATTLACELPELGTLNGKAIAALVGIAPMNRESGTWKGQRRITGGRAVVREALYMAALTAIRYEPRLRDFYATLKSKGKASKVALVAVMRKMLVILNARKRDAEALMASD

SEQ ID NO: 412911 - protein, 377 aa, unidentified
MQSIIYVGMDVHTENFTFASYEYGKEDVFAVNQVIGATWKDAIKYMKTLQKQRSEEEIHFVCGYEAGCFGYSLYNELMSAAVTEKDLSLQCVILAPTTMAIQGNAPKTDRRDARMIAKNLAYGTYSSVYVVSEEDNGVRDFLRMRDDTKKKLKTTKQQINALCLRHGKYYTANKWTGTHYEWLQKLELGDIYSNITLKEYLHQLTQLEENISRYDKEIEEIAKRERYATAVAKLRCLKGIETVTALALVAEIGDYSRFPTAEKFAAFLGLVPGERSSGGTINRTGITKHGNSFLRRLLTEAAQGYSKGTPYTKSKRLKARQVGQDKEILDYCDRARLYLGKKYIRLKEKGKNGNVCKTAVARSLACFIWGLMTDNIA

SEQ ID NO: 412912 - protein, 345 aa, unidentified
MKKIIIGIDFSKETFDATLFDCRNSELSEAVQSAVHEKFTNKKEGFQAFLTWIKSSVKKINSDELLLCGEKTGKYSLALSNFLYAKGYSIWLDSGLRIKRSLGISRGKSDKADSLKIALYAYRYQDMAVCYVPLSKNVSRLKELFLYRQHLVSQMKAMAVRKNVTDDFNKELGDVRFIVNSSTKIIQQIKATIKKCEEKMQELIEEDEELKTTHDSITSVKGISLINATAFIAYTNNFKDFGGNAKKIATYWGVAAFAQESGTSVHKVARVSKIANKMLKSLLTQAARIAVRWEPKFRQYFEHLISRGKHQGVALNNVKNKLIHLITALAVSQEKYNPAYKCINR

SEQ ID NO: 412913 - protein, 385 aa, unidentified
MSQPLNATGAVHYDRTLVLAIELSSTTWVVAAQVPGLPQTKAKRTIEPDKLALQSAIEGYRARAAAAGHTVDQVIATYEAGWSGFWLARWLTAKGVEVHVVQPSSVPVDRRMRRAKSDGIDAELLLRTLLAWLRGEPRVCSMVPIPDEADEDARRCVRERAELVSERVGLTNRIGAVLATLGVGEYNPLLQSRRRRLAALRTGLGEPIPPNALAKIERLLTRLELVLAQIAELERDRDAIAKAAAPDQAGKMIQQLCSLRGIGVQSATVLVREAFVRRFANGKALGSYAGLTATPYSSGGVEREQGIGKAGNRRLRTVMVELAWIWQRYQPESVQVAWFRGRVGSTGRRVRKVMVVALARKLLIALWRFAIDGVPPEGAVMKPAS

SEQ ID NO: 412914 - protein, 344 aa, unidentified
MEITTVGLDLAKNVFQVHAISSTGEVVVRRALRRAQVIPFFSKLPPCLIGMEACGTSHHWARELVSLGHQVRLMPPAYVNPYVKRGKTDAGDAEAICEAVTRPTMRFVSIKSVEQQAALALHRTRDLLVRQRTQLVNMIRGLLAEFGIDIPKGITHALAFVRRAVAGQADDVPDLAAKVIGALAEQAIEVQGRIRQLERDLLAWYRSNEVARRIATVPGVGLLGATALAATVTDPARFRSGRQFAAWLGLTPLNNSSGGKERLGRISKMGDQYLRRLLVTGMTSLVRRNRHHPSSADPRINALLARKPLRLATIAMANRAARAIWAIMVRGEVYRAPALGSAAA

SEQ ID NO: 412915 - protein, 427 aa, unidentified
MNCNTQNARIAEVDEKTLVVGIDVGSEYHYARAFDNRGVEYSKKAFKFGNTEDGFEAFKAWILSICKEQSKNKVIPGMEPTGHYWFNLGKYLQDNGMRPVLVNPFHVKTSKELDDNNPTKNDRKDPKVIAGLVKDGRYTYPYLPTGIYAELRTASNLRYRLQSELTGIENRLARWFSIYFPEYKTVYGNLDAISGLMVLKTAPLPEDIVALGVDGVNQIWREAKMRAVGKKRAQTLVAAAEHSIGTTEGLTAARYEIRLLLEDYESRSEKLKEVMDLIEELVHQIPMADKLLEIKGIGIRTVSGFLAEIGDLGRFSDPKQLQKLAGYALKENSSGKHKGQSKINRRGRKRLRHLLFEAAISLVGKNQEFKAIHHYYTTRKDNPLKKMQSLIAVACKLIRVFYAILVKGVEYDPKKMVSDIRRPALAA

SEQ ID NO: 412916 - protein, 433 aa, unidentified
MLKINYMSTLFVGIDVSSKSNSVYAMDFEENKYLSTSFGNNQPGADELVNRIAACMQKHKNLDTLLIVLESTSVYSVHISNFLASSEVLMPYKPYVFCVNPKATANYRKSYIGMEKTDPTDAYLIADFARVGRTKKLEPWRGGQFIALKRLTRHRMHLSECITREKTYMVSNLYLKFSELQLLEGDDKPFGNLYGATSSAILTEFLSPQEIIDMPEEDLLAFLAQRSRNRICDLSKTSELLRKAARDSYRLDKCMYEPLNISLASSFNCIQAYQKEIRLIEQAIEKCIKGMNPNALIILQSIPGIGPVWASGILSEIGDISAFHSSDALAKYAGLYWPKGDSGDFISEDNQMSKAGNPYLRHYFGEAANSIRKHIPEYADFYARKYAEVSKHQHKRALALTSRKFVRLVFGLLAKNQLYTGEKLDTEHNTESN

SEQ ID NO: 412917 - protein, 391 aa, unidentified
MVCVGIDVAKDKHDCCILDSDGMVRADCFTIPNNMDGFKQLLQTIRNCTKKSDKIKVGLEATGHYSYNILGFLLDNDLAVYVMNPLHTNLYRKSLSLRKTKTDRVDARTIATMLLSDVDLKSYTDTAYHNEELKSLTRYRFDKVRERAKLKQSVSRLVTILFPELEKLVPSLHIASVYALLSEYPGAKQISEIHLTKLTNLLATASKGRYGKDKAIQIRDAARTSIGSVMPAKFLELKHTIKLIRELTSEIDEIEVSIQKIMDELHPPILSIPGVGIQSAAMILAEIGDFSNFESPDKILAYAGCSPSTYQSGKLTNCYAHMEKRGSRYLRHALYNATKYVCYWNPVFAEYLAKKRAEGKHYNVALSHAMKKLVRLIYALQKSGKVYLAAA

SEQ ID NO: 412918 - protein, 425 aa, unidentified
MNNVEKKQLAYGDVLVVGIDIAKKVHWARVLEPMGVDVIKPFKFHNTREGFVRLESKINEARNKTGIQRVIVGMEPTGHYWKPLAYYLKEREYSVVIVNPHHVKKSKELVDNSQTKSDRKDAGIIADLVKSGRFLNCLLPTGIYAELRNLSTARIQARKIFNGALAQLQAIIDQFFPEYTQVFKNVLGKASTWVLRHYPFPKNILSLTEKELAIKLKQASNNRVGLKRAKQLQNVAKESVGIKEGLEGAHLKLMTIMDRLEYAASEISKIEAALERTLEKTGLAKYLLSIPGIGVITAAWFLAEVGDLSKFDDWRQIRKLAGLNLVENSSGMRIGSKKISKRGRPGLRNVLYLASLVLVAKNAEFKALYNYFKTRAENPLKKKQALIAISMKLIRVIFALVKNRTLYDPAKVFGEYRAAQLQQAA

SEQ ID NO: 412919 - protein, 359 aa, unidentified
MSGTSDRVVIGMDPHKRSATIEVMARDETVVGGGRFDTDRDGYAAMRKYASRWPNRVWAIEGCQGIGRHIANRLLADGEQVVDVPPKLSARARVFATGQGRKTDATDAHSIALVGTRMAGLRPLVNDEQLALLRILVDRRRSLGEDHTRMVSQLHQLLLELIPGGAKKSLSAAQAKALLATVRPRDAVGKARRRVAAELTADLERIYRHSEEADKELKELVASTGTTLMNLHGIGPSGARLLVEVGDITRFPNRAHFASWNGAAPIDASSGEQVRHRLSRAGNRQINRVLHTMATVQLRNPTEGRAYFDRKKADGKTSMEAMRALKRRLSDIAYRCMNSDTVATAAGPGGHRERLLAPA

SEQ ID NO: 412920 - protein, 457 aa, unidentified
MSARKTSKTKRSNLPKHLQHINSRAAGIDIGSRSHFVAVPEGSSEQTVREFSTFTDDLHRMADWLISCGVTTVAMESTGIYWIPVFEILESAGLEVKLVNARHVKNVPGRKSDVLDCQWLQQLHTYGLLGGAFRPTDQVCALRAYVRQRMNLVRYAASHIQHMQKALALMNLLLTNVVSDITGVTGMRIIKAILDGERDSLILAKMRDPRCKNNAETIARSLHGNFRSEHLFSLKQAVDLYTFYQKQIAECDQEILAQLCTFDVAASSGADSDIKPSTTIEDALLRLSGVDLTRIDGIKNNSALKIIAEIGIDMSRWKSSKHFASWLGLCPGTKVSGGKILNGKSKQVANRAATTFRMAAFTLLNSKSALGAYFRRQRSRLGAPKAITATAHKLAKLVYSMLKNGTPYVDIGQDYYENRYHDRIMQNLQRKAKELGYELVEMSGGTTQNGKFVESGS

SEQ ID NO: 412921 - protein, 485 aa, unidentified
MKNKSIFTRQNQTLIDLFREAGHPDKVLCVPIDYAKQTHMGLFCNGSGQQLKKPFPVKNSPEGIAFLLDAVEKSRRKHHIKRGHVFFGGEDCGTFADNFIYALRKEGFTVMGVNAADAAKQRENLQASTDKLDLLGIAKMLLGKRGSIAGGQIGRERALRSLTRHRDSQVRMRTATGNRIHKIVDQLFPGFLDEKRSSIPPFSEASLYLMEDRFSPVQIAKRQDKALLRQLKVHGLQHPETALGKLKVYARQVLGHPPELVGMLQTSLAGETSLYRCLGNNIDLIGREIAQQLAQTPGAMLTTIRGIGITLAAGAASEIGPPESQPSIRRLCSYSGIVPRVKQTGGPEKGAKTGRVSRRCNHLLKNYIVQCGNHLGQHGPADLKEDHRRRGANGQHADFGMARRYLRMGMRLMRNGESYVPPELRTGATLQELQDYYLQLWPKLLEKWVKAGAVHTAFDSENPLGQWRDRIEAIYEIELPLPKKK

SEQ ID NO: 412922 - protein, 351 aa, unidentified
MIIVGVDYHPSVQQVVFLDMETGETGERRLNHSDGEAERFYRDLQRRQVKVRVGIEATGHARWFERLLAELKFELWIGDPARIKAARVRKQKTDRQDAQLLLRLLIEDRFPQIWVPSPENRDLRQLIWHRHRLVQMRTRAMNQIQAVAMNEGVRRKKTLWSKTGRKQLEALPLAPWATRRRQDLLELVDRWNTTIVELTAAAEQEARKRPEVLRLMTHPGVGPITALAFVLVLGSPDRFGCGHQIGSYLGLIPCEDSSADRQRLGHITKQGSSLLRFYWWRQPRLLSAGTPDWRRRFVHLAIRRDRRIAKVAMARKLAVSLYWMWRKGFDYQQTLQFGSHAGEPGFVHGVK

SEQ ID NO: 412923 - protein, 344 aa, unidentified
MGEVSTIGLDIAKSVFQVHGVDGAGAVVMRKRISRAKMLEFFADLPRCLVGMEACPSAHHWSRKLQALGHRVRLMPPSYVKAYLKRSKNDANDAAAICEAVVRPSMRFVPIKTKEQQAGLMLHRTRQLLVRQRTMLSNALRGHLAELGIVSAKGRNGISQLLGIITDVTDNRVAPAVRGLLDVLARQYSAIGAEIRSIDKSILTWHRWCEASRRLEEIPGIGPIVATALVAEVGDWREFRSGRNLAAWIGLVPKQHTTGGKERLGSITKQGNRYLRWLLVTGAMAVIRYAKKHGTERRPWLARLLERRHTKVAAVALANKMARMAWAIMVRSERYEEPKLLLAA

SEQ ID NO: 412924 - protein, 328 aa, unidentified
MPLYQLGIDVSKNTLDLCLLREGIKGKIKTRKLKNTADAAKVVTEWLKRQSCELGEVHIIMEATGVYHEPLAYGLHFAGARISLANPHRTREFARGMNILTENDKVDAWMLACYGSLKEPEAWTPPPESVRYLRALLRRRDALVADSTREKNRLEKSVFTDSPNAVRASIEHMLQELNNEIEHLDVLIQEHIETHPELNQDFRLLTSIKSVGYLLGLNMLAILKSHSFESAEQAAAFLGVVPVERRSGTSVKGKPKLSKIGPPEIRTKLYLAALCGLRFNPVMKQMYTKLCQRGKSKMCAIGALMRKLVHWCYGVLKTQLPFDAEYNQ

SEQ ID NO: 412925 - protein, 355 aa, unidentified
MNSEKYIGLDVHQATISVAVMDSQGKIIMESVLETKASTLLEFIAGLRGSLFVTFEEGTWAAWLYDLLKPHVTEVLVCNPRKIALVKQGNKSDKIDARKLANRLRLHDLKPVYHGETGVRMLRELARSYLTVVKDLSRVMNRLKALYRSWAIPCAGRDVYYKRHRSQWLEKIPEAGTRWRAEQLYQQLDMLQHLRQQARRELLVEGRKHAITAKLRQIPSLGPIRSALTVALIQTPHRFRSKRQLWTYSGLGLETRDSGEYHYVNGQVRRRKKQATIRGLNKDYNHDLKGLFKGAATRASVQPGPLQEFYQRSLAKGIKPTMVRLTLARKIAAITLTLWKKGEDFDIHKLNSPAA

SEQ ID NO: 412926 - protein, 340 aa, unidentified
MFNLSTNATTETIAGCDVSADWLDVACQRPSREHLHERRFDNTPSGHQRLIKWLCKGKCSVRIAVEASGVYSLDLALALHETKSVKVMIAHPRALKDYRRAQMQRSKTDQIDARLLCDYCLRMPFIQWQPPADEVFELRALARRLEALVEARIAEMNRLHAASKSRIASRFVINDINIRHLERRMTRMEDEALTVIERHADLEEACSHLRSVSGIAERSAIKLLGEILTMPEGLSVREWVAFAGLDVRHHDSGRSVHKPGRISKEGNVRLRRALYMPAQVAIQHEPNVRAFYDKLRAKGKKPMVAIVAVMRKLLHAIYGMLKHGQDFDGQKFYRLPAQTA

SEQ ID NO: 412927 - protein, 344 aa, unidentified
MGIVTLGIDLAKNIFALHGVDGAGKVVLQRPAVKRARLLEMTASLPPCRIGMEACSGAHHWAREMTRQGHEVRLIAPKFVVPYRLSGKRGKNDAADAAAICEAVSRPAMRFVPVKTEEQQAELFLHRARQGYVEQRTGLINRIRGLLSELGIVLPQKAETIRRELAHLLEDLPGHCNTVVGDAITDLEWLDARIAEYDRHIALCAKAHADARRLMRLSGIGPTTASALVASIGDGHDFASGRQFAAWLGMVPGQYSSGGKQRLGRITKAGDRYLRTLLILGARSVLQSGRKKDDAISRWTRDVEGRRGYWKAVVAMAAKNARLAWAVLRRGEDFRLYGQGTAAA

SEQ ID NO: 412928 - protein, 335 aa, unidentified
MHYLYYVGLDVSKETFDASLVAFEDANEMAHRKFANSRKGICSCLHWVEKRHGILLDDVIFCAEDMGSYISEMAVCASDRTLTFNFSLISPLVIKYSMGIARGKTDRVDARRIAEYAITHYRKIALYLPAEKELCQLRTWLILRAHLAKQRVAKLVLLEKLDYKEKFADVSIQRSMLQEEIAYAEIHMKTIEREMKELIAADSNICRNYKLLTSIKGVGPITAIVMLCSTLNFTKITDHRKFACYCGLAPFEHSSGTSVRGGCHTSSMANRDIKVQLNRSALIAIRCDPQLKAYYERKVAEGKHKFSVLNAVRAKIAARCFAVVRRGTPYVALQI

SEQ ID NO: 412929 - protein, 412 aa, unidentified
MEVIHPRCAGMDVSKKDAKVCIRVAGAGRRKTVETVTTWGATTRQILALRDHLVAKKITCVVMEATGDYWKPFYYLLEDLPGVQMMLVNARHVKNLPGRKTDVNDATWLAQLGAHGLVRGSFVPPAPIRQLRDLARTRTAVTRERGREVQRLEKVLEDSGIKLSAVATDIVGVSGRLMLEALIAGNTDPAAMADLARYRLRAKIPQLTEALAGRFTAHHAFLTRMHLDLIDRHTEVIDQLTQRIEVMMQPFHHFRDLICTIPGIGEKTADVIVAETGADMTRFLTAEHLASWAGTTPGNNESAGKVKSSRTRPGNPYLQAALGAAALSISHTRGTYLAAKYRRIASRRGPLRANVAVQRAILTAIWHMATTDTTYIDPGADYFTRLNPAKARAKAVRQLEAMGYHVTLDHAS

SEQ ID NO: 412930 - protein, 392 aa, unidentified
MDSPPPRHHSATVVFEEANGSEGETMKKHSSKHDSLSSTDVELCTTICVDLAKQVFQLAGEDATGRVIYEDRIKSRQAFHDFLLRLPTTVAVLMECGPGAQAWARLLQAKGNPVRILPAQRVAEHRSGAKNDRNDCYAILRAGRDTSIASIPIKSTTALAIQALHRIRRGNIKRHTALGNQIRGLLLEHGVSMPQGDAAINKHVPQALEDASLPLPDLLRELLDELLMDWLSLGERIAALSRRLEATAQEDKVAQRLITIRGVGPIIATAIVAKQTDPSRFASGRMYSAFFGIVPDQHSSGNKIRLGKMSKRGDGYIRSLMIQGAHAVLSQLRPDSDQPDDRRLLRWLSRLGRKEAAIRLANRNLRIIWALLQSDQVYQRRPNEKPEAAMSL

SEQ ID NO: 412931 - protein, 405 aa, unidentified
MNAVGIDVSKGKSTVTIRRPGDIVLMPPCDIPHTQSAINGLINEIKALDGETKVCMEHTGRYYEPIATWLTNAGIFVSAVNPILIRDFGDDSLRTPKTDKADSKKIARYTLDRWTKLKQYGNMDKTRNQLKTMNRQFGFYMAQKTAMKNNLISILDQTYPGANDFFDSPARSDGSQKWVDFVHTYWHVECVRGKSLNAFTEHYQNWCRRKGYNFSAEKAAKVYCLSSDLIAVFPKDDNTKMLVRQAVAMLNVSSETVESLRQEMNKLASTLPEYPVVMAMNGVGTSLGPQLIAEIGDVTRFTHREALTAFAGVDPGKNDSGQHIQKSVRTSKKGSPSLRKALFQIMDSLIKRSPADDPVYAFMDKKRKQGKPYYVYMTAGANKFLRIYYGRVKEYLSSLPEAEEL

SEQ ID NO: 412932 - protein, 345 aa, unidentified
MTEIKLLAIDLAKRVFQVHGIDGSGAKVLERRLLRDQVEPFVAGLPACEIAMEACGSAHDWGRRFVALGHRVRLIPPPEVARLVDRRKKNDRRDAQAIALAARLEHVRPVPLKSAEAQAEQFEHRARAQLIKARTSFINLLRSMLLEFGIAVPKGPTSLKRQRDGTMAGARFQAMPAAGQAMAADLYARIDELDAAVAAADRRIAALVKQRPASRLLLTIPGIGPINASAFPAAIPDIQAFANGRAFAAMLGLVPKQDSSGEKVALGAITKRGNRYLRALLVHAGRALLVKAMRTQNPDDGLLAWAKALRRRMPWNRATVALANKLARIVWAVLAFNQPYRPRPV

SEQ ID NO: 412933 - protein, 343 aa, unidentified
MHIASIGIDLGKTTFHLVAVGEQSKVVVKKKFSRKQLLAYTANLQSSLIGIEACSGAHFIGATLRRQGHDVRLIPAQFVKPYLKSNQNDFLDAEAIAEAGARQNMRFVPIKTEDQLDLQALHRVRDRLVHHRTAIINQIRGFLLERGITFAKGPANLRSQMPAMLEDAELKISPRMRTLLARVWQEWKQLEIDIADASDEIERISSEDAGCKRLRQIPGIGPLVSTATVAAIGNGAAFRKGRDFAAWLGLVPRQHSTGGKAKLYGISKRGNIYLRRMFIHGARAVLLRVKYDTGGFGQWVHQLEARAPRNKVVVAIANKLARIAWAVLFREEDYRHMAVCAQA

SEQ ID NO: 412934 - protein, 308 aa, unidentified
MIMQNYVGCDISKQWLDFFDETSGHLRRIDNQADAIAAYVAGLDPSRDFVVMEATGVHDRLLRHALAKAGVPFSRHNPAHTHHYAKSTRRRAKTDPLDARMLSDYGRRYNPEAEPAPSEEVEQLQSLAGHRDHLVNMRATAKKHLAEAFNEIVIADLEETIAYLDTRIKALENLIAEVIRQNQDTARDHALMVSVPGVSKVGALSLLALLPELGKRSPKAIAALAGLAPFDNKSGKLTRRSQIQGGRSRVRRALYMAALTAIRTCDRFKSFYTALAARSGSKKLAIIAVARKILVVLNAIMRDKTAFA

SEQ ID NO: 412935 - protein, 444 aa, unidentified
MTKAKSKLEIVNPNASGIDIGSAVHYVCVPEGRDKQRVQKFGCFTADLHNLARWLKKCKVTTVAMESTGVYWISLFQILESYEFEVKLVNARHVKNVPGRKSDVQDCQWLQQLHSYGLLRGSFRPDNQMCVLRSYVRQRKKLTESASTHVLRMQKALIQMNIQLHKVISNITGVTGMKIIEAIIEGEKNPEKLAEFRSSNIKNDKATIAKALTGDYREEHLFVLKQELELYNIYQEKIAECDENIENYYKTFETKFCGNKQCSKIKNRSTKNRPNFSIHEELHRVTGMDFTKVPGLDALSIQTIISETGINHNKWPTEKHFSSWLGLSPANKITGEKVFSTRTCRVINRAANAFRMAAHCVSRSNSGIGAYCRRLKKRLGAPKAITATARKLACIFYSMLKHGQEYVEKGIDYYEKLYKERVLKNLSKKASELGYVLTKKHELI

SEQ ID NO: 412936 - protein, 338 aa, unidentified
MAIVTLGIDLAKNVFALHGVGSTGKPELVRPEIRRSRLLELVASLPPCLIGMETCSGAHHWAREFEKLGHTVRLMAPKFVAPYRMAGKRGKNDANDAAAICEAVTRPNMRFVPIKTIDQQAELFVHRARQGYIEERTALINRLRGLLSELGIALPLKASLMRRDIHSILEDLPGWCNVVVGDMLVHLADLDERIATYDRHVAKIAKQDDRARLLMKLAGVGPTTASAIVASIGNGHDFKNSRQFCAWLGLTPGQHSSGGKARLGSITKAGDAYLRTLLVMGARSLLMKAANHTDSVSRWAIKLKERRGFGRAVVAIAAKNARMCWAALRLGESFRVPT

SEQ ID NO: 412937 - protein, 390 aa, unidentified
MVTTHFQTETPTAIRTDLGAIFVSLEFSRSTWLVTSLSPGGGERMSKHAVAGGNVSELLARFTHLQEKARSRSGRLFPIVTIQEAGLDGFWIHRVLETNGIESYVVDAASIAASRRRKRAKTDKIDGEALVRALLAFKRGEPRVCAMVKAPSPEEEDRRRICRERRVLIAERVEHVNRIKGLLFAQGIGGYQPLRKDRRRQLEDLRTGDGRVLPPHLRAQICRVLDRLELLLDHIAVVERERDALVERVECEAKAPEPATMLCAIKGVGPEVAAVLWTEGLCRQFDNRRQVAAYAGLAPTPWQSGTIDREQGVSKAGNPRLRTTMIQLAWLWLRNQPSSALSRWFIDRVQSNGGRHKKSTIVALARKLLVALWKYVTFGIVIDGAVLKSA

SEQ ID NO: 412938 - protein, 409 aa, unidentified
METIVERPAALDIHKAQVTACVRVPGEGRAREQHVAEFSTTVRGLLTLRDWLAAHRVTQVTMEATGVYWKPVWAILEDEFECLLVNARHVKQVPGRKTDVSDAAWLCQLAEAGLLRASFVPPKPIRALRNLTRYRKTQIQERAREANRLHKALEDTGIKLDCVATDILGVSGRAMLDALINGTTDPEVLADLARGRLRAKLGALREALQGRFDHLHTVWIGAILAHIDFLDEQIAGLTETIGEQIAPFEPAVELLCTIPGVQRRTAECVIAEIGVDMSVFPSAKHLASWAGLCPGNDQSAGRRRSGKTRNGSKWLDWALEEAALAAVRTKDVYLAAQYQRLRPRRGHKKALGAVKHSIICAAWHMLTTGELYRDLGGDYYQRRDPEKTTKRLIAQLERLGHTVVLQEAA

SEQ ID NO: 412939 - protein, 312 aa, unidentified
MTQACAAGVDVGRDYLDVGLAPSGRTFRASNSAAGVQAVVAGLRKAGARRVVLESIGGLGRPLVRALAEAGFEVGVVDPKRVKALRTAEGKSAKTDDLDARLIARFALLMQDAARPVPGAEVYEIRALSTRRRQLVEMIAAEKVRLKQALDAPVAESCRQMIALLGQERLRIEDQLQTRLLKADGGAERSRLLQSIPGIGPAVSMTLMADLPELGQLDRKAVASLAGLAPHPNESGTRTGAARISGGRPCVRVALYMAAVSASRTDKGFRREYLALRQAGKPPKVAFVAIARRIAMAANSIIKSGRPWEVRA

SEQ ID NO: 412940 - protein, 325 aa, unidentified
MRQPQLQVKPQTQIGLDVSSQTLDAHIRVDGKAFSVPNTDAGFDQLCEILSAYDVSMILMEATGGYEDNVACYLQLQGFDVVVINPRFARRFAQSMGRLAKTDRIDAAILAQMAFMIDSGPDRERYIKPVTDEQRKQLSRLSSRRRQVVDLITIEKQRLTHADDYARESINGIISLLNVELKRIESDILRYVKKNFSELANRLLSIPGVGEQAMIVLIADLAELGHVNRRRISALLGVAPFNHDSGKFKGQRRIRDGRQTVRNVLYMGVISATRFNPVIKAFYDSLLLRGKPRKVAIIACMHKLIRIINAMMRTGKSFDMSLHGV

SEQ ID NO: 412941 - protein, 407 aa, unidentified
MRLFVGDDWSEDHHDVELMDAAGRVLARKRLPEGVAGMARLHELIGQQLGEDAEDAEVVIGIETDRGPWAAALVAAGYTVYAVNPLQASRYRERHGVSGAKSDRGDAHMLTDMVRTDSHQLRAVAGDSPDAGAVKVVARAHKTLIWERTRQVQRLRHQLREYFPAALAAFADLAAPDALELLAKAPDPARAAKLTRAQISAALKRARRRDIHGKATAILTALRSDQLGQPPAVTAAYAVTARSLIAVITTLNEQVTALEGQVEADFGRHPDAEIYLSQPGLGPVLGARVPGEFGDDPDRYVSGKARKNYAATSPITRASGKRKVVTARFIRNDRLTDALMAQAMSALGASPGARALYDAERASGTEHNAALRKLANRLVGILHGCLKTRTLYDEATAWSHHENKLAA

SEQ ID NO: 412942 - protein, 387 aa, unidentified
MSKQNDLSRCLVALEQDATLIAVVEMGQSSWLVAGIVPGLDRYPLKKLGPDRDALLQLLHRWRSEAEKSGHAIDRIAVAYEAGRDGFWLARWLCSQSIEAYVIHPSSVPVSREHRRAKTDRLDTELLKRVFLGWLRGEPKHCSMAAIPALEDEDARRPSRERQVLVGERTRILNRLKANLARLGIRGFRPNLARAPSQPEALPTPEGVAIPTNTLAEMRRDLDRLRFVKQQIKEIEKTRVERLAKAPDERRHVAARALIRVVGVGVETEDMLVQEVFSREIRDRRALARYAGLTGAPDESGQRRRERGLAKSGNARVRRGMIELAWGHLTHQKGSPLSARYRMRTADARGGTRKTMIVALARKLLIVLWRLATTGEAPDGLQLRPVA

SEQ ID NO: 412943 - protein, 381 aa, unidentified
MKQDNKAKQNRGNQISAEAPQGTFDLGRRRWRVQREGLTVGLDVGDKISHYCVLDEEAEVVQRGKLKTTPAGLQPWMEALPASTRVVLETGTHSSWISRLIEQAGPETLVAQPRKIPQIYACKRKNDRRDAEKLARTGRLDPNSMGPIRHRSAEQQADLAVIQARDALVRARTQLINTVRGLVKSTGERLTGCSARSFARQAEEQIPQRLRAALLPLLSQIAALSEQIERYDVHVEQLAQRKYPETELLRQVSGVGPVTSLAFVLTVADRWRFRHSRDVGPFLGLVPGQDESGESSPQLGISKAGNGYLRRLLIGSANYILGPFGPDCELRRWGMKLSERGGKNGRQRAKVAVARRLAVLLHKLWVSGEVYEPLPEKRAAA

SEQ ID NO: 412944 - protein, 386 aa, unidentified
MSSAASQSTAARSIIFLGMDVHKESITIAVLPATATAATRVERLPNDLGKLKRWVDRLAREGELRICYEASGAGYVLHRALREWGYACDVIAPSLIPKRPGVRRKHDKRDAGELARLYRAGELTPVRIPSEAEERVRDVVRCRETFQREILKSRHYILKFLARRGFVFREGANWCTPHLQWLQHLTTEQSPLAPADRLVFREYHALLQYKLQRRDELDREIARLAELPALAPVVRRLQCFRGIALQGAMVLATEIVDWRRFERPTQLAAYLGLVSREDSSGDRERKGSITKAGNSHCRHVLVQAAWSYHHRPAVSADLRRRQTGQPPAVVAHAWKAQQRLHQRYTHLAYRKQPQIAVVAVARELVGFLWAAMQDCSATTSSAEALA

SEQ ID NO: 412945 - protein, 364 aa, unidentified
MASVPSTSNRPYVVNEVVLGVDTHRDVHVAVVLSTLGAVMDSASFPATVVGYRELWEWASQLGTVHSAGVEGSGSYGAALSRYLRARRVEVFEVNRPDRSVRRQRGKSDPVDAQEAARAVLSGRARSQAKTGDGPVQCARLFKLAKDSAVKARTQAINQLKAVLVTADPDLREQLAGLKTPALVRTCGQFEIREGDDGEKDAVEQATRIALCLLAQRIDQLTEQIRDLERRLAGLVQRHFPQLLVPVGIGPDSAATLLITMGDNPERLRSEAAFAALCGVSPVEHSSGRQRRHRLNRGGDRQANAALYRIVQSRLRFDARTRNYYERRIAEGKTRREIIRCLKRYAAREVFNLVRPGIGPREVA

SEQ ID NO: 412946 - protein, 409 aa, unidentified
MNVNATVNCVGIDVSKGKSTIAIMRPLGEIVKSPYEVKHTSSELKMLADTLNGLEGETRIVMEYTGKYYLPIARYLYDAGFFVCVIHAKLMHDFANNSIRMIKTDKADAVKIANYGLSNWEILNPYSKDEETRELLKAHNRQYNAYMKQYVAARNNFISLLDQTFPGLNGLFAQNRRPDGKIKWVDVATRFWHCECVSQHSFLYFQKAYNKWCLDNGYRKSSAKAEEIYQLACECVPSLPKNEHTRYLVLHAAVELSDMSKTLLDTQKKMEELASSLPEYPIVLSMNGVGKTLGPQLMAEIGDVRRFPHRGQLIAYAGVDAPPYQSGKYESHHRHISKRGSSDLRKSMFQVIICLCQRQNEDDPIYQFMARKRAEGKPYYVCMVAGCNKFLRIYYARVREYLNNLELQA

SEQ ID NO: 412947 - protein, 424 aa, unidentified
MQDILTNVCGLDVHKETVVACIIKNKPEFKPLVNPSKVSVSTEIRTYSTLYDDLQKLRLWLEAEKCYDVAMESTGVYWHPVYDVLENTNDGNVNLLVVNAHHMKNVPGRKTDINDAEWIASLLRAGLLKASFIPPEEIRQLRQLTRYRKTIVEDITTQKNRIEKFLQSSGYKLSTFLSDIFGVSGRSLLDILIDEGKITPKDVERELRGRAKSKIADMRYALNGVMNAHQRSFLSLQLEHLDSLISHQKKIEGDIETQSNPFSNEIELLTTIPGIGLIAAKAIIGEIGINMSCFPTADHFTKWAGMSPGDDESAGKKKDTRITHGNTWIKGLICECAWSIVSRRSTYLSQFYWRLKARRGAKKAIIAVGRKMLVIIYIMLRDGIPYREEQFEKARLKQDEMRVRKIYKDAARLGLTVTKTQETA

SEQ ID NO: 412948 - protein, 338 aa, unidentified
MSLYCGIDLHSNNSYVAVLDEERRDVECRRLRNELPAVLGFLEPYKEELEAIGVESTYNWYWLVDGLMRAGFDVRLMNPTRATVHSAMKYTDDRHDARWIACLLALGILPEGYIMPVEERGLRDLLRRRLFLVHKRTAHLLSLKGIFARSTGKQVSVGDILDWDCEAIREVIDDPLVVESIAVMLPVVRVLTTQIKAVERRALEIGKLRDEFGLLQTAPGIGQVLALTIMCETGDIRRFPGVGNYASYCRCVPSDRMSNFKRKGSGNRKNGNKYLSWAYSEAAHHAIRFEPLAKRYYDRKRARSHLMVASRALANKMARACYYVLRDQVPFDPARAFC

SEQ ID NO: 412949 - protein, 343 aa, unidentified
MYYIGLDVHKKTISFCVKDAAGRVCQEGKIGSTRYELDAWIKTLPQPRMIAMEATIFTGWIYDHLLPHAEAVKVAHPLMLRAIAAAKRKNDQIDARKIADCLRCDLLPECHMASTAIRDRRRILRYRSLVLRQAVQMKNRVSGLLMEAGVSYNKLRLHRMGYFAELMATNEEVSENIRPLLRLCREHIDRSIRMNTALLNSLERDPLLADRLRRLRTVPGVGPITALTWALEVGDTSRFHNIKQAISYCGLCSAEKSSADKVMRGPISKQRNKHIQQVLVEAARLAPRYNDELALLYERERQRGNGNRATLAVARKMVVWMLAVDRRNADFVPDGGFKRTAAA

SEQ ID NO: 412950 - protein, 337 aa, unidentified
MKYSGIDLHSNNSVVTVMDDNDRVVAEKRLPNDLAKIIGFLSPWREELAGVVVESTYNWYWLVDGLQEAGFVVKLANTGAIKKYDGLKHSGDEADARHLAHLLRLGILPTGTILPPEHRAIRDLARKRMQLVRSRTSHILAIENIMARQQAVKITSNIIKRLTAEGVEQMGLPADVSLAIQSNLAVTITLGAQIDLLEKRLQESVGERPDYVLLSSVPGIGRILATIILLETGPIDRFAAVGNFASYARCVDSQHTSNGKKKGEGNTRNGNKYLAWAFVEAANFALRFCPEAKRFYERKKARTNTVVAIKALAHKLARACFHILKERKPFDVTRCFA

SEQ ID NO: 412951 - protein, 350 aa, unidentified
MKIYVGIDIAKLNHFAAAISSDGEIIIEPFKFTNDADGFQLLVSKLESFDKNSLIIGLESTAHYGDNLVRYLVTELYQVCVLNPIKTCQMRKNNVRKTKTDKVDTYVIAKTLMMQDNLRFVSFFDLDMMDLKALGRFRQKTIKQRTRLKIQLTTYVDQVFPEIQYFFKSGLHQHAVYALLKEAPSPKEIASMHMTHLANLLKVNSHGHFTKEQAKELRVLAQKSVGANDSAISIQITQTIQQIELLDSQLEKIEAEMTDIMKFNDSVIMTIPGIGYINGGMILGEIGDIHRFSNPNKLLAFAGLDPSVYQSGNFQAKTTRMSKRALVFYDMPCKCSLERCQKQRNLQGLL

SEQ ID NO: 412952 - protein, 366 aa, unidentified
MTSVSSAAGLIHLGMDTSVKEIVVAVLRPGEEVPVVDRIPGDEESVRRLIGRFPDRRLLSACYEAGPGGYELHRLLASMGVACDVVAPSLIPKGSSDRVKTDKRDSVRLALTHRAGLLTPVRVPSPAEEAVRDLVRARGDLLDDRKRMQQRLNAMLLRHGRVWRGGKKWSYAHRAWVDRQVFDEPALAEAFALYRGGLEAREAELAAAGARLAAWAAREPLAGPVARLGGYRGIAQLTGLTLAAEVVDWRRFASARAFMGFAGLIPTEYSSGSRSRRGHITKAGPEGVRTALIEAAWAYRYRPAIGATLRHRQAGLPPETLARSWKAQQRLHAKYKKMTARGKPPGVAVVAVARELAGFVWAEMIS

SEQ ID NO: 412953 - protein, 351 aa, unidentified
MLALEHDSDVVIGVDTHKDTHTAAAVSSTGAVLAHLTVPADPKGYLRLIAFGRRHQAGLWAIEGTGSFGAGLTTTLLDKDQRVVEVDRPQRAPRRGGVKSDDIDAVRAARQALAGIGLAEPRSRGEREAIRVLLTTRAQAIEFRTRAIAAVNALVVSAPDSLRERLRNLSMGQLLRSCAALRGSSRQSAEEFATVMALRSTARRALACEAEAAELEVQLGILVRRVAPQLLELIGVGPVVAGQVLSSWSHRGRVRSEAAFAKLAGVAPIEASSGMVVRHRLNRSGDRQLNRALHTIVMVRMRQDSATKDYVQRRLAEGRSSREIKRCLKRYVARQLFRQLEALAPAALDVT

SEQ ID NO: 412954 - protein, 456 aa, unidentified
MTQKRSKPKIDRTMPMVHPNAAAIDVGATMHTAAVRADWTPEPVRSFGTFTTDLHRLVNWFKECGVETVVMESTSVYWIPIFELLDARGFSVFLVNARDAKHVPGRKTDVSDAQWLQRLHSYGLLRASFRPKGQIAELRAYVRQRERLLEYAASHIQHMQKALTEMNLQLHHVVADITGTTGMRIIRAILAGERDPKVLARLRHYSCHSSIETIEKALTGNYRAEHLFALEQALTLYDAYHEKVSACDVRIEAVLKELSVRRGRKSGSLPSSHRRTDQANGLAFDARAALFTLLGKDITQIDGLGPYLSLKLIAECGDDLSAWPSAKHFTSWLCLAPSNKISGGKVLSSRTRRGSRAAALLRLAAVTVGRTDTALGAFYRRLSARIGKAKAVTATARKIAVLFYNAVRHGMEYVDPGASFYETRYRKRVVDNLRRRAKSFGFVLQPFEPTPSVPVS

SEQ ID NO: 412955 - protein, 400 aa, unidentified
MGQPLWAGVDAGKSDHYCVVIDADGKRLLSRRVANDEAALLELINAITALADGDELTWAIDLNAGGAALLIALLIGAEQRLLYIPGRTVHHASGGYRGEGKTDAKDAAVIADQARMRRDLQPLRPGDDIAVELRILTSRRIDLVADRTRAINRLRAQLLEYFPALERAFDYSASKAALILLSGYQTPDGLRHAGAARLAAWLRKRKARNADAVAAAAIEAAKSQHTVVPGQQLAAAMVARLAEEVMTLDTEIGDTDAMIEERFRRHRHAEIILSMPGFGVILGAEFLAATGGDIAAFGNTDRLAAVAGLAPVPRDSGRISGNLKRPRRYNRRLLRACYLASHIAIRTDTASRIYYDRKRAEGKRHTQAVLALARRRLNVLWAMLRDHKPYQPTAPNAAAA

SEQ ID NO: 412956 - protein, 398 aa, unidentified
MRFVGIDVAAKRHVVAVVDETGTLLLRATPVTEDTPGYRQLLELIGPGDDCLVAMEATGHYWHNLYAALVTAGFEVALLNPLRTRRFAEEELQRTKTDAIDAIGIARFAAQKRPAATKLPEPALLELRELVRLKQQVVQQLGDRVRQLHRAVDLGFPEFTRHVRTLESELATTILAQYPTAAAFRSVSVKKLARLIYGGNHQVGEELARTLIEAAKQSVGAHHGEPYRLQVRYACEDIELLRRRLRALEGDIERRLMQHEVGKLLTTINGIGPQTATCIMGEVGDPARFHSLAALASYVGVIPRLRESGKRKKTRTAPPLPLGNARLRRALWMPTLSAVRVNPWVRAYYQRLRAVGKPAKVAMRKLLAAVYSVARHRRPFTLAPIFPPVAGGAVTPGA

SEQ ID NO: 412957 - protein, 344 aa, unidentified
MIKTPIAVLGIDLGKYTCSLAGLDINGAIVLRRRMTREAVIAFAASLPTCIVAMEACCGAHFLGRTLAAQGHTIRLMSPEYVQPYVKAQKTDDRDAEAIAEAATRPTMRFVSLKSETQLDLQVLHRARERLVVARTSLINQLRAVLLERGIVLPKGRLVLMRRLREIGMDELPVSGRTRRLIEDLCEEASALDERIRAYDEEFADLTRTDEQARRLSSIPGVGIINATALLAAVGDASAFSKARDLAAWLGLTPRQHSTGGRTKMLGISKRGNRYLRKQLIHGACAAMPHLAAKPTPLGVWLQGLLARSHPNVVVVALAAKLARIVWALLRRKQAFDQGALATA

SEQ ID NO: 412958 - protein, 366 aa, unidentified
MISVGVDVSKEESTVCVMKPYGEIISKPFELSHTEKDLSELANMLLRLDGEVRVIMEVTGVYHLPILMYLKEQGFFVSVVNPYEMKKYRSQGLRRVKTDKQDAITICKGLDYWYQLKNYEANGAIYEELKLLGRNYMKMHIEGVQNLAHLLDCVMPGIKLLLGGWNESSGKNKLSDFASEYWHFDNITKKSERQFSANYIKWAKKNGYHQNQDKAEKIYLLAKSGITTISSGNPTTKMLMQEAVKVLKEVDNTLKKILTQMQLLAKSLPEYAVVRAMGGVGEVLAAKLIAEIGDVRRFHHGKSLIAYDGIDSPPYQSGQFTAQNRRISKHGSAYLRKVGYEVMQSLKTHDAPTDDCVYQFILKKRT

SEQ ID NO: 412959 - protein, 349 aa, unidentified
MREHLRGIKYVVGVDTHKASYTASVVSRAGAELETLTVPADAFGHKKLLAFADRVGNGPRLWAIEGTGSFGRGLTTFLLENGETVGEIDRPARPARRNGAKADDLDAVRAAREAIARPHLSQPRRRGLREALRVLVRTRTTAVRAKSVAICHLKSLIVTAPTGLRDQLRKLSDVRLAPKCARLRTTVNQSPEHRATIAAIRATARRILWLEAEAEDHASAIELLVQEIAPQLLKEVGVGPLTAAELIIAWSHPGRVRSEAAFAQMAGVAPIPASSGQVTRHRLNRCGDRHLNCALHQIVLSRLFHHDETKVYYERRRADGRSPKEIKRCLKRYLARRIFRLLEASSMAT

SEQ ID NO: 412960 - protein, 315 aa, unidentified
MDRDGVFVGIDVSKASLDVGTDSGSQVEKFANDSCGHKALADHLCDLKPVLVVLEATGGLEIPVAGSLFEAGLPIVVINPRQVRDYAKAMNRLAKTDRIDAVVIAKFASAVKPEQKALPSKKAKLLGDIIARRRQLIGMLVAEKNRLGHATFSLRRDIQAHIKYLQKRIDNLEDDFKKEIQSSPLWRVKDNLLQSVPSIGPKTSAALLADLPELGQLNHKQIAALVGLAPFNRDSGKFKGRRRVWGGRTHVRCALYMAILSATRYNPVVKDFYQRLLNAGKPKKVAQVACMRKLLTILNAMLRDQTKWQDHAFSS

SEQ ID NO: 412961 - protein, 317 aa, unidentified
MARKGTIVGIDVAKGKIDAAIRFGAEASFANSAEGRRELLAWLKEHGVCKAVMEASGGYEKSWATLLRGAAVEVVITDPNRVRHFAKSAGQLAKNDPIDARMIAWFGEVFGHASRQPHDDERQELDQIVTARLGIGRLKEQIENWGEHEQPKAVQKAQQALLKVVATQLAKLETIIAAKIDKTERFAQRAEIIQSVPGLAGTAAAGLIAFLPELGLVDRQAAAALLGVAPFDADSGRRRGERHIQGGRHKLRKLLFMPILSAATQHNPVLKACYQRLIAKGKKAKVALIACMRKLIGILNTMLARGEKWDPARHAIA

SEQ ID NO: 412962 - protein, 320 aa, unidentified
MRNAVGLDISKLTFDATAIVGNAEYSAKFDNDSKGLDQFSDRLKSLGCQNLHICMEATGSYYEEVADYFAQYYSVYVVNPLKISKYAESRFKRTKTGKQDAKLIAQYCRSAKESELVKRQKPTDEQYRLSRMIAAYAQIKSECAAMKNRHHAAKDEEAAKAYAEIIKAMNEQLEVLKEKIKEQTEKPNCKEGVKRLETIPAIGRMTAAVLFHHLTSSKFETSNKFAAFAGLSPQQKESGTSVRGKGKLTKFGNRKLRAVLFMPAMVAYRIRAFPDFIARLEEKKKPKKVIIAALMRKLAVIAYHVHKKGGDYDPSRYKSA

SEQ ID NO: 412963 - protein, 346 aa, unidentified
MEQIIRIGMDTSKSVFQLHGVDAGERPVLRKQLGRVGMISFFRKLPPTVVGIEACGGAHHWGRLLASFGHQVKLLPPQYVKPYVKRGKNDAADAEALCEAMSRPTMRFVSVKSAEQQAAQMLAGVRDQLVRRRTQLTNAIRGYAAEFGLVAAKGLGKIEPLLARIRTDEVLPMLAKELFEAQAREYARLQKELEALDAKLMAWHRANALSRRLGQIPGVGPIGATLLAIKVADASAFKSGRDFAAWIGLTPKNHSTAGKNRLGVITRAGDEMLRSVLVAGATALIQPVKRGRRPASPWLVSLLRRKAPKLVAVALANKTARIAWKLMVSGECYRPGSAMPLGMAQV

SEQ ID NO: 412964 - protein, 325 aa, unidentified
MSSYEIVGIDVAARTLVAIGERVTLAAAYDNTPASRSSLIQTLGRSRRPVRVVLEATGIYFVDLACELVAAGIAVMVVNPKAAHHFAEAILQRRKTDPVDAAMLREYGRRMDFVPWQPPRPELFGFRALTREVQALSKAVAAAKNRLHAVTATRLTPAALIRALERQIAHNQTLIDELVAAALAQTETDPELARLFARTDSIPGFADKAAVLVIGELAVLPPMTARQWVAQAGLDVREESSGTSLARRPRLSKRGNKRLRQTLFYPALTAARCCPAAGAFVERLVARGKTRLQAIVALMRKLLHGLHAMWRNDEDFNAEKLFAQA

SEQ ID NO: 412965 - protein, 411 aa, unidentified
MDKVYDKCCGIDVHKKLIVACFRQGNKQEIRDFGATTRELLELADWLKEGGCEMIAMESTASYWKPLYNILETCELNAMVVNASHMKAVPGRKTDVKDAEWIADLLQHGLLTASYIPDKDQRELRELVRYRKSLVGERNRELNRLQKMLEGANIKISGTVRDINGKSARNLLEYLLTGKQIDSAEYDILYEQKIIAHNLKATKEQIIDDLNGVMSDLQKKMMRLLLKHLDELNAHIKELDDDIDNFMKPEEKQAAKVIQDIPGIGNTSAQAIISVIGTDMNRFPTDAHISSWAGLCPGNNESASKRKSGRTTKGNNLLRDTLVVCAHSAVKNKDSYFSAQFARISAQRGKKRAYVAVAHSMLVAIYHILKDGVVFKDLGADYYNQFNKERKINAYLKKLKALGWEAPVVAA

SEQ ID NO: 412966 - protein, 339 aa, unidentified
MKITVIGLDLAKSVFQAHGVDESGRTALVKKLHRKQMLPFFSNLPPCLIGVEACATAHHWARTLSAMGHEVKLMPPSYVKGYVKRGKSDALDAEAICEAVQRRSMRFVPTKTVEQQAILMAHRTRSLLVRQRTMAANALRAHLAEFGLVANPGIANLAKLSEKALAEPDGLPAYARRALAILVRRLVELTEEIGALDRELGAWHAQNEASQRLATIPGIGLITATAIAATVTDPKQFRSGRQFAAWLGLTPQQSTGGKTRLGGISKQGDRYLRRLLVVGATAVMRYAKDKATPLADWIRELLAKKPFRLVSVALANKLARIAWAVLTSGETYRPKAPAH

SEQ ID NO: 412967 - protein, 346 aa, unidentified
MLYAGLDLSRQKLDVHILDETGRTVELLAVRPDADALRTLAERIGRYGQPVEAAIESMNGARFVHDTLERLGWDVEIADAAKARGLAPLAAKTDKIDARVLAELARRELVPAIWLPDPSVRAERERARFRLYLVRYRTSLKNRIHATLIAFGQSVPVSDLFGMRGRELLASLPIPEPWATTLTTSLRLVDELETQIDELEAELRATGAHHRYVPLLMTVPGISWVLAYTIAAEIGDIGRFAGPKRLTGYTGLCPRVYQSGLADRRGPLAKTGPKYLRWALIEAATTAARNPHYHDRYQRTKRRLGKQRGSKVARVELARELAGAIWYMLTRQEPFRAGGPTSGLVA

SEQ ID NO: 412968 - protein, 345 aa, unidentified
MQVTTIGLDLAKNIFQVHGIDAEGNAVIRKTLRRAHVLPFFTGLPPCLIGIEACSSANYWARELMKLGHTVKLMPPSYVKPYVKRGKTDAADAEAICEAVRRPTMRFVPVKSPDQQAVLMLHRVRALLMRQRTMAANALRGHLAEFGIVTGQGAKNLRELIKRIYAEGPDRLELPRLARIALDPLIMQLNDLQMRVRAIEIELLAWHRTSAASKRLETIPGVGFITATAIAATVTDPTHFKSSRQFAAWLGLTPKQNSSGGKERLGGISKMGDRYLRTLLVVGATSVMRYARDKGAVSAVWINKLLAKKPARLVSVALANKTARIAWALLVRQEDYRAPKMPAAA

SEQ ID NO: 412969 - protein, 341 aa, unidentified
MQDVTLVGIDLGKHSFHLHGQDQHGKAVFRKKMGRKQLIEFFATFHACTVVMEACAGAHHMARKLASFGHLVKLISPQFVRPFVKSNKNDFVDAEAICEAASRPAMRFVTPKTESQQTLSALHRVRDSLVRDRVKAVNQIHGFLLEFGISLPIGKAVITRLPAVLAEHPLPPHLIAILERLHAHFKYLSEQIGEIDKEMTRQLAVDELGQRLLTIPGVGAITASVLAAEMGDGKQYGCSRDFAASIGLVPRQYSTGGKANLLGISKRGDKNIRRLLVQCARAYMQRLERQTGPLADWVRAMLTRRHSNVVACALANKLARTAWALVTRNTTFDAGSAAIPV

SEQ ID NO: 412970 - protein, 387 aa, unidentified
MVQVNDLSRSLAAFDPASTLVVVVEMSKASWLVSGVVPGVERQPLKKLEPDATALLRLIERWRNEAVRAGRPISRIALAYEAGRDGFWLARWLIARVIEAHVIHSASVAVSRERKRAKTDRLDAAMLIRVFLGWLRGERGHCGMVAIPTIEEEDARRPNRERESLVNERSRIINRMKSALARLGIRGFKAHLRKAPERLAGLRTPEGTGLPTNMIEEFRRDMARLALVREQISSIEKTRAERLEQAPDTGPHAMVRLLARVIGIGIETADLLVREILSRNLRDRRALARYAGLTGSPDESGLKSREKGLAKAGNARVRRGLIQLAWRFLMFQKDSALARWYRTRTEGPSGARKTTMIVALARKLLIALWRLVTTGEVPDGVELRSAA

SEQ ID NO: 412971 - protein, 484 aa, unidentified
MKENHRRCCGIDVHKSSVTVCVLPPVGQTHLEVKKRKFRTFTRDLRQLRAWLKNCRVTEIAMESTGQYWRPLWNLLEGQFTKVILVNPQHIKGLNGYKTDPKDAQWIADLLESGKLKGSWVPPRPIRELRDLTRQRVHILEDLNRAKNRIEQLCQTGNIKVSSVASDLFGVSGRKMLKAIVEGKRDPGWMADYAKGRLRDKRRELELALEGTFTDEQRWLLEKELRQVEWLEGQVQTLEEEIERRVEIFEEPIQRLLTIPGIDRKTAWTIAAEVGADMNAFTDARHLASWAGLCPGNRESGGKRFSGRTRKANRYVKRAMCQAAWAASHTKNTYLSAFYRRMSVRKGAPKAVMALAHHMLVVIYQVLSRNEEYVEFGGDYYDQRNKPKVVARLVTRLMKLGYKVDIQPVEGIGEPAAVAAEPETGAESVPKSSDSSTEASEGAVKPKRRGRPCKCAARGIICKHRTSPETNSMIFRTLPAGKFS

SEQ ID NO: 412972 - protein, 316 aa, unidentified
MDDKHTMHGVDVAKAELVIGHGETEVLLRIANTPQAIAAWLAQLPTGSWVAMEASGHYHQPLAHMAHAAGMVVYVLNPQLIKHYGRAVGMRGKTDRLDAQLIARYVLREHSKLRIWEPPSPGADALSRLLVRRQALVNARQMLAQSLSGLTELKAPRQALMASFKRMLAQVELLMRTEIARVPAMAALHRRLVSIVGIGPIVAAQLVASLSALRFTRADSFIAYTGLDPRPDDSGQRRGRRRLSKHGHALLRCLLYNAGMAAARSKLFKPTYLQLRARGLQSTEAIVILARKLARIAFALYQSGTTFDAQRHLKPA

SEQ ID NO: 412973 - protein, 389 aa, unidentified
MKIFVGIDIAKLNHFAAAISSDGEILLEPFKFTNDADGFQLLVSKLESFDKNSIIIGLESTAHYGDNLVRYLVAEFYQVCVLNPIKTCQMRKNNVRKTKTDKVDTYVIAKTLMMQDNLRFVSFFDLDMMDLKALGRFRQKTIKQRTRLKIQLTTYVDQVFPEIQYFFKSGLHQHAVYALLKEAPSPKEIASMHMTHLANLLKVNSHGHFTKEQAKELRVLAQKSVGANDSAISIQITQTIQQIELLDSQLEKIEAEMTDIMKFNDSVIMTIPGIGYINGGMILGEIGDIHRFSNPNKLLAFAGLDPSVYQSGNFQAKTTRMSKRGSRVLRYALVNAAWNVVRNNATFKAYYDAKRAEGRSHYNALGHCAGKLVRVIWKMLTDEVEFNLE

SEQ ID NO: 412974 - protein, 399 aa, unidentified
MVNVGVDLHKTQFTVCVRRDGEEQFARYPTTEEGYQAFLSAAAAWPGSEEEVRAGVESTGNTRYFKNRLEAAGIGVTVINPLQFKVINASINKTDRHDAATIAEFMELGIGKLPEAHLCSRESEQLRRLLKARKTLVEAAVVLKNQIHALLTAEGMEDVKGSLQSKRGRQRVLDALNQCANGLVAQPLFATIDLLAAEVKRIEDHIRPLVAGDRMVELLLTIPGCGEICAWTIRAYTDDIQRFASAKKYAAFAGVVPWVHNSNETVQHGKITKRGPRELRTAIVQVVMGMLRLKTKTFSWRLMERYVAMRKHKRPGVAIIAAARKVATIIWHMLNEDAEFDVSKMVDRKAAEQSEPINQTLQLVKEALAEKAEKPVAKKTENKNEGKTGVASKKIRKVG

SEQ ID NO: 412975 - protein, 466 aa, unidentified
MKPFYMGIDVSKGYADFMILNSKKQPVAQNFQLDDTFEGHQSLYKILGRFLTDHPESTLFAAVESTGGYENNWYNSLIEFQGSLNIQTARLNPLGVMHNSKADLKKNTTDKISAQNIAEYLIAHTEKVVYQQDDQLAGLRKQWGFIKMLTKQSTQFLNQLNALLYTANPELLSYCQDGVPGWMLTLLVQYPSAARLKNAHAKTVANIPYVSRMRAQQLIANAKRSVASATDTTTEQLIVATTRQILHLKNTIAEQMKRMIKECPISEIELLKTFPGISDTSAIGLIIEIQTVKRFAGVKKLASFFGVHPVYKVSGDGVGGFKMSKQGRKAPRQILYMVALSAIRCNPLIKETYEKHQQQGKHNMAAIGICMHKILRILYGMLKHNKPFDPQIDIRNRQRKVRIKSDTPAKDTNRRFQDYDQNAPVTRRQRKKRLERERPHNVGDIKSGVTAPVPLADIIADILPQL

SEQ ID NO: 412976 - protein, 432 aa, unidentified
MPQLWAGIDAGKTEHHCVVIDANGTKLLSQRFKNREAAILTLMGDVASLPGGTDVAWATDLNHGGTGLLQTLLSAHAQPLFYISGRVVHHASGAYRGEAKTDAKDAVIIADQARTRRDVSLMRQADEVTAELRLLSARREDLVHDRTRAVNRLRAILVHYFPSLEGAFNYATTRGPLVLLTQYATPSAIRRMGESRLASWLKGQGCWKSAAVAKVAVEAASEQSSVVIGEAAAARLVSRSAHDLLRIRDELAELEAEIDAALEGNTSADLLESVPGFGRRLAADFLAATGADLAAFETPDRLASFAGLAPVPRDSGRISGNHHRPRRYDRRLLNACFQAAFIAARTCPVSRSFYERKRQEGKSHKQALIALARRRINVIWAIIRDQTRYNPTPAPASQCGDLEAPRGKSLPGRSAIQSPHRRHTYAAPPLSA

SEQ ID NO: 412977 - protein, 338 aa, unidentified
MTLYCGIDLHSNNSLVSLIDSDDRVIREQRVPNELDTVVNLLQPYQSDIQGVVVESTYNWYWLVDGLMDYGYPVHLANTLAIQQYNGIKYTNDATDARYLAHLLRLGILPTGYIYPKALRAVRDLLRRRLLMVKQRTAQILSLQSQIGRHTGQRLSALRIKQLQSADLAGYFTEPAALLAAQQAHQLRQQLDCQINDIEAQVLAACEHQGDYTLLTSVPGIGKILGLTILLETGPIERFTQVGHYASYARCVPSDKISNGKSKGKGNTKNGNRYLGMAFVEAAHYAAIWHPAIKRYYQRKCKKVPKLVAKKTIANKLSRACYHMLKNNAPFEVNRAFG

SEQ ID NO: 412978 - protein, 415 aa, unidentified
MSDQKRWYAGVDWASESHHVRLIDEQGRDIGEKIFKHAGEGLAEMAAWLLATSGAAEPGQIHIAIEVPHGPVVETLIERGFAVYVLNPKQMDRFRDRYSMAGAKDDSRDALVMASALRTDPHCFRRLAVTDPIIVELREWSRITEDLGSERTALTNRLRQQLWRYFPAFLDLEADLAAPWLIELWQAVPTPDKAKRIRQASIAAILKRHRIRRLDAAQVLDILRQRPLAVTAGTTEAARAHIVTLVARLQLINRQLAHAHHQLDALTAKLGASQDTEPGQIKQRDADILASLPGIGRIVLATLLAEATDALQRRDYPALRTLTGVAPVTKQSGRSHFVVRRHACHRRLANAVYHWARTATQHDSTSRAKYAALRARGHSHGRALRSVADRLLNVACSMLRSGTTFKPSLATQNAP

SEQ ID NO: 412979 - protein, 403 aa, unidentified
MECIFGIDVSKATANVAVLVDDSVVKQFIVATDRGGFQTLSDELNSFKSPLIIFEATGIYSRPLRAFLQRDGWQYTEINPLAAKKAMDSLRNNKTDALDAIGLARAMAKNHYKATFQEQPVYTELRDLERTYQQHNEDLVQNKNRLHRELQLTFPEIEQFLSKTDGSLYWHIVERFPHPQLVLGYDVNELAEIILAETPKNMGQKRSIRLAQHLIDLAQQAAPAVTQSAYAVKAVTALAKDVERIDGLKAETITEMANVAKNLSEVKLLMTIPGIGEKTALCLIAELGDVRRFHSANAINAYIGIDLILYESGQYQAGMHIRKRGNAYARKILYKAIMNIVSVAQYHPTRISTTYKRKKQSAQSKKKTTKKIAIAAMSQFNRLMRHLILNNEAYDSTTFTPEQ

SEQ ID NO: 412980 - protein, 402 aa, unidentified
MNSVGIDVSKGKSMIAVMRPFGEVVVSPFEVRHTANELNELAGLLKSLDGETRVVMESTGNYHAPVAWLLHDAGLYVSVVNAMLVHDYGNNSLRRGKTDKKDAVKLANYGLDHWLTLPKYVPEEDTRLMLKTCYRHYQQYPKVRTLLKNDLVPLLDPAFPGANRLFTRPPRAAGSEEWVDFVAAFWHCECVCGLSKKAFTTQYQKWCRKHGYNFSEDKALDIYASACGHFGVMPKTDTAKLLVEQAVSQLRATSAALAALKQEMQSLAVSLPEYPVVMEMFGVGPTLGPQLIAEIGDVRRFHSKKALVAFAGIDAPPYQSGQVDVRSRNISKRGSASLRRTLFLVMGVLLQCAPMDEPVYQFMNKKRSEGKPYRVYMMASANKFLRIYYASVKAYLDSLEHG

SEQ ID NO: 412981 - protein, 402 aa, unidentified
MNCVGIDISKGKSTIAVMRPFGEVVVSPFEVLHTDSELSKLARLLKSLDGETRVVMESTGNYHAPVAWLLHDAGLYVSVVNAMLVHDYGNNSLRRAKTDKKDAVKLANYGLDHWLTLPRYVPEEDTRLMLKTCYRQYQQYSKVRTMLKNNLISLLDTAFPDANRLFTSPPRADGSEKWVDFVAAFWHCECVCGLSEKAFTAKYQKWCKKHGYNFSEDKALDIYASACGHFGVMPKTDTTKLLVEQAISQLRATSAALAALKQEMQSLAASLPEYPVVMEMFGVGPALGPQLMAEIGNVRRFHSKKALVAFAGIDAPPYQSGQMDVRSRSISKRGSASLRRTLFLVMGVLLQCAPMDEPVYQFMNKKRSEGKPYRVYMMASANKFLRIYYASIKAYLDSLEHD

SEQ ID NO: 412982 - protein, 363 aa, unidentified
MFTERTSVGLDVHARSVAAAAIDSVTGEVQQTRLTPSYEHIRSWLSQLLGPVAVAYEAGPTGFGLQRALTEAGIRCEVVAPSKLQKPSGDRVKTDARDALHLSRLLRLDEITSVSIPTVSQEAARDLVRAREDCRGDLMRARHRLSKLLLRHGIVYYGGAAWTGAHDRWLRTVAASQLAAPATRMAFDADYDHVLTMQARRGRLDSAIEEMAADGEFAPIVRRVSCLRGVNTLTGFALAVEIGDWNRFTGNTIGSFVGLVPAEYSSGSSRAQGPITKTGNAHVRRLLVEAAWHHRARYHVGAVMRSRWDRASAAARARGDEGNRRLHGRWVGFLERRKRPVVANVAIARELAGWCWSLAVMDD

SEQ ID NO: 412983 - protein, 452 aa, unidentified
MPNAKNARSKRKLRASQVRPVVQPNAAGIDLGATLHLVAVPPDRDAEPVRSFGTLTGDLHALADWLVTCKITTVAMEATGVYWIPLFQILEARGLEVCLVNARHVKNVPGRKTDVQDCQWLQYLHSVGLLHASFRPPAAVCAVCSLMRHRDSLVRTGCEHLLRVQKALDQMNVQLHHVVSDITGETGLAILDAIVAGERDAAALARLRNYRCRKSQAEIAAALRGDWREEHLFTLRQSLEAWRYHQKLVEQCQTQIDRHTAALADLTREEPPPPPKRHAQPDERLRRHLFAKFGVDLTAVDGVSIQTAFVFLAEVGPDVSKFPTPEHFASWLGLCPDNRISGGRTLSVQTRSVANRLATALRMAVQSYHRSESALGDWFRRLRAKLGTAAAVTAAAHKLARVLYAMIKHRCAFDPAKLGNPELARQRKERSVRRLAESLGFTLQPIQTDSLS

SEQ ID NO: 412984 - protein, 313 aa, unidentified
MAGITVGIDISKAHLDVYVYPAADRFRVTYDQGGIGQLIEKLKPWRDEATLILEATGGLEVAITAALGVAGFHVCVVNPRQVRDFARALGRLAKTDRIDAEVLALFGDRVRPEPRPLPDAALRALEAQVSRRRQLVDMLTAEGNRLGQAADGDVRKQIQRHIRWLERELKGVDTDLGDTIRRTPLWRAKDKLMRSVPGVGRVTSFTLLAGFPQLGTLQGKQAAALGGLAPFNVDSGRFTGYRRIWGGRAHVRTVLYMAALSAIRWNPAIRRFYQRLVQAGKAKKVALIACARKLLVILNAILRDQQPWSASEA

SEQ ID NO: 412985 - protein, 474 aa, unidentified
MKEHKKTKAKAKSQATKALREQEPNAGGIDLGAEEIWVAVPAERDQNPVRRFEAFTQDLVAIVQWLVGCGVRSVAMEATGLYWIPLYQLLEDAGLKVCLVNARHVKNVPGRKSDVRDCQWLQYLHSVGLLLGSFRPAQAICATRSIYRYRQNLISMATEHVQHMQGALDQMNIKLHYVIDDLSGFTGQAIIEAILNGHRDPVQLAKLRDKRIQASEEKIIKSLQGDWRKEHLFVLAKAWAQYQEVRKQIQDCDQELLQYTQQLEASTTVGKPAKVMRLRPELVGSEPVAKLPTKKKVRRKTSKNQPEGPWQQELERFFGVDLTLIPGISVLTGLTLMTELGNDLRAFKTQHHFASWLCLCPDNETSASKVLRRRTRRSQNRVRQALRMAASSLHHDKSHLGDKYRRLRARLSPPKAITAMAHQLARIIWTLITRQVPFDLSLFAEQEKLNQQRQIKRLTAFARNIGYQLTPLAP

SEQ ID NO: 412986 - protein, 415 aa, unidentified
MKVVFPTCCGVDVHKTFLVATIITTPADSLQPNYQKKRFSTFNSDLNRFADWLLKHNCLDVCMESTGKYWVPVFNILEKRGIRVVIANPKWVKAVKGNKDDAKDSKWIGDLFRIGLVKSSFIPNLNIRILREFTRYRYKLVSMKSSEKNRFQNAFTVCNVALDSVVSDMFGKSATAITDYLTSDESFDPEHCVSLLQRSLKKKAEQVLESIEGFSIANEQKTRIKIVREHYDFIEKMIAKVDTCVNEMVAKYEGEINLLCTIPGIDRRSAITIISEIGTDMSQFGSSKRLCCWAGLTPGNNESAGRKKSVRISRAGVYLKPALVQVAHAAVKDNNHPYYKLKYERIAKRRGKKRAIIAIARMILTAIYSMFCTGEVWNPVDLFKVDMPEHLKEQQLAKAIKQATRFLEKQGLSVA

SEQ ID NO: 412987 - protein, 377 aa, unidentified
MFYLGIDQHARQITISLRDEGGDVVQARQVSTQPEKVQAFFQQLTRERLHDGESFVAVLEVCGFNDWLIGLLHEYRCHKVILIQPEERKLRKTDRRDAAALSELLWVNRDRLLQDKPVRGLRQVDIARTADQEDRRLTTLRKDAGRARTRLVNRVRHILRRHNLQWQMPTKKFPSKSGLAWLKQLALPEIDRLEMNHLLADLEQVQGRRQELEQVIAQRCGVSAEAVLLSSMPGVGYFTAVALACRVGRVERFPRAASLSNYWGLTPGCRNSGETNQRLGGITKAGSSMARWLLAEVTIKVLRRDARLREWFKRLKRRRGASIARVAVMRKLATVIWHMLSKRLTYAACRDAGEAGTKARQEQGAEGSRPGGAVGRV

SEQ ID NO: 412988 - protein, 379 aa, unidentified
MYRILKIGMDVHTTNFTLCALESKFGEEDRVLANITVGPDHKNVLDFIRRIKEKMDPKGQDEINVECGYEAGCLGYSLHNQLTACRIKCTILAPTTMHSEKGPRIKTDRRDAKLIAQCLSNGGYHAVHIPTAEDNAIKEYIRMRDDHKIALKKVKQQTNALCLRFGLFYDGSKWTGAHLKWLRALELPELIRETLNEYLATYDELTAKIARFDQRIQELANQEQYREKVKKLECFLGIRTYNALALIVETGDFIRFRKGNVYAAYLGLAPGEHTSAESGGRLGITKAGNSHLRCLLIEAAGGICKGQIGKKSKDLIARQTGNPADVITYADKANTRLRSKYYRLTRHGKKRNVAVAAVARELACFVWGMMTDNIHGNVA

SEQ ID NO: 412989 - protein, 338 aa, unidentified
MQAIGIDTHKATLAACAIDELGRPAAEQTFPNDPVGHAALHAWARTVAPGGRIGLEGSASYGAAAARFLLDAGEDVVEVPPQLSHRERLRTRRAGKSDPGDALAIARVTLREPELPPVRTADRTREIGLLVEAREDVVTEATRVRNRLHADLVVLVPGYATRADNLVAACHRRTAGRLLRGKPGVQAELARDRLARLGRLMAEAKVLEARIEALVGDHPLRTLPGAGVVTTGRLIGEAGDLRRFRSADAFAMLAGTAPIPASSGQVQRMRLNRGGNRQLNRALYTIAFTQVRCYPPAQAYMARKKAEGKTWREALRALKRHLARVVFRLLQDGAATMA

SEQ ID NO: 412990 - protein, 340 aa, unidentified
MRKYIRIGVDIAKNCFQVHALESEDCSATKRRLSRSGIVKFLAEVEPCAIGMEACGSAHYWARRFRAMGHEVKFTPPIYVKPYVKRGKNDAADAAAICEAMSRPNMRFVAVKSEDQQATLMAHKTRELLIKQRTMSVNALRGHLAEFGVIAAKGISHVEELVERAAGADLPAMVQATLGVLLAQLRGLDAAIDELERAIVADHRRDPVSRLAASVPGVGALAASAILASAPDPQAFKSGRDFAAWLGATPKQNSTGGKEKFGSITKQGNRYIRRLLVLGAISVLRAAPKRKGALCDWLAALRARKPAKVVAVALANKLARIVWAIITTGEVFRTSIYAKA

SEQ ID NO: 412991 - protein, 338 aa, unidentified
MNIVFLGIDLAKNVFQLCGLNQAGKPVYTKRTGRKELLQTLANIPACLIGIEASTGAFYWQREFEKLRHKVKVISPQYVKPFVRGQKNDGNDAQAIAVALMQPTMQFVPPKSLEQQDIQALHRARQRIVNRRTATVCQIRGLLLDRGSPIGSAVSRARRAIPLILEDAENGLSSRMRRTIAELYELFNDLGRRIHFFDKEIETVFRQSEACQRIARVKGIGPKTATAIVAAIGKGTEFKNGRHFAAWLGLVPRQHSSGDRQALMNMMKKGDKHLRTLFIHGARAVVRVATNNNDGHMNQWVNQLKERRGFNKTTVAVANKNARIIWSMLRNETEYQVV

SEQ ID NO: 412992 - protein, 418 aa, unidentified
MKVVYPICCGVDVHKTFLVATLITSQGITPHYSKKRFSTFNNSILAFKQWLIENNCFDVCMESTGKYWVPIYNLLEDTIRITVANPKWVRAVKGSKDDTKDSKWIGDLFRLGLVPGSFIPSKPVRILREYTRYRSKLVSCRSSEKNRFQNAFTVCNVALDAVVSDMFGKSASHITDYLISSDSFDPEYCSSLLQKSLKKKADTVVESIEGYQMTREQKERIIIVRSHLEFVNQAIAQLDEKLDKMVAPYESAIILLRTIPGVDRASAITIISEIGTDMSQFATSKRLCCWAGLMPGNNESAGKKKSVRITRAGVYLKPALVQVAHAAVKSNLSPYYRVKYEHISKRRGKKRAIIAIARMILTAIYHMFTTGELFNPSDYYKIDMPQEMQFKQKENAIKQATKLLISYGLIKSTDISAA

SEQ ID NO: 412993 - protein, 351 aa, unidentified
MMIIGVDYHPSFQQIAFLIEETGEYDEQRLNHEGGEAERFYRDLKRKGIRVRVGMEATGYSRWFERLLAELDFELWIGDPAEIQAKRVKKRKTDREDARLLLRLMREDRFPQIWVPSPENRDLRQLLWHRHRLVQMRTRIMNQLQALAMNEGKRWKSKLFSQKGRAEFEKLALGPWASRRRSELLELLDRLNPSIEELTTAVQQEVNKRPEALRLMTHPGVGPITALAYVLIIGTPERFTRGKQIGTYVGMIPIEESSGGKQRLGHISKQGSSLLRYLLVEAAQAAARYNPHWRRRYIRLAIRRHRSIAKVAMGRRMAIRLYWMWRNGCEYSPSFEFGSYAGQLEKRHGGK

SEQ ID NO: 412994 - protein, 341 aa, unidentified
MNGSKNVVGIDIAKRVFQLHSIDMETGEIVSLQLKREQFLEHFANRQACLIGMEACGGAQHWARKLTAMGHQVKLLPGKAVKGFVTGNKNDRHDARAIWTAVQQPHVKAVAIKTEEQQAILALHRMRSQLVKFRTAQINGLRGLLTEYGEVMPQGKAGVRKGITEALARLSDRRPAMVIDTLRDQWARIGKMDEEIATIEQRIKLWLKNDHACKRIAEIPGVGPLTATAAVAIMGDAKAFKSGREFAAFAGLVPRQTGTGGRIKLLGISKRGDTYLRTLLIHGARSVLTHAKDPGPWITELRQRRPLNVAVVALANKMARTIWAILAHERTYQKAFVSQPA

SEQ ID NO: 412995 - protein, 366 aa, unidentified
MSTLFIGLDVHKATITAAVAEEGRNGEVRSHGTIENTPASVASMIKRLAKPGRDLHFCYEAGCCGYGLYRQITAAGHLCTVVAPSMIPTKPGERVKTDCRDSIKLARLLRAGELTAVWVPDAAHEAMRDLVRARADAKEQVKVAKLQLQSFLLRQGRIYGGLASWSRAHAIWLADQKFEHTAQAIVFQDYINAVKDAEDRHAALVVQISKLIPEWKMKPLVEALCVMKGIDVVAASTILSVTGDLRRFSSPLKLSSYVGLVPSEHSSGDSVKRSGITKTGNRELRRVLVQAAWCYRFPARVTKDKERRYTEAEKKVRDVAWRAQVRLCGRYRRFIAGGKKASVAITAVARELATFIWEMGQVVPMD

SEQ ID NO: 412996 - protein, 395 aa, unidentified
MKHILSFDIAKGKSVYCFIDEKRNVIRDATLIEHKKDEFDELFNFISKYKSLVVIMESTSVYHLPVENYFRSKAIDTIVMNPKLVKQYRDTLNKSKTDKLDCFKIARCYLGTIDNLYQKQDEYFMFNPLARQYWSLVEGQTRLKNRYKQLIEIVFPEFNLLFNDLYSDLALNFIHDFPHPVLFVNRRNDYLMNYLKTKNGTTQAFRFKNKVLKMKELAKNSLCYVSVDSLQVQNLIQVIEMIQYHKQEIEKIKNQLINNLKNTKLFKIINSIPGFGDFSTALFLAEVGDITRFNERKEFISFMGIDSITSQSGIASYHGPISKSGSKFARTILFNVVTTLIQISAHTDKENPIYLFFRKKQSEGKHHYKCIIACENKLCKTIYKMCTSDCTYINK

SEQ ID NO: 412997 - protein, 405 aa, unidentified
MTDIEQHDSVQIFVGVDVGKGAHHAVALDRKGKRLLDSALPNDETKLRALIGKLKEHGPVLLVVDQPATVGALPVAVARDEGVLVAYMPGLAMRRIADLHAGEAKTDARDAYIIAEAARSLPHTLRSLKLADNQLAELTMLCGFDEDLAGQITQVSNRIRGLLTQIHPALERVVGSHLDHPAMLDLLERYPSPAQLAALSQKQLANRLVKLAPRMGKTWAAEILQALSEQTVVVLGTQAASIVLPRLAQQLAALRIQRDEVAKEVERLVLAHPLHPVLTSMPGVGVRTAARLLIDVVSRAFASAGHLAAYAGLAPVTRRSGSSIRGELPSRRGNKQLKRAMFLSAFAALRDPVSRAYYARKISQGKRHNQALIALARRRCDVLFAMLRDGTLYSPPGPQKPLTTT

SEQ ID NO: 412998 - protein, 358 aa, unidentified
MVDKVTKAAVVSGVDTHKDLHVAAVVDQNNKVLGTQYFSTTRQGYRQMLAWMTSFGTLKRIGVECTGTYGSGLLRYFQNAGLEVLEVTAPDRMERRKRGKSDTIDAECAAHAAFSGIRTVTPKTRDGMIESLRVLKTCRKTAISARRVALQIIHSNIISAPDELREQLRNMTRMQLIRTLGSWRPDASEYRNVTNVYRISLKSLARRYLELHDEIADLDVIIAAIVDELAPELIKRNAIGYESASQLLITAGDNPQRLRSESGFAALCGVSPVPVSSGKTNRYRLNRGGDRAANSALHIIAIGRLRTDAKTKEYVARRVAEGHTKMEAIRCLKRYISREVYTLLRNQNRRINSIPITA

SEQ ID NO: 412999 - protein, 407 aa, unidentified
MEVLYPRCAGLDVHAATVVACVRIASGATVTYEHRTVSTNTRGLLDLVDWLTAQGVTHVAMEATGVYWKPVWHVLEGHVTLVLANAMHIRNIPGRKSDKNDATWISDLLALGLIRSSFVPPALIQELRDLTRTRKQLVRERARHTQRLQKTLEDANVKLTEVISDILGTSGRAILTALVAGETDPERLAGLTSGRLKATRAELVEALDGRVTAHHRFMLNLHLTQIAALDTAVAAVEARIREALAPFRAAVSLLKTMPGVSDTAAAVIVAEIGDDMSLFPSAGHLLSWAGLCPRLDESAGKRRSTRTRHGAPWLKTPLVQIAWPAARKRHSYFQAQFLRLKTRRGPKKAIVAVAASMLTDVYYMLRDGVEFHDLGDQHFTQQDKARLTTRLLKRLRDLGVEVEVKAA

SEQ ID NO: 413000 - protein, 426 aa, unidentified
MFAEADDDEQIIQRVAALDIGKAELVCCVRLPAPPGHKRRVQEVTTHTTMVGALTELANRLVELGVERVVMEATSDYWRAPFYLFAAHGLQPWLVNAKDVHHLPGRPKTDRLDAVWLCKVAERQMLRPSFVPEARIRRLRDLTRYRVDLVGARTSEKNRVEKLLEDACIKLSVVASDIFGVSGREMLDAIIAGDRDPKRLAEMARARLRVKIPDLEEAFAGLQLGTFDDHHRFLLTRMLARIDQADRDIAALDAQIEQHLAPFADAAARIDEIPGIGARNAAVILAEIGTDMAQFPTAAHLASWARFTPGIKSSAGKTKGNGSTGHGNRYLARAISEAAIDCRHTKTFLGARYRRLVRRRGKKRAMIAVGRSILTIIWHLLNDPDTTFHDLGADYYDTQASTTAKQRNHIKGLEALGYKVILQPAA

SEQ ID NO: 413001 - protein, 365 aa, unidentified
MPSVTPPAGLIHLGMDTSKNTIVAAVLLPGEQIPAVDRIFNDEAAIRRLIGRFPDRGLLRACYEAGPGGYDLYRLLASMGVACDVVAPSLIPKGGSDKVKTDKRDSFRLARLHRAGELTPIRVPSPAEEAVRDLARVRAAVLADRKRAQQRLTAMLMRHGRVWRNTYWTGPHRAWVAAQSFPEPALATALAHYRAALDTRESELACIEAELAPWARREPLAAAAGRLCCYRGIAELNGLTLAAEVVDWRRFASARAFMGFTGLVPAEYSSGQRTWRGHITKAGSGPVRTALIEAAWAYRFSPAVGVTLRRRQQGAAPDTIARSQKAQRRLHGKYRRMVTGGKAAPEAVTAVARELAGFVWAEMTS

SEQ ID NO: 413002 - protein, 429 aa, unidentified
MSNLFISVGIDVGADFSYMSIALPNQTFVGKPFKIVHNNLNSLEKAALTIREAEELHSMKSRIVMESTGNYHYPLFCYLHDKGFCVVVINPIISKNSTNLNIRKVENDKFASKKLALIGLKPDLKTSVITPNGVLDLRNLVREYYNLMDCRCAYVNKLRGVLKVSFPGYIGIFSKVTVKTSLALLEKYPSATEFLSAKKSSVVKIIRKTGKFGKTYAETKYQAIVEAVKAAGVFGHFVPSNSTQIRLYVSFIKKYDEEIAGVLALMRKFADDHADELFVRQIKLIETIPGAGFLSAVTVVCEIGDFSVFTSPKQLVAYFGIDPSVKQSGNFTGTNVKMSKRGSAVARRAIFTIAVVSIGVSRKGIANNQVLREYYLNKCKSKVKMVAIGAVMHKVCNIIFAVLRDSKDFSVISNEEHIKMYQNKLLFGT

SEQ ID NO: 413003 - protein, 338 aa, unidentified
MALYAACDLHSNNTVLAVVDDAGTLCYRQRLPNDLSLLDAALMPFREDLAGVAVESTYNAYWLIDGLQAQGYPMRMVNTLAVPQYAGLKHGDDDSDARHLAELMRLGVLPTAYIYPRGQRPLRDLLRRRMLLVQQSVGLLQSVQGYWARATGQRLSANGFRHLTRQQLTDTFPESTELFAVVSLIQTWRSLQEKVSAMEAWLAEDLRKRPDLIALRTMPGIGIVLGLTIVLESGGMTRFDAVGQYTSYCRLVPALRFSNGKKKGTGNRKCGNRYLAWAWMEAANFAIRFEPAIQRWYQRTAARKPRLVALKAVAHKLARAGYYLLRDGGTFDVHRAFA

SEQ ID NO: 413004 - protein, 343 aa, unidentified
MKIYALGIDLGKTVFHLVGLDASGQVVVRKRCSRTQLLAFTGNLQVQVIGMEACSGAHFLGRALREQGHDVRLMPAQYVKPYVKTNKSDYIDAEAIAEAVQRPRMRFVPIKTEEQLDLQALHRVRERWVMRRTAVVNQIRSLLLERGLTLPKGRRHLDEALPGILEDAELRLSGAFRVLLAQLKLELEQLAARGEQMDVVIQQEARENEACQRLTTIPGVGPVTATALIAAIGNGSAFRKGRDLSAWVGIVPRECSTGGKQKLLGISKRGNAYLRRLFVQGARSVMQQRHKQAPGLSDWLTQLLGRTHQNVVVVALANKLVRMAWAVLCKNERYRAPVLAMAT

SEQ ID NO: 413005 - protein, 420 aa, unidentified
MEEITEDTEIVARVAALDIGKASLVACVRVPDEARPGARRQEVRTFAATTRALLELRDWLVCQGVTLCVMEATSTYWKPPFYLLEDAAGCRVVNARDVKNVPGRPKTGRLDAVWLCKLAERGMLRPSFIPPPWQRQLRDLCRYRRTLIQERTREKQRAEKLPEDTQIKLSSVISDIFGKSGRDMLEALIAGQRNPAVLAGLARGSMRGRKSVSQEALTGQFRGHHGWLLRMMPDRIDALTAQAGQLTAKTGEVTAPAAHQVAQLDEIPGVGRTGAQELIAETGTGMSRFPAAGHLVSWARFAPRAKQSAGKSKPGTTGKGSPWIAGTLGEAVIGAARTKTFLGSRYRRLARRRGKQRALVAVGASLLVITYHLLSDPGARFTDLGPDWHDRIAPLRRKRQLITELERLSGKKVQLQEAAA

SEQ ID NO: 413006 - protein, 318 aa, unidentified
MNVIGLDVSKDTIDATLITTKGSKDYIKISNNTDGFENLINWIKTKRIRKIAISMEATGIYYEQAAEYLSALYTIFVINPLKIKEYAKSQFSHTKTDKADSKLIAEFANRHLDKLTPFRPSENPILYKLVNLLQQLKEQQKETQNRLHTAKDIYIKSTHEAIIELLEEKIDQTSKRIEGMIKQKESLNIEYQNLQTIPAIGKETAVILLRHLTDKSFETANKFVAFAGLSPKIEQSGTSVNKKGRLSRYGHRQLKRALFMPALVAYRMNAFPQLVRNLEAAKKPKMIIIVALMRKLAKIAFYIHKTKKPFDKARHQTV

SEQ ID NO: 413007 - protein, 451 aa, unidentified
MEDEVIKMEVVNPGAAGIDVGSRSHWVAVGQREEDVREYGVFNDDLFSLCEWLKECRVRTIAMESTGTYWQNLYAVLISRGFDVILCNGKFTKNIKGKKTDIKDCQWIQRLHSLGLLSGSFLPDGKTEELRTYCRHRQNLLHESASTSKKMQKYLRLLNLRLDVVVKDTCGLTGLRIIRAICNGEKNPEKLAELRHHNCHTSQGDIARALQSNGREDYLFALQHELDMYEYLHKKIEECDIRIDAKLNSIINDDENKKQHHIEPKPYKKVNKNTPKNIDLNLKSYQMFEGTDLLAIEGMSYSTVLALMSEIGVEGIRKFPTAKHFASWLRLAPNNKVSGGKVLSSKVPKGSSKLKISLRNAANAIGNLKDSTPLRDFFMRINFRKGRVSAISATARKLAVIIWNMVVTGNPYQNPEGYLYLDQKRKLGMVKRIRSQIEKYQLKPDEIGFCK

SEQ ID NO: 413008 - protein, 355 aa, unidentified
MKRTPKHVGLDVHQATTVVSVRDGHRRVIHRDVIPTTAAAVVSFVQGLRGPIYVALEEGTQAQWLHDLLRPHVDDVIVCDRRGESRRGNKADQLDADGLSARLCDGTLRAVYHSRTAPARQLKELAQTYLQVVDDTRRVMQRLKALFRARAIATPGRRVYRPDERAQWLAKLTESAARFRATVLYAELDVLRTLHRQAQSALVSAAQTEAAWSVLRTIPFFGPIRVALLLATLQTPWRFRTKRHLWAYAGLAVVTRTTAEYQLEGGRAVRRRRLVMTRGLNRNHNPIVKDVLKGAATAATTRPGALRELYERMLMQGTRPELARVTLARKLAAMTLHLWKTGETYEPTKLTLQAR

SEQ ID NO: 413009 - protein, 355 aa, unidentified
MEMGENAVEVVIGIDAHKRTHTMVVCDAMGRQLAVKTVPATGDGHLLALDWAARWPRRRWAVEDCRHLTRRLEADLLRAGETLARVPIKLMAEMRRTGREPGKSDPIDALAVARAAWRVPSLPTARLDGPQRELRLLVDHRDDLVRERTRMQSRIRWHLHELDPELIVRPRGLRSQRTVDRVLADLDGRDGLLVDLARELLLRVRELNQRALELERRITRIVYQLAPSLMEIPGCGPLSAAKIVGETAGAARFRSRSAYARWNGSAPQPVWTGNTTRFRLTRSGNRQVNAALHRIAVTQARTPGLGQDYLKRRMASGKTKTEALRLLRRRLSDVVFRTLLADEAPTPNRRNPQST

SEQ ID NO: 413010 - protein, 352 aa, unidentified
MMIIGCDFHPRFQQISFLLEETGECGQRRLMHTAEAEQYYRSLLGTRVRIGIEATGSYGWFRRLLTELGHELVVGDATQIRASNPRRQKTDKRDAEHILGLLVADRFPAIWQPPAENEQLRQLLLHRSRLVRLRTRVTNQLDGMAKNEGWVIPGGWSGKRRKAIEALPLPGWYGERRKDLLGLLDRVEERIAPLDKAVSQAAANNAEACLLMTHPGVGPVVSLAYVLTIGNWQRFPRGKQVGSYLGLIPSEESSGDKRRLGHISKQGNTLLRWLLVEAASTAQRYDASWHRQYVRLSMTKHHGVAKVAIAHKLAVRLYWMLRSGEDYSQVRERGSHARQSECPVGRTTRPIE

SEQ ID NO: 413011 - protein, 344 aa, unidentified
MNVTTVGLDLAKNVFQVHGIDSTGKVIVAKTLRRRQMMPFFSKLEPCLIGIEACGTSHFWAREIAALGHQVKLMPPIYVKPYVKRGKTDAADAEAICEAVTRPTMRFVAIKSAEQQSVLALHRTRDLLVGQRTQLVNMIRSQLAELGIVLAKGIHHALRLVDQLVDGVVPDIPPLACKIVIALAEQIRALQVRVAMIEGEIKTWFHGSDLAKRLATIPGIGTITASALAASVTDPHRFTSARQFAASLGLTPKADSSAGKDRKGRISKMGDRYLRRLLVIGMTSQLQSARRKPEAHPWITKLLVSKPNKLVAVAMANKAARIAWVIMTRGEVYRAHRPVTEAAA

SEQ ID NO: 413012 - protein, 341 aa, unidentified
MFKNKSMKVFYLGVDVSKKKLDLCLRSNGKDILYDVIPNDLSSIKSWLTRTFEKFFLSEDSLVVCAEHTGQYTYPLVCATKSIGVYLCLEDAAKIKYCHGIPRGKNDKIDACRIAMYAERYNDCLQPYTASELIIQKLKNLSTERSMLVADRAKYQSQLKDQVDYMEHSIYIAKCNRVEGIINTFTDYIAQIDLEIKELINQAPVIAHQMDLLMSVDGVGERVALKMIMETDAFTSFTDPRKFCCHAGVVPFVYVSGSSQRSKNRVSNRADKSIKHLLHMAALSVSQVKNSPLKKYYDRKVEEGKNKMSVLNAVRAKLVTIMFAVIRTDAFFSRNYQNSLA

SEQ ID NO: 413013 - protein, 424 aa, unidentified
MKVTYQTCCGVYVHKSFLVATIVKTTSGVEPSHQKKRFSTFNNSILEFKQWLLDNDCHDVCMESTGKYWVPVFNLLEDEINVVIANPKWVKAVKGNKDDTKDSKWIGDLFRIGLVKGSYIPYKAIRILREYTRYRYKLVSCRSSEKNRYQNALTVCNVALDSVVSDIFGKSSTSIIDYLLEQSGTSINHEEIASKLLRSLKSKEDAVIESVEGYQMTDAQKYRMRLVRAHMDYITAEIKDVDKMIENMISSNPDFENAVQFLCTIPGVKRDSAVTIISEIGTDMSQFSSSKRLCCWAGLTPGSNESAGKKKSVRITRAGVYLKPALVQCAHAAVKSDKSPYYKKKYESLVKRRGKKRAIIAIASMILTAIYQMQSTGEQWNPSDLYKIDMPEALVEKQKAKAIKQAKKLLQREGILPPDEPLTS

SEQ ID NO: 413014 - protein, 348 aa, unidentified
MQGQGTRGLAYHEGGRGLKKWNRVGVDVSAKELVVAIEASGRQEAPIVLSNDADGHRKLTKLATKRGASAQVVLESTGTYGLDLALALHRAKRIEVMVANPRAIASFAKASLQRSKTDRLDAETILEFAIRMPFEPWSPPAPHVLELRALSRRIEAMSKTVVQEKNRLHANDQSEELSEFVKQDIRELADLLESRIERLRNQARLVIEQSEELAQAFAHITSIKGIADASGITILAELAVLPADMTTRQWVAHAGLDPRQFQSGTSVHKPVRISKTGNAHIRRALFMPALVAVQWEPHVKAFYEHLLDRGKTKMQANVAVMRKLLHAIHGMLDHDQDFVGEKFFAIKA

SEQ ID NO: 413015 - protein, 374 aa, unidentified
MADHSVAYVALDTSKLRNAVAIAVAGRDGEIRYLGEIDNAPAATAKLARRLAKQHATLTFAYEAGPTGYGLYRQLKSLGHDCIVVAPSLIPQKPGDRVKTNRRDALSLARQLRAGDLTAVWVPDPHHEAVRDLTRARGAAVREQRAKRQQVAALLLRLGLHYPGKTTWGRAHMAWLAGQKLAHLEQRIALEEMLHAVRQAGDRIARLEQAIRTAVPDWSLAPSVTALMALRGVEFIAATTLLAEIGDLTRFRTPRELMAWLGMVPSEHSTGERIRRGPITKSGNRRARSILVECAWSYRHPPRVGRDKLARLEAAPPAVRDIAWKAQSRLTARYRALRRAGKLDVVAITAVARELAAFIWAVGVAVGSGRTPEV

SEQ ID NO: 413016 - protein, 344 aa, unidentified
MVTSYIGADVDCKMTELAVERNGKIVIRDRVPTDIRSLREFLATISGQKVMVIEEGPMSGWLYRNLRADVDRFVVCDPRRNQAIYGDGDKADPIDAGDLASLCRGGHMREVYHTTDEDRLALKETVALYHDRVRDAVRQINKLRASCREHGIRIPSKVLRDPKERGEWLETLGSPALARRLSIMWIGFDAISRQVDLAKRELARRAKAFSMIGAWQDLPGIGLIRAATLYAYLDTPWRFGTPKKLSKYCGIGLKRTASGTDKNGRPKAGYVRLFRNVNRKLKAAIQGAALSAIGQRTNPFADAYERMVRDGMTLSNARHAVARKLLTVMWGMWKNNSRYEPRLV

SEQ ID NO: 413017 - protein, 325 aa, unidentified
MNDTTSATSAPSTPLHVGIDVCKARLDVALSGRTPVSSFDNDDAGHVALVAMLKPLSPTMIVFEATGGYERDAVIALLAAGLSVAVVNPNQVRKFAQGIGANAKTDPLDAHVLVRFGQVVTLAPTPLTDEMTLVFQENLARRRQLNQILTAEKNRLHMARAGAVRKSIQNVIELIQAQIKQIDDDLTGMIQHCPAWRDKEELLKQVPGVGDQTARTLLAALPELGTCSRQKIAALVGVAPINRDSGNKTGARSIARGRPVVRTALYMAALVATRWNPVIKKHYEKLLKLGKRKKVALVACLRKLLTILNAMLREKTPWKPINQNT

SEQ ID NO: 413018 - protein, 349 aa, unidentified
MATACSVTLGVDTHKDLHVAVTLDQVGRRLGVATFGTDDAHHARLWAWASDFGPIVQAGVEGTGSFGYRLAQFLTGSGVQVFEVNRPNRVTRRRRGKSDPVDAEAAARAVLAGDATATPKDRSGPAGQLRALLVARRSAVKARTQAEQQLRSLILELDDDQRARVDRRRVVELTTACAALAGTDGTSLALRALARRWRHLDQEVRDNDQDVTIIVRRVVPGLLARPGIGPVCAAQLLVTAGDNPDRLRSQGAFAALCGASPVEHSSGKTQRHRLNRGGDRAANSALWVIANNRLMHDPQTRAYAARRTATGASRKEILRLLKRYVARQVFAEIRHALSPPAALPDSPLT

SEQ ID NO: 413019 - protein, 346 aa, unidentified
MKVKTLGIDLAKETFGLHGVDALGRVAVHRRVTRKQLLGFLVKLEPCLVGMEACGSAHYWAREIEKLGHTVKLMSPQFVIPYRKGNKNDPNDAEAICEAVSRPSMRFVPIKNEEQQDLQALHRVREQLVKNRTALANQIRGLLRERGVVVAQAIARLRVALPVILEDQSNRLSGLLRELLGEMAERLRMLDDRLRQYDQRIARICQQDERCRRLVKVEGVGPLVATAVVAAIGNARQFTNGRELSAWLGLVPREHSSGQRTMLLGISKRGNRYLRTLLIHGARAAARVAERKRDARSIWLSRLKLRGGPNVAVVALANKNARVMWALLARGDCYRVRPALDRAAAA

SEQ ID NO: 413020 - protein, 408 aa, unidentified
MEILYPRCAGLDVHKDLVVARARCVSEPLCDETRSFATTTAALIELQEWLSAQGVTHVAMEATGVYWKPVWHLLEGHFELVLANAQHIKNVPGRKTDVNDAAWIADLLAHGLIRSSFVPPAPIQELRDLTRTRKQLVREISQHTLRIQKTLEDANLKLSSVLSSVLGSSGRAILNALIAGESDPQRLADLAQGHARKKRAALIEALHGRITPHHRRLLKLHLGLIAALEAALAEVDADVGKLLAPIRKSARLLTTMPGVSELTAQVVLAEIGVDMARFPTPAHLLSWATMCPRNDESAGKRRSTRTRKGSPWLKTALVTAAWAAVRAKHTYLQAQFLRLRARRGAKKAILAVAASMLSAMWHMLKDGVEYRDLGADHFSRRNHMQQIQRLIRRLNDLGCDIQLNTQAA

SEQ ID NO: 413021 - protein, 343 aa, unidentified
MQTVTTIGLDIAKSVFQVHGVDAAGQVVIRRKLKRRYVLAFFQKLRPCLVGIEACASSHYWARELQALGHTVRLMPPAYVKPYVKRQKNDMADAEAICEAVTRANMRFVPIKTPEQQSGLVLHRTRHLLIRQQTAVINAIRAHLAEFGIVAPVGRKGVEELLRVVADQNDKRVPDVVRACLGALGTQLLSLKKQILELDRMIMAWYRSNETSRRLHYIPGVGPLLATALVANVADPGAFRSGRNFSAWIGLVPKQHSSGGKDRLGGISKQGDRYLRSLFVAGALSVIRYAKAHGSKHRPWLTALLARRPAKVAAIALANKLARMAWAMMARGERYRNPVALAA

SEQ ID NO: 413022 - protein, 350 aa, unidentified
MIILGVDAHKRTHTFVVVDEGGRKLAERTVSATEEGHVEALAWARRWDDRRFAVADCRPVTRRLEADLLAAGETVVRVPTKLMAGARRSGRTPGKSDPIDALAVARAAIREPDLPIAHLDCATRELRLLVDHREDLVAGRTRLQSRLRWHVHELFPGLEIAPASLGRHRHIAALEARLVDATGTVAEIARELLKRCRELTLRANELERQIGRLVRVLAPTLLGLPGCGGLSAAKIVGEVAGVLRFRSKATFARWNATAPIPVWSGNADRHRLNRGGNRQVNAALHRIAITQQRGVGSGRDYVQRRLRAGNTKTEDLRVLRRTISDEVFRRLSVDEQRRATTTPNAIPLAA

SEQ ID NO: 413023 - protein, 436 aa, unidentified
MGCRAVEHWSIRSQLGSLRLADGTEKGVAMIFVGDDWAEAHHDVCVMDEAGARLAFRRFPEGIEGVAGFHDLVGEHVSDPSQVVVGIETDRGLWVHALVAAGYQVYAVNPKSVSRYRDRHRVSGSKSDRGDAKLLADLVRTDRHNHRPVAGDSPQGEGIKVLARAHQGLIWERKRHTNRLRSALREYYPAALETFESLADRDTLAVLNKAPSPREGAHLTIPQIKATLKRGGRQRNLDRRAADIQMGLRAVHLEAPGPVTEAFAATTRSAVAVISEINLQIAQLEKTLEDSFEQHPDAAIYLSMPGLGDVLGARVLGEFGDDPERFTDVKSRRNYAATSPLTIASGKTKTVTARYVRNNHLYDAAIRWAFCSLTTSPGCRAFYDQRRANQDTHYQALRALSNRLVGILHGCLKHGTHYNENTAWAHRQPTTTNIAA

SEQ ID NO: 413024 - protein, 428 aa, unidentified
MNKKDGSRLEAFRQLRQEIRGSQEYLIVGIDVAKDRHHAFFGTATGRALLRRLVFENNREGFERLVTQTEVLQVVHDLGKVVFGLEPTADYHKPLGEYLIRGGHQVVLVSGKSVKRNRELLDGRWDKHDTKDSANVADLISQGKCLYYEYPDERLRDLRGLLSLKRRLKKQEHGLRVRIRNHLLAQYFPELDRYFGRSGPEGLAIVRWCLCPSRIRELGYDEFIRMVAPGRRYLSQEQRLRAIWEKASLSVGCKGGEGVDFEARVMVEELRRIREVIKQSEGEIETICLKFAEYPYLLSIPGFGPDVSSKVLGAIGDPFRFNKAPQVLKTAGLDLSANRSGRRSEGVVPVISKNGKADLRYALYQAALVASTRDWDFMRWFAHKLQGRQREKGIRTKMRVKLAAKMLVIAWTLMKKRESFNPSHLGVV

SEQ ID NO: 413025 - protein, 365 aa, unidentified
MKATTLVVGMDVHKESISVSVLEAGRKEARPTVKLRNDVTELKRLFGRLKKEGDVKACYEAGSCGYEVQRLLAGMKVECDVIAPSLIPVRAGDRVKTDRRDAEKLARLYRAGELTSIRIPTEAEEALRDLVRCREDVREDVLRERDRLLKFLLRHGRTFTAGQKNWSMAHWKWLRQLSFENAMAQTVFTDYLARLEGTLGRLKALDQEIVAAAELEPYKAPVARLRCLRGIDTLSAVILVAEICDFDRFARPDQFMAFVGLVPSERSSGGKERRGGITKTGNGHARRVLVEAAWHYRRPPRQSGTIVKRWEGQDAKVVAHAWKAQERLHRRFHRLTSRGKASQIAAVAVARELCGFIWSIARGAS

SEQ ID NO: 413026 - protein, 439 aa, unidentified
MGEGLGSVERAEPALQSGLDVAAYPKLLLNVSTQGRLDLLPTSPAQVAEGGSMEIILGCCAGLDVHKETVQACVRKMGAGGKLEQEVRPWGTMTSDLRGMAEWLATAGVTHVAMESTGVYWKPIFNILEERFEILLVNARQFRNVPGRKTDIKDCQWIAQLLQHGLLKGSFIPPRPQRELRDLTRQRAQIMDERSRISSRIQKVLEDANVKLSSVASNVVGVSGRLMLEAIIEGQDDPAKLANLAQRSLRSKIPQLEQALYGRLTEHHRWMLHLLMDQLSTNEALLARLDERIAQCTRPLEPVLERLDEIPGIDVRVAQVLLAEIGPEMKPFPSDAHLASWAGVCPGCNESGGKKRSGKTTKGSRWLRQAWCKPPGRQRTRKTAISRPTRATSCIAVAENADWWRSLIRCLSSSITCSNKELDTAIWVYHSWIASEPLT

SEQ ID NO: 413027 - protein, 404 aa, unidentified
MIQGLYERSAGLDVHKMVIVATLLRMQANGQLDSQTREFSACQGGLEQLADWLEAAQVELVAMESTGVYWKSVYEALEARGLTVWVVNAYHVKNVPGRKTDVLDSQWLAELARCGLLRASFIPPKDLRELRLWTRYRQKLAGMLSAEKNRLHKILDDGGIRLGGVASDINGVSARRMINALIAGEEPAKIAELAVGRLRRKRSQLEEALHGHLSDRHRWLLRELQSHIEDLETRLSQLDDQVVAAMKPYEAEWRRSQTIPGFDEISASILVVECGVDMAQFGKAARLSSWAGVCPGNHETAGKRKSGRSRPGNRYLRQVLCEAANSARKTHSQFKAMYEALVIRRGHKRAIMAIAHKLLEVYFVTNKKQEPYRDPMVNYEELMVKRNAPRWIKTLQKYGFLSQS

SEQ ID NO: 413028 - protein, 333 aa, unidentified
MPIVGGLDIHRKQITFDYLDTVTGEVKRGQIAPADREHVRAWLARFAGGDEVAFAVEGCAGWRYVAEELAAAGIGAHLGEPADTAALRGRKRHAKTDKTDAAHLRALLAEGRLPECWIPPPPILEYRALLETYHDLRRAHTAWVQRIHAVFFHQGAPPLGEGALRAAHLSAAGQQQVATALDMLAATEAQLGPLRHQLRDAARHLTGAKVLAERLYGVGPVTGLALTCWLGGKDRFSSSRKAVRFTGLDITVHSSDRKGPPGRLSRQGPPVLRWAVYEAGKTHARAAAPDHAYYAAVADRKNTKRAALSEARKIVRQACHILTELGDDALTAA

SEQ ID NO: 413029 - protein, 402 aa, unidentified
MQFFVGIDWATQAHTVCVIDQTGRSRWQGAVPHTSAGLAELRARLRRLRRRGPVRIALERPSGLLVDTLVDAGLEVVPIHPNALKASRPRYSAAGGKSDPGDAFILADVLRTDGHRFRPLRPPSDDTRALRALVRGRDDLVAQRVALANQLRALLERFWPGAAAIFADVDSPIALAFLARYPTPHSAVRLGQKRLAQFLGQHAYCGRRPVAELLARLRTAPASQVGEAEAEASGDVVRALVAVLNPLGAQIQQLTAAIEAALPQHPDGRLLQSLPRSGAINAAQILAELGDDRTRFPTDDQLAAEGGLAPVTHASGKHHAVVFRWACNKRLRRALTTFADNSRHASRWAALVYQRARARGCRHPHAIRILARAWTRILWRCWQDRTPYDVSRHRAAQTLVAA

SEQ ID NO: 413030 - protein, 455 aa, unidentified
MAPRPKGNPAKPPAPQLPVLHPHAAGIDLGARAIYVAVPPGRDPRPVRHFPTFTEDLHALRDWLKDCGVTTVAMESTGVYWIPLFQILEAAGIEVCLVNARHCKNLPGRKTDVQDCQWLQYLHSVGLLRGSFRPADQVCAVRTILRHRDALVRGAGRCVSHLHKALTQMNVQLHHVISDLTGVTGQAILTALLAGERDPQKLAALKDHRIKASRDVIAKSLCGDWRPEHLFTLEQTHALWQQHQTLIAACDTQIETMLQAFDSKVEAGAAPLPPAKTSHKKPQRNEPQFAAREQCHRVLGVDLTAVPGFQTPTVLVLLCELGPDFAAKFATAKHFGSWLGLCPDNRITGGKIYSVRTRDVKSRVAEALRLAAQSLWQAKNYFGDLFRRWKARLGSPKAITAMAHKLARILWHLLKFKVPFNPEVFAQAEQKMKRQKLARLQNLAASLNYSLVPNQ

SEQ ID NO: 413031 - protein, 343 aa, unidentified
MNEVTTIGLDLAKNVFQVHGVDASGRAVVRRQLRRNQVLPFFEKHPSCLVGIEACATSHHWAREIAKFGHRVRLMPARYVKPYVKRNKNDAADAEAICEAVTRPTMRFVEVKTEEQQSVLMLHRTRQLFVRQRTTLINAIRAHLAEFGIIAGIGRNGVERLLLLIDGGMDKRLPTAAEECLRALQTQLVLVKRQILEADRRILAWHRSNELSRRLEAIPGVGPLIATALVASIPDPHAFGSARDVSAWIGLVPKQNSTGGKERLGSISKAGNRYLRSLLVVGALSVIRRAKQVGYTRRAWLAELMARRPAKVAAIALANKIARIAWALMVRGTHYREPVPRAA

SEQ ID NO: 413032 - protein, 411 aa, unidentified
MQVIYERCCGLDVHKRMITACLLKWLGGDWQKEIRQFGTMTKDLLALSDWLVREGCTHVAMESTGVYWKPVYNILEGQFELLVVNAQHLKAVPGRKTDVRDAEWIAELLAHGLLRGSFVPPPSVRELRELTRYRTSLVRDRARTINRLQKVLEAANIKLASVVSDIDGVSARLMLEALVAGQRDTEQLASLAKGRLKEKRAQLVEALSGRLQPHQSFLIAEHLAQIDYLEEAIKRLSHEIEERLRPFEQEIGWLDTIPGVNRRTAEVLWAETGGDMSRFASARHLASWAGMCPGNNESAGKRRTGRTRKGSPWLRHCLVEAAHGAAHTKNKYLSSQYHRLAARRGKKKAQVAVGHSILVIAYHLLTRKQAYADLGANYFDERDRQAVTKRCLNRLQRLGYKVSLEKLSMAA

SEQ ID NO: 413033 - protein, 416 aa, unidentified
MVVLIPDDRDKKPIRKYLTFTQDLNDCAKWLVECGIKTVAMESTGVYWIPVYDILESYGLEVYLVNARHVKNVPGRKTDVVDCQWLQYLHSVGLLRSSFRPDGEIVAIRSLYRHRENLIRQNGSSIQHIQKSLTQMNVFIHNVISDIVGITGLAIIEAIVKGQTNPQELLKFKNYRIKASDEDIVKSLTGNYKEEHIFTLKQALKTFHYFKDLIDDTDKEIEKLLLKFNSQTTNTLPPHKPSTAKNNNEPKFDLANHLYRILGTDLTAINGVSSHTANTIFTEIGFNLDKFKTVNHFTSWLGLSPNNKISGGKILSVKTLNSSNPIAKALRISAMTLSNSKSYLGNYYRKMRARLGAPKAITAAAHKLARIIYSMLLNKTPYDESVFAVQELKRQEKKKKAIINQAQALGLQVLET

SEQ ID NO: 413034 - protein, 454 aa, unidentified
MDEVDDVELLVERVAALDLGKAVLEACVRVPHPQRPGRRMQELRGYGTTTAQLLAMVAWLRHWQVQRVVMESTSTYWKGVYYLLEAEGFDCWLVNAREVKNVPGRAKTDRADAVWLAKVAERGMCRPSLVQPPEIRRLRDLTRYRRALVQDRTREQQRVEKLLEDAQIKISSVLSELHGVSGRSMMHALIAGERDPRTLAGLAKSGARKKTDQLEEALRGFFTDHHATILKMMLDNSDRIGDQIAALDALIEDAISPFSREATRLADIVGVNTVAAAELIAETGVDMTRFPSAAHLVSWAKFCPQTHQSAGKSMSKGRGKGNPWLAGTLGRIAFANSRADTFLGTRYRRLARRRGKQSCAGIQESELVDSSTASIATTAKLGTHRRLPPALRPGRHILRPRARILRIPDQQAPPRPRPRHPTPDTYRSAHRHPRRQGRHHRHRRLTQTHSSKTT

SEQ ID NO: 413035 - protein, 348 aa, unidentified
MSQSKQYVGLDVSLKETSICVIDDVGKIVWRGRTESTPETIGSAVKQHAPYAVRIGLESGQLSSWLFHGLKVAGLPVICIDARHAKAALSLKVNKTDANDAFGLAQIMRVGWYREVTVKGLDCQAVRALLVARAQIVSQITTTKNCVRGILKTFGRVLPKGLRSQFSGRVRAAIDGDPILGAIIEPTLRVLEAMRAQLLVYNKAVIQRARNDDTARQLMSAPGVGTVVALAYMTGVEDPARFKRSSSVAAYFGMTPRRYQSGEVDHAGRISKCGDGMVRGLLFESAKVLLSRSARPSALKTWGEALGKRIGPKKATMAVARKLAVILHRMWTTGTTFQWNAEAASPAA

SEQ ID NO: 413036 - protein, 351 aa, unidentified
MAVAEDGLRGEVRDYGRIANTPAALRRLADKLGREGVALRFCYEAGPCGYGIQRQLSGDGHECIVVAPSLIPKRAGDRVKTDRRDATSLARLHRAGELTPVWVPDPGHEAMRDLVRARLDAVHALRRARQQLSGFLLRQGCHYGRPAWTKLHRRWLAGLKFEQAVHHIVLEDYIAAVEAAEARRDRLTAQIAAMLPDWTLAPVVAALQTMRGMALVNAATLIAELGDLSRFANPRQLMAYLGLVPSEHSSGASVKRGGLTKAGNSAARRLLIEAAWCYRFPARVSRELRLRQEEQPRPIREIAWNAQLRLCARYRKLARSGKPANVVTAAIARELAGFVWAIARRVPPTVS

SEQ ID NO: 413037 - protein, 422 aa, unidentified
MSYRIAGIDVHKRMLTIVVSDVEVVGEFAFERRQFGSGPAQLRELAGWLVAQRVEEVVMESTAQYWKPVWASLERDWKPLAQQWAGAGRMAGTLHLAQAQSNRARPGRKRDFTDAERLVKRFVAHELTLSFVPDPAQRLWRTLTRTKYQLTRTRVQLQNRLEALLEEAHIKLSSLVSDLLGVSARRMLHALAEGATDPGALAALANVRLRATQEQLRDALGACQDLNPVYRRLVRMALEDLLLLERQIGQVDQELADLLGPYHDQVQRLAEVPGLGVDSAQQIMAEVGATAATFPSPGHLASWVGACPGDDESAGVSHSHRSPKGNRQMRRVLNQSANAAVKCTGSIFQALYRRYVPRLGHNQTISIIAHRLCRLIWKILHQGVRYEERGPAMNERSKQRRAKRMIRELRSLGYHVEFAPVQ

SEQ ID NO: 413038 - protein, 319 aa, unidentified
MAKITQAMLCGVDVSLQSLDIAQSAGEVLHISNTIKAIDGWLSSLPEGSLIALEATSTYHEAVLERAMECGHQVYVVNGKQLHHYREAVNQRAKTDSSDAALLLRYLTNERSHLEPVTALNAQQKRLWRLLKRRAALVRFRTQAHVSLGSLEETRSMAKQFVRSINAMIRELEKALRVMARELGWERQLQQCQSIPGIGWLNALGLVACFHRGQFGVADKFVAFLGLDVRVRDSGKCVGKRKLTKRGDSEMRRLLYNAAMSFARDPRYKPLYERLLERGRSSTAAYVILARKLVRIAFCLLQRGEFFDSEKFIGACATT

SEQ ID NO: 413039 - protein, 429 aa, unidentified
MNYTQNEKIEQVTDSTMVVGIDIGSQIHYARAFDNRGRELTKRIFSFHNDLEGFNSFNLWAETLKTENKKTAVLIGCEPTGHYWFAFAKYVNDHQKRLVMVNPFSVKKIKELDDNSPKKTDSKDPKIIAKLVVDGRYSIPYMPEGIYAEIRDLVYSRDRIMKQHNISANRIQRWLAIYFPEYLGLYTRFDAISGLAVLEKAPLPKDVIALGVNGIRKIWHDKKMRGRGVTEDRAKTLVEAAHNSVGLDGGIGTKSELYMLLEEHRLWTSQLEAVNKVLEEMILKVPHMEKLLAIKGVGSITIAGFIAEVGDIRRFDSPKQIQKYAGLELVENSSGKHKGRTRISKRGRRKLRKILYQVMVPLLARNKEFRGIYDYYVTRVKNPLKRRQAMVAVSCKLIRVFYAVLTKGVEYDRFKMMSDIHRKSDIIAA

SEQ ID NO: 413040 - protein, 407 aa, unidentified
MEVLYSRCAGLDVHAGSVTACARLATGAEVTYEHRTVPTTTRGLLELDEWLTAHGCTHVAMEATGVYWKPVWHVLEQHFTLVLANAMHIRNVPGRKSDMNDATWIADLLAHGLIRSSFVPPAPVQELRDLTRTRRQLVHEIARHVLRIQKTLEDANLKLTQVMSDVLGTSGRAILEALVAGETDPSRLADLTRGRLKATRADLLDALHGRITDHHRFMIKLHLTQVDTLESAVTTIEARIGDALGPFRAAVSLLTTMPGISETTARVVIAEIGTDMTRFPSVGHLISWAGFCPRLDESAGKRRSTRTRQSAPWLKPTLINAAWAATRKKDSYLRAQFLRIKSRRGAKKAILAVASSMLTAAYFMLRDGVEYHDLGPRHFEQRDKEQLAKRLLQRLRDLGVAVEVKAA

SEQ ID NO: 413041 - protein, 378 aa, unidentified
MDEITRAPIARVGVDLAKQVIQVHAVDASGRRVVARAFKRDQFLAWCTRLPAGCVVAMEACSSAHYWARKLRALGLDARLIAAHFVTPYRMEGKNGKNDATDAAAICEAASRPSMRFVPVKTCEQQGVMSLHRVREGLKEERTACINQIRGVLTEFGLVFGKSPKVLRAVLADVIEDASNELSTMARLVMQRAFEHWRELDEHLRWCDRQVGQHVRANPEAKRAAKVIGIGELGASALTAGVGDFRQFKSGHQFGAWLGMVPRQDSSGGKIRLGRITKRGDDYLRTLLIQGAKAAVMSADKRDDPTSRWLVQLIARVGWQKACVAMANKNARILWAVMTREEGFDPNHVSVKPQAKQSARQSVAASLSGSAACAACAA

SEQ ID NO: 413042 - protein, 340 aa, unidentified
MKNTKYFIGLDVHKKKTTYVVKDRIGNIVLEGETATLYSELYERLEPYLKSSIIGLESCTSYYILYQNFLKNNYNIKVANTIQLRQLIAKNDKLDAKRLAEMLRLGTFPTSYIPDEEIQRLRSLLQVRHSLMEEKTRCNNRIQAFLDRNGIVMPDQEAFGKKWRQKLLQYIGSGEVSLELRYEYDHFVYLENKSEHLGQEISGYTMKHWKKEYKLIQSITGFGPVLSCYIIAHILPISRFSSNRKLRRYAGVVPTFHESGGKKSKGRIPKTSSRKHLRWALIQAANAAGRTNTKLGRYYRKKKKQKNNAGIAHVAVASSMIDIIYKVLTTKKSYNPQKIC

SEQ ID NO: 413043 - protein, 429 aa, unidentified
MEEVEDVELVVERIAALDLGKAGLEACVRVPSPQRPGRRMQELRGYGTTTAQLLEMVAWLWQWRVQRVVMESTSTYWKGVYYLLEAEGFECWLVNAREVKNVPGRAKTDRADAIWLAKVAERGMCRPSLVHPPEIRRLRDLTRYRRALVQDRTREQQRIEKLLEDAQIKISSVLSELHGVTGRAMMEALIAGQRDPRALAQLAKGRARKKTEWLEEALRGFFTEHHAAILRMMLDNTDRISAQVASLDARIEEEIGPFSAQAARLAEIPGVDAVAAAELIAEVGVDMTRFPSDTHLVSWAKFCPQTHQSAGRSRSKGRGRGNPWLAGTLGRIAFANSRADTFLGARYRRLARRRGKQKAIVATGNSVLTVVYYLLSNPEATFCDLGPGYYESRINVHRRARDLATQLQALTGQHIVIRDCKAVITDAAA

SEQ ID NO: 413044 - protein, 333 aa, unidentified
MVEGTLGSHHKEGSKKMSKHSMICAGIDTGKRKLDVAIKGHADELQVDNSPDGYRALSGWLRRRRVKRVGIEASGGYEQAVVAHLRRDKFEVVVFQPAQVRAYAQFHLQRAKNDKIDAALVAECTAAVQQIHAPPDPRLAPFAKHLTLIEQITEDVARLKNRRESCRDQRIGRLWIEEIARLNEILRSERKQLVAAIRQHPDLAARLDLIASVDGVGLPTAVTILVRMPEIGRVTREQVAALAGLAPYDDDSGDRVGARCIDGGRERLRKSVYNATLAACFRWNAQLVAIYERLIAAGKPHKVARIACARKLLIYVNTVVERGTPWVQSPTPA

SEQ ID NO: 413045 - protein, 408 aa, unidentified
MNAVGIDVSKGKSTVAALRPMGEVALLPQEFLHTEVGLEQMAYAIIALGEDTRVVMEATGRYHEPIAAALHEYGIYVCVLNPLYIKQSGGSSIRKVKSDKADAMKIAKYGLDNWVDLREYTPMDTVRQQLKLCSRQYNLYMKTVVSLQNNLISLTDKAFPSVNELFSSPERADGHQKWVDFVMTFWHCDCICHVSEKAFTERYQKWCKRKGYHFSVEKALDIYASSCGHFTTLPKNENTKLLIVTAAKQLLAGKTTLAALRAEMRRLASQLPEYETVCAMYGVGETTAAQLMAEIGDVRRFPRRSSIVGFAGVDPGVDESGKHSAKSVPTTKRGSPHLRKTLYQIVCTYLRKAPPDEPVYQFLDKKRAEGKPYFVYMTAAQNKFLRIYYAHVRECLEAFDAQQSTSQG

SEQ ID NO: 413046 - protein, 531 aa, unidentified
MEAQIMTIRAAQRKSSRPRGLEHLGKPHGVLSPRVRAVGPEHFGVVCVDCAKARSKWMLTDFYGRVLIAPEFLDHRRDAFDHALAQIGQAVAAHQLLDLVVVVERTGRYHLPVKRAFTTAGHDVRVVHPMISRHFRQAAHPDQKTDDTDLEGIFQAACNGYGLLEAPWDPIYSELQLWARHRRDLVDKATLLCCQILEHLESCLPGYARCFDNVFKSGIALVIPDAYSTPQAIIEAGLAGLIELARREKVRVQNATLIRVLAWAQDAPQPDREAALQARFLKTFNRDRMIKEEQIQSTERELVGLLVQTPYVRLMALPGINVVLAAELAGELGPITHYATGRVITGRAGLFPRRYQSDRVDYRRGKLVRQGNRRLRQVLLLAAETLATNNQHFQVLDARWQRQGKDPRDSYVRIAGRLARITLQMVAGSAAFHHPACQGSPVVLEKLIKFHDEHNINITTMRTNLQRAAASLPGPEQAKERVALEAKRREFHGRRGRGPKRLAAILPAVLKRLIGGELVDVIESNESGESS

SEQ ID NO: 413047 - protein, 354 aa, unidentified
MTSVKFIGMDVHTESISIAVRNSIGKIVMECVIETKASTLLQFIDGLRGDLRVTFEEGTWAAWLYDLLKPHVTEVLVCNTRKNTSKGGSKSDRIDARKLSEQLYMNNIKSVYHGEHGLRTLKELVRSYLTISKDLTRVMNRLKALYRSWGIPCAGKEVYAPRHRAEWLAKISEAGVRRRAEHYYQQLDVLRPLRQEVRRDLLAEAKKHKAWKLLRQIPGIGPIRAAIVIAVMQTPHRFRTKRQLWTYSGLALETHDSAQYRVAEGQLQRSRKPATVRGLNKDHNHDLKDIFKGAATRVSSSRGPLRDFYENLLAKGRKPTMARLTLARKIAAITLIVWKKEVRFDANYLKPQAA

SEQ ID NO: 413048 - protein, 341 aa, unidentified
MTLVMGMDQHRAQISAEWIETITGEISRARVAPADRAGVRKFLAQFKGVGLEVALEATTGWRFVVEELERIGADVHLAEVVQTSGLKGRGKRAKSDWADARHLRELLLIGRLPESWIAPAHLLDLRARVRCRHTLLHQRTEWQQRMQAVLYHHGAPHARGLLKLANRERVAALKLPPAAREQLTIALSMIDAIDLQLAPFDLALRAYARKQPGCRTLTDEIYGIGELTSVTILPELGDTRRFQNSRDAVRYAGLDVTVHQSDQRRAAGHLSRQGPPALRWALYEAAQAARRPGSPDRDYYEQLAARIGGNRACIAISRKLLKRSYHLLRALGDQALEPVTT

SEQ ID NO: 413049 - protein, 355 aa, unidentified
MKYYTTITEFNCGIDLHAHQMYVCLMDRDGKKLVHTNIRNNDFDYFLKLVQPYRHSLTVCCECMFGWYWLADACQAAGLTFVLAHALYVKAIHGGKNKNDRIDSEKLAHLLRSNLIPPAYVYPAAMRPLRALLRQRLFFVWQRANLLARIQSHQLAHNRPAIRQTRPNRDPWEQRLLAAEDHPLRQLALQNELAMIRHFDHQISQLEEQLHRLTKEALPREYALLQTVPGIGEHLGMTILYEIGDIERFATVKDFLSYARLVKGTVASAGKIKGLRGAKLGNPYLRWAFGECAVIAKRDHHIIGPLAQRLEAHMGGNKFKANTVLAIKLARAVYFMLKNKTVFDPERLVAALTNN

SEQ ID NO: 413050 - protein, 344 aa, unidentified
MEHYAGLDVSLELTSVCVVDAQGQVVREAKVKSEPEALIGFLRSQAMEIGRVGLEAGPLSQWLHAGLVAAGFDAVLLETRHVKAALSAMTVKTDRRDARGIAQLLRLGWYRPVHAKSASAQEVRSLLTARKLIQAKLLDIESGIRGVLRGFGLKVGTVSRGRFETRILDLVAGHAVLETVIGSMLSARTALQHEFARLHRTMLGLVRADPVCRQLMSVPGVGPIVAITFKSGVDDPARFRRSRDVGPHFGLTPKKYQSGEIDVTGSISKVGDRMVRTALYEAASVMLTRTVRMSPLKSWALGVAKRRGTKKARVALARKLGVILHRMWVDGTSFRWSKEPTAIA

SEQ ID NO: 413051 - protein, 427 aa, unidentified
MNKSQDAKFHAIETTDAIVGIDIAKNTHWAVIISPLGKVITKPFSFNNNKKGFKSLVENVKTSLIPMRFNNVIIGMEPTGHYWKCLARYLKEIEWIKVVTVNPKHVKDSKELDDNCQTKSDRKDCITIARIVKDARYFEPYLPEGIWAELRNMSNTRQEIVRKSISVKCRIIATIDEYFPEYIKVFKKIDSRTSMEILKECPFPEDIKLKGKEGLLMHIKQTVKRGYSRQQVIDIYDVAVDSIGTTEGIKTAKVQLDIYVEEQELLEKQIRRIEEQLEELLQETGYCENMISIKGIGIVSAAQLIGELGDLTRFKSYEQIRRYAGLNLVENSSGIHQGKTSISRRGRSTLRSILYRIAFTMVNQNEEMKQLYKYLKERKNNPLKSKQALIAVIGKVLQIIYTIVINNTKYEATRVFNLERLEQLKVA

SEQ ID NO: 413052 - protein, 388 aa, unidentified
MHVYVGVDIAKELHYAAIMDSDGVVTKPFSFENNDKGFNLLLSHLAPYNKESILIGYESTAHYQENLAYFLKSLGYRTAEINPLQTTALRKANIRNTKTDSVDARLICLALMNHHIQGDQRDSVRLDDLYQLCKMRMDTMKKRTTCKIQFVAIMDRIFPELASFFDNNLHTNTIYRLIDSFPLPSQIKKTRIDILTKLLHKASKGHFKKEKAQKLKNLADISVGIPSDIFAFQAQQLVHQIEFYTDQIQTIEERINTNPDVMSSPLMTIPGIGTFCVACILSAIKNINDFDAPCKILAYAGLDPVIRQSGKFTASHTRMSKRGNSLLRYALVWSAGNVVKNNHTFAEYYRHKTEDQGKSHYQALGHCAKKLVKSIYHMLKYNESFNLD

SEQ ID NO: 413053 - protein, 335 aa, unidentified
MITGSIYVGIDLHKHKFDFVMLDDSGVLLSQGSRRTDVGAIADFAVQLGSRHQVVLEPLQNSLWFLDHIRPYAGSVHVANPGKVRLIAESRLKNDRIDARILADLLRVGYLPEVYIPDDKVRQWRCLVSHRIRLVRDSTRLKNRILGLINREGFCIAASDPFGKQGRGEFDSLGLSPLLRQMVESNLTTLGLYTSQVAALDKEIKEIVESDETARLLCTIDGVGCFTALAIKAAVGDMRRFRSARAFAAYTGLIPGYRQSGDKVRNGSITKQGNSTLRWLLIQAVTHAIRRSDYLKRLYHRICFRSSVGKARVAVAHALARIIYQVWTEARPYYR

SEQ ID NO: 413054 - protein, 423 aa, unidentified
MTKRFSKPTGAVLVAIDMSKHRQEVLIERPEGGRRRRMTVMATKPDYDRLAADLAAIGRPILVGFEATGNYHRTLAYRLLTAGFELRLISSVALARTREALHNGWDKNDPRDAQVILHMLRIGATQAYVDPLAAGINDLQELSKTHETLSKAKTQTWHRILTHYLPLYFPEIARFAGNSRSDWFLALIERFPTPASITALEREAFAVQAWPLVGRKVSKARLINDIYETACTSIALPVPEASAAITMFRMIIAHARGLIRERDRIEEIAQVTLADHHDYQLLRRIPGIGPINALTILAEAGDLRRFGHHRQFLKFCGLDLATCQSGTFRGRTKLSKYGNARLRRTFWMAAQVAARQRDNSFRDKLGRYVAGHVDDADRRRKAMTALTAKMARVAHAVVKTGTEYRPFLERPDARWKDPSLQVP

SEQ ID NO: 413055 - protein, 350 aa, unidentified
MKKIVKQVVGIDVAQKELVVCLGKMYDDWTPELFASKTFANSAKGFELFIQWLSKLTDLSTPLRFVMEATGVYHESLAYYLAARELDVSIITPNKISNYVRTLNVKTVTDKTASEAIALFGLERNLDKWKRSNPLFKKLRQLSRERDQLVQARTIAKNQLHAELAEAEPNSSSVVRIKKQIAFFNKQELEIRSEITELSKQDEKVNGSIKIICSLPGVGLLTAVTVLAETNGFELIRNKKQLTSYAGLDVKEKQSGTSIKGKPRISKHGNKYLRKAMHMPALAAIRFDEKHKAIFARLVSRHGIKMKAVVAVERKLLEMIYTLYKTNREYDKEYFKNKESIIKKEMPVEN

SEQ ID NO: 413056 - protein, 326 aa, unidentified
MSRMQGKTSSTQPATPPVYVGIDVSKSHLDVYIHPAGIARRVTNDKSGLKALTALLQSHAPDVTVVEATGRYHRPCHRHLHAAGFCVAVMNPFRTRKFADMMGQLAKTDEIDARTLALFGAMVKPKTTPPPTQEVAQLAELLTARRQVGTEMTTLKVQGGQCESKLVARQIRARLKLCERHQKALETEIRALIQQHPELQRRFDILTSVPGIAFVTAATLIAELDELGAANAAQISALVGVAPMNCDPGAWRGQRKIRGGRQNVRNALYMAAISAIRANPDLAAFYSRLREKGKPFKVAVTAVMRKLAILANSLLSENRQWKPQRP

SEQ ID NO: 413057 - protein, 348 aa, unidentified
MSQSKQYVGLDVSLKETSICVIDDVDKIVWRGQVDSTPEAIASAVKRHAPHAVRVGLESGQLSSWLFHALKEAGLPVICVDARHAKAALSLKVNKTDANDALGLAQIMRVGWYREVTVKGLDCQAERALLVARAQIVSQITTLKNCVRGILKTFGRVLPKGLRSQFPARVRAAIDGHPILGAIVEPTLQVLEAARAQLLVYDKAVIQRARSDDTARLLMSAPGVGVVVALAYMTGVEDPARFKRSSSVAAYFGMTPRRYQSGEVDHAGRISKCGDGMVRGLLFEAAKVLLSRSTRPSALKTWGEALSKRIGAKKATMAVARKLAVILHRMWTTGTTFQWNAEAASPAT

SEQ ID NO: 413058 - protein, 340 aa, unidentified
MKKVSTIGLDLAKNVFQAHGADASGAVIFRKKLRRAQVLEFFATQPACTVAMEACGGSHFWGREIGNYGHRVRLIPPAYVKPFVKRQKNDAADAEAICEAAQRPTMRFVAVKSEAAQGAAVVFRTRDMLVRQRTQIINALRGHLAEFGLIVAQGPAHVAKLIMAVQDPKQPLPEAARPILCVLVDMLNLLDQRIKLLDIAIARRAKEDEVARRLMSIPGVGPVIATAVAALAPPAETFKRGRDFAAWLGLTPLQHSTGGKQSLGATSKMGERTLRRLLIIGASSVVRWAARKGAPAGSWLASMIARKPAMLVRVALANKMARVIWALMAKGGTYRAPVVA

SEQ ID NO: 413059 - protein, 418 aa, unidentified
MTDKNVSSNTDTGIIMTEPKRMYVGIDSGKNKHQVSFLNPAEVKKDLKIGNDREGFTALTKRLKSYRQRGYQLQVACEPTGHYWNNLGRELKEEGFEVKLINPFHTSRYKEIFDNTPQKDDKKDSSIIAHLLKQGRALHENLLENPYAGLRELTHMREDLLVEKNRLTNKLHQWLDLRFPEYPKLFSKLLGTTCLGLLKEYEGAEGMREASLEELTEKIHSLSRGQLGVKRAQQIKERAEETIGHTVAPQAARIELNYLLSRIILLLDGIKRVEGVIEERLDEMEESPYLLSIPGVGSWGAAVFLGEVGDPTRLPRARSAVKMAGLNLWRTQSGESESGLSITRRGRSLLRKMAYQLAVVSPAYNEEFDDFYQRKLDRGKAKPNALVALGAKILRVMYGVVKNGEEYRPLEERTKGRV

SEQ ID NO: 413060 - protein, 413 aa, unidentified
MQNLLEVCCGLDVHKEVIVACLLKGRLEEDPEPIIREFPTLLSGLDEFKKWIMENGCRNVAMESTGVYWFPIYNVLESILYGEERVNIIVANPHHMKNVPGKKTDVKDAQWIATLLRAGLLAPSYIPPKEIRELRDWTRYRDVLIKEMVGHKNRIEKHLQQCGFKLSTILSDIFGMSGTLLVKRLCEKGALEERDVVECLKGTLRGKVSEVRLAVAGKLSEHDRIFLTNLVKVKENCDREIEDVEQRITEYSEKYEPAMQALETIPAVQRRASAIIISELGVDLSMFQSAGHLCKWAGLCPGDNESAKKKKTMRITKGNPRIKSVMCQCAWAATRCKKFFLRDWFYRLRARRGTKKALIAVARKLLAIVWHVLTTGEAYDEARYEQTKKNEEERRKQKLKAEAAKLGFKLMPV

SEQ ID NO: 413061 - protein, 328 aa, unidentified
MNDSQVVYVGIDVSKESLSVDAGELFKGDVPNTEKGLKGLIKTLRKAAPGGNALHFCFESTGPYGWNLFNACCKAGIPASQLNPAKIRHYAKAMSESAKTDPIDARVIRLFAEAKKPDPAHVPGDGERAMRQLVLARGALTKSAVQLAGTMDSLTDAVARKSVIKAARAVRTEIKRIDCAIAKAVKQDGRLTGLVGELAGIDGVGVLTASKIVALVPELGTLGRRDSAALAGLAPFKRDSGKFKGKSFINGGRPSVRQALFMPATVAIKHNQVLKAVYEKLRKAGKPYKVALTAVMRKLFAHMDGVAAKWLAEHGGTASGSAPSPVAG

SEQ ID NO: 413062 - protein, 343 aa, unidentified
MQSISTIGLDIAKSVFQVHGVDAAGQVVLRRQLRRRYVLAFFQKLPPCLVGIEACASSHHWSRELQALGHTVRLMPPAYVKPYVKRQKNDTTDAEAICEAVTRPNMRFVSTKTVEQQSCLMLHRVRHLFIRQQTAVINSIRAHLAEFGIVAPVGRRGVEQLLEVVADTADRRLPEVARACLAALGSQLRALKAQILEFDRRIMVWHRSNATSMRLDAIPGVGPALATALVASIAEPGAFRSGRDFSAWVGLVPKQNSSGGKDKLGSISKQGDRYLRSLFTAGALAVIRYAKIHGTRHRPWLTGLLARRPTKVAAIALANKLARMAWAMMVRNERYKEPAALAA

SEQ ID NO: 413063 - protein, 326 aa, unidentified
MNAYVGLDISLKRTSICVVNEDGGIRVEGTVASDPDAIANFVRARAPATRRVGMESGPTSVWLWRELTERGLPVICIDARHAKAALSMQINKNDRNDAAGIASIMQTGWYREVQAKSPDSHATRALLNSRALLVRIQRDLENQVRGLLKISGLIVGRAKDGVFAQRTQALLASDPVLAEVALPLLAGRESIHKQLMKIECRVRRLAHANMQARDFMTVPGIGPVTAIAFLAAIDDPNRFRRSRAVGAYLELTPRRYASGEVDWSGRISKCGDTMVRAYLSVRGGRRSAHARAEMVCAQGVGSAPGQTSRHEEGANGACPQARRGPA

SEQ ID NO: 413064 - protein, 361 aa, unidentified
MHVPIRTKGVNAMPSLAERVDVVIGVDTHKYTHTAAAVAAATGAKLDELSIGTDSDGYAALLTWAQSHPGDRVWSLEGAGGYGAGLARFLAAAGEVVFELDRPVRAARRNGAKSDPLDAVRAAREALSREHLAEPKTDGPRAQLAALMAARRSAVEAATLAQHQLHALVIAAPDSLRALFRGQTTAVMLATAAKLRPHTGWDPTTVTTAQVLRRLARRSNALTEEAAEHEKAITTLVKAWRPDLLELPGIGPIVAAQVLTAWSHQGRIRSEAAFAMLAGTAPIPASSGMLTRHRLNRSGDRQLNRALHVVALSRTRYDQRTRDYIERRRAEGKTDREIRRCLKRYISRQLYRQLEHGGRLA

SEQ ID NO: 413065 - protein, 322 aa, unidentified
MNKYKETFGVDISKDVFDVHGSESGHEQYKNDETGFKKLLKSLPKDSLVAMEATGYYHYRLAQFLYKNGVEVSVINPLSIKRFIQMKLSKVKTDKSDSKAICEYALINEVPIYNALTDVQSECLQLFRLLDTYLKQRTATKNKMHGEEALGLPSMFVYRSLRRNKKQLDKEIIAIEARILSLVKEDQQHQLTLLTSIPGIGQKTALFLIVVTDGFSKFENASQLCSYVGITPTIRDSGSSVRGRSRISKVGNRKLRNLLFLCSFNACKHNKACRELYERIVNKGKSKKLALIAVANKLLKQCFSIATSGRPYDETHVSVLPR

SEQ ID NO: 413066 - protein, 350 aa, unidentified
MIIIGCDYHPGFQQIAFVDIETGDCGEQRLQHREEAEKFYRDLAGQGKAVRVGMEASGHARWFERLLAELNFELWIGDAAEIRTKRVRKQKTDRQDAELILKLMLEDRFPQIWVPSWENRDLRQLLWHRHRMVQARTRIMNQLQAVALNEGLRYKKRLWREAGREQLEAFRLAPWASQRRRDLLELLGRLDSTVAKLTQAIEQEVEKCPEARRLQTHPGVGPLTALAFVLIIGRADRFQCGKQIASYLGLVPLEESSGNRRRLGHITKQGNSLLRFLLVEAAQVTARSIPEWRSKYFHLAMRRGRKIAKVAMARRLAVQMYWMMRKEWDYEQLRKFGSHAGQPGYRHGVK

SEQ ID NO: 413067 - protein, 339 aa, unidentified
MKLYGGIDLHGDNSVIALVDEQDGVTYQRRVTNDLSRILEELAPYQSSITGLAVESTFNWYWLVDGLMAASYRVHLANPAAMQQYQGLKYTDDKYDARWLARMLRLGVLPEGYIYPKEERGVRDLLRKRAQMVRYRTANLLSVENLYNRNTGRRLRSSEVKKLSLAEAGCLFSATDLNLAVQCNVAVMSCVEEQIGVLERAVKERTKLRPEYRKLLSTPGIGPILGLTIMLETGDIRRFPRVGDFASYCRCVGSTRWSNGKQKGKGNSKNGNKYLGWAFVEAANFAIRYSPSIQQYYQRKKAKTKGVVAIKAVAHKLARACYYVMRDQVAFNVTRAFSG

SEQ ID NO: 413068 - protein, 351 aa, unidentified
MKSMIKQVQGEELFVGIDLHKLRWHVTIRTADVEIFCNSIVGRWEDLRRVISRYKDCRIHAVYEAGYFGFSLYDHLTKYGVECIVTPPSLIPQEHGNRVKTDRLDSRKLARLLAKGLLKSIWVPSAKERFHRQVIRRRRQLVGDRVRTQNRIKSELCFYGIDLPVARSKWSQVYFANLQRIKFKNHWMQKSFNQLLEQYEFLSAQIDKQTQLLKQLAQLPLYCDRVKILRSIPGIGLLTAMEILLELQDFSRFRRVEQLAAYVGLTPSQYSSADKIRMGRITGAGKNTVRSALVESCWLLIRKDKAMRRKYEQIKARAGGKRAIVAIARKLILCIRRLLLDNRPYEYEPVS

SEQ ID NO: 413069 - protein, 356 aa, unidentified
MNNSNKLDFTGQPIYLGLDIHKKSWSVSIFTRQGEYKTFSQPPQVETLVHYLGHHFPGALYYAVYEAGYCGFWIHDQLVKQGVHCTVVNPADVPTKNKEQRRKGDGVDCRKLGRGLRNGELEGIYVPPRGRLEDRSLIRTRLSMGRKQTRCKNQIKSMLLFYGVEIPEEKEMGHWSRRFIQWIEGIRMERASGDMALQIHLEELSHLRQILAKLNRAILALSRTEEHRSWVHLLRTIPGISTLTAMILLMELGEITRFRSIDQLCSYVGLVPDTQGSGDKEHVEGVTQRRHSHLRWLLIEASWTAVRKDPALMEAFDQYCKRMKKSQAIIKVARKLLNRVRYVLKNQAEYVPCVIE

SEQ ID NO: 413070 - protein, 345 aa, unidentified
MTEYKRIAIDTSKAVFTLHGVDQQDRPVLRINLRRPQLLAFFKKLPPTEIAMEACGSAHHWSGELTALGHAVCLVPPQYVKPYVKRSKNDRNDAEAICEAAGRPGMHFVPVKSVTQQAQGMVLKVRETLVGQRTQMTNTLRGHAAEFGVIAGKGLRQIGPLLSAIEQETTIPAEAREMAALLGQEIEHLDRRIKELDVKLAAVHKANEVSQRLATIPGVGPITALTLAIEVDPAAFESGRHLAAWAGLTPQEHSTAGKQRMGGISRAGNERLRVLLVTGATSVIKAAMRPGSALMTDWLRALLARKPRKVVAVALANKIARVAWVLMTRGEVYRRPAAAAAAAAA

SEQ ID NO: 413071 - protein, 369 aa, unidentified
MEHSMFIGLDVHKATISVAVADGKRGGEVRSWGVIPHRAGDIQKVVEKLGSSGRHLHFCYEAGPCGYGLHRQLLSLGHECVVIAPSLIPVKSGDRVKTDRRDAMMLARLHRAGELTAVWVPDEAHEAMRDLIRARATAVRVVGKARQHLQGFLLRHSRIYAGKRGWTVAYRRWLTTLRFGHPAQQIVFQDYVHAVTDAEARVERLAKQIRDLVPSWSLAPVVEAVQAMRGVAFIVAVTVVSEVGDFHRFDNPRKLMAYLGLIPSEHSSGASVRRGGITKAGSGLARRALIEGAWTYRMQARVSRKLHDRLENVPEAVRDIAWKGQLRMCQRYRQLTAAGKASVIVTTAIAREMVGFIWAIARITTAATA

SEQ ID NO: 413072 - protein, 402 aa, unidentified
MAYDYVIGMDGGKYFHHACVLDSHGAQVLSKRINQNEQSLRALFSNFCSGNNKVLVVVDQPNNIGRLTVAVAQDLGIDVRYLPGLAMRQLSRIHAGNAKTDIRDAYIIAHAGKNLPESLRSVDRVEKAFCQLKVLNGIDEDLARSYTRLINQIRSALVGCYPQFEQAIRGQIIHRKWVLHLLARYGGPTKIKRLGKAKTIAFARRHKARNPEPVIDAIFAAIAEQTVSIAGAHYAEMGVAMSAKDALAKLDHRKEIEKEVIDLIDDIPHTQILLSMPGIGPKTAAQILMTVGDMSDFPTPEHLASYAELSPRTNQSGTSIMSNSLNRTGNKKLKNALWQSSFASIRFHERSRQFYERKRKEAKRHNAAVVTLARRRINVLYAMMRNHEYYRDPAPAKEAATA

SEQ ID NO: 413073 - protein, 357 aa, unidentified
MRSIQSVPHGEQAVQQDDLFMSLELGDKRWKLSIGDARHGVSRYDVAAADTAAIAKCVAKTRERFQTPRAVVHSCYEAGRDGWWLHRWLTQVGVDNIVVDASSIEVNRRARRAKTDRLDADKLRTMLVRHHGGEHVWSVLREPTEQDEDARRVHRELQRLTHERTSHINRIRALLVLHNVRPDIVLAGRDWPAWWQKNSGQVSPKLRAEIEREVARLTLVKDQVRSIELARRRELASGMHPMVSQLTRLAAIGPTGAWVLVHEVFGWRRFSNRRQLAGCLGLAPTPYASGDTETEQGISKVGNKRVRALLVEQAWGWLRRQPTGALTLWFNRRFAHSGARMRRVGIVALARRLAIAL

SEQ ID NO: 413074 - protein, 438 aa, unidentified
MWRNSQWLLSIFQKGALPVKVVYQTCCGIDVHKSFLVATIIKTTSGVQPSYQKKRFSTFNNSILEFKQWLLDNSCRDVCMESTGKYWVPVFNLLEDEINVTIANPKWVKAVKGNKDDTKDSKWIGDLFRLGLVPGSYIPCKPIRILREFTRYRYKLTSCRSSEKNRFQNALTVCNVALDSVVSDIFGKSATSVIDYLLKQPDNSINHEEISSRLLRSLKKKSESVIESIEGYQMTDAQKYRMRLVHAHMDYITSTISEIDSMIDSLVEPYENAVQLLCTIPGVDRSSAITILSEIGTDMTQFSNSKRLCCWAGLTPGNNESAGKKKSVRITRAGVYLKPALVQVAHAAVKSNKSPYYKAKYERIMKRRGKKRAIIAVARMILTAVYHMLSTGEAWNPTDLYKIDMPEPLKNKQKEKAVKQAMKLLIAEGIIKEPLLAS

SEQ ID NO: 413075 - protein, 425 aa, unidentified
MNFNTNEKINQVSENTLVIGIDIAKHKHFACAIDDRGRVLQKSFPIVQSHVGFEAFYERVLALKATHEKQEILIGFEPTGHYWMNLAAFLNSYGIPFVMVNPMHVNRSKELDDNLQTKNDQKDALVIARLMRDGRFSYPRHLEGIEAELRNGATIRSKIQEDLNALQNRIIRWLDRFFPEFTSVFKNFGKMAYAVLEKTPLPMDIRGKAPEELLFLYRQVEGMKSPQLPKAKQLVEVAQNSIGLKEGLVMAKLEIATLLSQVKLMQAQLDELTTQLVELAKQMTDYEYLTSVPGIGDVTIVDLLSEVGSLTQYEHPRQLIKLAGLTLRENSSGQQKGQKRISKRGRRKLRALLFRVMMPLILHNKAFKQLHDYYTTRTTNPLRKKQSIVVLCGKLLKILHALCKRKTTFNEQQMMNDFASLKTAA

SEQ ID NO: 413076 - protein, 381 aa, unidentified
MRQVCGLDVHKDSVFVCILNENGIVFQDKFGVLTPELEHLASVLQEHDVGEVCMESTSIYWMPVWRVLEPYVAELKLVTPYFIKQLPGKKSDVKDAEWIATCLLKDLIKGSYVPADIIQQLRQYDRRIFDLNAECVRKLCKLDAALQRCNIRISNYVSTTDSKGYKEVVRLISEGEIDPEVLIKAIHGRTINRVGKDVILASLSGVISEADLDIIRQLREEIDLAQRHRDECQSRMDAVCRQHFPEQLKNLQTIPGIKGRSATAIIAEVGTDVSSFQDAAHLVSWCGLKPRNEESAGKIKARSITHGNRFLRKTLIECSWAAAKTQGCFLNKFSYYQTVVRKKNKMKVQVAIARKILTAVWYVMHDNVAYRDYTPDIAPAE

SEQ ID NO: 413077 - protein, 317 aa, unidentified
MTKSSMVCAGIDTGKRKLDVALHGRAERLQVDNAGDGHTRLLRWLRQHRVKRVGIEASGGYEAGVVAWLRGNRFVVIVLQPGQVRAYAKFVLQRAKNDRIDAALIAECTALTSTIHAPPDLRLAPFAEHLTMIEQLRADIACDKTRRESCRDPRRRRYWNEEIARLKAVLRSELKALVAAIGQHADLAERLALLTSIDGIGLPTAVAILVRMPEIGRVTREEAAALAGLAPYDDDSGDRVGGRHIAGGRERLRKSLYSAALAAAFHWNDQLKALYKRLIGAGKPHKLALIACARKLLIYANTVVQRGAPWLANPAAA

SEQ ID NO: 413078 - protein, 356 aa, unidentified
MEVVHPRCAGLDVHKRIIVACRLTPGPRGHPVREVESFRTTTRGLLELSDWLAAVAISVVAMESTGSFWKPVYNVLEGSFELLVVNAQHLKVVPGRKTDVRDAEWIADLLRHGLLRPSFIPERPERELRELTRYRTTLLQQRTAEVNRIQKVLEGANIKLASVASDVVGTSGRAMLEALVGGEVDPEMMAAMARGRLRDKHDALLEALEGRIGPHQRFLLAALLRHLDAIDGLVAEVSAEVEARLRPFEAEIVRLQTIPGVGRRTAETILSEVGPDMSRFPSSRHLASWAGLCPGSHESAGKSRSGRARKGSPWLRSMLVEAAKAAGRSQTYLGAVHQRLAARRGAKRATFAIAAR

SEQ ID NO: 413079 - protein, 534 aa, unidentified
MARASKSKKRSFPASQTIHRPRGVISPRVQTVGPEHFGIVCVDCAKARSKWMRADFYGRVLVPPTVVEHTRPCLISMIQELRANLDQARIRDQIVVIERTGRYHRPIQRAFAQAGFEVRIIHPLTTKQHRQPANPGNKTDDTDLAAMHRGAVNGFGLLEPPADSLSIRLQLLARHRRDLVEKTVALRSQIHEHLHAVMPGYSKCFDDVYDAQIPLSIAREFGSARAILQAGVPGLIVHLRGAGIRVHAPTLEKILAWARSAPAAEDESDIHLRILAQLDDDRLSKVRGVRAIEAELAGLLVQTPYVLLMGIPGINVVSAAEFAGEMGPIERYATARAITGRAGLFPSRYQSDRVDYPDGRLVRCANRTLRRALMTIADNLVKCNDHFRVLAAGWRLHGKDARAVRVQVAGRFSRIAFQMVAGRKAYRHPCCQQRDYVLNKLLVFHTENGIGYEQLTMNLEAAVAQLPRSEYREEAVPLADELDRVLKKRGKGPRPLAEILPVVLAKLGVKPVRSPESGEAILTQPFVRRDRTTS

SEQ ID NO: 413080 - protein, 336 aa, unidentified
MKKFVIGVDVSKEKLDLCLQYDNKVHKEWMLDNTTAAIKHSLKALMKERKFESSEVLLCAEYTGQYTYPLSCACEELGIDLWLESPAQIKHRSGVVRGKNDRLDAQKIAAYACRFQDKMRLFSLPEKNIASLKQLISERDMYVSDKAKYQGQLNDQKRFMSPKDYQNKSVRLKKLIAGLNESIAIIEQEIQDLIDGDDTLSNQHKLLCSIDGIGDKVAIKMIVSTNAFRDFDDARKFSCHAGVAPFRYTSGSSIYSRNRVSNRADKSVKSLLHMAAVVAATRIKGGELRDYYLRKVAEGKNKMLVLNAIRAKLVARMFAVIKNNRPYEKNYAFALA

SEQ ID NO: 413081 - protein, 372 aa, unidentified
MKKISTVVGKQSKNFPEQKLTIGLDLGDGSSWYCVLDEAGEVLLEQRLSTTPKAMKEVFGAMPRSRIALETGMHSPWVSRVLSELGHEVIVAHARNVRLIGESRGKDDRLDARTLARLARIDPHLLAPVQHRSAQAQAHLMVIRARAGLVRARTSLINTARGLTKSYGERLRGCSPRNLNAEKARGLSPELQAALEPLLAAIESLSERIYEYNQKIERIARESYPQVARLKQVKGVGTLIALTYLLTLEDAQRFRKSRDVGCYVGLQPGRRNSGQSEPQLHISKEGDPYLRTLLVQGAHHILGPFGADSDLRRWGLNVRPEFRESRHVRSRFRDSPRFPPSPNKPSNEELFEGDVVRLERFLNLVGKLRQAG

SEQ ID NO: 413082 - protein, 352 aa, unidentified
MDVVIGVDAHKKTHTLVAVDKAGRRLAQKTIATTSAAHGEGARWARSRFGTNLIWAVEDCRTLTARLERDLLAEGLDVVRVPPHLMSRTRASSREQGKSDPIDALAVARAVLREPHLPVASHDPVSMELRLLVDRREDLVGQRTATINRLLSRVHYLDPEQPVPANWNVKSAREKIQTWLATQEGLVAELARDEAADITRFSDDIAKLGRRITQRVRAVAPTLLAVKGCGELSAAKIVAEVADIRRFRSEAAFANYIGLAPIPHSSGQTNVRIRKGRHGNRQLNMAVHRIAVTQIHHEGPGKDYFQRRLAEGNDRQHALRSLKRRLARVVFNRLRADQSRVRGERTGPLDPK

SEQ ID NO: 413083 - protein, 425 aa, unidentified
MRTFSSFTGGVHELRDWLLSCGVKTVAMESTGNYWVTTFDVLERAGIEVFLVNARHVKGVPGKKTDVCDAQWLQQLHSAGLLKKSFRPAQDILPLRYLMRHRAGLVEELGRQVLLMQKVLTEMNLKIHHVFSDLDGVSAQAIITAILAGERDPATLAALRDRRCRSSEETVMAALRGDYREEYLFVLGQCQSQWRYHLQALAELDERIGVLIKGIAPSPDEGADPPGDTAQPAQPAQATGRPGLKKDKPLGKNTLRMDVQAEAVRFYGVDLTTIDGVGSGLLSVLMSELGPREQILNAFSTPPQFCSWLGLNPANDISGGKVLKAKTRQVKNRLAAAFRLCALGLANAKGMMGQYSRRIKGRLGKAEGITATAHKLARVVYAMISSGRAYDENEAFRITPQNRKKQLNKLQKQAEALGFQIVALP

SEQ ID NO: 413084 - protein, 355 aa, unidentified
MNKIKTNFAGQIVYSGMDIHKGSWNLGIFLNDMFVKNVHQKPNPTIMVNYLKQHYPGARYIAAYEAGKFGFWIQRQLTALGIECLVVNPADIPKSQKDTLQKNDPRDARNLGLRLQSGVLNGIHIPDEQQEADRVFFRHRKRIWKDLTRCKNRIKGMLAFSGIDIPEQYDNASWSHNFINWLKEIDCKQQSRRSALNYMISQMEFLRKELLSISNAIRKMMREQRYKTNYYLLRTIPGIGPLTAASILVEIGDVKRFETFYHLNSFVGLLPMEHSSGQSENKLSLTVRKHRQLRSDLVESAWTARRTDPAMALYFQEQIKRKDSKIVIIKIARKLLNRIRYVLINQQPYEMGIVK

SEQ ID NO: 413085 - protein, 450 aa, unidentified
MITEPQEIEDEEHEQVLQRVAAVDVAKDSGKVCVRVPHESKPGRRVSRVWDVDATTRAVIELGDHLVCQGIEKVTVESTSDYWRIWFYLLEAAGLDVQLVNAREARNMPGRPKSDKLDAVWLAKLTERGMLRPSFVPPAEIRQLRDYTRLRTDLVQERTRHWARLEKLLEDALIKVSAVASRIDTLSVRDMIEALIAGERSPRVLADLARGKMKAKRAALAEALTGRFDDHHAELARMLLDQIDQLNAQIARLTDRIGELIGAMPAARGVDADGSTGPSAGTGPDAAVIPALQRLDEVPGIGPGGAQVILAEIGLEMGRFPTAGHLVSWAKLSPRTIQSGATNRSGKTGKGNPYLKGILGEAAAAAAKTDTFLGERYRRLVKRAGKLKALVAVARSILVIIWHLLNDPAARFRDLGSGYYASRTDTGRKARGHIRQLEALGYTVTLTQAA

SEQ ID NO: 413086 - protein, 387 aa, unidentified
MARKRTLSTLDTSIAYEAVGLDLAKEDTAIAAFGPDHEGPYLIDRMPYDKLYELLADMAPTLVAMEPCSGAHQIAEQIQELGHEVMMISGRHVQAWVKDHCNGQKTDLNDAFAILNLAYDRWLTPIRGKTREKCRLLALQASYRQLKGQRTKTMVHVKATLHAWGFPIRAGSFNQKALHELIDANREAFGDEVVETLHLMINRVHDLDHDIATMLKLLTEATQRDPRASLLRSIPGFGVLPTSRWCAVVGDIARFDSPKQTMAFIGLVPNNRITGHHTETSSGREARGQGKMSKRGDKMLRSLCILGAGALCLMVRNDRLPDCPFVASIKGRLASPRPWLKVLVYVAAKLVRIATALLKYGETFSFEKAGISKAVLKQWELEQAKAA

SEQ ID NO: 413087 - protein, 413 aa, unidentified
MDKIYDICCGIDVHKKLIVACLSHKRKKELREFGATTRELMELAEWLQKNECEIVAMESTGSYWKPLYNIMESYGLHAIVVNPAHMKAVPGRKTDVKDAEWIAELLQHGLLQPSYIPSKDQRELRELVQYRKSLVGERTRELNRLQKMLEGANIKLSGTVTNINGKSARKILEYILSGNEIDEKKYDEMYEEKLIAHNLKASKEQILDDLKGFMSPLQRRMLKELLQHLDELNVHIENLNDEIDNFMKPEEKQASQVIQDVTGIGNTSAQTIIAVIGTDMERFPSDRHISSWAGLCPGDNVSAKKRKSGKIRKGNALLKSTLVLCAHAAVRHKSSYFHAQFKRISTHRGKKRAYVAVAHSILIAIYHILKDGVKYQDLGAEYYNQFNAERKIHAYLKKLKALGWELPKEAVPA

SEQ ID NO: 413088 - protein, 333 aa, unidentified
MKHWIGIDVSKATLDVALLDEHGKVTAEEQVANTEKGLRSMWKRWTKAFGLAKGECLVCLEPTGHYSHLPLETLVQLEVLTWLAHPTDIIRSIGATRGKNDRIDALRIADYARRFHDKARLVTPDHLRTNKLKQLLTRRRTWCGARPCTTRIRNLNKCMDKSLQTAFTRIDKAQITALGKSIKQIEALITEVIAADAEHQRIYDLLLSIDGVGPVLAAHLLALTEGFLRFKTARELSCHAGCAPFEHSSGSSIRGKTRVSRQAQSTLKYLLHMAAVGVTARKGELQDYWKRKVAEGKHKMSVLNAIRNKLIHRIYAVIDRGTPFVRRTEPVTA

SEQ ID NO: 413089 - protein, 467 aa, unidentified
MTPHKDYCLDPCPPVLTPMLPPSPILSDALQVCHPHAAGIDIGEAEHWVAVPPGSDPQPVRRFGPFTADLDALADWLIDCGVTTVAMESTGVYWIPLFELLEARGVQVLLIDPRQAKRAPGRPKTDRLDCKWLQRLHAYGLLAGAFRPADQVCVLRGYLRHRQMLLTYAAHHIQHRHKALEQMNLKLTQVVSDITGVTGMAILKAIIAGERDPVTLAKLRNPHGQHSEDEIAKALQGTWRAEHLFALQQAVELYQFYHQQLTTCDQRITAHLETFADQSAGQPLPPKARRHKKTNEPRFDARTPLYRLAGVDLTTIEGIEENTALILLSEIGTDMHRWPSVKHFCRWLGLCPQHQSSGGKVLSRRVRPGAHRVTVALRLAARSLHHSQSALGAFFRRMKARLGTPKAITATAHKLARLVYHLLKHGSAYVQQGLENYEAQYHERKVTTMAKQAKALGYTLVPLAAQG

SEQ ID NO: 413090 - protein, 349 aa, unidentified
MKIIGCDFHPSYQQIAVLDSVTGEMVEKALSHERKEEVRAFYAELEGPVRVGIEASGQSQWFERMLTELGHEVWIGDAAKIRASCERKQKTDRRDAELLLKLLAEDRFPRIWVPTAAERDDRQLLLHRHKLVRMRTQVKNQLQALALNQGVQQKRKLWSEAGRKQLESLPLLPWASRRRAELLQLLDQLEVPIAALDRAVAEQASARPAARRLMTHPGVGPVTALAFALTMGPAERFQRGKQVASYLGLIPSEHSSGGRKQRLGHISKQGSPFLRGLLVEAAQSAVRHEPEMRRAYQRLAQRKCRALAKVAMARKLAVRLYWMLRLQVNYAQLIQGSHAGQPGTFCGRG

SEQ ID NO: 413091 - protein, 404 aa, unidentified
MSEDSTTYVGLDTSKKSIQVAMLRPGCQEPVEWETVNEPRAIRRLARRLKRDAVGTVQVCYEAGPCGYALQRQLGEAGVKCMVIAPSLVPVKPGERIKTNRRDARKLAQMLRAGALTEVHPPTPEEEAVRDLCRCLEDAKEDLHRARNRLGKMGLRRGLSYEGRAWTQGHRQWLRGLTFEHEADRVVFGDYLYAIEQLEERCRGLEEKLVVMSQQDPYLQPVGWLRCFRGIDTVTAMTLMAELHDFRRFESPRDLMGYLGLVPSERSTGDSHRRGGITKTGNSHARRLLIEAAWHCRHRPAVSANLRKRRAGQPGWVIGIADRAQARLHRRYWHLVLHGKPPNKAVTAVARELVGFIWAALYLRENTTAEAPRDRVGTTKKEGTRAGGTKGQRTGRRSGRRMVA

SEQ ID NO: 413092 - protein, 339 aa, unidentified
MEQISRIGMDTSKHVFQLHGVNAAGVTVLRKKLRRKEMVAFFQTLPPTVIGIEACGASHHLARLLSSFGHTVKMIAPQLVKPYVKRGKNDAADAEALCEAMSRPTMRFVPVKTAEQQAALMLVGVRDRLIRNRTQLSNAIRGYAAEFGLTAAKGTAHLIPLLERTESDESLPALARELFVSQAEEYRQLQAQIDDIDAKLTAWHRADACSQRLAKIPGVGAIGAVLLKMKTPDPAQFQSGRQFAAWIGLTPRDHSTAGKVRLGGITRAGDEGLRSALVLGATAVIQHALRSGKASPWLAELLKRKPAKLAAVALANKTARIAWKMMRTGEAYAAKSAAA

SEQ ID NO: 413093 - protein, 429 aa, unidentified
MRTESTPGARGPVFCGVDTHADSHWLCVLDWRGRKVLSRQFPADAAGYEALAGAIAAAGEPACIAMEGTSSYGAGLTRHLASLGMPVREALSPARMQRRRPGQGKCDEADAERAARAAMSGSKLGTPKSQDGWVDGVRCMLAARSGAVKARTSAINTARSLLTTAPEGLRSRFRGMGGPRLMEELPSVRAEGALGAALGALADLWSAARDAALDMERAIEASLEENCPALLAMYGCGPVSAAKLAVAAGDNPGRLRSEASFAAICGACPIPASSGKTVRHRLNRGGDRQANSALHEIARQRVMRDPETAEYAERARERGKSDREIMRCLKRYVAREAYRALMRPHEVRRPEDASELVAARRAARVSQVKAASILGTSEKYISMLERGQRELKPIRRAYEAWVEAGLPLDWDRQAFEAERKMNSKKDLAI

SEQ ID NO: 413094 - protein, 356 aa, unidentified
MRSNKKIGKRQKIFVGIDVHLKSWDVTCVTHKGYCRSFNQQPSAEALAAFLRREFPEGEYHAVYESGFTGFSTYYALTAVGIRTIVANAADVPTTQKEKLLKTDRRDSRKLAESLRNGDLKGIHVRPVEDLDDRSLVRIRKTFKREESATKARIRHLLYTNGVEIPVQHSRCWSLAFKTWLREEAVLLGAGRNSLTMLLDHLEALHKEVLAAGRAVRKMVRSEKYAEPLRRLMTVPGIGINFAVALLTEIGDFNRFPNERGFACALGLIPTCHNSGDTVSNGEKIFRGNRTIGSMMIETAWKAVAKDAAFNAYHHKCCQRMRPTTAIVKVARRLSNIILSMMKNERDYDPTKTYPK

SEQ ID NO: 413095 - protein, 407 aa, unidentified
MKRYYLGVDWADEFDQVWVSDADGNKVAEMKVLQNTQGLSDFGRWLHERKAQAIELWAAIEKPHGRIVDFLLNHGVVVYPVNPKALDRARDRFRMSQSKSDSFDAYVLADFLRTDHARLRALEPDSAPAQELKIVTRDHQRLMRQKNRLLNQIEVTLKEYYPRPLEVFNDLETKIALDFLKAYPTPQALSQLNRRGWNRFAKRQHHLSEARADELWEKLNKAQLAVPEHVVRAKARLLAALVVQFEAALQAVKQYEEQVKGFFASMPAADLVKTLPGGKSGTTVPILWAELGDAKSRWESFRHLQAEAGAVPVTQSSGKSRFVQFRFACNKHLRYAIHWFSFNSLNRCEWANKYYRSQRAKGHSHPQALRALGAKWLKIIFVMWRDHKPYDENYHLANIARQQMRAA

SEQ ID NO: 413096 - protein, 456 aa, unidentified
MKNEDSGRESESVRYVEESSGRGVERQLAERKDGRSFTDSMNRIYMGIDVGKKSHHATVLGCTGQVEEQFQFANTRRGFDGMVSRIQVYQGRGFRVLVGMDATGCYWYSLYSFLSRHLDGESVKVVNPLQLGRYRKLLIRKTKTDEKDSELIARLLIMNLVPQTELLAGDTLKLRQLAKHRFRLADEVGNKKKRLRSVLAYLFPEFEQVFRTITSKGALHILSRYPDPAALSRVSERGREDLVKDLARISRTPASNAAHKLDALMDAARRSIGVSFLAEPASLAIRQTVTQLEILEQQIGEVDHAMNRVLENNYLWPVLQKRPGIGPVIAGTIIGMIGDPSRFAGRSQVVAYAGMDLAVYQSGSRSVTRKLTKRGSPLLRRVLYLAAARAATCDQRCKDYLQKKLGEGKHYKSAVTALARRMIEWIYSDMVQAQKQAQKQAQRATKPVTERPEPST

SEQ ID NO: 413097 - protein, 344 aa, unidentified
MTEVITIGVDIAKSVFQIHAVDAAGEPVIRRQLRRRQVLPFFKKQPPCLIGIEACATSHHWAREISKLGHEVRLMPPRYVKPYVKRNKNDAADAEAICEAVRRPNMRFVPVKTPEQQSVLMLHRTRQLFVRQRTSLTNAIRAHMAEFGIVAGIGRNGVEVLLKLITEGEDDRMPAEARACLIALADQLELIKRQILDADRRVLAWHRSSETSKRLEAIPGVGPLIASALVASIPDPAAFRSGRDLSAWIGLVPKQHSTGGKERLGSISKAGNRYLRQLLVIGALSVIRRAKQLGYTRHPWLVRLLERRSTKIAAVALANKIARIAWAMMARNESYQPSRLSPAT

SEQ ID NO: 413098 - protein, 357 aa, unidentified
MVYIGVDLHRKKSHVAAIDEEGELVLNRKVRTGPAELQQLIDELRPRPIEVAFEATFGWGWFADLLAELGIPAHMAHPLATKAISSARVKNDAVDAKTLAHLLRTNLLPEGWIAPPDVRETRRLVRMRAALVRVRAKLKAQVHALLGEHGSQPDVIDLFSKRGRALLAELQLPAISQSRLQACLRLIDEVSLEIVLAEREIRETFKHDERLQRLLPIPGIGPIIAATILSEIGDIKRFASPDKLCAWAGLTPNEHSSADHLRRGHISKQGSRWLRWVLVEAAVHAFGDVELRQFFVRIAHRRGTKIARVAVARRLLTLVYYALRSETGCRSYPVPASPSSVEARSSRVMASRRRPTI

SEQ ID NO: 413099 - protein, 394 aa, unidentified
MFIGVDVGKGEHHAVALSCTGKRLFDKALPNDETRLRTLITELQAHGQLLLVVDQPATIGALPVAVARDGGILVAYLPRLSMRRITDLHAGEAKTDARDAAIIAEAARCMPHTLRSLKLADEQVSELTMLCGFDNDLAAQITQTSNRIRGLLTQIHPALERVLGPRLDHPAVLDLLERYPSPAKLASVTEKQLANRLTKLAPRLGKNLAAEIVLALSEQAVVVPGTNAAMIVLPRLARQLAGLRCQREEVSQEVERLVQAPPLYPVLSSMPGVGVRTAARLLTEVACKAFASAAHLAAYVGLAPVTHRSGSSIRGEHPSRRGNKILKRALFLSAFAALRDPISRTYYTRKINQGKRHNQVLIALARRRCDVLFAMLRDGSFYCQQSIKLPLTTT

SEQ ID NO: 413100 - protein, 345 aa, unidentified
MKLYGGIDLHSNNSVIAIINEHGETLTAKRLNNDMSVILSFLSPYKDNLKGLVVESTFNWYWLVDALMDEGFKLHLANPAAIQQYSGLKHADDHSDACWLAEMLRLNILPEGYIYPRELRAVRDLMRKRMDIVQQSTKNLLSVQSCYMRHLGYKLSSNKIKQMAAIRKGVDVEQIHSDFNSTNTALSVISNLTLIRCAQQQINAIESAILQQTSLSPEFINLTSIDGIGNTLALTIMLETGTIKRFDSPGNFSSYCRCVKGAKYSNGKKKGATNQKNGNRYLAWAFTEAANFAIRYNPTVKKYYQRKLAKTNQVIAIKTVAHKLARACYHVLKDNVPFDEHKAFA

SEQ ID NO: 413101 - protein, 402 aa, unidentified
MRVGIDAHKMKCTTVMFDGDSVTGSFDFQTTRQGVYEFMKKVPEGSIAVIESSTTGKVLSRMLSGKYEVHMVAPPERKVSIKTDRRDAERIVMEDMLNYLRRCYIPSQYIENIRFVVTQQIQIGRRIARVKNQVHALLEMNMIQHELDDMADIFGVKGLNKLSKIQLPRHDMIALARYLEELKMYVSHHRQLDTEIARIAASDNDVQLLMTIPGINCFTAVAIKSRIGDDVSRFATKKHLCSYAGVVPKANNSGEYISEHNHVKHGDIVLKYALTCAVRGAILANKNSSIKLFYRKISKKGVSPQKAQIAAARKMACTVWKVLSSKQPYTEQDDHMTKRKMKIMSSKAMRIIPTSVMPSKVSELVRNLADDIDILGKYHEDSGYIIGKDLSNKNRLKEDIVR

SEQ ID NO: 413102 - protein, 532 aa, unidentified
MNQAGRRACEAPRTRLFITLPLRTFLLQKRMDSGLMKLETRVTTATNTLPIHAMNGERGSSGSDALAITTNTQDVGRHQASSIRFSQIPSSRVSINTIMEDRRMSKTEAVTETAEYAALIGLDWATEKHDVWVWDTRTGEGRHRVVEHTPEALSAWLTELQTRYPGQRLAVCLEQSRGALISALMGHAFLTLYPVNPATLARYREAFTPSRAKDDPNDAQLLAEILRLHRDKLAVWKPDDIQTRTLTFLNEERRKAIDLRTKLTLRLQAALTLYFPQAIEWVGVHLYTPLACDWLLKWPTLAAIQKAKPQTIRAFYYAHNCRRPDQVEDHLQTIARAQPLTQDAAVISAYQLTVQMLAKQLRTLHHSIAEYDRQIAQLFAHHPDAPIFNSLPGAGPVLAPRLLSALGTNRDRYLSVQHLQTYSGIAPVIERSGKECWTHWRWNCPKFIRQTFHEFAKNSIPYSAWAKAYYESQKKKGKGHNAAIRALAFKWIRILYRCWKDRIPYDEGRYLKMLKQRGSELANVIAQQPQMA

SEQ ID NO: 413103 - protein, 423 aa, unidentified
MKVVYPICCGVDVHKKFFVATLITTEEIQPKYKKRRFSTFNNQILAFKAWLLENNCYDVCMESTGKYWIPVYNLLEDSINVTIANPKWVRSVKGNKDDAKDSKWIGELFRIGLVPGSFIPRKEIRILREYTRYRFKLVSCKSSEKNRYQNVFTVCNVALDAVVSDMFGVSASSITDYIVNSDDFDSAHCISLLKRSLKKKANEVVESIEGFQMSIPQKERAKMVKEHYDHLVGQIGKLDATLDELAKPFEPAINLLCTIPGIRWHSAITVLSEIGTDMSHFDSSKRLCRWAGLTPGNNESAGKKKSVRITRAGVYLKPALVEVAHAAVKSKLTPYYRLKYERIAKRRGKKRAIIAIARMILTAIFHILTTGEVWNPVDLNQVDMPPQLQEKELHKSLCRAAKLLVAHGLISPDSVQIPEPLPA

SEQ ID NO: 413104 - protein, 338 aa, unidentified
MTMFAGLDVGFKRTAVCVVDGSGRTVWRGVLDTHPQTIAAALHRWRAELEKVGLETGSMSPWLARGLAVLGFPVVCMDARRAADAVKSRRVKSDKADAFALAEMLRTGWYSAVHVKSEDSHRLKALLGARDQLVRAKRALGNQVRGLLRPFGIRLPSRQGTKKFAEAAHQAVAHDAMLSASVTALMEALAAIEGQLARLDDRLKELARRSPVCWRLMSVPGVGPIVALAFMAAIEDVGRFARMRDIGVYLGLTPKRYQSGETDVGLGISHQGDAMARHYLYEAANVLLTTVRSPSALKSWGLKLIKRRGPKRARVAVARKLAAVLGRIWKDGTHFAAA

SEQ ID NO: 413105 - protein, 383 aa, unidentified
MSSTTADRDPVIHLAIELSCSTWLVAARLPGDEKPRLHRLGGGDTAALLALISSLRARVAARLGSPIGVICCFEAGRDGFWLHRLLTAHGVINHVLEPTSILVNRRARRAKTDRLDAEGMLRVLAAYLRGDRQACSMVRVPTPEEEDAKRPHRERQHLVQERLRIENRIEALLFTQGIRQRPSLRSWERDLAALRTGDGREIPHHLRAELDRLRRRLVMTLTLIREIEAERDKAAAAEPQDQTCRKIAALCRIRGIGENFAAVLTREVFYRCFDNRRQLASYVGITPMPYQSGGIDRDRRISRAGNPRARTTMIQLAWLWLRYQPGSELAQWFRERVGALAGRTRRIAIVAMARKLLIALWRYVETGVLPAGIEIRAKTAAAA

SEQ ID NO: 413106 - protein, 340 aa, unidentified
MIKIIGLDIAKNVFQVHGVDETGQPALRRKLRRAEVLRLFYHLEPALVGIEACHTAHHWAREIAALGHQVRLMPPQFVRPYVKSQKNDAADAEAICEAVQRPTMRFVPVKGADQQAVLLLHRTHDLLIRQRSSLISAIRAHFAEFGVVVGQRMRNIDRLLELLVAEGRALPELARRMLAVLADQLRDVAARVAVVEGELMAWHRANEVSRRLATIPGVGPITASAIVATVGDATQFKSGRQFAAWLGLVPQQRSSGGKERLGRISKRGDGYIRRLMIHGARAVVGWRKRRPLAGDPWLGGLLARRPVNVATVAFANKSARIAWALMARGRSYTTVRARAA

SEQ ID NO: 413107 - protein, 356 aa, unidentified
MPTIAQLEPVRVTVGVDTHKDAHVAVAKDHLGRHLGDNTIPTAPSGYRDLLAWAESYGDVEAWGVEGTGSYGAGLLRFLRGADQAVIEINRPDRKARRLKGKSDLVDAEAAARAVLSGEATAVPKSADDRVEMIRALRVARSSAIKARTQAINGLKALVVSAPAELREQLRALSSTQLVRTCARLRPGDIAAPLAATKMAMRSLACRHEALAAEIKILDPELLRLTAEVAPALVELFGVGPEVAGTLLVTAGDNPERLRSEAAFAHLCGVSPINASSGKTVRHRLNRGGDRQANSALYRIVLVRLCYDTRTKEYAERRTAEGKSKTEIIRCLKRYVAREVFAVLSDVGKKNLAAAA

SEQ ID NO: 413108 - protein, 351 aa, unidentified
MNYVGIDIHKRYSVLVALDERGRELKRCRINGNTAFGFDQFFSGLDGKSKVVVEACWNWGRIYDLLGEIEQVEEVVLAHPLKTRLIADAQIKTDGLDAHGLATLLRGDLVARAYVPSKPTRQRKEVLRQRLYWARLRTRVRNRIHALIDRQRELSMPQCSDLFGRKGLNALNKLCLNEPDATLLREELALLELIQSQIKAQEARIVEFNSKDETTLRLQSIPGMGKILAAVAPVEIDCVERFSSAAKLCAYAGLVPRTHASGGRVYQGPLVKSRNKWLQWAFIEAAWVAIGCSAYFGGLYRQHRARGKNANIAITSIARRMCQISFTLLKERRDFIEAFPGRSAVRLTAAA

SEQ ID NO: 413109 - protein, 384 aa, unidentified
MNNDSIIFIGLDTHKSFIQVAVLQEQRGATPEHLGRIKSNKSALIKLTQQLQSKYPKATLHFVYEAGPCGYWTHRLLTSLGHCCYVVAPSLIPKKPGDRVKTDKRDAAKLAKLFKAEELTPIYVPEAEDEAIRDLSRARETAMKDLKDAKFQLKGFLLRNNVQATVNDNWSKKHLRWLTDLILPHYSQQIVLQEMIMTISERMQRLQRLDNELLHQVKNWRYYPVVKAIQAMRGVRLLVALGTIAELGDLRRFDHPRKLMAYLGLVPTESSSGGKTRRGSLTKCGNSRARRLLVEGAHTYKHKANISVELQLRQEGLPKEIVDIAWQAQQRLCRRYQRLLQKGKHRNVVVVAIAREMIAYIWAIAREVVISDVDPRTRIARLPA

SEQ ID NO: 413110 - protein, 403 aa, unidentified
MRVPAALERAWAGIDVGKRHHWVCVVDQDGEQLLSVKVANDQAGIEAVIGSVTGLAGKVSWAVDIIGAPSALLLAVLSEAGQPVRYASGRLVAAMSGAYSGEGKTDPKDAYVIAETARIRRNLPAIDRKTELVCNLGLLTARRADLIADRVRMINRLRDVLTSVFPALERAFDYSSCKGALVLLTGYATPARIRRTGQARLAGWLRQRRVRGYARVAARALAAAQAQRITLPGQDIAADIIAELAQAVLSLDQRVAELDTQIAALFAEHPQAEIIQSMPGFGPILGAALLVTAGDLAAYPSAGHLAAAAGLVPVPNDSGRRAGNLHKPRRYSRPLRHVLYLSAQTSMMRDGPSRDYYLKKRGNGRTHQQAVIALARRRLDVLWALLRDNRTYAATPPVPAKAA

SEQ ID NO: 413111 - protein, 453 aa, unidentified
MNKTEQTTTFEEIRRNVAGIDIAGHADHYVCGPRLDDGSREVEHFGTTTPELFRMLDWLKSRRVESAAMESTSVYWISVADVLEAHGIEVVLVDTREVRMVPGRKSDVKDCQWLQKLHSCGLLRGGFRPPENVAAIRTILRERASLTKMRTQCLQQMQKSLDQMNIRVHHAVSDIDGKTGMDIISAIVAGERDPLKLAGFRDRRCKKSEARIAEYLTGNWRDEHVFNLKQAYLTLRFIDERISEYEQQASAMFKALAAASGNPQPPVPPEDKRTGKDSRNAEEKVDLQRITGFNMTDLAGVGYDTAATLVSELGYDFARFPTERHFAAYIGLAPRLGKSAGKNVRQKRRLKNTSRAGQALRMAASTLYRSNSELGAYFRGVARRADRKTAVKATARRMAHLIYRGVRYGQAYVDQGAEAYEKRMREKTLRTVRNLVKIHKINILELNISNAVA

SEQ ID NO: 413112 - protein, 353 aa, unidentified
MNNRKYIGMDVHQASISIAVSDAAGKVLMECIIETKAATVLEFIQGLRGSLWVTFEEGTSAAWLYDLLKPHVTKVVVCDPRKNALLKAGNKNDRVDARKLGELLRAELLTPVYHGESGVRTLRELSRGYLAVSKDLTRVMNRLKAIYRSWAIPCAGQQVYSPRHRAAWLEKLREAGVRRRAEQTYQQLDFLMEIRKETRKELLAESRKHPARKLLEQIPRLGPIRVALLIALIQTPHRFRTKRQLWNYCGLGLRTRSSGEYRYTGGQLQHARKPPALRGLNVNHNHDLKHLFKSAATQAGNDPLGAFYQNLLAGGMEPPMARLTLARKIAAIALKIWKKGERFDPAKLKQQAA

SEQ ID NO: 413113 - protein, 456 aa, unidentified
MSKRKTAPKWDQMPIVHPHAAGLDIGAAEIWACVPSSRDPEPVRYFPTFTPDLQRLADWLVACGIDTVAMESTGVYWIPIFEILEARGLKLFLVNAQHIKHVPGRKSDWLDCQWIQTLHTLGLLAASFRPDAEMIALRTLLRHRAMLLEHRAPHILHMQKALQHMNLLLHQVLSDVTGETGLQIIRAIVAGQRDPVQLAQFRNPNCKSSQDDIAKALTGNYAPEHLFTLTQALELFDFYTQQVAACDAELERRYAAMKPRWDGPDELPDVPPVKKGSRSKNQPAFNVRAHLLRLTGVDLVGVMGLSASTVQTILSEIGTEMACFPSEKHLASWLGLAPHHEISGGKILRNGTLKGNHRAAQAFRQAAQSVARSHSALGAYYRRQRARLGEAQAIVATAHKIARIVYHLLKHREAFIAESAADYEARLQQRELAQLKRKAAKLGLSLVPVAQATLAT

SEQ ID NO: 413114 - protein, 426 aa, unidentified
MFAASVDEDQVIARVAALDIGKAELVCCVRLPASGGSKRRVQEVTTHSTMTRSLAELANRLVDLRVERVVMEATSDYWKPVFYLLEAHGLDPWLVNARDVRHLPGRPKTDVLDAVWLCKVAERQMLRPSFVPPRPIRVLRDLTRYRIDLVAARTAEKSRVEKLLEDAGIKLSVVASDIFGVSGRAMLAALIAGQRDPAVLADLARARMRAKISLLEEAFAGLPTGAFAEHHRFLLQRMLGRIDAIDADIAILDAEIEAHLAPFDQAVQRLDQIPGIGPVAAAIIIAEVGVDMTRFPTAGHLCSWAKFSPGIKSSAGKSKGSGSTGHGDRYLARVLGEAVVMAGRSDTFLGDRYRRIARRRGKKKAIVAVGRSMLVIIWHLLSEPDIPFHDLGADHYARTINTDARKRNHIRQLEALGYRVTLEPAA

SEQ ID NO: 413115 - protein, 386 aa, unidentified
MSVPPVLEKCTIDAIDAVDDARSRHRSAIGRSLKSESLEGVVHRQISTIGIDLAKNVFQVHGVDAEGKVVLVRQLRRGQMMTFLAKLEPCLIGMEACATSHHWAREITKLGHEVKLIPPAYVKAYVKRQKNDAADAASICEAVTRPSMRFVPVKSAEQQSTLAMHRTRNLLISQRTQLINALRAHLAELGIVAEKGRDGLARLIAILKDEATLQSLPAAMLQALRAMVAALAALQTQVAELDRSIRDQHRASDVSRRLKTVPSIGLLGATALTATVTDPSAFKSGRDLAAWIGLVPKQNSTGGKERLGGISKQGDRYLRRLLVAGATAVVQHARRQPEKYPWITKLLARKPAKVVAIAVANKTARIAWVIMTRGGTYRPPALAAAA

SEQ ID NO: 413116 - protein, 339 aa, unidentified
MNRTAVGVDIAKNVFQLHYIDPATGEIVNKPIKRPKFLEFFANREPCLIGMEACGGAHHWARQLTKMGHEVKLMPGKFAKAFNIGNKKDAADARAIWLAVQQPSKPVAVKTEMQQAMLALHRMREQLVKFRTMQINGLRGLLTEYGEVMGKGRAALDKAIPQVLGRVAERLPAVVIDTLREQWSGLTKLDEQVASIERRMREWKKEDPQVQAISAIPGVGLLTSTAAVATMGDAKAFRSGREFAACIGIVPEQRGTGGKVNLLGISKRGDTYLRALLIHGARSVLSNSKNPGEWVEQMMKRRPKNVVIVALANKMARMIWAVLAHDRPYQKDYVSVKPA

SEQ ID NO: 413117 - protein, 396 aa, unidentified
MAAIWAGIDAGKAHHHCVAIDESGRRLLSRRVANDEPELLELLADILALGDEVTWGIDLADGGAALAIALLVNRDQPVHYISGRAIHRASESYRGEGKTDAKDAAVIADQVRVRRDLHPLRAGDDTVIDLKILTGRRMDLIADRTRTVNRLRAQFTGTFPGLERALDLTNTGPLTLITGYQTPAAIRRIGVKRLETWLRNRHVVRPDRLAETAVQAAERQHTSLPGEKLAATLVHTLAKEVMSLNQHVAELDKAIEARFRDHHTFEVITSMPGLGIILGAEFLAATGGDMTAFGTADRLAGFGGVAPVPRDSGKLSGNLRRPQRYNRRLQRVFYTSALFSIRHCEESRRFYDRKRAEGKRPTQAVLALARRRVNVLWALLRDGRRYEPAPPARAAA

SEQ ID NO: 413118 - protein, 313 aa, unidentified
MMASPDVFVGIDVSKDRLDVHVRPLGQGFSVSNEAAGHAALIARLRPLRSKRIVLEATGGYERALWLALSEAGLVAAVVNPRQVRAFARAAGRLAKTDRLDAAVIAHFAETFVPRLGKPDPVADRLGEHVLYRRSTQDELVGLEHQLRRLETPALRQRAERRVAVLRAEVKELEREMRAIVDSDPAKKALFACLTAPKGVGLILACTLIANMRELGALSRHQAAALIGVAPLNHDSGVRRGYRAIAGGRRRVRNVLYVATLSAVRCNPTIREFYRRLAAGGKPAKVALVACMRKLLVMLNGRVRDQLAVTVSP

SEQ ID NO: 413119 - protein, 342 aa, unidentified
MEYYVGLDVSLKQTSICVVDRTGSVVREGVVDSDPEAISVYVRSKAPGAVRIGLETGPTSTWLWTELKRFGLPVICIDARHAKAVLKMQINKNDRNDAIGIARIMQTGWFKEVHVKDIDSHSVRALLASRALLVKIKRDLENHVRGLLKNLGLVIGRATFNVFAARAEELIEGRPDLVAAVRPLLEARNAVEQQVSELDRKVMKLARRDAQVQRFMTVPGVGPITALAFKATIDDPARFARSRSVGAYVGLTSRRHASGEIDWSGRISKCGDAMLRSYLFEAAGVLLTRVPKWSTVKAWGTRLAKRNGLRKAKVAVARKLAVILHRMWIDGTEFNWSKEVAA

SEQ ID NO: 413120 - protein, 384 aa, unidentified
MDAKRKEADPLEPKRHRCARVEMCSNHSRDRGSTMNVTTYGLDLAKRVFQVHWVEPETGEVKRKALARAEVSAFFARRQAGVVAMEACGSAHHWGRLLRDLGHEVRLIAAQFVRPFVKTNKTDAADAEAIWEAAQRPGMRFVAVKSEEQQAVLSLHRVRQQFVKMRTMQANQVRGLLYEFGVVVPQGWRVLLAQAGPIVMEETRCPVPELVRRELLRQLEGIRALTTRIAELERQIGSWQRRESECRRIAAVPGVGKLTASAVVATVGDARTFRSGREFAAFLGLVPRQSGTGGRVRLLGISKRGDPYLRTLLIHGARAVLLQQSRADRTLDPWLKDLLARRPKNVAIVALANKMARTIWALLAHGRSFDRSWSRAAMPVPAFH

SEQ ID NO: 413121 - protein, 348 aa, unidentified
MKIKTIGIDLAKDVFGVHGVDVRGKALVHRRVTRKHLLGLLAKLEPCLVGMEACGSAHHWAREIEQLGHTVKLMSPQFVKPYRKGNKNDPNDAEAICEAVTRPSMRFVPVKSAAQQDVQALHRVREQLLKSRTALVNQVRGLLGEHGIIAPRGIAHARRLLLEILADPERHGLSELFREALQEIAERLRFLDERVGAYDDRIERVFKQDERCKRLAKVEGVGPLVATAMVAAVGNAREFKSGRELSAWLGLVPRQHSSGNRNVLLGISKRGDRYLRTLLIHGARSALCRVERRRDRRSIWASRLKLARGFNVAAVALANKNARIIWALLTRGDNYRPAVAADPGNQAA

SEQ ID NO: 413122 - protein, 417 aa, unidentified
MNSPPETIPIQRYIGIDIHKHYLMIGGQNRHQEWTLRPRQVQMARFRSWAEKNLKPEDEVVVEATSNVWDIYDIVVPLVRKTVVANAYKVRQIAEARVKTDKEDIKRLITLLIADIVPEVWVPPCHVRELRSLISFRWRLTKQITMSKNRLHSVVQRFNLNAPEGGLLTDKNKSWWDRQEFTELTGFQVERDLEIVKNLEFQKAAIDQKLAELSNTEPWASEMVYLMQIPGFGLIFSMVILSAIGDIKRFPHPKKLVGYAGLGAGVHASGEKYQEKSITKAGRKELRWALVEAAWVAVRFDPYWKAQFIRLKKRMHVNKAIVSIARRMLVSIWYILTKRESYRHFDEETIAYKMLIWAQAIGEEGRQGLTRQQFAKYGLLRLGIGQDLERIVKGGGPRKIAPTEEVLALKPELAPPR

SEQ ID NO: 413123 - protein, 466 aa, unidentified
MENNYILYVGMDSSKGKADAAILKVSDRRSVKPKFLRKKLSFKFVKSEVTSFLETVRSYSDDNCTSICFALEVTGIYSTNVYNFIKDNLNDNESIKFLNTDFVNQWRNAHNIAKSDPLDAQTISTIIGTDSDVQYVNDNVFKNKNGYQDLKALVHRHYQIKKIYSQEINRLIAQCDCLFPELQYVFEPKSAAFIAVLSSYPTTHDIINASRLEVFNVVYEATKHRCSMDKIDKLFDLCHDTLVPDNISSYGRSIILDLVENIKNIKGQLKMIERYIRDVASLNPAYKLLLTITGCGPLTAATVIAETGDIKRFKNADCFVSYSGTSPRNKRSGTSVETMGKISKRGSRYLRHAIYMIAEFARRHNPVLKHQFERIKNGNKKRHKLANIAIANKIARYIYSIMKNESSFVILHEHIMRLPEETQNTFFNSISLDFPENTRKQIYQYSDIDGEVHKFVYTKLEETMII

SEQ ID NO: 413124 - protein, 356 aa, unidentified
MKTHKVQDFVVKGKEVFVGLEDSKTTWKIAVRCDKMLAHQVAMEAAYPVLKSYLDHKFPACTIHLMYEAGFKGFNLYDRLTEDGIACVVIPPHLVTEPKVNRVKTDKRDARRLALMLENHDYKDPCHVPDKERREDRQVSRTLIGVQKDIVRTRNRVRKLLQFHGIEVPFPDRWGRGEFRALKKLELSEPLRISLAILLTQLEQLWEHQTSLRGSLRQLCRKERYRRAFEIARSLPGIGWYSAIRLVLDLGEDLTYFTSGKKIAGFVGLGCSEHSTGETERKGRITGMGSGFIRATLIENSWVSIRKDPVLLAKFMRIWRGSGSKKRAIVAVARMLIVRLRACMISDTLYVTGVVR

SEQ ID NO: 413125 - protein, 310 aa, unidentified
MVDVPCFVGIDVAKAQLDIAVRPSGERWAVPHDASGVGTLGERLQALHPTLIVLEATGGLERTAPAALATAGLPVAVVNPRQARDFARATGQLAKTDALEARALAHCADVIRPTPRPLPDAQTQELRALLGRRQQLIGMRTAEQNRLAGTKGRLQTDIEAHIPWLNERLATLDDDIETLLRASPLWRENDDLLQRAPGIGPVCARTLFLERPELGPLTRQQIAALVGVAPLNWASGTRRGRRTIGGGRAHVRTGLYMGTLVATRYKPRIKAFSERLLAAGKVKKVALTACMRKFLTILNAMLKHRTPWQA

SEQ ID NO: 413126 - protein, 384 aa, unidentified
MQTITLHIGLDVHKDSITIAIAEPGPKGEIRLFGTITNDLGRLEHALGRIRKAHPGATLELAYEAGPCGFVIARRLQQLKVPCLVAAPSLIPKQPGSPFKTDQRDARTIARLLRAGELTGVYIPEATDEAIRDLCRSRTDAVDDLRRCRFRLKAFLLRHGYRYQGKASWSQAHMRYLRELVLPHPAMKAILEEYLQGIDAAHQRIQRLEASMLSLLETWRLKPAVQALMAFRGFQLVAAMITVSELGDIHRFAHPRQLMTYLGLVSIENSSGPRQRLGRISRCGNGHQRWLLTECAEHYLTPPKVSKELSRRQEGQPQQVKALSWKAQTRLHLRFTRLLARRLARNKAKVAIARELCGFIWALLRTLPCYTLPAATPAANASAT

SEQ ID NO: 413127 - protein, 314 aa, unidentified
MKKTVEIFVGIDVSKAWLDEAVHEQKEVNRFSNDEVGIASLVKVLKKLKPKLIVLEPTGGFEMLVVAELSQAGLPVAVVNGKRIRDFAKATGQIAKTDKLDARVLAHFAAAIRPEVRPLQTEEEEQLTALLTRRRQVLDMITVEKNRLVTVRAKMRPDLEAHIHWLSDNLKELDQEIEEFVKGSPSWKEKDTLLQSVPGVGPVTSATMLGMLPELGLLNRQEIAALVGVAPMNKDTGNKQGKRCIYGGRADVRSVLYMAALSAKKHNPFIRKFYERLIRHGKEKKVALTACMRKLLVILNAMVRTNQPWRSQTA

SEQ ID NO: 413128 - protein, 443 aa, unidentified
MNTSPPYDLVIGLDRSDTRADLCLINTHTGQRRVEIIATAPEALWEWLLQLRQQHPQARVGLCLEQPAVHLIPFLEIYAWITLHPINPITLQKYREAFVTSRAKDDTKDAEYLADLLLTHHAKLPVWTPEDSATRAVQQLVFHRRAVVDERTALSNRLIALLKQYFPQALTLCGEDLWRPLATAFLLQWPSLQAVQQAKPATVKQFYYFHGSRSAKLLAERLALVGKAVPVTDETAVIGSFVLRVQLVCRQLQLVQRSVAEFDRQIAAAYAAHPDREIFASLPGAGPVFQPRLLASLGSQRERFPSAASLQHYTGIAPVTKRSGGSCYIHRRYLCPKFHRQSFHEYAKESILWSRWAGAFYLQQRSKGCPHHTAVRALAFKWQRVIWRCWQDRKPYAEAKYEAALRKAGSPLVALFDRVELGKSPWKTAAKKSKKTVDGLPQR

SEQ ID NO: 413129 - protein, 391 aa, unidentified
MYFVGIDIAKRNHEACIIDSAGQSQGKTLRFPNSQAGGQKLIQWMQHVDHDLSSTEVALEATGHYWLALHSFLLKQGVKVHVINPIQSDAFRNMYIRQTKNDTKDAFIIAEVLRFGRYTTTELGSDKIVALRQLSRFRFSLVDSISDLKRQVIGVLDMLFPEYERLFSDIFGKTSSELLMEYTTPEEILAVDTEELAAFIAKHSRNRLGLERAKELQQAAESSFGIDTALDAYRLQLRLLLQQIRFTEEQLDFLDIEIEKRLKAVDTNLVTIPGIGPVLAAAILGEIGDISRFPTGVKLVAFAGIDPTVRSSGEFTGTRNRMSKRGSPYLRRAIWLAANVAKIHNPILKEFYEQKRVQGKHHLAATGAVARKMTYIIHAVLRDNKPYEPIA

SEQ ID NO: 413130 - protein, 434 aa, unidentified
MRLMYPRCAAIDVHKKTAVVCRRQTEANGTVKSEVKTFGTTTPELLQMMDWLIEWEVTTVAIESTAEYWKPVFNLLEGEFEVILVNARHVKQVPGRKTDVKDAEWLAELLSYGLLKASYIPAKPQRDLRDLTRHRVTLVQERARIVNRLQKVLEHANIKLASVASDIMGVSGRQMLAALVDGKTDATAMADLAKGRMRNKMEALEKALTGVVRPHHRFMLAEHLAHIDFLDEQIERVSEKIGQQIETMSQPSEPDEMPPGGESPLTWAESVELLDSAPGVDKKAAEIVLAEMGIDMTQFKTADHLTAWAGLAPGNNQSGSKRHKAKTREGNRNLRQIMVQIAWAAVRTKGSYAQALYRRLAGRRGKKRAIIAVARTLLSSFWYMLSRGEAYQELGGNYFDQRRKDVKVNVLTKQLEKLGYAVQLEPIQLQLAPA

SEQ ID NO: 413131 - protein, 438 aa, unidentified
MDTTESKKKSIAAEEIVAWVGLDWADSEHKISTYEVATGQAEDSVLKHSSEALQQWAAGLKKRFEGKKVAVVLEQSRGAVLYALMSCDFIVLYPVNPQSLSSYRKALYPSGAKDDPVDSTLLREMVQRNPERFRQWVPDDPDTRSLKLLVEGRRNLVNQMTRLTNQLTSQLKTYYPQALEWAGELNSAQACEFLKQWPTLEALQQARPARLRKFYLRYGRPRLETMNRRIDEIKEATPLTSDPAAVLAGSTMVRAIVMQIRPLIDSIESYDDEIKRLFQKHPDRLIFESLPGAGSVFAPRLLAAFGADRERWTSAAEIQRLSGIAPVTERSGKQHWVHWRLACPKFIRQTFHEFAGSSIQWCNWAKCYYQHLRACGKKHHAAVRALAYKWIRILFACWKNRTPYDNDVFLKALAKRGSPLSERAAAIVPARRAKAQMA

SEQ ID NO: 413132 - protein, 387 aa, unidentified
MSQVSDLSRSLAPFDQNTTLTVVVELSEASWLVAGLIPGIERQPVKKQEPDPVALLRLLERWRLEAIKAGKTIGQIALAFEAGRDGFWLARWLQARDIAAHVVHSTSVAVSREHRRAKTDRLDTAMLMRVFVGWLRGERGHCRMVAIPTLEQEDAKRPSRERESLVGERTRIINRMKAALARLGIRGFNPALRKAPQRLAALRTPEGVPIPPNMLDEIRRDMDRLAVVREQIDGIERARLARLENAPAAGPHAMVRLLARVVGVGVETADMLVQEVLSRNLRDRRAVARYVGLTGSPDESGKRRREKGLAKAGNPRARRGLIQLAWRFLRFQSDSALAQWYRARTDGPKGARKTTMIVALARKLLIALWRMVTIGDIPAGVALRPTI

SEQ ID NO: 413133 - protein, 316 aa, unidentified
MEAVLECCVGLDVHQETVVACVVFGPLEHRPKKEIKTFGTTTPELLTLADWLEERKCSHVAMESTRIYWKPVWNILETGPFQLILANAQRIKNVPGRKTDVKDAEWIGQLLRSGLIEGSFVPPVEIRNLRDLTRYRKKLLQDTTQEKNRIHKVLQDANIKMTTYISDIFGVSGRNILECLLNGEVITAENITKMVKGKIRSKVPGLVDALNNRLRRHHREMIRFSWEHLKYLERTIVDVEVIIEQCLNPYQQDIDLLDSIPGVGHTAATVMIAELGTDMSIFPTDRHVSSWAGVSPGNNESAGKKKELAPHQGIKR

SEQ ID NO: 413134 - protein, 408 aa, unidentified
MVYVGVDVAKADHCLGAIDAQGQVVQKPVRFTQDAEGFARLAGLLRRLGPPEEVVVGMEATGHYWVLLAEELQRLGYPPQVFNPILSGDAIRMSVRGRKTDADDCLAIARVVRDGGFQPVRLPDAAMGELKRLCRYRQAAVERSANLKKRLLGLLDLVFPEFAHLFSECSGAAARAALMAGPSARLMAAMPINDLVAQVHAASRGRLGRERAQAVILAAKTSIAAARTDTATEMAIRMTLQEIALLDDQITTYDAAITPLAPAGKDLLTTIPGIGPILAAVILAEIGTIERFIPAKGDPRPSDGIHRLLAFAGLDPRITESGQTRGKPRMSKRGSRTLRTALWRAAFLAHRHDAFRDLYQRHRVTMKQPQKIALSHVARKLTQAIYGVLRYQTPFNLDAFRGKPRIAA

SEQ ID NO: 413135 - protein, 389 aa, unidentified
MRFYTKQHQFYCGIDLHARTMSLCILNQEGEMLVHRNMPAGPDPFLKTIAPYREHLVVCVACICTWYWLADLCAREGIPFVLGHALSRKAIHGGKAKNDNIDAQKMAVLRRGGMLPQAYVSPAALRATRDLLRRRMHLMRKRAALRAHIQHTHRQYNLPEIGKQLAYKANRDGVAARFPDPAVPKRLEVDLALIDHYDHLRRAVALAVRTTAKQHDAHPLSRRRTVPGIGEIRSLVLLYDIHDLQRCPRVQAFVSYGRLVKCAKASAGKRSGTSGTKIGNASRTWACSEAAVLFLRAKPAGQKSLARFENKHGKGKALTICAHKLARAVYDMLQREGVFDLATFLQREGRSVGEPAASLGHDGRSLATVLSNDALPASTNAHEHRGPLP

SEQ ID NO: 413136 - protein, 316 aa, unidentified
MNKKNHTEVNIGIDTSQTQLDIYVRPCGDYFSVENTPKGAKEAARRLRSYRPTRVLIEATGRLEMHFVCAAHKARLPVVVCNAGQVRQFAKASGRLAKTDKLDAQDIAHFGEALKPALTELKPEKLRQISDLIAVRSQCLDMSTMQKHRLHRMPQSVHKPIQRILKAIRTEVERIDKQLDKLVEAIPQWRNQRELLMSVKGVGKVVAYTLMSELPELGKLNRKEIAALAGVAPINRDSGSYRGKRRIYGGRRKVRTVLYVSMLSAIQYDPKIKSMYERLVAAGKPKKVAIVACMRKQLTILNTMMKNGTHWDEKLA

SEQ ID NO: 413137 - protein, 325 aa, unidentified
MTDTAYLGIDIAKRKFDVALVRPDGKVRVKACPNTPAGATELVAWVAHQHDGAVHACLEATGTYGDGLAEALADAGYTVSVVNPARVEAYARSRLTRTKTDRTDARLIAQFCATQQPPPWVPLPREVRTLQAFVRRLDALEGMRTQERNRLAAEPTAAVIRASIQHVIDLLEDEMAALRARIHDHFDQHPDLRTQRDLLTSIPGIGDATAAILLAEFGPLTRFRQAAACAAFAGLVPRLGESGSSVRRQPVLSKLGAPALRKALFYPAIVALRHNPIIAAFGQRLRAKGKHKMVVIGAAMRKLAHLAFGVIKTGQPFNADHLVRR

SEQ ID NO: 413138 - protein, 306 aa, unidentified
MVGQTKVANNSHGFNDLASWIRKLKVKLSDVLVCAEHTGIYGYDLQIWLDDMQISFAFVPALEIKRSLGIRRGKNDAVDALRIAEYAYIRRESISLSHKPSDVIFQLRALLGERKQYVRMRAALLARKDALHQYESKESIDRREEIIDKYAEYIASVDKQMRGLMEHDDEIKRNYELISSVKGIGLVNAINTLVYTNNFTSFQTPRQYACYCGIAPFEHTSGTSIKGRTAVSKMGNHQLKCELTMAARSAIIHDPWMKQYYKRKMMSKGNAPGAHGIVLNAIKFKLIVRMFSVVKSGIPYKVMAYC

SEQ ID NO: 413139 - protein, 391 aa, unidentified
MIFVGIDVAKDKHDCFILNSEGTVLADVFTIANNRIGFETLLSRIQSCSQGESKIKVGLEATGHYSYNLLWFLLDSGLATYVINPLHTNLYRKSLSLRRTKTDRIDARTIAMMLMSDVDLKSYSNTAYHNEELKSLTRYRFDKVKERAKLKSSVARLVNILFPELEKLVSSLHIAVVYALLSNYPGASYIANANTEELAETLCTASKGRYTKSKTAEIQVAAGVSIGSKMPAKSMELKHTIALIRELDKEISEVESAIDKITSQMDSPIFTIPGIGRHMGAMILAEVGDFSNFASADKLLAYAGLSPSTYQSGQLQNCYAHMEKRGSRYLRYALFNAAKYVCLWCPTFSAYLEKKRSEGKHYNVAISHAAKKLVRLIFAMQRSGKAFLADY

SEQ ID NO: 413140 - protein, 441 aa, unidentified
MSDTAIPTPEPAWAAFVALDWGSQKHAWTLQSAGGGRRNKGFVDNTPEAIAVWAADLHRRFAGQPVAGALEQKRGSVVNLLLPYAHLVLFPVPASMSASYRKTFVPSGAKDDPSDASWILDLLLRHRDRLRRLEPDESNTRLLLMLVEDRRQLVDDKTRLSLRLQDCLKQYFPQLVRWFDPDSALVADLLKQWPDLQHLQRCHDGTLRSFFRQHHYGEERIVQRIEAIRAAVPATNDPAVLQAGSMKARHLTESMATLREQIARLERRRDELVAAHPDTPIFASFPGAGPSTVPRLIAAFGTCRERYQSAFEVECDSGIAPVHIRSGKIDRVSFRHACQDFTRQTFHEFAGQTIPRCEWANAYYQAHCHTPQQHHAAVRALAFKWIRILFRCWKDRIPYDDQLYLTSLRRRSGLLGQALASATSVGWITVAGFSKLAEKSA

SEQ ID NO: 413141 - protein, 425 aa, unidentified
MKNNILETLFVGIDVSSKTNVLCALDFSGNKLLNLKALNNQPGAKSLLDSVLGCLDSNSLKYVVIALESTSFYSTHIANFLASNELLLAYKPLVYCLNPKTIHNYRKSFVDMDKTDPLDAYIIADFARCGRITSQPWRGAQFLALQRLTRHRLHLVECITREKTYMVSNVYLKFSQLAVLDKEDRPFSNSYGVTSAAVLTDFLSLDDITYSSIDDLVAFVSEKGKNRFSDPVETAKLLQKAARDSYRLDKVLYEPLNVSIASSFNVIKALDDEVKAVDKAIEKTIKGINTTEYQSLISIPGIGPVLAGGILSEIGTITSFKSHDSLAKYAGLTWRVNESGDFKSDETRMTKTGNKYLRYYLIEAANCVKKQAPEYKEYYLKKYSEVTKYSHKRALALTSRKLVRLIFGLLTKNQIYSNDKVGEIQ

SEQ ID NO: 413142 - protein, 357 aa, unidentified
MNSEKYIGLDVHQATICVAVMDPKGKVVMESILETKATTILEFLAGLRGTLSVTFEEGTWAAWLYDLLKPHVANLVVCNPRKNALLKHGNKSDKIDARKLADLLRLNDLEPVYHGETGVRMLRELARSYLTIVKDVSRVMSRLKAIYRSWAIPCAGRDVYYTRHRGEWLGKIPEAGSRRRAEQLYQQLDMLQPLRQQARRELLAESRKHTITAKLRQIPSLGPIRSALAVALIQTPHRFRTKRQLWTYSGLGLETRDSGEYHYVQGQVRRRKKQVFIRGLNKDHNHDLKGLFKAAATRASVQPGPFQDFYQRSLAKGIQPTMARLTLARKIAAIALTLWKKGARPTSSRWLYDSETG

SEQ ID NO: 413143 - protein, 533 aa, unidentified
MATKRNSRKSGTIGPAVLGKPNGVIQPRVQAVGPERFGIVAVDCAKARSKWMLCDFYGKVLVPPTVVEHERVALQLATLQLKEACERHGLRDHLVAIEMTGTYHRPVQRAFRKAGSETRLVHPFASRHYRLPAHADRKTDDHDLEGIFRAAVNGFGLLEPAWGETYLRLQLLARHRRDLVQKRAKLQCQIRQYLERCLPGYGALFPNDDLWTRPAPLAVARRAGSAEAICQARVPGVMQWLREADVHAQSRTVERLVTWAANAAEPDPLWAHLTRVWQTLHDDWQAKTQHIARLEQDLAEILVQTPYVLLLSHPGINVVSASELGGEMGPIEHYAHAKAITGRAGLFPSRYQSDEVDRADGPLARFRNARLRAAWIRVADNLIKCNAHFRGKSALWKQRGVDPRDIRCRVANRATRTIFQMVSGRRLYHHPSQVDRAYVLDKLLTFHREHDTPPHDIVRDMRHAAAQIPRDEHPEEATPLERTYERIRHSRRRGPQPIGLILVEVLARLGVVELQSEAEAPKPDANVSDTGTR

SEQ ID NO: 413144 - protein, 354 aa, unidentified
MLAEMVDHVVGIDPDRDWITAAVLEAATAAVVVTGRFPASAAGYQEAVTWADQCSTNTERAWAIEGTSSYGRGMAMALARSGEWVIEFDRAKEKPAKDGSKTDELDAIRAARETLGRAKLASPRTPGGFREALRVHTVARDTAVQARTAAINELKAFVVTADDTLRSELRGLRTAGLVKRCAGFRHSNNRSIDQQCTRAAMRAVARRIVHLNDEITSHEQALTGLVDQAAPQLVAEVGIGPITAAALYIAWSHPGRCRNEAAYARLGGVSPIPATSGQTQNRHRLNRRGDRRLNKALHQIALTRLRYHPPTQAYKQRRSAEGKTDREIRRCVKRYIARQVWRLLEHQEPAKTTT

SEQ ID NO: 413145 - protein, 361 aa, unidentified
MAGTMTWVGLDVHARSTHAAAVDVMSGELTRMRFGPGVDGPVAWLGSLPGPVWACYEAGLTGYGLYRAAVAAGIRIDVIAPGKTPRGPSDRVKTDRRDAELLARCLLAGSLKPVTVPPAGVEAARELTRADDACRRDLMNARHRVSKMLLRHGRVYPKDNTWGQEHLRWLSRQQFEQEVSAFVFADLVARVDGLTARKAVLAERISRLAVEPEFWSTVSRLRAFKGVDTLTALSIHLELGADWQRFEKPTRLGSWLGLTRSLTQSGESSRQGAITKTGSGLARRLLVESAWHYCREPRIGATLENRQQGQPEHVLQISNTAQQRIHRVYRRMKARGKPHHVTVVACARELACFLWAAATAP

SEQ ID NO: 413146 - protein, 390 aa, unidentified
MDVLYQSCAGIDVHQANIVVCILHGPLTSTRPKREMATFYTTTKGLRACHDFLSQFHVEAVGMESTGVYWRPVWHALCDDFELILAQPAHMKAIPGQKNDKKDAHWIAKLTRISLLPRSFVPDETIQELRELTRQRKHYVESRNRETNRIHKILQSGGIKLTTYIEDIMGLSGRNLLQLLVDGTPITPRIVHQSVYTSLKKKVPQLLEALDGYFSDHHRFMLKQSLEIYDFYQKQIELLEERITVYLSQYEKHVEILDSIPGIDVITASVIISEVGVDMSQFPTSGHLASWAGLCPGNNESAGKKRSTKIRHGNSYLKKCLCQAAFAVKRQKGSPLAERYYQIQSRRGSQKATIALAHQLLKIAYILLKEQMTYPEFLAQKKTTRDELVA

SEQ ID NO: 413147 - protein, 343 aa, unidentified
MDHFAGLDVSVKDTSVCIVDDTGKIAREVKVASEPDALLAVLKNPAYHFKRIGLEAGPLSQWLFSALAEASLPVICVETRHMRAVLKAQINKTDRNDARGIAQMIRVGLYRPVHVKTLRSQKLRILLTHRKLLQSKAIAVDNDLRGTLRNFGLKVGIVGQAKFEARIKELVEDLPDLAVLVEPLLVVRRVLREQIGILHRRVLTVVRDDEVCRRLMTVPGVGPVVALTYRATVDVPARFRHSKSVGAVFGLTPSRDQSGEHDHPGAISRCGDEMMRTMLYEAAQSMLTRSSRWCWLKAWAMKIARHRGMKRAIVALARRLAVIMHRIWVDGTAFRWTRQAVAA

SEQ ID NO: 413148 - protein, 390 aa, unidentified
MAKNSSKKAKSQRSRERALLQKVHLNAAGIDVGADAHWVAVPEDRDPQPVRRFGVFTSDLVLLCHWLKSCQIETIVMESTGVYWIALFQVLERHGFEVRLVNASHVKNVPGRKTDVLDCQWLQQLHTFGLLRGSFRPEAAMCVARSYLRLRDTLTKDSNSLVQRMQKALTEMNVQIHRVISDITGLTGMSILRAILAGERNCVKLAQLRHPQIKSSSEILAKALEGDYCPEHLFALQTALELYDSLQLKMLECDQRIEETFQGFEAKISLPAPDLSRLRSAEKRRDAHRRHRLQELTGADLTALPGLDLLAVERILSEIGRDMTRWPTEKHFCRWLGVAPDNRISGGRPLPSKPRKNANRAAAALRLAAQSAMQSKSALGAFIRRIKSRL

SEQ ID NO: 413149 - protein, 338 aa, unidentified
MKLYGGIDLHSNNSVIVILDEKDETVYKKKHKNDLLEILSCLLPFRDQLQGLVVESTYNWYWLVDGLMEAGFKVHLANPAAMQQYSGLKHTDDKTDARWLAHVLRLGLLPEGYICPKEERSVRDLLRKRSQLVRQKTANVLSIINLFTRNTGKAINLRQVKKLTAEELRNQFGDESLCLAVASNLEVFRCLEAQVKLLEKAILEQVKLRKEFIQLKTVNGIGDILALTIMLEAGEIERFPKAGNFASYCRCVGSQKISNGKKKGKGNTKNGNKYLAWAFIEAATSAVHWNVQVKRFYQRKKAKTNSMIAIKAVAHKLARACYYILRDQVEFDNHKAFG

SEQ ID NO: 413150 - protein, 406 aa, unidentified
MLFVGDDWAEDHHDVEIQDETGRRLAKARLPEGISGMARLHGLVGRFLPEDGDAAGVKIGIETDRGPWVAALVASGYQVYAINALQSARARQSQGVSGAKSDAGDAHVLADLVRTHSHQLPTVAGDSEHAGAVKVLTRMHQTLIWDRTRQVLRLRSSLREFFPAALEAYEDLAFPDVLELLTKAPEPNSAARLTRAQITAALTRAHRRDREAKTTAIMAALAAEHLTQPPLIAAAYGATVRALAALIRTSNEQITALQGQVEACFGQHPDAEIYLSQPGLGLVLGARVLAEFGDDPTRYDGARARKNYAGTSPITRASGRKKVVLARYVRNNRLADALHQQAFSALSGSPGARTYYDALRDRDISYNAALRQLGNRLVGILHGCIKTHTPYDEATAWNQHTQQAAA

SEQ ID NO: 413151 - protein, 340 aa, unidentified
MNATAALPVVAVDVAKSVFQLAIADHTWRLVEQHRLSRTQFERWFINRAVGLVVMEACGSAHHWARWLSGLGVEVRLLPAAYIRAYVKCNKTDAADARALLEAARCAEITPVKIKSIEQQALQGVHRTRSLWMATRTSRIDALRGFCREFGIVIAQGSRLGVEQIGRVLADPRSCVPPLIRGTMTLLVEEIRLLEVRIAQLERELTTLARQSPACTTLLSIPGVGLLTATAMVAATSGEVSHFRDARHFASWFGLTPKEHSSGSTRHLGRISKRGDRYLRMLLTHGARSVLRAASVAVRAGKTVDRLRQWALGVQHRSNPQQGSLRTRQQAGKNLLRHAT

SEQ ID NO: 413152 - protein, 444 aa, unidentified
MVGSGWILICEGADAPMIMGTLEPADLYSPLWEVILLNSLFVGVDVSSRTHYAYLMCPDGDKYSSFPLRNTPSDAKLLSDRIVSTLDSLYLTNVSIGIEATSIYGDGLVYALREDGALARFEKKIHVLNPKQVQNFKKAYPDLPKNDEVDAFVIADHLRFGRIGKPVYMDDYRYKALRTLTRMRFDVVQNLTREKNRFANYLFLKCSGIAQDSSIPNSSATTLALMEHFETVDELAYANLDELTDFIAKAGRGRFADPEKMAKAVQAAARASYRLPKTVNDSVNQAMAVSMASMKALQDQIKTLDKAIEKHFEIIPNTLTSVPGIGKVYSAGIIAEIGDIHRFDSHAAVAKYAGLVWSQHQSGSFESENSRLIKSGNRYLRYYLLEAANSVRRCDSEFRRYYDLKYHEVNKYQHKRALALTARKLVRVIFRLLKDNRLYIPLEA

SEQ ID NO: 413153 - protein, 355 aa, unidentified
MMNDKQVKVYGGIDTHADTHHLAVIDQAGRRLADAQIPTTATGYQAALRFLGSWPGLVSVGIECTGSYGAAVTRVVREAGITVFEVNRPNRFDRRLHGKSDPFDAYSAAEAVLGGRASAAPKGGDGLVESLRVLRTSRSSALQARTATINQIKGMLITAPEDLRTRYKGLSTPKLIAALAASRPTATPVTAAEATAYSLRLLARRWQALTGQIEDLAGHLQRLLDDHAPDLMRVFGCGQDTVAQLLITAGDNPDRLRSEAAFAALAGVCPIPASSGKTKRHRLNRAGDRQANSALYHIVMVRLRYNQETQDYVARRTAEGKTKMEIIRCLKRYLVRQLYPLIVETLHPRKEVAAA

SEQ ID NO: 413154 - protein, 467 aa, unidentified
MPRVRPHPHRRERAVTLPPELHQVNLNAAGVDIGAEHHYVAVPPGRDPDGRDVRTFGAFTADLVALADWLTRCGIATVAMESTGVYWIPLFELLTERGFEVKLVDPRQLKHVPGRKTDVLDCQWIQQLHTFGLLAAAFRPADQICVLRSYLRQRGMLVRYAAHHIQHMQKALEQMNLKLTHVVSDIAGLTGLAIIRAMLAGERNPRVLAQLRDRRCKADEATIARALEGTWRREHLFELRQAVELFDVYRGQIAACEAEIEAQLGQFEDKSGGQPLGGAAGGRKAGRGALSFDARQHLQRLTGVDLTRIDGIDAPTALKLVAEIGLDMTRWPTEKHFASWLGLAPGSNVTGGKRLSGRTKPCASRAATALRLAAHALHHSRSALGAFYRRLKGRLGAPKAITATAHKLARLIYRMLRFGTEYVDRGQDYYEQRYQSRVVAHLMRRAQQLGYQLIKNENFSVATSSPA

SEQ ID NO: 413155 - protein, 369 aa, unidentified
MAKSITYVGLDVHKDTIAVALAEAGLRGEVREYGKIPNTPAALQALTVKLVPARRELRFCYEAGPCGYGIHRQLTEAGHECVVVAPSLIPRKPGERIKTDRRDAINLAKLHRAGELTAVWVPDQAHEAIRDVVRARQAAVRTLRQARQQLSGFLLRHGHHYHRPAWTQLHRRWLASLKFEQAVHYIVLEDCIAAIEAATARRDRLEGHIEAALPAWSLAPVVQALQALRGVGLVAAATLVAELGDITRFTNPRQLMAYLGLVPSEHSSGRTRRQGGITKAGNGAARRMLIEAAWSYRFPARISREQLLRQERLTRPIRDIAWKAQERLCRRYRTLARAGKLPTVITAAIARELAGFIWAIARQAQPATS

SEQ ID NO: 413156 - protein, 368 aa, unidentified
MLIIGVDYHPSDQSIALVDTETGEYAERQLNHSAGEAEKFYRELATRATSIRVGMEATGYSRWFERLLGELGIELWIGDAAEIKTRRVRKQKTDREDARLLLRLLRENNFPKIWVPDPENRDLRQLLWHRHRLVQMRTRIMNQLQALAMNEGQRRKKKLWSEQGRAQLEKLPLAPWASRRRNDLLELLDRMNPTIEELTRAVEQEARKRCEVKRLMTHPGVGPITALAFVLIIGTPERFARGKQIGSYVGLIPAEDSSAGHQRLGRITKQGSTLLRFLLVEAAQAAARCDADWRRRYLHLAMRRQRNIAKVAMARRLGVRLYWMWRNGWEYAQLVKFGSNAGQLGIGHGVNQNAVHLNGHPAPSQEGV

SEQ ID NO: 413157 - protein, 355 aa, unidentified
MDSTKYMGLDVHKETISIAVLNSSGKLVMETIIETKASTLLEFVQGLHGSLQVTFEEGTWAAWLYDLLKPQVTKVLVCDPRKNALLKVGNKSDHIDARKLAELLRSNLLRPVYHGEHGVQTLKELSRSYLTISGDLTRVMTRLKAVYRSWAIPCSGKQVYAPRYRAQWLGKISEAGVRRRAEFYYQQLDALRSLRQQVRRELLAESGKHKASKLLCQIPSIGPIRAALLIAILQTPHRFRTKRQLWAYGGLGIETHSSADHRYVEGQLRPSKRPVSLRGLNRNHNHELKNIFKGAAIIAATKAGPFQEFYAALVAKGIRPEMARLTLARKIAAITLLVWKKGVCFDARHLKPQTA

SEQ ID NO: 413158 - protein, 446 aa, unidentified
MENNIRFVGFDVHAATIAVAVAEGSGEVSSLGVIPNQPDAVRRLIRRLGPADRLWVCYEAGPCGYALYWQMIELGVKCEVVAPTLIPVKPGERVKTDRRDARKLARSYRAGDLTAVWVPDRAHEALRDLVRAREVAKADQLRARHRLLKLLLRQGRRPPAGVRAWSAKWWAWIKEQRFEYPLQQTVLLDYIGEVEHAAARIQRLEQALDLAVETAPEKMRAVIEGLQALRGIARLSALTIVSEVGQLSRFARARQLMAYSGLVPSEHSSGEKIRRGSITKTGNAHLRRVLLEAAWTYRHRPAVGASLRARQERISPEVKAIAWKGQQRLCNRYQRLLMRGKPACKVASAVARELLGFIWAIGVRLEREPGTPTARPSASKPSAGRCGARRSGARLVLKTATPIQRAVNHTSSPTALLSPSRPLGGRAQSRRFKCDAPEHWHAGRLT

SEQ ID NO: 413159 - protein, 338 aa, unidentified
MKLYCGIDLHAKSSYLAIIDEKRQRIFKRNVANDRQAILLFLAPYKAELAGVVVESTFNWYWLVDALMEEGYRVHLANVCAIQQYVGLKYVDDKHDAFWLAELLSLGILKEGYIYPKEQRPVRDLLRKRAHLMKLRTSLLISLHNTMANVCGARIPSHHVKGKEDRLSAHLRQHASLALMGQVSKASIDALTLQIKMIDAHVEKQYKIEPTYAGLQSLPGVGKILGLIIMLETGPIGRFPAVGNYVSYCRKADSTWKSAEKVKGKGNVKNGNRYLSWAFAEAAEHARMFDTASRNFYTRKVHQRNGAVAHSALANKLARAAYYIMRDQVPYEEAKLFG

SEQ ID NO: 413160 - protein, 352 aa, unidentified
MRVYIGVDFHARQQTVSYLTTEDGEIHQCKLDHQKDDIAGFYRQFEGEVVVGMEASGYIEWFEEMLLKIGHQVWVGDSAEIRLRARRRQKNDKRDSLLILELMVKGEFPKVHRQTTESRQVLKQLRYRHRLVKIRTIAKNNVQSLALSGGLLAKRQYTSKWRQELQRLEREPMLGEQAKQLVKIIEEVTVEMKRVEQWLRKQAEADHRVMLLQTHPGVGLLTSLVLVHTLWPVERFRNGRKVTAYLGMDPVEDSSADRVRIGSISKQGSRLARYLVIEAASTAAKNDKGLKSFYRRLMSRQGKPKAKVAVGRKLLVRCFIMLRDQIDYEEFLRRGVEVRSSRQASGPLCLNP

SEQ ID NO: 413161 - protein, 435 aa, unidentified
MKAPPVTGQFIRLNSRKRWFVPEPLNPEMMRLQFICRHSGMRLRSAIADLRRQARNPYSLSWLLVWTAPYGIALCQDEAVERSQTREPSVNQIIRIGMDTSKHIFQLHGVDAAEQPVLRKKLRRSEVLTFFAKLAPTVVGIEACGAAHYWARMLTGLGHQVKLMAPQLAKPYVKRNKNDGRDAEGLCEAMSRPTMRFVPVKTPEQQAALMLIGVRERLVARRTQLSNAIRGYAAEFGLTAAKGLDKIEPLLAEIAANEALPKLARELFAMHGKEYAHLQAELKKIEARLMAWHRANADSRRLAGIPSIGLIGATALVMKAPDPHLFPSGRHFAAWIGLTPKDHSTAGKLRLGKITRAGDEMLRSVLVAGATAVIQQAKLGRGRPSPWLLALLSRKSPKLAAVALANKTARIAWKLMVTGESYHAERMPMASANAA

SEQ ID NO: 413162 - protein, 312 aa, unidentified
MDATVVGIDVAKDRLDVCVRPGGESFVVSRTGAGIEELTDRLKKLAPRVVAVEATGGFETVVAAGLASAALPVVVVNPAQVRAFAQALGKRAKTDPIDAAVIAHFIEATKAEPRPLPDEMTRLLADLVARRRQIVEMMAAEGQRERRLSDKRLRKSIVRLRKALEKELNELDGEIDDHVRGSPAWAEKEDLLASVPGVGPIVARTLIAELPELGSLDRRKVAALAGLAPWTRQSGQWRGKSFIGGGRKSVRSALFLAAMVAARHNPVLKRFRDKLVAAGKPKLVALIAVARKLLTILNAILRDKRAWQPETA

SEQ ID NO: 413163 - protein, 368 aa, unidentified
MNEHITIVGLDVHKATVVAAILPPTATRPTQTVTIENCPKAIERLVRRVAGEGRLVLVQEAGPCGYQVQRQMTEMGKKCVVVAPGLTPVRPGDRVKTDRRDAEKLARLYRAGELTEVHVPSCAEEAARDLVRIREDALEDRLRARHRLNKFLLRQGRMYRETKAWGVAHRAWLRGQRFEWPLLQQTFEGNLRAVEEAEARLESLNQQVLDFAQSGPYRMAVRYLRSLKGLDTLGALTLAVETLDFGQFERAPAYMSLTGLVSSEHSSGGRERRGSITKAGNAHLRRILVEAAWSYRLKNTVSPQLAERRRSCPPEVIQIARKAQDRLHRKFWRLVSRGKPSQVAAVAVARELAGFVWAIAQQVPAAAT

SEQ ID NO: 413164 - protein, 342 aa, unidentified
MSKFVVPGGDVSALLERFEHLQRKASARSGRSFRIVSIQEAGLDGFWIHRVLEDSGIESYVVDPASIAISRRRRRAKTDRIDGETLVRALLAHKRGEPRVCAMLHVPTPDAEDSRRLVRERKALINERIRHVNRIKGLLFSQGVSGYEPLNRDRRERLEALMTGDGRPLPKALKAQISRELARLELLIEQIGDVEEARDAVLAEAEHSTRGPALLLNLRGIGPEFAAVLWSEGLSRRFDNRRQVAAYAGLAPTPWQSGQISQDQGVSKSGNPRLRATLIQVAWLWVRHQPTSALAAWFKARVSQNGGHRKKSTIVALARKLLVALWKYVNAGVVIEGAVVRT

SEQ ID NO: 413165 - protein, 340 aa, unidentified
MIIATIGLDIAKSVFQVHGEDAAGRIVIQKKLGRAKMMAFFAKLPPCAVALEACGTSHYWGRTLRALGHEAKLIPAAYVKPFVKRNKTDARDAAAICVAAGRPDMRPVAIKSEEQQASRGLERARELLVKQRTQLTNHVRAMMAEFGIVAAQGGRGFAALTSRLSSSDPGLPATLVAALQALLTQAEALTPAIGAIEEEIVSIAKREPSMRRLTTIPGVGYLTAHAVVAAIGEGRQFGSARDFAAWAGLTPRESSSAGKRKTKGVSRQGESRLRKLFALGAATLMRNARMRPERATAWRRGILARRPMKMAVLAQAAKTARIAWAVLVSGKPYIEPATAA

SEQ ID NO: 413166 - protein, 419 aa, unidentified
MKSIQTKKVKVVNDKTLIVTVDVSKDKHMGYASCPDRTETKPFEFFNNGRGFNEFWSRISMVKKANNLEEIIVGFESTGPYAEPLIQFLKKRDVKLVQVNPMHTKRLKELQGNSPNKTDDKDPKVIADIIELGHALTVVVPEGVAAELRRLTQARERSMQRRTALLNQLQGLIFIIFPEFLQIMKDIKTKSAQYLIKHYCTPHGIAECGVERLTSILRKISRGKLGKGHAEELFNAAGSSVGITEGQKSIVFEIKEILAHIEACERFTDELEKEMSQNLEQIPYSCFILSIKGIGEVTAAGIIGEVGDFNKFNTIAEIEKLAGLDLFEISSGKHKGTRRISKRGRSLLRKFMYFAALNVIRKGGILHKEYHAFVDRGMPKLKALIAIARKLLRIMFALVRNHSEFTVNYSKPSKLKMAA

SEQ ID NO: 413167 - protein, 334 aa, unidentified
MNYIGLDIHKKNTQACMKNETGKVLLTGRFPSRPKDLNAFIEKVEEAGGPASFVIESTGFCIPVYDIIAGRGHQIKVAHPLKVKALTAGRAKTDKNDAEMLAELLRLNAIPESYIPPAELRELRALTRFRRSLVRNSTEIKNQIHAFLASRGIETPPEHRSPFSKKHQDSLRSLHLVQIDDLLDIYLILLTKIEKVEGEIERSNQRKDDVELLKTIPGVGDVIANTLVAEICDIRRFSSPENLFSYAGMVSSIHQSGEKGWAGPITKQGNARIRHIVVEAAYSHVRCSKDSDLTRFFERKKSEKGTKKAIVAMARKLLGVIYQMLKKREVYHAH

SEQ ID NO: 413168 - protein, 350 aa, unidentified
MTTLARQITGGVDTHLDVHVAAALDERGALLGVESFETTPKGYDKLLTWLRSFGTVELLGVEGTGSYGAGLTRHLHSEGVRVVEVDRPNRQRRRRHGKSDPEDAISAARAAQGGDATGEAKTRDGNVEAMRVLRVALASARKGRTQALNQMRSLISTGPDCVRADLRHLNVYRMLERASSYRPGTKRDLVSINKLTLRMLARRAIELEEEIKEIDAVLKPMVKETAPELSALSGVGTDIGSALLVAAGDNPERLRNEASFAHLCGTSPIDASSGKNQRHRLNRSGDRQANSALWHIVITRMVSDLRTREYIARRMKEGQTKKEAIRCLKRYIAREVYNNLPMEHLALDNP

SEQ ID NO: 413169 - protein, 427 aa, unidentified
MSPLLEQPFTAWVGIDWADTKHDICMQAAGDTRRESGCIAHQVAAIDEWANALHRRFGGLVAVALELAKGPIVAALQKYDFLVLFPINPATLAKYREAFQPSGAKNDPADAELALDLLVRHPERFSPLRPQSAAMRSLVSLVERRRQLVGDQTRLTNRLCDTLKQYYPQALEWFDDRGTVLFCDFLERWPTLRSVRQARTAVLERFFHAHHCRSASRISARIESIRAAAALTDDPAIIGPCRLHMLALVAQLRAVLAAIVQFDREIAQVACTLPDYALFESLPGAGPQLAPRLLAAFGEQRERFRSADELQKYAGIAPVTERSGKKSWVHWRLQCPKFLRQTFVEWAAQTINRSFWAGAYYRQQRAKGSSHHIAVRALAFKWIRILYRCWQTRTPYNETAYLNVLRERGSPLLGKLGDSVKTGCAFI

SEQ ID NO: 413170 - protein, 421 aa, unidentified
MKNSATEWEKVYDTCCGIDVHKKLLVACLNRGSKQEVREFGATTRELLELLDWLMKSGCEMVAMESTGSYWKPLFNILESCNMPAIVVNAQHMKAVPGRKTDVNDAQWIAKLLQHGLLQPSFIPDKAQRELRELVSYRKSLVEDKTRELNRLQKMLEGANIKLSGTVSNIMGKSAMTLLDEVLKGKAVDKSRIAQLRKEKKVASQLKASDEQLADDLNGFLTPLQTTMIREVLAHIKELDAHIRRLEDEIDRHMDEGQKEAAKKLEAVAGIGGDSAKAIISVIGTDMSRFPSDAHISSWAGVCPGNNESAKKKYSGKTRKGNKLLRSTLVVCAHSAIKNKKSYFSAQYQRICAHRGKKRAIVAVAHSMLVAIYHILKDGTTFQDLGAGYFNQFNRERKINSYLKKLRELGWEASATAVQPA

SEQ ID NO: 413171 - protein, 411 aa, unidentified
MDLLLREVPGDRLVVAIDPGKVTNRVWLTTGDRGLIGDPVSLPVLRDGVDELDRLIASSGVEGAPVIGIEATGALHRAWAAEVERRWPGSLRLFAPSETQAARAQLGSRRFKTDDRDCAALVWLLRQGAGRPTAPSAIEALLGAVRHRRQLVDARRVLQQRLHDQLNALCPGLSAPVGHGRALKLDDASGHAVLACAVAFTGRPPSLRSLRARSPGRLTDANARFWIERWKRLLPPPADAVLRAQRLGRDVDRWLGLREDITALEHQLAELLARTDGQILTALPGVAVVRAAAFAAHTLPIERWPTAEHLYSATGLAPASYQSASVTRRGRISRQGLAEHRDALMGIAWGLSQHSPAFAQRDREYRARGFRPIQARVALARHACRLTWRLLHTQQPHDDQRYDRARHRRGR

SEQ ID NO: 413172 - protein, 416 aa, unidentified
MDKMVEYCAGLDVHRDTVVATVRKPRADGGRASKTLTFPTTTAGLVALGDWLTTEQVTLVGMESTGVYWKPVFFMLEDRVPEVWLLNAEHLRNVPGRKTDVADSAWIAQLIEHGLVRPSFVPPPPIRELRDLTRHRRTLIEERTRVIQRLEKVLQDAGIKLSSVASTLLTKTGRAILDALLAGVSDPVELAELAKGRLRSKIPQLTEALRGTFRVEHHGLLVGQMLAHVDFLDEAIVTLDARITTTVAPYEPVLERVVTIPGIARKTAVSLVAEIGVDMDRFATAGHLASWAGICPGNNASGGKRKSGRTRHGSAWLKTALTEAAQAAARTKGTYLAAHHASIRGRRGTHKAIGATRHDLLIAYWHVVHDQVDYIDLGADWATRRHSEEHRVRRLVRQLNALGQHVTLTPTTADAI

SEQ ID NO: 413173 - protein, 357 aa, unidentified
MNKTYRLQEYVVRGKEIFVGLEDSKRTWKLAVRSEKMIIHQVSMEAKYAVLIGYLRNKFPECMIHLIYEAGFKGFNLYDQLTEDGIDCVVIPPHVVTEPKVSRIKTDKRDARRLAKVLEDHDFQDSCYVPDKERREDRQVSRTLIALQKDIVRTRNRIRKLLQFHGIEVGFPDRWGRDEFRALKKLEVSEPLRISLDIFLAQLEELWTHQLSLRAALRKLCHKERYRKAFTIARSLPGIGWFTAIRFVLELGEDLSRFTSGKKIASFVGLTCSEDSTGETEHKGRITGMGSGFIRSTLVENSWMSIAKDPVLLAKFTRVWHASGSRKKAIVAVARMLIVRYRACLMSGTPYVIGVAA

SEQ ID NO: 413174 - protein, 370 aa, unidentified
MSERTRFLGLDAHKATIAVAVAEEAGPAETWGTIANDPAAVRKLVARLGGPDVRLVAAYEAGPTGFALHRQLVGLGVECAVIAPSLTPVRPGDRVKTDRRDALKLARLLRSGDLTAIWVPTPEHEAIRNLVRSRADAKADELRAKHRLSKFLLRSGMHAPVGARAWSLRFESWLNQLRFEHEGDQIVFDDYRATVRAAGDRSQRLEKALRGCSLPPEQARLLAALQAFRGISFLTAVTIVAEVGDLRRFATAPQFMAYAGLVPSEYSSGAARHRGRITKTGNALLRHVLGEAAHHARHAPMRGAALRQRQEGMPAPIVDLGWRAQVRLHGRYRHLSGRLGRQKALTAVARELAGFVWAMGQAVAAEDVAA

SEQ ID NO: 413175 - protein, 441 aa, unidentified
MAMRTQDEGIVFPNAAGIDVGASTHWVGVPPRSTDEPVREFGPMTDDLNAMADWLIACGVDTVALESTGVYWIPVYEVLEQRGLTVWLVDARQMKYVPGRKSDVQDCQWLQKLMTFGLLRAAWRPNGEVCAVRAVARQRDVLVAEQASWVQRMQKALVEMNIQLTEVLTDVMGMTGQAVIRAIVAGERDPKVLAQHRNGRVKAKIEDITRALTGNWRDEHLFVLGQALAMYDDIGQHLAECDAKLKALLTELGQSEVDLGKAPRVGSKVRQEFDARQVLANWAGVDLTRINGLGLAAVMKILSEIGPDLSHFETVKHFCSWLGLCPGTKISGGKVLSAKTKRSANRVRQALKMAAMSLSRSDSALGAFYRRLCSRMDKPRANTAVAHKLARMVYFMLTRGEAFVDKGQQHYEEQQRLRSVAALKRRAAALGFDISPTSVPA

SEQ ID NO: 413176 - protein, 422 aa, unidentified
MSQEQARWFVGIDWATEKHDVCLLEESGTVVAERRIANTGAGLAELCTWLLEIGHGEPATVSVAIEVPRGPVVETLLERGFLVHAINPKQLDRFRDRFTVAGAKDDRRDARVLADSLRTDRQAFRRLRVDEPVVIELREWSRMADDLSQEHARLTNRFREQLRRFYPQALAFSEDLGADWFLDLWELLPTPAKAARTREQSVARILKARRIRKIDAAGVLNILRQEAPTVAPGTTEAATAHIRMLAASLRLVNRQLKECHHRLDALCDELAGDVPAGEDSEGERRGQRDVTILRSLPGVGRIVLATLLAEASQPLRARDYPALRSLCGVAPVTKRSGKSRVVLMRQACNHRLREALYHWGATAIQHDDVAKAGYAALRSRGHSHARALRSVSDRLLALACAMLEHGTTYDPARRRVGRQEAA

SEQ ID NO: 413177 - protein, 361 aa, unidentified
MTKPSKHLIAEVPRSVAKPRMTIGIDLGDVWSHYCTLNEDGEVVDRGRFRTTPSGVEKWFSDVPRARVAMETGTHSIWVSEQLQEMGHEVIVANVRELRAISHSNRKSDTVDAEKIARYARVDPEILSPISHRTVAQQETLTLIRARNLIVRLRTAAVNAVRGLAKPCGYRLPASSTLCFAKRCMAVLPPGLAQALGPVLEQIAAMTVKIQQYDRAIKRLTETEYPETQALLQVYGIGQLTALTYVLTLGNKERFKRSRDVGCYLGLRPKRSQSGDRDPQLGITKAGNIYLRSLLVECANHVLGPRGRDSTLRQWGLHLASRGGKQSHNRAIVAVARKLAVLLHRIWITQEPYIPFYTVAA

SEQ ID NO: 413178 - protein, 254 aa, unidentified
MSDPIKYTMIGVDVAKLKLDVAIGDDKVLTLDNNEDDFKKLLKIIPDSAPACFVMEATGGYERKLVSFLQSKNIAVAVINAKRVRDYAKAMGAYAKNDRIDAQMIRHYAQVAFAKGRLKLRESRTEIAQQLEDLLRRRHQLVGQRTVEKQHLEAAINKESVRSITRMIKQLDKEIERIEGRIKAYIEEDANLAKHKEQLMRVQGVGEVTALALLTQLPELGKLSNKEIAALVGLAPFCQDSGKKNRAKSDLWRA

SEQ ID NO: 413179 - protein, 344 aa, unidentified
MQHYVGLDVSVKETSVCIVDKAGKVIREVRVATEPVAIFAVLTEEPLAIERIGLEAGPLSQWLYSALAEAGLPVICVETRHMKAALSAQIKKSDRNDARGIAQMMRVGLYRPVHVKTLASQKRRMLLTSRQLLQAKALDIENDLRGTLRNFGLKVGMVGTVKFEARIRELVADHPDLAAIVEPLLIARRVLREQLGVLHRQLLEIVRHDEVCRRLMTTPGVGPVVALTFRATVDVPSRFSNSKAVGAAFGLTPRRQQSGEIDRMGGLSKCGDALMRETLFEAALVLMTHSRKWSWLKAWGMKIARHRGMKRAIVAVARRLAVIMHRMWVDGTEFRWTTKEAAAT

SEQ ID NO: 413180 - protein, 337 aa, unidentified
MHERTFIGLDVHARSVQAGVLDGLTGEVKSLAVPVATKALVAWVCAQPAPAVTYEAGPTGYELARALLAAGVPCLVAAPSRIPRAPGDRVKTDRRDAVRLARLLRLEELVAVRVPGLAEEAARDLVRAREDARGDLMRARQRLSKLLLRRGIVWEERAWTQAHELWLVRQRFSERPLQIAYEEALAAMLSVRDRRDALDAAIAVEAAMEPWAETVARLACLRGVSTLTAFALTVEIGDWQRFSGRSLAAFLGLTPSESSSGASRRQGAITKTGNAHVRRLLVEAAWQQRRAPGKSLRTRLARVRRTRDSRSIHARGGTRLAAARGRRSRRRSLGPGV

SEQ ID NO: 413181 - protein, 356 aa, unidentified
MNTRKVQDFVTKGREVYVGLEDSRKTWKIAVQCDRMLIHQTTMPAKYEILIQYLRNRFPECAIHLIYEAGFKGFTLFDRLMEDGIDCTVIPPHLVTEPKVNRVKTDKRDARRLALVLENHDFKEPCSVPDRERREDRQISRSLWALQKDIVCVRNRIRKLLDFHGVETSFPDRWGKKEIEAIKELTLGDSLKLCLVTLISQLEQLWAHRERLQEALKVLCSKERYKKAIAIAASLPGIGWSTAIRLVLELGEDLTRFTSGKKIAGFVGLGCSEYTTGETERKGHITGMGSGLLRMMLVESSWMAIRRDPVLLAKFTRIWKGRGSKKKAIVAVARMLIVRLRTCLVLNMPYAIGTIK

SEQ ID NO: 413182 - protein, 344 aa, unidentified
MGVTIGIDSHKSSLAVAALDELGRVAGAREFPNDARGHDALLRWSKAQGRDRVIGIEGAGSYGAGLARHLIDADENVYEVPAFLTHRERKRTPSKGKSDPSDAVAIARVAARGEGLSSPQRSDVFIDLKLLSDHRDQLVRARTRLINRTHTDLVISHPGYEKKLPKLNSKRNQDGAMTLLRGDRSVRAGLIRDRIREIRRLSNKIADVEKQIAGKVNESGTTLTELQGIGLVIAAKILGEVGEPARIRSKGAFAMLTGTAPLEASSGATKRHRLNRGGNRQLNYALHMMARARLRHHADTKAYVARRQTEGKSEKEAMRCLKRHLSNLVFRQLVADVRGLPEAA

SEQ ID NO: 413183 - protein, 338 aa, unidentified
MQTYAGIDLHSSNNFIGVINDQDKVLYGKRHTNRLDEVLRALKPFKDNLQGVVVESTFNWYWLVDGLQEHGYPVHLANPSAIQQYEGLKHTDDKWDSYWLAHMYRLGILPEGYIYPKAHRAVRDLLRRRLLFVRQRTSHILSLQSMISRNLGFKMSNNEIKKLKPEDAQELFDCTNLAFMAHNSIAAKEFLKKIILDIENKVKSQVKVREEFLKLLTIPGIGNILGLTIMLEVGDIGRFPQVGDYSSYCRCVESKRVSNGKKKGENNKKNGNKYLAWAYVEAAQFCRRYCVKAQSFYQRKAAKTKSVVAVKALSNKLARASYYIMRDQVDFDENKLFC

SEQ ID NO: 413184 - protein, 422 aa, unidentified
MHKERRWFVGIDWGSQEHVASLCDDVCKRIGQRKFAHGGTGLTDMIAWLLKESGGKPGEIHVAIETPHGPIVEVLLERSCHVYSINPKQLDRFRDRFTVAGAKDDSRDADVLADSLRTDMRAFRKLSSVDPTIVELREWSRIDEELKAEHVRLTNRLKHQLWRYYPQIYELANDVGAGWFLDLLEALPTPEKAAKTREKTVARILKQHRIRRFDAAHVLGELRKPALTVAPGTIEAATAGIRILIARLRLINSQLVDAEQQLDRLCKKIVGPVAGEEGENTPGQKNELRDAAILDSTPGIGRTVLASLLTEASDALQRRDYHALRALCGTAPVTKRSGKSCLVSRRRACNRRLRNAVHYWAHNAVQHDATSRAKYEALRAKGHGHARALRSVADRLLNVVCAMLRTGTSFDSSLASKKQAGT

SEQ ID NO: 413185 - protein, 309 aa, unidentified
MVIVGIDPHPGHHTAAALDPQGRVLHAETFLNSPDGLDHFVLWLEALDDVRLAVEGPTQPFFISWATRLMAEGYEIIPVPPQRTARARRSRTGKTDERDAQHIAAVLLADTNMPVLTMPAWLRPLQELVHTRLAVAVDLKVYRMRVKGMDDPNARDSVEQIILVLVQEIKRLEQELHRRVLALAPRLLDITGVGTVIAGMLLAEAGNPARFRSAHAFASYCGAAPVLWQSGAHHHVRVNHRGNRRLNWALHMVIRTRTRYDERTRVFLERKEAEGKGKRGAIRALKTYIAREIYDQLRSEWTTTPSLAA

SEQ ID NO: 413186 - protein, 339 aa, unidentified
MNITTVGLDLAKSVFHVVCFNEHFKEVKKRMLRRKQVLQFFAQLPPCQISMESCASSHYWGREIRALGHDVKLIPPQHVKPYLRGNKNDYNDARAIAEASTRPAMPFVSIKTVEEQDMQAIHRMRAQCIRDRTALSNSTRGLLGEYGIVLPKGLATLRKSIHGLLEDADNGLSDRFRNLLARRYEQLVGLDEHIAFYTNELELLSQQDDACQRLQTIPGFGPIVSSAFRSTIGNGTAYARGRDASASLGLVPRQHSSGGKNVLLGISKRGDRYLRGQLIHGARAVVLQAARKDDSLSRWINRIREERGWNKAVVAVANKMARIGWAILRHNTSYQPASV

SEQ ID NO: 413187 - protein, 436 aa, unidentified
MAVEFVGGPEQAEFMARVRGVEPGQVLLVPVDVGKSEAMAMVTDLRGEIVTPPFKFALTVSGVAALRARTSAAVEERAAVLCRVGVETAGHYHRTLVTSLVGGSVEVIELNPAAVKHARAQQLRSRQKTDERDLAAMADLMARGAGRPPQSRAEVLAAQLAWVGHRRRKVEIYRRMRQQIHAQIDLVFPGLSSCFSSLFETRAGRLILSELCCPDRVVRLGPTRLARFAANRGARMTRDKANQVVDAARDSLALPTPERAVLAEILAADVALFERVEADMVRAEAELARLLPDTPAAVLTSLPGVSTIRASAYGAALGDPHRFRNADAAYAFAGLSPASYDSAGKVRPGLGITKARSINLRAAILELGLGLGQSEESFINYRAQLIARGKPRQVAAVAVAHRAHRLAFAMLRDGQPFDPTQSADRSVMTTRSSPTT

SEQ ID NO: 413188 - protein, 353 aa, unidentified
MNSLTDLREVVDVVIGVDTHVLTHSAAVIDAATGGVLGEITVEATAQGYVELVEFAGEHATLRAWAIEGTGGHGAGLSRHLTGRQEIVVELDRPKRAKRRNGAKSDPLDAIRAGREALARTRLGTPRSGGDRQALSVLLAARRSAVRAATEAQQQVFSLVIAAPEPIRARFRGQKLPGMLTTAAGLRVHPSWDVETTTTVIALRSLARRFRVLTKEAAEHQKAILAIVRSWRPDLLEQLGVGPIVAATVLCAWSHPGRIHSEAAFAMLAGVAPIPANSGQVTNRYRLNRYGDRQLNRALHTVVQSRIRYHDPTRDYVARRTSEGKTGREIKRCLTRYIARDLYRLLESGPIAA

SEQ ID NO: 413189 - protein, 312 aa, unidentified
MDLLVVGIDVSKDWLDVAVRPTGASFTFGRTAVGIDDLIARLNTLAPKMVAIEATGGFETVVAAGLAGAGLPVVVVNPAQVRAFAQALGKRAKADPIDAAVIAHFAEATRPKLRQLADKTTRLLANLVARRRQIVEMISAECQRARRMNDKRLTKSVARLRKALQKELAELDALIGDQIRGSAIWAEKQDLLASVPGIGKTIARTLIAELPELGSLDRRQIAALVGLAPWTRQSGQWRGKSFIGGGRKSVRSALFVGAMVAARYNPQLKSFRDKLVAAGKSKLVALVAVARKLTTILNAILRDRRPWQPNLA

SEQ ID NO: 413190 - protein, 408 aa, unidentified
MNAVGIDVSKGKSMVAALRPMGEVALLPREFLHTEIGLEQMAYVITTLGEDTRVIIEATGRYHEPVAAALHKYGIYVCVLNPLYIKQSGGGSIRKVKTDKADAMKIAKYGLDNWVDLREYTPMDTVRQQLKLCSRQYNLYMKTVVSLQNNLISLTDKTFPGVNELFSSPERADGHQKWVDFVMTFWHCDCICRVSEKAFTERYQKWCKRKGYHFSTEKALDLYAGSCGHFTTLPKNDNTKLLITTAAQQLPAGKMTLAALRAEMTRLAMQLPEYNTVRAMYGVGETTAAQLMAEIGDVRRFPRRSSIVGFAGVDPGVDDSGKHSAKSVPTTKRGSPHLRKTLYQIVCTYLRKAPANELVYQFLEKKRAEGKPYFVYMTAAQNKFLRIYYARVKECLAAFDAQQDTTQS

SEQ ID NO: 413191 - protein, 323 aa, unidentified
MTKHITICAGIDTGKSKLDVAVEGSREQLQVENTSEGHAVLLAWLRRHRVKRVGIEASGGYEQPVVAELRRKRFVVVVFQPAQVRAYAKFHLQRAKNDKIDAALIAACTAAVRKIHPAPDPRLQPFAEQLTMIDQIGEDIARLKNRIESCRNTQIKGLWEEDLARLAKREKVELKALIASICKHPDLAKRLDLINSIDGIGLPTAVAILVRMPEIGQITREQAAALAGLAPYDDDSGEQVGTRHIEGGRQRLRHALYAAALAASFRWNKQLMTLYRRLIAAGKEHKRALVACARKMLVFANTIVARGTPWQDRPPENATLTAS

SEQ ID NO: 413192 - protein, 402 aa, unidentified
MKIFVGIDWSNEFDNVCIVNELEEIVNEFKIEISAQGFRYLVEQIFLFETNKRDVFIGIETDKNILADYLIGLGYTVYSLNPLCVNRFKDRYSACSKKDDNFDAYNISLILLKDRNRFEPVIRSSDSCETLKIHGKTLEMLIKDNTRLENRLKSELKRYFPAFTAFFKDFTSVPLNLLKIINKPGDIRNLSLEEFLNKVRFVKYMSSARKHEFYKVLSEQTIDIEPHIQKGYAMRIELLVNQILMIHDSIDKIEKEIKTLFNSNALADVFSSLPGAGPRLAPRLLMNFGDNKERFGSYQTVQCFAGTCPVTAKSGKTLLSIKVRRGCNKFFRDALYQFAFCSIQSEPWAMEYYKRQRDKGSIHSCAIRALSNKWVKIIFRMWKDGSLYNRDQFLNKRAKCAA

SEQ ID NO: 413193 - protein, 474 aa, unidentified
MSKKKQRYIRGKKEERFKRKIRGIEKEKILGISIDTSKDYHKALIFDFEGRILDGPFEFDIFKEGYENFKKRMRKAIEQTKAKRIFLGLEPTGSYHENLARHLKDDFKEVEFINPSATYANRAQDMLRGLKTDDIDLGAIGDLLMRGKGYEYNLEEEGVYLNLKEQTFWREKKLKMQTRLKNQIKARLNKIYPGMMSKYNDNKPLFSDIWKSRVARGLIRSKLTPAQIKIMKVEELKRKFKKVSCPLSSKWAEKIVEYTKRMLCPKDEILKIEMDLVNRDLNLLEALEREITFVERRMVEEVKKTDSSFLLGKIKGLSDIMIASFAGAVGRISNYNFGKQIFSKSGLSSKVNQSGKRNIKGLSIRRVGSKTLRCILFKMGDSVKKHNPYFALYYSYLTEKKGKPWKKAHIAVTNKLVRVMFAMLRDRADFNPPTAKIDYLEMLFNQRRKRRQEKKRRRKITLSAPSLVTKTSGL

SEQ ID NO: 413194 - protein, 384 aa, unidentified
MNKMKSNVACAGMDVHYKFSNVTFRDSGGRIVSRQRLDHPDRQHLAERLRRWPQGLPVVMEASFGWGWLSDVVEDAGLEVHLSNCFKVEQMRKARGWVKTNKKDADLVSLLPFEPCDWWKVWRAPPAVRNRREQMRFRGDLVALQTEVKNRIHALFHRHGIFHEFSDLFGGRGRRFLVELCIGGSEYLSPEALQALRGQVKLLDHLRRQLADVARVLRQQLAKTPLIRRLDHIDGFGLILSHVLTAEIGQIERFRNHKALASYSLLAPRSNDTGQEDPSQSPKGRHLGLRGNRTLKWAFLEAARGAVRSGGRWRAMFDRVTCGGTKDRNRGYIKVARELVKVVYVVWAKGVDYQPTPPARPGRQTNKNKSRSGTGQLYHPMVHA

SEQ ID NO: 413195 - protein, 319 aa, unidentified
MTYLNIGIDVAKNSHQACLVDEHGKQIGKYIRLENSRSSIESFREIVEAVAIKMNAIPRIGMEATGIYWYPIYNALSDWYEMNLYNPSQIRGFAQVNIRGTKTDKIDAKTIANMMGFGEAPKTSFEDKNRMEIKEYSRFHFKLKSELINLKRRFLRNVHMIFPGYDQFFSNVFGKTSKAILSKAPDPTDLLEMEEEKLFELMKENSRNYYTREKARELRDKARDAITSDFVKEPVIFELKVLSKLIEELEKQIKETENRILEIWGRVKDKHYLQTIPGITELKAAMIWGEIGEVENFKHPDQLVAFSGFDPKVKKSGQK

SEQ ID NO: 413196 - protein, 366 aa, unidentified
MIVAIESHQGALHMQISTIGLDIAKNVFQVHGIDAAEKVVVRKRLRRRQVLEFFKALPPCLIGMEACATAHYWARELTKLGHRLRLMPAKDVKAYVKRNKNDAADAEAICEAVRRPTMRFVRIKSAEQQGQLMQHRTRDVLIRQRTQIINALRAHLAELGLVAAQGNAGVNELRAIVTDEQNTRLPIDARASVIVLAAQLEALESVIGAIEKRIKMQHRSSEASQRVEAIPGIGVIGATAIVATVTDPTIFRSGRDFAAWIGLVPRQDSTGASRSSDRSPSRETATCGAFSSSGRSLCCGAPRRIPGSIPGSRNSWRGDPSRSWRWRSPTRWRAWPGRCWPMVAPIGRLSLLKLPKGARRGREEEM

SEQ ID NO: 413197 - protein, 351 aa, unidentified
MSDGTAVDRQFVGVDLHSRRSVICRIDAGGVELACRQIDNDAKTLVREVRRAGRGAPVAIEATWGWYWAVDALQGAGFEVHLAHPYGMTAMRKRKRVKTDAKDAYELANLLRLGSLPEAYIAPGGLRELRELVRHRQRLTQANTAVKAGIRAVLAKLNIHLPVSDLESGLGTALLDQVTLMPAYLHRLDSQRRQMLLLEAEIGATGVELDRRLKHHPDFRNLQKIKGIGPVLSAVLVAEIGDVHRFAGPDQLACWAGLTPRHYASDRTTRRGHISKEGSVLVRWAFVEAVQRQCEPSVRELRERIIARRGPGGRNIAKIAAAHRMLDIVYYSCATARPECSPTPATQHDLP

SEQ ID NO: 413198 - protein, 344 aa, unidentified
MVIIGCDFHSGFQQIAIFDNQTGEIQEKKLRHPDEAAEFYRSLSGPVRVGMEAGAPCQWFRRLLAECRHELWVGDAARIRAAEPRKQKTDRRDAELILKLMLEERFPRIWLPSEEERDVRQLLMDRHHRMRRRTQVKNQLQALALNQGLQKGRKLWSAAGMQQLRELPMMEHAARRRDELLRTVVELDSQIAELDVLVRRQAEGREDARRLMTHPGVGPQTALGMVLTLGEVERFESAKKVASYLGLIPGEYSSGNKQRLGHISKQGSSLMRFLLVEAGQTAVRGDEHLRRAYARLAAKKNRAVAKVMIARRLAVRLYWMLRREWTYAELARHAGEPGSFCGEQ

SEQ ID NO: 413199 - protein, 342 aa, unidentified
MRVGYSRLPRGVGPVSHLAARTSEPDAIAESLERYASDLRRVGVEASALGGWLQRALVARGFEAILIEARHTHVSLSTMRNKTDRNDARGIAQLMRLGWYKVVHVKSPEAQRLRALLGCRQLTSRKLVDVENEIRGTLRGFGLKVGKVSRGRFAARVLALAAQADTLVEEVIQRMLAIRETLLVEYRRLHQLVVKATVSDPVCRRLMTVPGVGPVGALAFRSGVDDPHRFKRSRTVAAHFGMTPRRHQSGEVDYTGHISKCGDREVRQALYAAAASLLLRYRKSCALRTWGLRIAKRSGMKKATVAVSRKMAVIMHRMWLDGTDFRCSRDLGAAAATVSATV

SEQ ID NO: 413200 - protein, 346 aa, unidentified
MLHAGLDLSRKRLDVCLLSDQGELVEQTQSPPDLDGLRSLAKRLDRHSEPIRGAIESMTGARFVHDTLEDLGWDVLIADAEKVKPFGSVACKTDKVDSQVLARLSQLALIPEIWLPDPTVREERELTRYRMHLVKHRSTLKHRIHATLMTFGRPCPVTDLFGKEGRALLDHLEIPEPWRTNVTASLELMDELDRKIADCNRRLQAGHADHPYVSLLETVPGIGKVLAFTIASEIGDISRFPSAKHLTGYSGLCPRVNQSGDKDRRGPLTKNGPRYLRWALIEATMHASRHPAYSERYQRNKRRLGKQRGAKVAQIDIARKLTVAIWHMLTRNETFAPRGATFRLAT

SEQ ID NO: 413201 - protein, 397 aa, unidentified
MNKKVHYIGLDVHKETIAVAIAPGGDTEVRNYGIIGGTLNALDKLIAKLQQPGLELRLVYEAGPCGYVIYRHLQKKGLHCEVVAPSLIPKKASDRVKTDRRDAEQLARLYRAGELTAIYIPDEDDEAVRDLVRARHAAVIDQRKARQRLKGFLLRLGFRYTGKSSWNDAHQRYLAGLSMPRPHQQIVFQEYIESINVESQRLERLTQAMENALSGWKWEPVVRALMSLRGVRVIVAMTLIAEAGDISRFDDPRQLMSYFGLVPSEHTSSDKRWQGGITKCGNGACRRVLVEAAWQYRFNPKVKRELRQRQEKQPKAVRDISWKAQQRLHQRYKILSARRKNKAVVVTALARELTGFIWAITRQFSPDKRKTAQPSSPSGARSRDYVLDPHKKFTKKK

SEQ ID NO: 413202 - protein, 339 aa, unidentified
MNSMAVGVDIAKQVFQVHYVDRETGEIVNKPIRRAKFLEHFANSVPCLVGMEACSGAHHWARQLMRLGHQVKLMPAEFVKAFNIRNKNDAADARAIWLAVQQPGKPVAVKTEIQQAMLALHRMREQLVKFRTMQINGLRGLLTEYGEVMSKGRAKLDQEIPAALGRIAERLPSALIDTLREQWNGLARLDEQVAEIERRMRDWKKEDKAVKAICEIPGVGLLTATAAVAMMGDPKAFSSGREFAAWAGLVPKQTGSGGKVVLHGISKRGDTYLRTLLIHGARAVLTHSKTPSPWVDQMKKRRPTNVVIVALANKMARTIWAVLAHDRPYRSNYVSVKPA

SEQ ID NO: 413203 - protein, 407 aa, unidentified
MIHARCAGLDVHKKSVYGCVICCGAAGEKQLEKRSFGTMTADLLSLADWLREHAVTHVVMESTGVYWRPVWAILEGQFALMLVNPHHVKAIPGRKTDAKDCEWIAELLQHGLLRGSFVPPTEIQDLRDLTRYRVELTQAQNRVANRIQKLLQQANVKLSSVASDAMGVSGQQMIEAIIAGEQDPARLADLAQRRLRAKIPELRLALEGRVRDHHRFLLREFLEEWRALVARIQRIEEEINRRMAPFEEAVTLWQSIPGVDRVTACNLVAELGVNMAQFPSAQHLASWAGLCPGNNESAGKRMSGTMRDGNKWLRRTLCQAAWAVTRKKDCYLSAQFRRLAARRGMKRAVMAVAHTILIIAYTMLKTGRSYHELGGNYLEQINRDQLQRYFVKRLQKLGLTVTVAPAA

SEQ ID NO: 413204 - protein, 323 aa, unidentified
MTRVICGVDVSSLSLEARIGRDGVGASFSNTAAGIAELAAFCQQHQVDMVAMEATGGYEQLALALLSAQGLGVAILNPRAVRQFAQSMGWLEKTDRIDAGVIAWYAETKRSRPVAPGSPQQQHLRARVTRLRQLTDLRTAQRNQQRLITDAGVQAAFSELLAVVARQIRELEQSIASLLEADPLWREFNRAFRTIKGVADRTVARLMAEMPEIGELSHKTISKLAGVAPLARDSGKHQGRRAVRGGRAAVREILFIVASVVGRYEPDFMVFQQRLRAKGKPPKVVRIALAHKLLVRLNAKAREVRQHLAIAEQQTAVALAVRG

SEQ ID NO: 413205 - protein, 347 aa, unidentified
MRFFTNNHQNYCGIDLHARSMYLCIQNQEGNVVLHRNIDAKPEPFLKAIRPYKDDIVVGVECIFTWYWLADLCAQHDIPFILGHALYMKAIHGGKAKNDRIDSRKIAALMRGGTFPMAYVYPAKMRATRDLLRRRNHLTRKRADLLSHIQNTNSQYNMEPFAKNISYKQNRSGVLEQFTDPDVRMSMEADLELITQLEKQRSKLELYITKNANNHDPQALYRLRSIPGIGPVLSLVILYEIGDINRFPRVQDFSSYARLVKCAKESAGKRSGTGGSKIGNAHLKWAFSEAAVLFLKGNPEGMKYKKRLVQKHGKGKALSILAHKLGRAVYYILKRDQAFDLQKFLNS

SEQ ID NO: 413206 - protein, 354 aa, unidentified
MKGAIGNSRVIVQGKEVFVGVDVHKVSWHVTVRAGGEEVFNGGIPGQYHPLRKLLDRFKTRQMKLAYEAGPCGFWLHDQLAEDGIEVTVVPPSLIPVESGNKVKTDKRDSRKLARLLESGLLKKVYVLTEEDRIDRELLRTRRQVLEHRNDLARQIKSKLLFHGIPSPFSTKTWTQAYLRWLKELIFEREGLRISFDVLIELYEYLTTELVKLKKRIMELSQSDKYRDKVKLLKGVPGIGTLIAMEILVELSDIERFGRADQLASYMGLTPSEFSTGEYVRQGRITRCGNKRVRTCLVEASWILIQKDPWMRSKYDRLKRIKGGKRAIIAIARNLIIRIRRILLNNEPYVVGVC

SEQ ID NO: 413207 - protein, 522 aa, unidentified
MSGSDEESVVHAEAAPVAGQPPGSDERPGSSGPPGGTDAVPACVPNAVHAGQPAVALLRFTRFVGLDVHKRMVEACVLDAAGVKVHREEFPCTPAELEKFARKWGGATVAAALEATTNTWAVCGILAPLFGKLKVSNPLKTKAIAQASVKTDKVDAAVLAQLLRCDYLPGVWAADEGTRRLRQQVARRTALVQSRTAVKNRIHSTLASELIAPPMARLYETKGLAWLKDAAMNEQARRFVDGDLRLLESLEKEIALLDKELASAAWRRDQARLLMTLPGVDYPVAMTLLAALGDITRFPDGDHAAAYLGLNPRTKQSGDHCYHGRITKQGNSHARWMLVEAAQHLDKHPGPLGVFFRRLAKRKTRNVAVVATARKLVTIAYLMLKNKEPYRYAQPKTVAAKLSRLRIKAGGKKRVGGNPRGSGRHPNYGKGQGARRIPSLPEACQAEDVPAPRPPEQLPPGEQRMLQETGTIAVVQSLHRPGSRPRAQGGRGKPATSEAAQGGAAAAPGQATESACPREVSG

SEQ ID NO: 413208 - protein, 349 aa, unidentified
MRFYNQQHRFYCGVDLHARTLSLHVLDAQGKALLAQTLAARPDAFLHAVAPFRDGLVVACECMFAWYWLADLCTAEGIPFVLGHALYMKAIHGGKAKTDKIDAHKIAVLLRGGMLPQAYVYPKGMRETRDLLRRRTFFVRRRAEALVHLTNTNSQYNLPPFPKKLAYAANREELDLPERFTDPSVRKSVELDLALIDTCDAQTRAVELYLTRTAKVDDPQAYARLRSVPGVGPVLALILLYEIHDIRRFPEVGQFLSYARLVRCTHESAGKKKGTGGNKIGNAHLKWAFSEAACLFLRASEQAKRWLARREKKHGKARALGALAARLGRAVYHLLRKEEVFDGKRFFAS

SEQ ID NO: 413209 - protein, 347 aa, unidentified
MKYYIGLDAHASTSTAVAVDEQGEIKLRETFPTTEGNLIGFLRKIPGERHLTFEECHLAQWLFVTLKEEADHVLVCNPVFVAKKSGAKTDFRDALHLAQELRTNHLKPVYHDDSHWIELRTLMNSYLDLVGQIVATKNRLKAVFRSSGLSTSGGDFYKSKDRANELPHASAKFAAENLFAQIETLEATKAGYKDFFHKNRLRYRPIRNLCTVPGIDLVRANIIVAVVCMPHRFKTKHQFWGYSMLVRHIQMSGGRIYGNRRVHGRRELRDAFLGAAESALRTETSLRDHYEALRAKGIAHKEAKISVARRIAAICLSLLKNNETYKDDFQEQLRERTTIRKTLNLEM

SEQ ID NO: 413210 - protein, 335 aa, unidentified
MQLFAGLDMHSESITGTIKDEKGNDIRVLKVDTTPEGVKYLFHRLQKKRIKAVFEASKNWSYYANLLKPYCAEIVMAHPLKVRAIASARIKTDAIDSNTLADLLRANLIPESYMPDLQIVELRELLRYRAFLSRQRANLKIKVRNILSREGKKCEFKSVTAKRARLWINHLELQDLNRRELDYVLSLIDNFSKEINKLDKTIDKEQYKYPEVDILKSVIGINTYSALLILAEIADFTRFDTPHKLSSYAGLAPSTYQSSTTCYNGRITKQGSKWLRWILGQCTHASIKSKKSHKLKRFFLRIQRKKGTQKAITATSRKMLTTIWHLINKNEYYSH

SEQ ID NO: 413211 - protein, 344 aa, unidentified
MIYLGIDYHKNYSYCTALNDSGQEKIDFKVSNTRECYQKMISKLGTPCHAVVETTYNWTVPYSMLEELGVKVKLANSAKLRVIAESQIKTDAKDSYILAELLRSNLIPEVFVPPKKVLQVKNILRHRLFLVRLKTQIKNRIHILLMRNHIKNPGLSDLFGKKGRRFLDNIKIKEPDSTLLAKHLNALDYISQEIYSTEALLGKYLKNNEYSKLLQTIPGFGKTLSALVALEICDIKRFRNPSKLSAYAGLVPSTHASGGHIFHGHLLRGANKYLRWAFIEAAWKSQVASPYCRALYYRIRKKRGPNVAIVALARRLSEIVYKILRDKRAYEERTHLTQYYSMNS

SEQ ID NO: 413212 - protein, 412 aa, unidentified
MQVLYARCGGLDVHQKTVVACVMITQPNGKVDKSTRTFATTTAALLTLADWLASLQVSHVAMESTGVFWRPIYTVLEDQFELILANAHEVKALPGRKTDVRDCEWIADLLRHGLIRPSFIPAKPIRVLRDLMRYRKSLVYQHTQEINRLHKVLETANIKLTSVVSDVWGKSGQSMINAIIQGESDALTLSELARGTLRGKLPQLQAALEGRIQPHHQMLLQRIFAHLRFLESSMQQVLTEIEAQMEPYQEAVELLMTHPGVQAVAAMGFVSEVGIDLSRFPSAKHFASWVGVCPGNHTSAGKRKHGKTTKGNSYLRALLAEIVWGISHTKDNYLSAQYHRLARRIGKTKAIVAVSHTVAVNFYHMITKRIPYRELGANYFDTLDRERLTKHTVKRLEALGYEVTLTQREVDV

SEQ ID NO: 413213 - protein, 331 aa, unidentified
MANDSSHEPAACTAPMYFGVDMAKAKFVWARHGDSHSQSLSNDEDGFESFVQALRGLPVGLIVVEATGGLERSLALWLVRHGLPVAVVNPRAARDFARAMGHLEKDDTIDAIALAHLAQTLAGKPNQAGIRFTPAVPEVQALQALVQRRVQLLNMRTAEQNRRAGSVRVLQKSIGAVIKTLDKEIAKLDRDIDDHLNRHFKELTARLGSIKGIGPVTCAVVQAFLTELGHVSNQRISKLAGLAPLNRDSGAAHGKRHIYGGRKIVRCTLHMAMRSAVRFNPVIKAYYDRLIAAGKSDKVAVTACSHKLLRILNAMARSGQDRNPELHGFTT

SEQ ID NO: 413214 - protein, 324 aa, unidentified
MSKYKEIYGVDISKDVFDVYAKKSGHHQFKNEEKGFTTFLKSLPKDSLVVMEATGYYHYRLAQYLYKQKVLVSVVNPLSVKRFIQMKLAKVKTDKSDAKAICEYGQMNEVPLYTALTDVQSECLQLFRLSDNYLKKRTATKNKLHGEEVLGTPSKFVYRSLKRDLKHLNKEIKEIESRLLELVKQDQQKQLTLLKSIPGMGVKTALFLIVVTDGFSKFEKASQLCSYVGITPTIRQSGSSVRGRSRISKVGNKKLRNLLFLCAFSACKHNKACREIYERIVNKGKSKKLALIAVANKLLKQAFAIAKSGIPYDENFVSVLSKGG

SEQ ID NO: 413215 - protein, 323 aa, unidentified
MTVYLGIDIASKKFDVAELCDGNYRCKAFENTSAGFLALYKWLGQSTMPDIHACLEATGDYGTSLATFLYENKIKVSVVNPARIKGFGASELSRTKTDKADSKLIARFCKAAAPDGWKPTPAPVRKLQALVRRISALNGMLRMECNRRENADANIQASLDRIISLLKTEIEVVRQEIKDHVKSDDELKKQDALIQSVPGIGAVSSNLILSFMSGKGFRKAKEVTAYLGLNPRHHQSGSSVRGKTRMSKMGDARLRSALYMPALVALRYNPDIKAFGQRLLLAGKPKMLVVGAVMRKLIHIVFGVLKSGTAYSSRIAVHSVVTS

SEQ ID NO: 413216 - protein, 414 aa, unidentified
MQVVYSRCCGLDVHKKSVTACVLVFDQQGRRSVRKKQFETHRQGLHRLVLWLYASKVEQAAMESTGVYWKPVWNALEKHFPLILANPYQVKSIPSEKTDPKDAEWIADLLAHGLIRPSFVPPREIRELRDLTRHRVKLVQDRNGVHNRIHKVLEDASIKLDTVASDILGTTGRAIIEAIIAGEDRPDWLADKAQGTLRTKRNQLRLVLRGQVTEHHRWMLRRLIGELKFLENEILSVEQHLAVAMQPHQPAIDRLCTIPGVNVITAWTLIAELGPDMGVFADARHVASWAGLCPGNRESGGKQLSQRTRKGNRWLRRALCQSAWAISHKKDCYLTAYFYRKAGTGIRQAIVATAHKILTIAYHVLRDGISYQELGGGYFDQLHPERARNRLLRRLERLGWEVSITPRKSSVPDS

SEQ ID NO: 413217 - protein, 394 aa, unidentified
MFYIGIDIAKNNHEASIIDQTGHSLCESISFRNSQDGCNKLFDLFNKFNINTDNCVIGLEATGHYWLALYSFLTDLGYDLKVINPIQSNSFRKMYIRQTKTDSKDAYIIAQIMRFGEYNSTSLSEENIMALRQLSRYRLSLVDECSDCKRKVIALLDQTFPEYASLFSDTFGATSKELLLKYPTPEDMLRVSSKRLVTLLNKTSRGIFTIDKANELKTAAKGSFGVKFAKDAFSFQIKQLIEQIIFIENQLEDLESEISFLLNQTNNVITTITGIGDVLGAIIIGEIGDISRFEEAPKLVAFAGLDVTVKQSGEFFGTHNKLSKKGSPYLRRAIWMAATVAAFKDPILSEYYQSLRARGKHHLTAIGAVSRKMCNIIFAVLRDNRPYEKLPSIK

SEQ ID NO: 413218 - protein, 317 aa, unidentified
MAALICGVDVSSISLDARVGSQGSEARFENTPEGVGRLIAFCHEHGVELVAMEATGGYERLAFGLLWGSSVPVALLNPRAVRRFAQGMGLEEKTDRIDAGVIAWFAEVKKVVPTEPASAAQARLEAMVTRLRQLTELHAAQRNQRLLVSEPSVLDSFCELLALVKAQIRALETAIAELIAADPLWQQLDTAFRSIKGVAGRTVSRLMAEMPEIGTASNKAVSKLAGLAPLAKDSGKSQGKRVVRGGRSNVRTILYVVADVVRRYNADFAAFADRLRAAGKPKKVIRIALAHKLLVRLNAKAREVRQQHSTAACSATC

SEQ ID NO: 413219 - protein, 407 aa, unidentified
MQRRENLLYVGIDLHKETHTAVMVNCWNEKLEVVVIENKPSEFKKLAEKVNRKSNHLGLEPIYGLENAYGYGRSLAVWLIENGHKVKDINPALAYDQRKSAPMLRKNDEHDAYCVATVLINQLHTLPDAKPKDNEWTLAQLVNRRDLLVKDGIRFKNGLHEQISMAYPSYSKFFSEIDGKCAMYFWKIYPSPVHLQVKTAEELTIEFKEISPIIRKDKAEMILDCIQHDGNTFREYQESRDFITTSLVRDLEHQKEELAGLDKENEKILLSFEYKLTSMPGIGTSIASKLIAEIGDIRRFPSADKLARFAGVAPVKFSSAGKGKEQSSRQGNRQLHGLFYFLAVTMVSKPKNGVPNHPVFYDYYIRKIGEGKTKSQALVCIMRRLVNIVYGLMKNKTEYREPIREEQ

SEQ ID NO: 413220 - protein, 347 aa, unidentified
MRFYTKTHQHYCGIDLHAKTMYLCILDSEGAVALHRNIPCEPEKFLRAIAPYREDLVVAVECMFTWYWLADLCAREGIGFVLGHALYMKAIHGAKAKNDKIDSKKIAALLRGGLIPKSYVYPAEMRATRDLFRRRTHFVRHRGQLLAHIQNTHHQYNRISPGKRIAYKSNREGIAEAFDDIAIQTNLATDLELVDYYDAVIGNLELTVLRQARSHDRDAYERLKTIPGIGKILALTILYEIHDINRFPRVQDFASYCRLVKCQSSSAGKIKGTSGAKMGNAHLKWAFSEAAVLLLAKCPEGKKLVDRLAKKHGKGKALSILAHRIGRAVYFMLKRKRAFDLERFLRM

SEQ ID NO: 413221 - protein, 338 aa, unidentified
MFVIGIDPHKRSHTAAVLDDTEALVGQVRVNADRWQRDRLLRFAAPFEPRTWAIEAAGGLGALLAQQLVAAGERVVDVPPTLSARVRLLDSGRTDKSDPHDARSAAIVALRHARLRPVRPVDHSAVLRLLANRHHDLTASRTRTICRLHALLCLLIPGGSSGRLSARHASQVLRGLRPVEVVDIERRRIALELLGDVRRIDDQLEALVKRIGLAVVASGTTVTDVYGIGPWAAAVIVGHTADVTRFPSAGHYARYNATAPLEASSGPRVRHRLNPRGNRQLNHALHVAAITQVSHDTPGRAYYLRKVAEGKTSKEALRALKRRISDAVYRQLVADTRP

SEQ ID NO: 413222 - protein, 358 aa, unidentified
MEPIIGEDDRVFATIKVTPDYKNILLFIENLKMKLGLNDEYDIQCGYEAGCLGYSLYNQLTAAGVKCVILAPTTMLTPQGVRIKTDMRDAYMIAQCLSYGGYHAVYIPTEDDDSVKEYLRMRNDHKLALKKIKQQINAFCIRHGFCYDGTKWTQAHLKWLKKLEIRNALYRETLDEYMASYEEQEAKIERYDKRIEEIAEQAKYHDKVKKLECFLGIKTHTALSLIVETGDFERFAKGNQYASYLGLAPGENSSSDSIHRLGITKAGNSHLRQLLIEASGGICKGAVGHKSKGLRARQNGNTAEVIAYADKTNTRLRSRYYKFIRHGKKRNVTVAAIARELACFVWGMMTDNIEMKAA

SEQ ID NO: 413223 - protein, 348 aa, unidentified
MIWIGVDAHTQLHQASAINEEGIVGERRITNEPAQWAALLDWARQWPERVWAVEGAWYRGRGLAQYLATQGEAVHEVNGRWTAGRRRGMRKPGKSDRLDARSVAQLLREERPTLPRVYAEEDELAPVQLWSRLAAELTEDRTRLLNRLHNLLLLCDPQYNSTLPELTSKAGVGAALAYQAPGASALARERERAVRQTAEQLALLESQIAELERKLERVTRGSFRALRQIEGVGAKIAATFIAELGRRRAGFGDQQLAAMAGAAPLEASSAGGTRHRLNRGGNRRLNLALHRIVLTQGRIYPPATAYLARRRTEGKTAREARRALKRHLCRRIVQAWRACFEQSLAAAA

SEQ ID NO: 413224 - protein, 407 aa, unidentified
MNDFGKRYIGLDVHKHYLIALGVDEELQVVLPVELVHLEAWMKKTLTKQDEVVLEMTTNTWQIYDELAEYAGTVTVVHPPHVALITRSQVMNDKIAASILARLLAKGLLVGIWVPPQEVRELRGLVAQRQKMTRLATQAKNRLHAVIQRHHLSVPEGNPFGKSNNGWWQALSLGRLEKMNLQSDLETLQFAAKQQSRLQEEMTSIVAENEEIGRLLHLAGFGVITAVTVYAAIGNIRRFAEAKNLVGYAGLGSRVHDSGLTTRTGRITKAGRRDLRVALVEAAHVAANSHPHWQAELARLQPRLGYNKAIVAIARKLLISVWHILSRKVTDRFAEPEAVAQKMLRFAYAVGKENRPGQQTAAGFARDRLDVLGLGQALTSISWGSKKPIPLPPSSLTETERSDVPNR

SEQ ID NO: 413225 - protein, 393 aa, unidentified
MRFAGIDIASETHVLAVVAADGGVALKATPFTEDDLGYQKVLTLLGTPGEVLIAMEATGHYWKNLFVVLAAAGHRVALLNPLRTHRFAGVDLERTKTDAIDALGIARFAAQKHPAATPLPDALTEELRELVHLRARLLQDFGDRVRQLHRLVDLGFPEFTHYVRTLDSELASAILRDYPTAAAFRGVSVRRLAALRYDGRHHVGLDLARLLIDAARRSVGQHHSATYRLQIRYACDDLDTLRHRLRDLDRDLDGKLREHEVGRLLTTIDGIGTHTAARVIAALGDPAHFRSGSALAAYVGTIPALKQSGKRQSVRGAVTPIGNAQLRAALWMPTLCAVRNNPWLRAYYQRLRARGKLPKVALVACMHKLLLAIYSVAKHRRPFVPHIAIESAP

SEQ ID NO: 413226 - protein, 418 aa, unidentified
MITPRIDSFTAIVGLDWGDSKHDVCIQASTGEGREFEVIAHRPAVVDQWIKSLHDRFGGPIAVALELSKGPIISILQKYDFVVIFPINPSTLARYRSAFKPSGAKDDPTDAEIALDLLLRHPDRFKPLQPQSTDMRALAKLVEQRRQLVADKIRLTNRLRSSLKEYYPQVLEWFDHIDTPLFCNFFARWPTLVQAKRARTNTLQRFFHEHNMRFEKVLASRIEAIKNATPLTLDNAIIMPHRMLAQVLVEQLQLMLSAIKEFDAEIDSIAKAQPDYTLFRVLPGAGPSLAPRLLVAFGEQRDRFTSAEDVQKYVGIAPVTERSGKKHWVHWRWQCSKFLRQTFVEWAAQTINKSYWAGEFYRQQREKGCTYQAAVRALAFKWIRIVYRCWQTRTLYDEAKYLKALERRGSPLMVKKTA

SEQ ID NO: 413227 - protein, 322 aa, unidentified
MTYIGIDVSKDSFVAAYPTKSGYTTKTFPNTTTGVRKFVNSLPADCHCVMEATGNYSMLLLYLLQQANIIVSMENPQKIKHFARAMLSTTKTDEIDAKLIATYGEKMTPAPYKIPTESIILLKQKRTVLRQLKKQLTATINLQQSLAVLPKQDPASKVAIEQTVKFLRKQISKMEEEITNLSTKEFGRQVKLLTSIKGISVTIASALILATGGFTYFSNAKQISRFLGLCPTYQQSGTSVNFKGHINRNGDTHLRSQMYVAAFASIRCNAACRETYERLRARGKSGKLAVVAVANKLIRQAFAVVTNNQPYIEGFVSSYAKN

SEQ ID NO: 413228 - protein, 312 aa, unidentified
MDAIVVGIDVSKDTLDVHVLPANESFAVPRTGAGIDDLITRLAPLSPKRIALEATGGFESVVTAALAGAGLAVVVVNPAQVRAFAQALGQRAKTDAIDAAVIAKFTAATEPALRALPSQTTRQLADLVGRRRQIVEMITAERLRARSLTQPRLAKSFARVRKALEKELADLDAGIDDNVRGSPLWAGNEQLLISAPGIGKIIARTLLAELPELGQLDRRQITALVGLAPWTRQSGQWRGKSFIGGGRKSVRNALFMGAMVAARFNPTLKRFRDKLVAAGKPKLVALVAVARKLLTILNAIIRDQRPWQQNAA

SEQ ID NO: 413229 - protein, 334 aa, unidentified
MIVIGVDVHKYSLTAVAVDEVGRTLADLTASDEQALLAWSTSLPVERRWAVEDCRHVTRTLEKALVSAGEQLVRVPPKLTAPQRRSGRVRGKSDPIDALAIARAALREPGLDRPRAGEERLRELRLLLDHRDDLVDERRRAQQRLRWHLHELDPLLGVPAGALDRPVWLDRIARKLARSEQTLQVRIARELVGRCRALTRTILELERELAVTTAQTAPALLELPGCGAVTAAKLLAEIGPIDRFQTDAQLARHGGVAPLEASSGRVRRHRLDRGGNRQPNCALHRIAATQARVHPVARAYLERKQAEGKTRREAIRCCSVEGVHLRRLSARSAI

SEQ ID NO: 413230 - protein, 317 aa, unidentified
MKTVPFEQVILRGCGIDVHKDMVVATISGEGLKTETRSYKTFSSSLTELKEWLLSSGITHVAMESTGVYWKPVYKILECPDMKVWIVNARHIKYVPGHKTDKKDSAWICKQLLAGLLKPSYIPEREQRELRDLTRYRNKLIQHVSSEKNRIVRILEDCNIKLSSVVCSLDGVVANKLIDMLIDKGHVTMDDITCIYHKKLEASPELLYQACEGFIEPHHIYMLQTIRKDMEQTKAIIADLTCRIKEVLSPYENVMELLQKIPGLSRKTVEDLIAEIGVDMEAFPTEKHLASWAGVCPGNNESAGKKKVVEPPMATNS

SEQ ID NO: 413231 - protein, 343 aa, unidentified
MQTISTIGLDIAKSVFQVHGVDANGLVVIRRQLKRRYVLAFFEKLPSCLIGIEACASSHHWSRQLQALGHTVRLMPPAYVKPYVKRQKNDMADAEAICEAVTRPNMRFVATKTPEQQSCLTLHRTRHLFIRQQTSVINAIRAHLAEFGIVAPVGRNGVAQLLGIAADANDKRLPEVARACVIALGAQLRMLKAQILEFDRMINAWHRSNEASRRLDDIPGVGPTLATALIASIADPKVFRSGRDFSAWIGLVPKQNSSGGKDRLGNISKRGDRYLRSLFTTGALAVIRYAKIHGTRHRPWLTALLARRPTKVAAIALANKIARMAWAMMARGERYKEPAALAA

SEQ ID NO: 413232 - protein, 408 aa, unidentified
MQVLYPRCAGLDVHKDTIVACVRCVSAPEHHEVRSFDSTTSGLLALADWLALHGCTHVAMEATGVYWKPVWHILEGNFELVLANAQHIRNVPGRKTDVNDAMWIGDLLAHGLIRSSFVPPAATQELRDLTRTRKQLVREISQHSLRIQKVLEDANLKLGSVLSDVLGRSGRAMLKAIVDGEDNPERLAALAQGSARKKHVELREALNGRITEHHRTMLKLHLDIIGALERTLAELDALVGKALAPIRQRARLLTTIPGVSNLTAQVLLAEIGVDMTRFADAGHLVSWAGLCPRNDESAGKRRSTRVRKSGTWLKTALVTAAWAAVRVKTSYLHAQFLRIKARRGGKKAILAVAASMLTAAYHMLRDGVEYADLGPDYFNRHDVNKTIRRLLKRLADLGCQVDPMSHTV

SEQ ID NO: 413233 - protein, 411 aa, unidentified
MRIVYQRCCALDVHKNSITACVLVWDGQEAVEERKKDFGTYKKELERLRFWLMACKVTVVAMESAGVYWKPVWHVLERQRQFKLKLVNAQQFHGVDGQKSDQIDASWLGELLQCGLLKGSFVPPQWQRELRDLTRLRVSLLQDQNRIQNRLEKLLEDANLKLGSVASDTLGVSGRRIVKAVIAGDKDAGWMADYAKGTLRGKRKELEQALHGFVTDHHRTLLAMLLRQFDALESDIECLEAEIRRRLAPHQDVVNRLAEIPGFGEVSAWTVIAELGLDMKIFRTPERAASWSGLCPGNRKSAGKRGHGRTRKGNRWIRRGLTQTALAVSHSKESYLRSFYWRIASKRGAKKARVATAHKQLKIAFLIIRDGVRYQDLGSNYFDRRNAERTKRRLVERLERLGLKVTLEPAA

SEQ ID NO: 413234 - protein, 367 aa, unidentified
MKKISTVGARQTRNFREQQLTIGLDLGDRSSWYCVLDEGGEVLLEQRLGTTPKAMKEVFGKVPRSRIALETGMHSPWVSRLLSELGHEVIVAHARNVRLIGESRRKDDRFDARTLARLARIDPQLLAPVQHRSAQAQAHLMVIRARAGLVRARTSLINTARGLTKSYGERLRGCSPRNLNAEKARQLSPELQAALEPLLAAIEALSERIYEYNQKIAKIARESYPQVARLEQVKGVGTLIALTYLLTLEDPQRFRKSRDVGCYVGLQPGRRNSGQSEPQLHISKEGDPYLRTLLVQGAHHILGPFGADSDLRRWGLKLAERGGKNGKKRAVIATARKLAVLLHRLWVSGEAYEPLRHSRAMPLPAAA

SEQ ID NO: 413235 - protein, 402 aa, unidentified
MADLFAGIDAGKSHHHCVVIDADGNRLLSQKITNDETVITNLIDEVNTLTDPSGSVTWATDLNRGGAALLIALMNAHGQTLLYIPGRTVYNAAATYRGEGKTDAKDAGIIADQARMRRDLQPIRLGDDIATELRLLTAHRTDLTCDRTRAINRMRASLGEFFPGLEAAFDYSTSKAALLLLTGYQTPAEIRRMGAKRLTAWLKKRGAKSAARVADIAVDAAHKQHTTVPGQDAGAMIVARLAAEILRLRDDITGIENRIENRFREHADAKILLSMPGFGPLLGAEFTAATGGGIAQFDSANRLAGIAGLAPAPRDSGRISGNHHRPKRYDRRLLRACYLAAQAASRWCPVSKSFYDRKRAEGKSHKQAILALARRRINVLWAMLRDRTMFSQGIAPIPECIT

SEQ ID NO: 413236 - protein, 344 aa, unidentified
MKKIFIGIDFSKEKFDATLIKAEGLKECAPSVHEVFDNKASGFRRLVRWVKSQSEEVPADAWLFCGENTGGYSIALSNYLYASGYDLWLECAYKIKHSAGIQRMKNDKADSRAIAEYAMRNHDKTILYKPQSASLTCLREVFLYRHSLVRQKVSLQVRRNEKRLTQGKSDIKTFMSFTSKHLITEVNKAISKCDDKIKEIIASDDELKEIFEIITSMPGIGVINATCLMVYTDNFNKFELNSRKIGCYYGIAPFGRQSGSSIKGRPQVSPFANRMIKSLLSQAALVATKTDISIYNYQQRLIQRGKHPLLIQNNIKNKILHRIVAMVKNRQKYNPDYIETKNVA

SEQ ID NO: 413237 - protein, 380 aa, unidentified
MLRRPVEPTAPVPLMGWTAPDGIKECQTGVVSNQAREPSVKKASTIGLDLAKNVFQVHGADEAGAVVFRIKLRRDKLLAFFADHPPCVVAMEACASSNHWARQIAKLGHQTRLIAAHYVKPFVKRQKNDAADAEAICEAALRPSMRFVRVKTEEEQASAVVFRARDLLVRQRTQIINALRGHLTEYGIVAPSGAAHIARVVALAADPTLAIPDAARTCLAMLVDQLQAIAKNIAKLDREIAARARRDERARRLMTIPGIGPVTAVAITALAAPPETFTKGRDFAAWVGLTPSQRSSGGKERLGRISKMGERTLRRLFIMGAAAIVRWAVRGRGPANPWLMSLLGRKPRMLATVALANKMARTVWALMAHGGTYRAQAATA

SEQ ID NO: 413238 - protein, 482 aa, unidentified
MKKKNIYTNQSQELLTLFEEAGNGAKVMCVPIDYAKKDHVAMLCNGNGHILRKPFSVKNSPEGIEYLTEQITRSCKHRQIDLKHVFFGGEDVGSYAENFVNTLRSGGWIVAGVNAHDAKEQRTNMQASTDRLDLMGIASMLLNRRGNCSPAQSGIYRNLRTCVRHRKKLVAMSTEVKNRMHTVVDRLFPGFLDEKKSGVLSFSESSLYLMEDRFSPHQIRRRKRQKLIKILKRYGTAKPESTAAKLQKYAAHVLNTPNEYITTLQLSLTQHVKHFRCLQDSINQLEHEVAVWLAQTQGAFLTTFRGIGIVLAAGVSAEIGNPHEQAPLNNLVSYSGIIPRVKQTGGAEGKTYTGKVAKRCNHILKDYVVQSGNHMGLHGPEELMADYKRREAAGQHADFGIGRRYLRTAMCLMRTSQIYMPEQLRNTKVKPEERVGYYLTIWPYLRSKWKKAGALEAAFEKDRPLGQWRCMVQELYGIKLKL

SEQ ID NO: 413239 - protein, 415 aa, unidentified
MNNSKSQKARFIKNEMIVGIDIAKHIHYARILFPDGSESPPFSFNNNKEGFDALVGWFGFQKNKRHQESITIGLESTGHYWEALAFFLDSTPGIKLVQVNPKHVKKTKELYDNSPGKTDQKDAGIIAMLISMGRYQRLVLPRGHFAELRSYAKLREQKVVELGVQRNILHSVVDRVFPEYGDIFNKIESKTSLAILKKYIVPERIVRAGLKRLSAFIRKASRGQHSAERAKMLIEAASITIGTKEGLEARTFIIGRTVETIERIQEDIAVIGGKMNAVLHNIPYANRLMSIPGIGSISLAVILGESGDFGRYKRSGEIIKLAGLNLFEISSGKHQGRRHITKRGRSLLRKSLFFVALRTVKTGGAFREDYLRLTETNQMQKTKALIVISKKILRVLFALVRDGVEYKQSTLQLAA

SEQ ID NO: 413240 - protein, 425 aa, unidentified
MNYKQNEKINQVKESTLVVGIDIGSTKQYARAFDWRGIELGKVFTFSNSREGFEAFKAWMQHLQDKYRKSDVIVGIEPTGHYWFDLGAYLEDEGILLVMVNPYAVKQTKELDDNSQSKNDRKDPKVIAKLVTEGRYSAPYTPDGVYADLRIMVANRKRLIREMTQIKNRFARWFAIYFPEYTDVFGDYEAQSSMLLLKKVCTPEAIVELGAEKINQIWRDAKLRAVGMKRATTLCETAKRSIGLKKGSSAARYEMKLLLEDYEYKKAQLDAVMEEIEKLCRKIPESEQMLAIKGIGVITVAGFLAEVGDVRRFESPRQIQKLAGLSLRENSSGKHKGQTTISKRGRSKLRAVLFNAAIPLIAKNPEFKSLHEYYTTRANNPLKKKQSVIAISCKLIRVFYAILAKGVTYDAQKLISDIHRQPQVA

SEQ ID NO: 413241 - protein, 416 aa, unidentified
MSTYFNQVYDDNRWWISRYQTLEREVNLMIYAGIDIAKLNHFASALSSDGEILIEPFKFTNDNDGFHLLLSKLSSFEKNSLIIGLESTAHYGDNLVRYLVAEFYQVCVLNPIKTCQMRKNNIRKTKTDKVDTYVIAKTLMMQDNLRFVSFFDLDMMDLKALGRFRQKTIKQRTRLKIQLTTYVDQVFPEIQYFFKSGLHQNAVYALLKEAPSPKEIASMHMTHLANLLKVNSHGHFTKEQAKELRVLAQKSVGANDSAISIQITQTIQQIELLDSQLEKIEVEMTDIMKFNDSVIMTIPGIGYINGGMILGEIGDIHRFSNPNKLLAFAGLDPSVYQSGNFQAKTTRMSKRGSRVLRYALVNAAWNVVRNNATFKAYYDAKRAEGRSHYNALGHCAGKLVRVIWKMLTDEVEFNLE

SEQ ID NO: 413242 - protein, 344 aa, unidentified
MDHFAGLDVSVKETSVCIVDDTGKIVREVKVASEPEALLAVLKSHAYRFKRIGLEAGPLSQWLFSALAEAELPVICVETRHMQAVLKAQVNKTDRNDACGIAQMIRAGLYRPVHVKTLRSQKLRMLLTHRKLLQSKAIAIENDLRGTLRNFGLKVGLAGTVKFEARIRELVANLPDLAVLVEPLLVVRRVLREQFVILHRRVLAIVRDDEVCRRLMTTPGVGPVVALTYRATVDVPARFRKSKAVGAVFGLTCSKYQSGEIDRSGRISRCGDEMMRVMLYEAAQSMLRSKKWSWLKAWAMQIARRRGMKKAIVALARRLAVILHRIWVDGTEFRWTREQAPAAA

SEQ ID NO: 413243 - protein, 405 aa, unidentified
MMVIGVDTHKRSHALCAVDEGTGRVRGSREIKADEAGHQAAVRWARGLDSERVWAIEDCRHVSRRLEQALLAAGERVIRVAPNMMGASRRSQRERGKSDEIDAQSVARAVVKDGVESFPAAYLDERAMEIRLLFDHREDLVRERTRMQNRLRWHLLELCPEVEAKLKRGALSQLRALERLDRRLRQLSPCVRLRIAREELGHIRALTRQADQLERELLELIRAYRPALLDEQGCGALTAALLIGRTAGAERFRSDACFGRQSGTAPIPCSSGQQTQHRLDRGGDRQLNRALHTIAITRAQRDPATKEYLARKEADGKTRKGALRCLKRYLARRFHRLLSEPPLPAQPTITGEQVPQPAQALDAPACDASRDMSRTVQPSAIAERPAPKPETQRINAAPNPMICIA

SEQ ID NO: 413244 - protein, 343 aa, unidentified
MKLMRIGVDLAKNVFQIHGVDCHERPIWRQRLPRDRWLQTVLEKIETGCEIGMESCGGAHHWARQLQARGFRVKLIAPQFVKPYVKSNKNDANDAEAICEAMSRPSMRFVAIKTIEQQDIQATHRIRAGLIEQRTAKANQIRGLIAEYGLVAPKELRMLRRAIPCWLEEADNGLTLRLRRLLDGLWGDLCTLDKRVGELDDEISAIAASEPNAVRLQQLRGVGPKIATALIAAIGDARQFANGRQLAASLGLTPRQHSSGGKDRLLGISKRGDAYLRTLMIHGARSVLRTAKSKDDRLSQWAVRLAERSHPNVAAIALANKTARMAWAMLRNETDYQPDKAAA

SEQ ID NO: 413245 - protein, 318 aa, unidentified
MKNVETYAGVDVSKETLDIAVHPRQQFKSFRNNEMGINGAVTYLRSLSPSLVVMEATGGLETSLAAALSASGIPVAVVNPRQVRHYAKSVGKLAKTDKIDAQIMADFAVAVHPEPRPLADSQTQELKDILTRRSQLNEMITAEKNRLQRTRKPVSDNIKAHITWLEQELDKMDSNLNNFIQKSPIWREKDNLLQSIPGVGPVLSSTLLAELPELGTLNRKQIAALVGVAPLNRDSGKFRGKRSVWGGRAKVRAALYMAALVATRYNAAIHCFYKRLIAAGKAKKAAITACMRKLLTIMNAMMKHQTPWHYHLNQAVIS

SEQ ID NO: 413246 - protein, 413 aa, unidentified
MEVLHPRCAGLDVSKKDVKVCVRVVPVGRVRAKTQVSTWSSMPAEVAKLREYLIEQDVTCVVMEATGDYWKPFFYVLEDGPFEVMLVNAHDAKNVPGRKTDVSDAAWLAQLGAHGLLRASFVPDEPIRRLRDLTRTRTAITRARVRETQRLEKVLEDAGVKLSVVVSDITGTTGRSILTALVAGERDPEVLADLAVRTLRAKIPELSASLAGRFTEHHAFLVATHLRLIDQHDQAIAAVTARIEDLMAPFQPARDLIVSIPGIGVPTADIVIAETGADMARFPTPGHLASWAGVCPGHNESAGKSRSTKARPGNRHLKGALGASAMSIAAQKHTFLAVKYRRLARNRGKQKAIVAIERTLLTIIWTMLTTGALYDEPGPDWYSRQHPDRAKRRALRQLHDLGYDVTLTPKGAA

SEQ ID NO: 413247 - protein, 354 aa, unidentified
METAYDGRQVVGMDLHRRRSVLVRMTEDGRRLGTAKITNSPAELRRAIARAGKHPRVVLEATYGWYWAADVLAAAGAEVHLAHPLGVKAFTYRRVKDDVRDSADLADLLRMGRLPEAWIAPHEVRELRELTRYRIKLVRMRTSCKDQVHGVLAKLGVPVTCSDIFGVAGSAWLDGLRLPQPYAGKVTSLRHLAGELTTEITMLSEVIASLLAGDRGYQVIQQLPGIGPVLAAVITAEIGDVTRFRNAAQLCSWAGLTPRHRESDTKVARGHVTKQGSRLLRWALIEAIQRIPRDSVIGAVKDGIIGRRGKEAKNIAKVAAARRLLTLIYLRDGQIRCLSRPPAGPPVTETARAA

SEQ ID NO: 413248 - protein, 366 aa, unidentified
MKKSSTVQAFRNEIFKEQKLTIGLDLGDRWSFYCVLDETGEIILQQKLPTTPEGMRRTFEKLPQSRMVLETGTHSPWVSRLLTELGYEVIVAHAQKVQLITKSSRKDDRHDARTLARLARIDPQLLGPVRHRSVQAQIHLTVIRARAELVSARTALVNAARGLVKSYGERLPKCGTYQVSGKLAEGLSAELREVLVPLLGGIESLNERIQEYDKRIEQIAKEVYPEVYLLKQVKGVGTQIALTYVLTIDDPYRFPKSREVGCFLGLRPGRRNSGKSEPQKRISKEGDRYLRTMMVQGAHYILGPFGEDSDLRRWGRKLAERGGKNAKKRAVVAVARKLAILLHRLWVSGEVYEPLRNSQRAMGVAA

SEQ ID NO: 413249 - protein, 312 aa, unidentified
MTEHCYCGIDVAKDRLDVQVLPHRQRFSVDNNGTGWAELVERLHALPIAAVGIDPSGGYERGIIRALLAAGLSVRRINPSKLRQFARARGILAKNDRLDAQLIAEYVSIMPTRVVQRAATAERLAEVVTMRRQLCDQHVTIENQAAHVEDAILRRLNKRRLARLKADIHLLDKRMAEIVAADTILAQRYELLTSMRGVGPTLAFTLIALLPELGQMSRKQIAALVGVAPYDFDSGKLKGHRCIYGGRMPVRNILYMAALSAARYNPALKVFHNRLAAANKKPKVIIVAVMRKMITTLNAMVRDKAAWQPRAA

SEQ ID NO: 413250 - protein, 313 aa, unidentified
MTIQTIIGIDVAKDELVIYRQDTDAQESFENRKPAIKRWLRSLPAQCAIAIEATGTYHVAAIELAHQCGHQVFVIDGYQLSHYRQGIGGRAKTDSSDARLLARYLSREHETLRVWTPPPAAYRSLQTLLRRRATLVQARVAIQQSCSELPELAPHLKRLIAQLTRIDQMIQRRIRTIIREAGLSQQVARCQAIEGVGELTAAALVMAFLRGDFRHSDAFVAFLGLDVRVRDSGKQRGRRRLTKKGDPEVRRLLHNAAMAASRQPAWKMTYQRYLARGLKTTQVFVILARKLARIAFSLMKHEVEYCPPALMKG

SEQ ID NO: 413251 - protein, 423 aa, unidentified
MLKLKYSICCGLDVHKNVIVATIVTTSKDGISEYMQKSFSTINSDIQRFHDWLIENNCYHVCMESTGKYWIPIFNYLENDIDVCLTHPKYVKAIKGKKTDKKDSKWIADLYKFDLVRCSFIPPKDFRQLREIARYRFKLVCMKSSEKNRIQNCMTVSNVGIASVLSDPFGKTATEIMSYLLEHTADSIDENAVRKLIKKGAKAKSNEIIEAIKGYNIKTDQAKKLELARGHLEYLDDMITQTEIELYVRMKPYYEFVEVVSTMPGMTELSSTIILAETGVDMDIFDDAKHLCSWCGLSPANNESAGKKKSVRIAKAGDYLKPMMVQCALAAIKSKKQPYFAIKYGRIKKRRGHKKAIIAIARMMMVCIYHMVSARKPFTPTDYEELMNPQNHVERVVLNEDNVFAYLESLGYDSSKLVKRNDN

SEQ ID NO: 413252 - protein, 340 aa, unidentified
MDITTLGIDLAKSVFQLHGVDAQGVIVLQKKLRRGAVVKFLSKLEPCLIGIEACATSHYWAREIVALGHDVKMIPPAYVKPYVKRQKNDAADAEAICEAVTRPNMRFVPVKTEEQQAVLVLHRSRDLLMRQRTMILNAIRSHCAEFGIIAAQGARKVSELVTKLRNDDTLGVPEVGVSALLSLASQLDCLEQEVRKIEHQLLAWHRQNAASQRLETIPGIGLITATALAASVPDPAVFKSGRQFAAYLGLVPRQNSSGGKDRLGRISKMGNGYLRRLLVVGATSVTRRAPTIDTRTGTWVRSLLEHKPTRVVTVAIANKTARTAWALLSKGESYNAVPAI

SEQ ID NO: 413253 - protein, 329 aa, unidentified
MNVNSQGREAVTAPRANAGIDVSKDWLDVAFGSRSERFANDAAGMESLAVLLRQEGIDLVVLEASGGYEAAAAAALQAAGMAVAVVNPRQARDFAKSVGVLAKTDKVDARVLRAFADVIARHEKRSHFLHAVPDEQRAHLQALVIRRRQLLEMRKAEANRMGMAHKAARKSLNKVILFLDKQLAEIDRDLDQHMREHFRDLSKLLSSAKGIGPVTTTTLAAALPELGRLDRRAIASLVGVAPLACDSGKRRGGRHVWGGRADVRAVLYMAVLGATRHNPVIRAFYERLVAKGKPKKVALVACMRKLLTILNAMVRDGQTWNPALHLKNV

SEQ ID NO: 413254 - protein, 365 aa, unidentified
MNKCHLNTELSSHEGTRCQFNGGTGAIELGIDVHQDFYVVVMQEGGANPKPPQRFGKQAFLHWVAKLARSGSEVHAVYEACGFGFTLQRQLSALSIRCYVVCPQKLDEQNRRVKTDGLDAKALVLKLDRFVEGNRSALALVRVPTQEEEQKRAIHRQREQLVKVRKQLEAQGRSLMVNHGFEPVKSWWKQRTFAALQLPAWMKELLLANTQPLLLALQEKIGALTVQLQSAADPKQPRGLGLMTSVIIDREIGDWNRFNNRRQIASYTGLCPGEYSSGNTRLQSCVTKHGNPRLRAALVELAWRLVRFQPNYKPIFKWRRLLAKGAFATGAARKKAIAAVARQLAVDLWRVRTGRCKAQALGLFI

SEQ ID NO: 413255 - protein, 457 aa, unidentified
MSDAKRSRRRREMSPVHPDAAAIDIGATMHVAAVGPGRDAAPVRTFKTFTEDLHRLADWFTGCGVRTVVMESTGVYWIPVYEILEQRGFEVMLVNARDAKHVPGRKTDVSDAEWLQRLHEYGLLRGSFRPQGEIAALRTYLRQRERLLDDAAAHIQHMQKALTQMNLQIHHVVADITGVTGMRIIRAIVAGERDPDRLAAYRDRRCHASVETVRQALAGNDREEHVFALAQAVELYDVYQTKVTACDARIEAVLERLRPASAKPVGPLPAARHNTRQPNAPAFAVRQALYAVLGIDLTQIHGLGPYLALKLVGECGTDLSAWPSAKHFTSWLCLAPSNKISGGKVLSSRARRSGSRVAALLRLAAVTVGRTETALGAFSRRLSARVGKAKAVTATARKIAVLFYNALRHGMDYADPGASYYEDRYRRRVLGNLQRRAKSLGYVLQEAAPGPTGRSVS

SEQ ID NO: 413256 - protein, 409 aa, unidentified
MDVILDRVCGLDVHKDSIKACVRVPGQGKKRDQHIATFGTKTEDILALRDWLEQWKVTHVAMESTGEYWKPIYYLLEDRFQVLLVNAAHIKNVPGRKTDAKDGAWIAQLLECGLLARSFVPPPPIREIRDLTRYRKKLIQQRTEEVLRLHGVLQRAGIKLSSVASNIVGVSGRAILNALVEGKKDPAAMAELARGQLRKKIPQLKQALAGRFTNHHGKLVNHMLSHIDYLEEVIADLSTELDALMEPYAAQIALLETIPGVERRTAEVIIGEIGVDMGQFPEDRNLCSWAGVCPGNRRSAGKRKPEKIRKGGRWLKPALTEATWAAVKENQSYLSGQYHRLVPHKGKKKAAVAVSHSMLVCVYHVLKKATPYRDLGADYFLRRNQEATKRRCLRQLEQMGYAVALQEIA

SEQ ID NO: 413257 - protein, 346 aa, unidentified
MNIIRVGVDLAKNVYQVHGVDSEENPVWRGRLSRGKWLNSLMAKVEPGCEVGMEACAGAHHWARELQSQGFVVKLIAPQFVKPYVKSNKNDAQDAEAICEAMSRPTMRFVTVKSVEQQDLQAMHRIRSALVSQRTAKGNQIRGLVAEYGLVAPQKLSHLRRAIPRWLEDAENGLSMQFRRLLDGVRCDLVELDRRVGELDVQVDAIAKAHPMAQRLQQLRGVGPLTATALMAVVGNGEQFAKGRDLAVALGLTPKQHSTGGKDRLLGISKRGDSYLRSLLVHGGRAALYAARDKDDRLSVWAKELAARSHPNVAAVAWANKTARMAWAMIRHDTDYQPERASSRVA

SEQ ID NO: 413258 - protein, 336 aa, unidentified
MKKLTPSEKITSRTYVGMDIAKATLQVHLNGHQIEFKNDPKGHAQLSKQLAKLTFPHVVCEATGGYERPVVEAFHKVKIPVSVVNPAHTLAASQAQGKRAKSDPCDAQALTDYGERFKPEPTPAVSSELRKITDLTAWLKQLIDNCAVTKTQAEHHSDPFVGEQHEQLLSHYQHQIVTAETEIKKLVGLQKEFQQRLDCLIEIEGVGFRTALMILVFMPELGFMNRGGAAALAGLAPWTRDSGTMKGKRCIGGGRAQVRPLLYMSALSAIRYNPILTEFYGRLKKREKPGKVALTAVMRKLVIFMNRQLKALAATPGIAERKIIANPQKSKKVLAK

SEQ ID NO: 413259 - protein, 326 aa, unidentified
MGEDDTMSSELFIGIDVSKDHLDIAVRPTAQCLTFENTDTGVDELIRTLLEFSPTLIVMEATGRYHQLALGRLVAANLPAIAINPRQSRDFARALGRLAKTDRIDAALLAEFADKVRPVLRSIPNSDTQELEALSTRRRQLMTMLIAEQNRHHSAPRSLRPGIKKHIHWLEKELEHSDKDLKNRIRSSPAWREKEDLLSSCKGIGPVTTHSMLAYLPELGTFNRRQIAAIVGVAPFNKDSGKYRGRRSISGGRRQLRNVLYMAALVATRHNPTIRVFYQRLIAAGKLPKVAIVACMRKLLTMLNSMVRHNTPWRADYLLDRQDSLS

SEQ ID NO: 413260 - protein, 421 aa, unidentified
MDVVVQRCAGIDVHKDTVVTCVRVPGADGQREMVTKTFGTVTAELLALREWLAGMGVTLVGMESTGVYWRPVFYMLEDVTECWLLNARHMRNVPGRKTDVADAEWICQLVEHGLVRPSFVPPKPIRELRILTRHRKTEIEEHTRVAQRLDKVLQDAGIKLSSVASDILGKSGRDMLDALVAGTSDPDILADLARGRLRKKIPALTQALEGRFGTTHALVVGEILAHLDFLDEAIERLSARIDEVITPFVVERDLLCTIPGIDRRLAEAILAEVGVDMGRFPSAAHLASWAGMCPGQHESAGRSRSGRARHGNSWLQRHLAVAAMAAARTKDSYFAAQYARLVRTRGKPKARKAVGHSMLVAIWHMLDAGVPYQELGADWFEQRNSPERRARRHLADLRSLGWVVTEGTEGIILTRPEPAAA

SEQ ID NO: 413261 - protein, 340 aa, unidentified
MSIVTLGIDLGKTVCSLVGLDAAGTVVMRKRLRRTGLVAFVLDLDRCVVAMEACCGAHHLGRVFDSSGFDVRLMSPEYVKPYVKAQKNDDRDAEAIAEAATRPTMRFVRIKTQEQSDLQSLHRARSRLVSERTALINNLRSLLLERGITVAQGRKKLEAELTVFADEEHPDLSPRIRGLIEDMRTQWRSPDERIAAFDKEFITMAREDSAAQRLMSIPGIGAINATAFVAAFGNAEAFGRGRDLAAWLGLTPRQASTVGRQKLLGISKRGNRYLRSTLIHGARAVFHRLIHEPSQLGAWLRDLSTRAHKNVVVVALAAKLARTIWALLRKEQGYQRVLAA

SEQ ID NO: 413262 - protein, 347 aa, unidentified
MPEDIVLSVDYHDQNCVIRRRALGSGAEEVLSVPTTDGDLRRVLAQARAQAGRGGRVVWIQESTTGWARVQALLGGRVEFVLANVLQMPLPPKGRRRKTDKVDTARLQREYLNGELPRAHQPPAWWRRLRRLVACREDLVSRRTALRNWVNRYLAHETWEDRAGLWSAKGRRRLSAITARLPRPDALVLGTKLAELDRSPAALAGVEAELFAAYHECPDAQRLDAVRGIGVVAAVSIVARIGPVGRFGSAEQLIAYAGLAPGVRQSDRTRHDGRIGGGGTDKHLRHYLIEASVWARQVPRYRATYERAARRRGPKIGRLVVARLLLRSIYKVLRDGVAFAPAAAAGG

SEQ ID NO: 413263 - protein, 432 aa, unidentified
MSALSTINLCGDVFMLKIVYPICCGIDVHKKFVVATVGTTNKSGVTDYQTRQFSTFTENLHQLLDWLKSQSCINVCMESTGKYWHPVFNILEDYCNVVVANPKYVKGIRGKKTDKKDSIWLCDLHKHGLVPNSFIPPLPIRQIRDLMRYRFKLINFKTSEKNRIQNSLTVSNIMISSVVSDTFGVSSMKIINHILENPDDKDFDVSSMLHASMQDKAATITKSINGNLTKPQADKMRICLGHFNNIEKHIADIETAILGLVQPYLAQLEIILSLPSIKDVFTAIAIIGEIGCDMSAFHSSKHLCSWAGLTPQNNESAGKKKSVRVSRAGVYIKPLLVQCANAAIKSKKCTYFKVRYDQIKKRRGHKKAIIAIAHMLLNCIYHMLDKNEPFNYDLYTIDSKPKQTYAPQITEEMTVRYLQTLGYQIPDMRITT

SEQ ID NO: 413264 - protein, 358 aa, unidentified
MKEETAGHPGIVGGVDTHKDLHMAAVVDEHDRVLGSECFATTRHGYRQMLIWMRSFGELLRVGVECTGTYGAGLLRYLQHAEVTVLEVTAPDRSDRRKRGKDDTLDAENAAHAAFAGVRTVTPRTRDGMIESLRVLKVCRKTAVAARRVALQLIHNTVVCAPDELRESLRTMTRMQLIRTLVAWRPDLSDYRNLTSAYRITLKSLGRRYLELHDEIADLDVMIAALVNELAPDLISRNSIGYESAAQLLMTAGDNSERLQSEAGFAALCGVSPVPASSGKVTRHRLNRGGDRAANSALHIIAIGRLRTDPRTKAYVERRVSEGHSKLEAIRCLKRYIAREVYYVIRKRNHQIGQVQVA

SEQ ID NO: 413265 - protein, 362 aa, unidentified
MEKYIFAGIDQGDKNSVARIAVDREKGERLGFVNTRGGRARLFKELNRQADQAGGAKILLAYEASSCGFVLRDEAQARGMICWVLAPTKMEKSVEQKRNKNDDRDADDVLEKLRGHVLAGNKLPTVWVPDMETRDDREVLRTRLALSEKQTQVKAQIQMLLKRYGLEKPADLGSTRSKQYRQWLESLCVCASLGWGTRQSLASLLRQLSGIEEEMGNLDKLVRQLGSQPRHKPIVEALMKEKGVGLLTALVFRTEIGQASRFRRGRQVGKFMGLTPTSHESGQQQDRKGHISRQGPPRLRKVLCQASWVHVRYDPHSREVYQRLVAKNPKKKKIALVAVMRRLSVRLWHRMLEAELELKTQP

SEQ ID NO: 413266 - protein, 404 aa, unidentified
MDLAPIYRCAVGLDVHQAQITVCVLSQGADGEVVAEVREFGGFKRDRRAMAAWVAGFQPDVVVMESTGIYWKSPYAALEQAGIRALVVNARHVKRVPGRKTDIADAQWLAILARAGLLTGGFVPPANFRELRLIARQLQRLTGIRAGEKNRLHKVLTDGGIRLSVVVSDLHGQSAWAMVKALAAGETPQQVLRHASARLRATEQELRDAVDGDLSDAHRFVLAQLVDHVEDLDRRIACFRDRLLAGLAPQQRLLGALQTLPGFDELGAALLLVEIGDDMQAFGKPEKLAAWAGVCPGNHQSAGKRQSGKQRKGNPYVRRLLCEAAHAVSRTRCALAEKYKALLVRRGRKRAIFALAHKLLKLVFVLIDRGDYYRDATVDYEALSVARNAPRWIKMLRKHGYLAA

SEQ ID NO: 413267 - protein, 349 aa, unidentified
MSQTLSDAVAVIGIDIGKNSFHIVGMDGRGAMVLRQKWSRGQVEARLANLPPCLIGMEACVGAHHLSRKLKAFGHDARLMPAKYVRPYSKGQKNDFRDAEAIAEAVQRPTMRFVATKTTDQLDLQALHRVRERLVGQRTGIINQIRAFLLERGVAVRQGLRFLRVELPRILAAPPDVLSPRMVSVIEDLAHNWRRLDERIDHLSGEITALARQDVGCERLMSVPGVGPIISSAMVAAIGTGDVFSKGRDFAAWLGLVPKQISTGDRTILGKISKRGNRYLRVLFVQAAWVVLIKPQSWERHGLKSWIEAAKKRLHRNVLAIALANKLARIAWSVLAHGRSFETSKLATA

SEQ ID NO: 413268 - protein, 389 aa, unidentified
MKIFVGIDIAKLNHFSAAISSDGEIIIESFKFTNKADGFQLLVSKLESFDKNSIIIGLESTAHYGDNLVRYLVAEFYQVCVLNPIKTCQMRKNNVRKTKTDKVDTFVIAKTLMMQDDLRFITFFDLDMMDLKALGRFRQKTIKQRTRLKIQLTTYVDQVFPEIQYFFKSGLHQHAVYALLKEAPSPKEIASMHMTHLANLLKVNSHGHFTKEQAKELRVLAQKSVGANDSAISIQITQTIQQIELLDSQLEKIEAEMTDIMKFNDSVIMTIPGIGYINGGMILGEIGDIHRFSNPNKLLAFAGLDPSVYQSGNFQAKTTRMSKRGSRVLRYALVNAAWNVVRNNATFKAYYDAKRAEGRSHYNALGHCAGILVRVILKMLTDEVEFNLE

SEQ ID NO: 413269 - protein, 440 aa, unidentified
MTKRRERVCGADVHKDLIVATITGDEMPPIQENFGTTKSELKRFRDWLITNKCEQVAFEATGVYWIPVYDALSRTIDTIVANPHQIKTIPNDKSDSKDSNRIATLCLNNQIKRSRVFSDENRELRNLTRARSGYVKTRTQFKNRIHKYLSSNGIKLSSCMDDIFCKSGTYIIRGLAEKKPVEEILKGIPTGKIRKKQDEIRSALANGLSETDRMLISDALEMMDNAETKTEKMSLEILKKIQQQRSNDLAIVMSIPGIAFISGSVILSEIGDYRDFQSPDQLAKWCGLIPGENESAGKKRKCGITKRGSKYIRVVLIQAAQSISNMKNTALSRFYKRLSKKKEHNVAIVAVARKLICLIYHLLINQEFYQEVGCKKMRKGRNESRHEPSLKDEDLADRVAAIVDAFYGMSDSNRKKVLMRALEDISGNKTDRKRSPEGGG

SEQ ID NO: 413270 - protein, 320 aa, unidentified
MSASSVVVGIDVAKAHVDVSVLGAKLDVQRFDNEAEAHSALAAALKPLGVALVVMEATGGYEAALACALQAAGLPVAVVNPRQARDFAKSMGRLAKTDAVDARMLAEFAAVLLRREDLARFLRPLVDEQQRWLAALVTRRRQLLSMLLSERQRLQITPKGLHPSIEAIIAAIKAQLDDIELQMVTHVGQHFAELDALLQSASGIGPVASATLIAELPELGRLNRREIAALVGIAPMANDSGSSKGRRRIQGGRFDVRRVLYMAALTASRRNPVVKAFYERLIAAGKLPKVALVACMRKLLTTLNAMVRTNKPWDNSLHGA

SEQ ID NO: 413271 - protein, 346 aa, unidentified
MEYYVGLDVSLKLTAICIVDRTGKIQREGAVPSDPEAIAAFIESYSSTVARVGLEAGATSTWLWTELNKLGLPVICIDARHAKAALKMQINKSDRNDAVGIARIMQCGWYKEVRVKDLDSHAIKTLLVSRALLVKIKRDLENQVRGLLKNLGLVIGRAKMNVFAARAAELIEDRPELTAAVVPLLKTREVIERQIADLDRKVLRLARNNTQVRRFMTVPGVGPITALCYLATIDDPTRFKKSRSVGAYAGLTTRRYRSGEIDWTGRISKCGDAMLRTYLYEAANVLLTRIAKWSALKSWGMRIAKRSSLRKAKVAVARKLAVILHRMWVDGTEFNWSSKEVAARAA

SEQ ID NO: 413272 - protein, 420 aa, unidentified
MRNAGIHANSLLEVRRMYNAVGIDVSKGKSTIAVLQPGGTVIRKPFDVSHTSQNLNELADYLSSLDGTTKIVMECTGRYHEPMVKALSEAGLFVSIVNPHLIKNFGNNSLRKVKSDPADARKIARYTLDNWTELRQYSGMDNTRTQLKTLNSQFSFFMKQKVAAKANLIALLDNTYPGVNKLFDSPTREDGSEKWVDYAYSFWHADCVRKIGLKAFTERYKSFCKKHHYIFQQDKPEKLFNASKELVAVFPKEKTYKLLIQQSIQQLNLASEHVERLRREMNELASTLPEYSIVMGIYGVGKTYGPQLIAEIGDVSRFTHREALTAFAGVDPGVDESGQHKSKSNRASKVGSARLRKTLFQIMTTLLKNAPEADPVYRFPDKKRSQGKPYYVYMTAGANKFLRIYYGKVKECLRNLEQTE

SEQ ID NO: 413273 - protein, 347 aa, unidentified
MSFIGVDLHTTSFTVCRLEADGREAFETYQLAPAALERFCLTLDGNDEIAVEATGNSAWFRDEVISCVGRVVVVNPGQFGVIRKSVKKTDRNDARALAFFLSRDMLPETRVKTAQESELASLTHTRDLLVKQRTRLLNKIHALHTRHGIKLKRESLGSKRRLNALEIGRFSRLEQAELRIVRDQALSLTDAIAEIDREIEAAAETMDGYDGLVSIKGIGPRAAAVFLSGIGDVADFEDADKLAAYCGIVPRVNQSNETDNRGRITKRGDKLMRTTLVQCTLIAIRYSGYLNAFYRRIKDRRGAGKAIIATARKLLKIIYDTLKNGWVFEDFPAFKIAGETIPAGQSS

SEQ ID NO: 413274 - protein, 352 aa, unidentified
MVKSNKLDFTGQHVYVGMDIHKKSWSVSIHTEQFEHKTFNQPPEVEKLTNYLQRTFPGATYHSVYEAGFSGFWIHDRLTEEGIHSMVVNPADVPTKHKEKAGKADKVDCRKLARNLRNGDINGIYVPPRANVEDRALLRTRQSMVRKQTRCKNQIKAILFFYGVPIPEEGCWSRPFINRLEQIRMERASGDLALKAHLEELRHLRQIIADLNRAILILSRSDAYRENVLLLKSVPGISTLTAMTLLTELCDIYRFSSLDKLASYTGLVPDIKSSGETEYTAGITHRRNPVLRMVLIEASWVAVRKDPALMMAFNKFSLRMKKTAAIVHVARKLLNRIRFVLMNQKPYVPAVV

SEQ ID NO: 413275 - protein, 343 aa, unidentified
MGEVSTIGLDIAKSVFQVHGVDGTGAVMMRKRVGRAKVLEFFGGLSSCLVGIEACPSAHYWSRELQALGHTVKLMPPSYVKAYLKRNKNDANDAAAICEAVTRPSMRFVPTKTPERQTGLMLHRTRQLLVRQRTMLSNAIRGHMAELGIISAKGRNGTAELLRIIGNVADDRIPPVARFCLDLLARQYLTLIAEVSSIDKRIHAWHRSCEASRRLEEIPGIGPIVATALVAEIGDWRAFHSGRSLAAWIDLVPKQYSTGGKERLGSITKQGNRYLRWLLVAGAMAVIRYARQHGTKRPWLTRITDRRPAKVAAAALANKIARIAWAIMVHGERYREPKLLLAV

SEQ ID NO: 413276 - protein, 444 aa, unidentified
MSNSCNKQAEEPEWAAFAALDWADQKHFWRLVAAESEQQQQGELENTPEAVDVWATGLHAQFGGRPIAVCLEQSRGSLVCLLAKYPHLVLFPVHPKTAADYRKTFCPSGAKSDPGDTASLLDLLLRHREQLRPQRPDTVATRLLQILVESRRMLVDEKTRQKNRLTACLKIYFPQMLQWFDLVDSPLVGAVLARWGTLMELRRAHPGTLRKFFHEHNCRDEERIRERIAAIGQAMPATEDGAIVEGESRKARALASVIASLRDSIAEYDRRIAEVVAEHPEGSLFGSLPGAGPALVPRLIVAFGTLRERFESAKEVQQLSGIAAVTERSGKSVQVHMRVACPKFLRQTFHEFASHSIAQSEWAQVFYTARRENRQKHHPAVRALAYRWIRIIYRCWKDRCPYDEQLYMRSLQRRGSPLIGAFAPTTEGEWKLTAGFSKFSAKNS

SEQ ID NO: 413277 - protein, 387 aa, unidentified
MPQLNDQSRSHTALKQDCTLIAVLEMSQSAWLVAGLVPGIERHPLKKIEPGEAALLRLLRRWQEEATKTGYPITRITLAFEAGRDGFWLARWLRARGIEAHVIHPTSVAVSREHRRAKTDRLDTALLKRAFLGWLRGERGHCSMAEIPTLEEEDAKRPTREREGLVRERTRLVNRIKGALARLGIRGFKPTLRQAPERRSALRLPEGAPLPPNTLAELRRDMARLRFVLDQIREIEAARLDQLEQHPETGAHTMVRLLARILGVGIETADMLVHEVLSRNLRDRRAVARYAGLTGAPDESGGRRREKGLAKAGNARVRRGMIPLAWRFLRFQPNSALTRWYRARTADARGATRKTMIVALARKLLIALWRLVRSGEPLEGVVLRPAA

SEQ ID NO: 413278 - protein, 370 aa, unidentified
MKKHSSSEKSPKRGKAALERDPVTIGIDLGDKTSWYCALTGSSDKGVEGSVATTRKAMAQKFGAMPACRVAIEVGGHSRWVSQLLASFGHEVIVANAREVKAITASSRKNDRMDARMLARLARVDPALLRPIRHRGEQAQAHLMRIRVRAALVETRTSLINTARGLAKSAGERLPGCDADQMGMARTEDLPEWLAGQLEPLLVQVEQLTVQIKKCDRELEQIARTEYPETKLLEQVWGVGTLIALTFVLTIDEPNRFRRSRDVGCYLGLRPRSSQSGEREPELPITKEGDGYLRVLLVQAAHRILSRPGPDTDLKRWGWKLAQGGSKSKKAKKRAIVAVARKLAVLLHRLWVTGEVYEPLRNSGAVAAAA

SEQ ID NO: 413279 - protein, 449 aa, unidentified
MKTSFVLGIDPGKSFLAATLLKSDGGTIWKGRQFDMTRDGIEHLASGLPEGDLTIGIEASGRIDDNLLAWFGPWASAAREKRLVKIIRINPGQSARFGGPKPRRDQTDGSDSEHVAEFTRVYALRLDAFNYDRKVQSLSRLVSERQRLVEDQTATKNRIHEQLLVCFPEFVQVFKDPFAKLAQAVLRDVPTARAAVRRRPLSLARVKACRKGASLGVDRARQLIALAGRSIASAGEDHDGKALVFLLDELELLEKRLASIEQTFADYVEEAKGKGETQSDHGCSPARQIELLDSIPGIGLIAGSTLVLGTRGIARFYSGKALSAQWASCPERAQTGTSLNKTRLTARGDHKRRAMLYLSAQTACVFDPAFAFHKWRMIQKGFCPQQAVCAAMNRMARVSWSLVAKDQLYDVNHMLDQIKIHHADLWKTFVRLHQDDQRLWKNVEPRHKK

SEQ ID NO: 413280 - protein, 358 aa, unidentified
MQAKDTKISFNGQNVYLGIDTHLKSWKVTVLLENSVFKTFSQDPCAEVLKKFLRRNFPEATYYSAYEASFCGYSVHRELEKQGIKNIVVNPADVPTTDKDRKQKEDKRDSRKIAKSLRNGDLQGIYIPTTITMEFRTMVRYRKTLVKEVNRNKSRVKSLLYFNGIKVPPELDTTSKHWSARYTKWLKELSFSSKFGNKTLDMLIEATTYYRQKLLEVTRELRNIQEESGYGKKIKLLISIPGIGIITALTLLSEIEDINRFKNLDTLCSYIGLVPSTNSSGEKELIGDITPRANKPLRNVIIEAAWVAVRNDPSLALKYNQLRQKMEPNKAIIRIAKKLLNRIRYVLKNEQEYVLSVN

SEQ ID NO: 413281 - protein, 322 aa, unidentified
MNIPVRIGMDTSKSVFQLHGVDENEVVVVRRQFRRAEMIRYFERLPPVLVAIESCGSSHHWARLLQSFGHEVKLIPPQYVKAYVKRGKNDAADAEALCEAVTRPSMRFVPVKSKERQAACMLMTVRERLVGVKSQLSNAFRSYAAEFGIVGPAGRQNVTALIKRVLEDDSLPEMARDLFRLQAEEYAAVQARLAKIEAKLMKWHREDDVSRRIATIPGVGPIGSSMLSMKAPPPETFRSGRDFAAWLGLTPKDHSTGGRQRHGGITKAGDSVLRSTLIVGATALLRHVRKGRHKPTPWLASLLERKPPKLFPVALAATPARG

SEQ ID NO: 413282 - protein, 365 aa, unidentified
MKKSSTAMAASNKNFEQKLTIGLDLGDRSSWYCVLDEAGEVVGEQKLGTTPKAMREVFAAMPRSRVALETGMHSPWVSRLLSELSHEVIVAHARNVRLIGESRRKDDRLDARTLARLARIDPQLLSPVKHRSAQAQADLTVIRARASLVRARTVLVNAARGLTKSYGERLRGCNPRNLNTEKAQALSPELQAALGPLLQALESLSQRIAEYNQQIEAIAQQSYPQTALLKQVKGVGTLIALTYMLTLEDPHRFRKSRDVGCYAGLQPGRRNSGQSEPQMHISKEGDPYLRTLLVQGAHHILGPFGADSDLRRWGLKLAERGGKNGKKRAIIATARKLAVLLHRLWVSGEVYEPLRNTNRTMSAAA

SEQ ID NO: 413283 - protein, 361 aa, unidentified
MEGIIKQCVGIDCSKDELAVCFGQLAMPWLESHKATGVFENSPKGFKQLLKWSDKLSAKGIAVDFVIEATGVYHESVTHFLFDKGRKISVVLPNQARHFAQTLKVRTVNDKESSKMLASFGLQKQLDGWQKPDPVYAQLKGLTREHAQLKDELTVIKNQKHAEEYSAFPVKESLKRMKKRIVFLEDQIKEIGKNIDSIIASHPVLQKKLKNICTIPGVGKMTAVKVIGETNGFNLIRNKKQLVAFAGYDVVTKDSGTSVHGKPHISGKGNKHIRKAMHFPALTSVKFDKNNRDLYERIEAKTGIKMKGYTAVQRKLLGLIYVLWNKDEVFDPNYQAKKSNRQKSLEQPMLTALTELDQVCS

SEQ ID NO: 413284 - protein, 349 aa, unidentified
MRIIGGLDVHRSQITYDWIDTDTGQHQRGQLAPAHREHLRVWLEQFRDRPAAFALEGCTGWRYVVEELQRAGIAAHLAEPADTSTLRGPKRHAKTDRTDARHLRGLLAAGRLPESWIPPAHVLEARTQVRCYRALLDEHTAWLQRVHATLFHHGVPAQRNLLAADRRARLDRGSGLSPAARQLVAVALRTLDHLDAELDRLRAELTWFARRQPGCQALDGLYGIGPVTAVAIWAELGDPARFTSSRHAVRHTGLDITVYSSDGKRTPGHLARQGPPVLRWALFEAAKCAARPSSPDHAYYLQVKGRLGGNRATLAVARKLARRCYHTLGTLGDLAYAPPSDTPDLGRVA

SEQ ID NO: 413285 - protein, 343 aa, unidentified
MKHYAGLDVSLEETSVCILDETGKICREIKVASHPEDLLRILQDPAWRFERIGLEAGLLSQWLFNGLAQAGLPVVCIETRHTKAFLKAQVNKSDRSDARGIAQMMRVNLFRPVHVKTLTSQKRRVLLTARKLLQEKAIAFENEIRGLLANFGLKVGVVGVAKFEERIRELIGDMPDLAEIMEPLLDARRRLREHFSTLHRKLLDLARRDEVCRRLMSIPGVGPVVSLAFVATIDTPARFRTSKAVGPALGLTPVRSQSGHTERIGRISLCGDALMRTLLFEAAQVMLRRTTKWSWLKAWAMKVAQRRGSGKAIIALARRLAVIMHRMCRDGTEFRWTREVQAA

SEQ ID NO: 413286 - protein, 408 aa, unidentified
MQVEHPVCCGIDVHKDTLTACLRRVEDNGQVHKEGREFATTYTSLLALSDWLVEQHCPVVAMESTGVYWKPVYHVLAGTVEVFIGNAHELRSRPGKKTDKRDAAWIAELLAHGLIRPSFVPPPEICALRDVTRTRVALVQTRSQSKNRVHKLLEDTNLKLGSVVSDLFGVTGRRMLAALVAGERDPQVLASLALGSLKHKRPQLALALTGQFTAHHGTLLGLLLELIEMLDRQIATLDQQIGALVAPLQAQIAQLDSIPGVDIIAARDILAEIGTDMSRFGDAARLASWAGVCPGNHESAGKRYRGKTRKGNRYLRRILVQCAWGARKTPTFLGRTFRRLEVRIGKKKAALALAHKILVIVYHLLAAGTCYEEARYDQYNPRQEARERQRAIKALERLGYTVTVARAA

SEQ ID NO: 413287 - protein, 355 aa, unidentified
MPSKADTAVARTIGIDTGKNTLHMIGLDERGAIVLREKISRARIAARFVNLPPCLVGIEAGMASHYVARELVALGHEVKQVPPAYSKPFRHGHKNDFRDAHAVAEAVERPSTRCVPIKTDGQLDLQALHRVRSRLIGNRTAVINQIRGFLLEHGIPVRQGHHFLRKQLPLILATRTDVLSPRMIRIIGDLVEDWRYLDERIEGVTDEIEALAHADEGCQQLITVPGIGPIISSAMVAAIGNGAAFCKGRDFAAWLGLVPKQMSTGDRTILGRITKLGNRYLRMLFIQGARAVLLRPASWVKHSFGSWLTAATRRLHRNVLAVALANKLARIAWTVLAQGRRYEARVEPRVEPAAA

SEQ ID NO: 413288 - protein, 374 aa, unidentified
MANHNEVFIGIDTSKLRNAVAIAEAGRNGKVSYLGEIDTSEAATKKLVASLACKYRRLTFCYEAGPTGYGLHRHIESLGHSCIVAAPSLVPKKAGDRIKTNRRDAEGLARLLRAGELTAVWVPDARHEAMRELARARDSARQDLTRKRQQVSSMLLRMGLHYPGTRTWSARHRSWLANLKLEHAEHRFVLEELLVAERQAGERIGRLEQAIRDALGNWSLRDIVPALMAMRGIDMISAVTILAEIGDLTRFANPRQLMAYLGLVPPERSTGNAVRRGPITKAGNGRARRVLVEAAWAYRHPARVGFEKQASVAAAPRPAREIAWKAQVRLCKRFRSLTRKGKKSTVVAIAIARELAAFIWAIAHEVEAASAGTS

SEQ ID NO: 413289 - protein, 392 aa, unidentified
MSQHCHFDASRSLTALEQDSTIIAVIEMSQTKWLVAALIPGVERQPLKKFDAHEETLLKLLHRWRREAGQAGRNIKRIVVAFEAGRDGFWLARWLRARDIEVYVIHPTSIAVSREHRRAKTDRLDTELLMRVFLGWLRGERRHCSMVAIPTIEEEDARRPNRERQTLVTEQTRIINQMKAIFTRFGIRTLRPTMRKVAEKLEDLRTAEGTPLPQNTLAELRRHLARLRIVRDQIRAVEQERLRKLAVAPAAEKKSPHAMVRLIARVLGVGVETADMLVNEIFSRHWRDRKAVARYAGLTGSPDESGSRRRERGLARAGNVRVRSGMIQLAWRFVRFQKNSALAQWFAARTADGRASTRKTMIVALARKLLIALWRLVTRGEVPQGVALRPAS

SEQ ID NO: 413290 - protein, 449 aa, unidentified
MTLLEQIDLNAAGIDVGSREHWVAVPADRDPHPVRCFGTFTSDLHALADWLLQCEVKSVAIESTGVYWIPVFQILESRGLEVLLVNARQVKNVSGRKSDVSDCQWLQQLHSYGLLAGSFRPEAQICVLRCYLRHREHLVEQASTQIQLMQKALTQMNVQLHHVLSDVTGVTGMAILDAIADGERDPLKLAQLKDPRVRSSVETIAKALTGDYRPEQLFVLQQARESYRFLQTQIADCDVEVNQVLSGWEAKVDLEQQPLPPTHKKNRSKSKHKPVPFNLRQQLYRVTGVDLSEVDGLDVLSAQALISEIGLNMHRWPSEKHFASWLGLCPDHRISGGQVLHNRTRPVLNRAADVLRMAAQSLKDSQSALGAFFRRLKARLGPAKAITATAHKLARIVYLLLKYGHNYVDPGAQYYEQRYRENILRSLKKRAASLGYTLVENAALNLQVS

SEQ ID NO: 413291 - protein, 351 aa, unidentified
MKILALDLGKYKTVGCDYERESGRHQFRAAATTPAALYKLVQAVGPDRVVIEVCSIAGWVCDLVRRMGIEIQVANTSDDTWRWRKVKKKNDREDALKAARLSAVNQIREVYIPATAGRQWRALIAYRQQMVWRRTKIKNHIRDLLLREGQILPRGQKCWTQLGVATLEAMTRPFAEVELNELWRAELGLELAQLREVQQKVQALEEKLNAIGAADARVQLLRTIPGVGPRLAEAIVALLDDPARFHKVGEVSAYIGMVPKELDSGETERRGRITRHGNRLVRSLLVEVAWAGLRHNPWVRETYQRISGGKKSRKKIAIVAVGRKLLVRCWAMLRDNQPWHHEIKIDTRAAA

SEQ ID NO: 413292 - protein, 419 aa, unidentified
MFKIFRKNCCGLDVHKTWIYACIGITDENGRTEYKQARFSAFTKGLLELAEWLAKYNCTQVCMESSWKYWIPVFNILEKSCWVVLAHPKYTKPQKGNKTDRKDAKWICDLFMCDMIKPSFIPPPDIRHLRDLVRYRVKLTNMITGEKNRAQNCLTVSNLKLDDVFSDVFGKSSISIVNYILDHPGESFDVRPFIHKRCKHPIEEIQAAVDGSISHEQAVKLRECIRHIEELEIHKLNIEVEIFRLVVPYRYPLELIRSVPGFDANPLTAIALIAEIGVDMSVFPTANNLSSWAGCCPKNDQSGGKRKSSSISRAGTYLKPLLVQIANAVVKSDKHPEFKERYRRLKARRGHHKAIIAICRMFLTAFWNILSKLEPYSPDGFLSDLPQNKSFVISKSQAFSILKSRGFVILDNVHDPDFG

SEQ ID NO: 413293 - protein, 350 aa, unidentified
MLHAGLDLSRKRLDVCLLSEHGELVEEFSAPPDADGLRGLVRHVGHHGAPVRGVIESMTGARFVHDTLERLGWEVLIADAQKVKGLAPLACKTDKIDARVLAVLSERDLVPAIWLPDPRIRSEREQARFRLHLVKHKSMLKHRIHSTMLSFGHPCPVTDLFGVEGRELLERLEIPDPWRQSVDASLDLIDYLERQIDEINRDLKASGAEHPYVPLLLTVPGIGWVLAFTIASEIGDISRFPTAKKLCGYTGLCPRVHQSGESDRRGPLTKQGPKYLRWAMLESTMHALRHPAYSERYQRNKKRLGRQRGAKVAQIDIARKLTEAIWHMLTNNQPFAPTPASGGATCRLVA

SEQ ID NO: 413294 - protein, 325 aa, unidentified
MEESRIRTRAADVERYFARAEPMRVVIETGTHSAWVSRAITAAGHDVTVANSARVRLIHGSRWKNDRLDAEKLARLLRYDRTLLAPVEHRGRDAQLALAILRSRDALVRSRTLLINHVRGVVKAFGLRIPKCDTKAFTRRAGEHIPPDLLPALQSQLDVIAQLTNQIRLLEARIRELCRTTYPETAALTQVHGVAELTALTFVLTLENPSRFERSRDVGAYLGLTPGQKQSGGSDPNRRITKTGDRTMRRLLVQCAQRILGKRGIDSDLKRHGERIMRIGTKDAKRRAVVAVARKLAVLLHRLWITGEVYEPLRNSSRATPAALT

SEQ ID NO: 413295 - protein, 407 aa, unidentified
METRFAVVIGLDVGKTGHHACALDPGGSRLFDKPLPQDEAQLRELFTELQKHGNVLMVVDQPNTIGALPIAVARDAGCAVAYLPGLAMRKAADLYPGRSKTDARDAFIIADTARTMPHTLRAVDRDNEVLSALKVLAGFDEDLAHETTRALNRIRSLLTQIHPALERVFAGGSLANSLTLELLIKYGGPTGLKTAGRGKVLRFARAHSRRDPEGLIDQIFAALGEQTVVVPATAAVELVIPRVAGQVKELKEQRATVAREVEGMLEDFPLASVLRSMPGIGLKTAAQILLNIGDGSAFETPGHLAAYAGIAPVTRRSGTSIRGEFPARSGNKRLKNALFYSAWVASNHDPISKTYYDRKRAEGKRHNAAVICLARRRCNVIFAMLRDGTYYQSPTPVPTPEPPTLAA

SEQ ID NO: 413296 - protein, 416 aa, unidentified
MKKHNNSGKKSEPTSKRAKSRGLVQLDPKEVLAELLEKLREKLDSRAVAASAGEEHPRGELRPNFDRLTVGVDLGDQWSHYCILGLEGETLAEGQLRTTPQDVTEFFQALNAARVVVEVGTHSAWVREVICGYEHEVVVANPRLMDGSKRRKRKNDRIDANKLARLGRVDPESLYPIQHRSREVRQDLVMLRARDALVAARTELINATRGLVKSLGTRLPKCSSPSFAQKVEEAVPAQTREALLPLVRMTAALSDGIQGYDEKIEKLAKEKYGHTALLRQVKGVGPITSLAYVLTLENPQRFVKSRDVGPYLGLVPKQEDSGESQPQLGISKTGDTMVRKLLVGSAQYILGPFGPDTDLRRYGLRLCERGGKNAKKRAAVAVARKLAVLLHRLWVTGEVYEPLRRGRSERMLHAAA

SEQ ID NO: 413297 - protein, 339 aa, unidentified
MREFIRIGVDVSKGFFQVHAIEGEGSSAVRRKLSRAKFLSFFAGIAPSRIGIEACGSAHHWARELRALGHEVVLMAPAYVKPYLKRGKTDANDAAAICEAMSRPDMRFVPVKSADQQAVLMLHKTRALMIKQRTMAVNALRGHLSEFGLIAARGIHRIKDLLALAETDERLPEAAREATAMLAAEIQGLDGRIDGLEAKIAAASSPMIRHLDEIPAFGPLIASAMVAFNPDPRAFRSGSDFSASLGLTPSQHSSGGKEKLGHITKAGNRYLRTMLVVGCTSVLRVAHKYKGALAEWIVAMRARKPERVVAVALANKLARIAWAMMATGEAFRKELYFKA

SEQ ID NO: 413298 - protein, 419 aa, unidentified
MTQKKYTESVSIVHPVCCGLDIHKRIIVACLIDQSQDEAVMEIKKFGTFTNELLLLKEWLLEHACPVVAMESTGVYWRPVHNILEGYMQVVLINARHYKNVPGRKTDVADSQWIAELLRHGLLRGSFIPDPEVRRWRELVTMRNHFVSTESDFRRRIQKLFETANIKIDSVVSDLFGVSGRNLMNLILSVPTEEITREDVRECLRGRLNKKGEELFLAIQGFVTDHHRFMLSEYLEVVDSCRHSVNHIESRIMEVMSPHQDVLDRLQELPGISQIAAAGILARLSPCLDAFPNSAALCSWAGVCPGNNESGGKRHSGRSPVHKHPLKTLLVEVAWAAIKRKGSYYRDKYYRLKARRGAKRAIVAIAHKLLKAIYVIIKEGKRYQELGSDYLDGRNKQAQIFRLKKMAEKYGFTVVENVA

SEQ ID NO: 413299 - protein, 420 aa, unidentified
MKVVYQTCCGVDVHKSFLVATIIKTTSGVEPSYQKKRFSTFNNSILQFKNWLIENQCRDICMESTGKYWVPVFNLLEDDINVTIANPKWVKAVKGNKDDTKDSKWIGDLFRLGLVPGSYIPCKPIRILREFTRYRYKLISCRTSEKNRYQNALTVCNVALDSVVSDIFGKSATSVIAYLIEQSNNSINHEEIASRLLRSLKKKSDSVIESIEGYQMTDSQKYRMRLVRAHLDYITSSINDIDTMLDSLIAPYENAVQLLCTIPGVDRNSAITVISEIGTDMTPFSNSKRLCCWAGLTPGNNESAGKKKSVKITRAGVYLKPALVQVAHAAVKSNKSPYYKQKYERIMKRRGKKRAIIAIARMILTAIYQMLSTGEAWNPTDLYKIDMPEPMKEKQKEKAIKQAKKLLIREGILSESQLVS

SEQ ID NO: 413300 - protein, 366 aa, unidentified
MEPIYIGVDFHSRRQTICYLKTETGELVITELKHQDKERVRAFYQQFPGPVIVGLEASGYSPWFEAMLEELGREVWLGDATEIRRRARWRYKDDRRDAELIRDLMVHHEFPRLHQPTPPSRDILRMLRYRQKLIKVRTMTKNSLQAIAMQAGLAKGHQLFTAAGQVEFKAVAMSPVLQYQRDHWFELLKPLNQELLETMKWCKAAAKGEAAIARLRTHPGIGLLTSLCLLHTLQPVSRFRNQRKVVAYAGFDPMVRRSADSAIHLGISKAGSRMLRYLLVEAVHTAIRNDEDLKRFYQRLAERRGRPKAKVAAARKLLIRAYILLRDEIDYAEFKRRAVAARLARRSQGPPSVPEVLIGQSASPGA

SEQ ID NO: 413301 - protein, 350 aa, unidentified
MKYYAGLDVSVKETSVCIVDESGKLCREKKVVTHPDDLVAVLSDPAFNFERIGLEAGPLSQWLFEGLAKAGFAVVCIETQHTKAFLKAQQLNKSDRNDARGIAHMMRVGLFKDVHVKTLTSQKRRALLTARKLLQEKAIAMENDMRGLLRNFGLKVGTIRAFKFDERIRELVEAAPDLAEIIESLLAARQKLREEFVKLDRKIRGEARVDPVCRQLMTVPGVGPIVALAYTSTIDIPSRFRHLRAVGAVLGLTPVLNQSGESSRIGHVSLCGDGMLRGLLYEAAQVLLIRVKKWSWLKAWAMNVAKRHGIKKAIVALARRLAVVLHRMWVDGSEFRWTREATPTTTDATA

SEQ ID NO: 413302 - protein, 296 aa, unidentified
MTQNDLVVVGIDVAKDKVDACIRTVTERRTFPTTASGRRSLIAWLRKHRVGKAVMEASGGYERVWAKALRQTGLEVRIVDPKRVRSFAESAGRLAKNDKIDAEMIAWFAETFSEAPSQLEDPAHEEIKALVKGRKSLIDLRARLEMQNEHETPPLVRKIKATPAFAVRAEIIESVPGFAEATALTLLAGLPELGQVSNEVAAALVGVAPYDDDSGKRHGQRCIKGGRRWVRNALYMPCVGAATLNNPVFKAFYQRLIAKGKAPKAALIACMRKLIVILNIMIARGEKWDATRFALS

SEQ ID NO: 413303 - protein, 321 aa, unidentified
MANCAKAFQIGVDVSKHELVISVEAQAPFTLENSSKAIKAWLKSLPEHCQIAMEATNDFHMALTEQAHAWGHRVYLLNGYRLNRYREGIGGRAKTDSADALLIVRYLQREVDELRPWEPAAPGYRELQMLLHRRATVVRARTQIQQSLQGLSLLDNALKRLMKEIDKVDRQIAGLIQRTLQQAQWEADWQRCQQVEGIGPITAAALTMAYKRGPFRDSDAFVAFIGMDVRVRDSGQKQGKRKLTKQGDPELRRLLYLAAMQAKRQPAWQGFYQRYIERGMSKVQVLTVLARKLARVVFALLRSQSDYDPQRRLQVQALMHC

SEQ ID NO: 413304 - protein, 444 aa, unidentified
MSKKLRTHLRGERGQAFADRMRGVPLDRILCVSLDISKYFHVVMIHNGLGEIITPMFEIDIFQSGFDQLIQAMEAARERTQAQVVLVRMEPTGHYFENIARRLLEANYRVTLLNSFAVKQNRDQHMMQQEKTDEIDVAAIGDLLCRGEGTPYRPAEGLYLRLQQLDRVRLSRVKIERMLKNQILGHLDRIFPGLVLIGKEATRRYTPLFVSDFWSCQTLQHLVCVCPDPHRLSQMKPDELVREFHAQGYPMGVVTAERIITYAQKVLLPDPELVAVRCELLHHDLELLEQVEHHIDAMEEQLRGLLQQTPYQILARLKGLGDIQVASLAAAAGKPEHYSSGSQVFRRSGLVSGRSDSGTRQRKGKGKAILKTGDVYLRRVLTNMALTPGLHQPVLGCYYQKLKQSKPDGVARVATARKAMGILWAIVRDQRSDMLILREEEVAM

SEQ ID NO: 413305 - protein, 322 aa, unidentified
MYKIIGIDISKQTFDVGFNDGSKWQHLVLDNNKKGFKRLLKNLGVNDWIVMEASGPYYLKLATFFFEKGYKICVLNPLIIRRYSQTRLLRAKTDKKDARTIAEYGTQYDLQQWSPEPESILKIKQLYTVLELLNKEVHQSERQLESLTATGVLDKELKSTLKNIVKYLKSKRDKVEKQIEDHAQINYKPTLDRLKSIPGIGTKTAIMLTVITGNFEKFENHKQLIAYVGFSPRLYQSGTSVKGKGHICKMGKSQIRKLMYLCSWSAKRCNKECMIMYERLLEKGKPERVIKIALANKLLKQAFSIVKNKTYYAENFNEKLCF

SEQ ID NO: 413306 - protein, 324 aa, unidentified
MSDSIVGIDVSKETLDANCARGQRKQAKIFANSPDGWRLVLSWLKALGSKQAHVCMEATGRHSLGVALALYDAGHIVSVVNPAQIRDFARAKLGRNKTDKVDAALIGDYAALFNPAPWTPPSPAMRRLCELHTVRAGIIGSRTEWKNRLGSGLGDSTATGLAAMTIEHFTHQLETIDRAIGETIDQDAALRGRRDLLLSVSGVGETLAALLLVEMPSPEVLRRSGEMVAYAGLNPSHYRSGSSIDRPTRISKIGNATLRSSLYMPALSAMRFNPAVAALVARLKEAGRLKPKQIVVAAMRKLLVICFGVLKTGRPFDPAIAMPA

SEQ ID NO: 413307 - protein, 318 aa, unidentified
MTRIICGVDIASATLTARIGRTGAWREFANSREGISELADFCQSQGVQLVAMEATGGYEKRSYVQLTEHGLGVAIVNPRAVRQFAQSMGALEKTDAIDAGMIAWYAETKQSQPLSLAPKAQLELRARVTRLRQLTEVRTAQKNQRRLVSLPAIEKSFEQMLGFLAQQIAELEQAISELIEADPLWREFDRAFRTIKGVGDRTVANMMAEMPEIGTLSNKTISKLAGLAPLANDSGNHQGKRSVRGGRGAVRDLLFIVGSVVGRHEPDFMAMEKRLRTANKPPKVVRIAVAHKLLVRLNAKAREIRQSHAQKQALVCPC

SEQ ID NO: 413308 - protein, 509 aa, unidentified
MKTKRCKAKNQPGKKTKQVRTVSSAEVAEELAILRPDAGGVDCGATEHYASVPPDRVPAGQAAVRCFSAFTEGLDALVDWFKECRISTVAMESTGVYWIALYQKLEAAGIEVYLVNARHVRCVPGRKSDVQDPQWLRQLHRFGLLNASFRPEDLVCRIRSLHRDKENRVGSAAAEIQHMQQALQQMNLHLHHVVSDVTGQTGLRILDAILAGQRKPEELVKLRDKRCTKSTPEQMQAALVGDYRPEHLSVLKRSLQAYRFYQSQIEECDRQIEPLLQELAQRVEAASAQLQLPNPELKAGEPGEKLAEKQQQQCNATVPNTNALRTKKKRKAKANEPKIELAALLQRICGVDLTRVVGLNVASVLLIISEIGIDMTKWRSARAFCSWLGLCPANKISGGKVLNSRTRKVVNRVATALRLAAQSAGRTDTCLGIFYRRKKAQLGAPKATTATARKLACVLYHLLKNKEPYQDPDPVLYQKRLQISALTKLQRQATALGYTLFPAHAPAPV

SEQ ID NO: 413309 - protein, 414 aa, unidentified
MLYVGIDWAVESHTVTLLTRPGEVLKSLVIANTLKGFLTLLDAIRSHIGKDKPAPSPNDVLFIIEDRNQRLVDFLLAQDFIGYLMEPSRMPGYRLRYRSSGNKTDPDDAFIMADVLCRDRDQLPTIKPMNATVQTLKTLLMDREGFVRDQTRLINRLTACLRQYYPEALELFSDVAGKTALAFIAAYPDFAAAHRLSREQVQQFLTEHHCPRTKRLERIVELLAQEPIAAPAAVIETKRRLALHIIQQLQGVQATVAEYDEEIKRIGAENEEVQRFKGLPGAGPQIAGGLYTLFGDDRTRFGSAMAVQSFVGTAPRTIQSGKMRVVCFRFGCNRFYRTQAQQLALSALRMSAWAKRYYRGKRAEGKRHQHALRCLANLLMKIAFAIWRDQTTYDENRHLAQIMRHQLRQKSSMA

SEQ ID NO: 413310 - protein, 342 aa, unidentified
MEHFAGLDVSVKETSVCIVDDTGRIVREVKVASEPDALLSVLSNPAYRFKRIGLEAGPLSQWLFSVLAEAGLPAICVETRHMQAVLKAQINKTDRNDARGIAQMMRAGLYRPVHVKTLRSQKLRMLLTHRKLLQSKAIAIENDLRATLRNFGLKVGMVGTVKFEVRIKELVENLPDLVLLVEPLLIVRRALREQIVILHRRLLAVVRDDEVCRRLMTVPGVGPVVSLTYRATVDVPARFRNSKAVGAVFGLTCSRYQSGEVDRNGRISRCGDEMMRVMLYEAAQSMLRSKKWSWLKAWALQIARRRGMKKAIVALARRLAVVLHRIWVDGTEFRWTREAAAA

SEQ ID NO: 413311 - protein, 320 aa, unidentified
MGTDKVYVGIDVSKETLDLAVHASEQQWRFANIDKGITEALTCLEELSPELVVMEATGGFEYPLAAALAVAGMPMVVINPRRVRDFARATGRLAKTDAIDARVLAHFAAAMHPESRRLPDTQEQELKAILTRRRQLIEMLTAERNRLHSARSKAVKANIQAHIAWLEKEMTHIDDDLGHSIRQSPVWQEKDDLLKSVPGVGPVLSTTLLADLPELGTLNRRRIAALVGVAPFNRDSGNFRGQRTIWGGRAVVRSALYMATLVATRHNPVIRDFYRHLLSVGKPKKLALTACMRKLLTILNALVKHQIPWHYPITGPFQIP

SEQ ID NO: 413312 - protein, 359 aa, unidentified
MSLQVDNSSTVVGGVDTHKELHVAAIVDHHDRLLGSASFPTTRHGYKTMLAWMRSYGTLSRVGVECTGTYGAGLLRYLQQAGITALEVTAPDKSVRRKRGKDDTIDAENAAHAAYAGRRTVTPKTRDGMIESLRVLKVCRKTAIAARRIALQMIQMQIISTPDELREPLRKMTRMQLLRTLAAWRPDLSGYRDVTTAYRIAFKSLARRYLELHDEIADLDVMIKAIVDDLAPELVARQGVGYESASQLLITAGDNPARLRSEASFAALCGVSPIPASSGMTQRHRLNRGGDRAANSALHIIAIGRLRLDPRTQEYVVKRTGQGLSKLEALRCLKRYIAREVFYILRSRNQAINQVQIAA

SEQ ID NO: 413313 - protein, 341 aa, unidentified
MKKTEYVVGVDIGAESISIAALKGPDGAGLAELSVTNDPEGFEGLKGWLTKHRLTIENAAFCLEATGVYGEALCYYLCSRGFRIAVEPPLKVKRAFQQSAHKNDTVDARQIAEYGHRFFDELSWWTPPAAVLEQVRVLLTAREQFTGQKIANVNALKALERKTITTQIAIQAYEQAIARLTQNIKEIDQEIKRLVKQDDSFNRMITAITSTPGIGMLLAANLVVMTSGFARTRNHKKIASYTGISPIEHSSGTSVYRRPRSRRYGPSRMRKLLYLAAMSVSTHDPDFRRYYLRKVAEGKPKRLVLNNIANKLLKVVCALVKSESAYIPNYRSVQPLLLKTA

SEQ ID NO: 413314 - protein, 410 aa, unidentified
MVKENFIYVGIDLHKETHTAVMIDCYNQKLGEITFPNRPADFPKLVTKVKKCNIDAKEVVYGLENAYGYGRPLAVWLIDKGYFVKDVNTAISHRQAKHRGAMYRKSDSDDAGAIALATLNMLDKLPDACPNDAYWSLGQLVHRRDNIMKQRTRLVNQLHEQLCIAYPSYKQFFNDISIPTALYFWEHYPSRKYLKGKSVEDLRAELVPVSHNKCSTRTCEKILDAIAGDKVKNNAYQDARDMVTLSIVSDLQHYDKQLAEVDKMLEQMYKMLGCTLTTIPGVNVITAVKILAEIGDIKRFSNANKLAQFAGIAPLHLSSSGKGKDVATKQGNRRLQATIYFLAIQMVQVSSKGTPRNPVVRAYYEKRKAEGKTSQQALICISRRLISIIYGMLKSGTEYRMPVVENAGEK

SEQ ID NO: 413315 - protein, 341 aa, unidentified
MTVYIGVDLHKTQFTVHVRVGDRIESLSEIKQYPTTAVGYTKFLERIAGYKTADFTVKIGVESTGNTRFFKNQVEKAGAEVTVINTLKFKVINESTKKTDKHDASTISWFLSKDMLPESHICSKETENRRRLLKSRERLVRSIVGQKNEVHALLVSMGLDDELRSLQSKKGRQKVLDTLLSHSDLVLEAQSVKLIFQIIEQMIESVKMIEKHLSELTEDDAMVNRLMTIRGCGKITAWIIRAYTEDIGRFANAKKYAAFCGLVPWVQDSNESVRHGKITKRGPQELRTAYVQLVLGIRRCKDTWGWRIMQRLDYMKKNKGSGKSIVAAPCKPPSFSYKIQS

SEQ ID NO: 413316 - protein, 317 aa, unidentified
MNKHNDQQEVNIGVDTGKHQLDIYIRPLDIFFSVTNDHNGIKDAIAQIRKHHPSRIIIEATGRLEHEFIMACSKAKLPFAVANPAHIKKFAGAIGRLAKTDKLDAQLIAHYGEVIKPSFSQIKPETMRLMSDLLSRRRQLITLQTMEKNRLQIMPKEITGLIKPILTSIKKQIAKVDEKLLKLIQTSDEYKTKNDIIQSMPGVGNVVAISLLSNMPELGFLTNKQAAALVGVAPVNRESGIYQGQRRIKGGRHQIRTVMFMAMMSAMQCNPVFKSTYQRLVAAGKPKKVAIIACVRKMIVILNSMVRDGTKWDPEMV

SEQ ID NO: 413317 - protein, 401 aa, unidentified
MKEFNPEQHRIETASALEVVTNADQRERHAAYVGLDVHKETIAVAVAEAGRSEPVYRGEIANKPKSIEKLIGKLSEAYEGALLQFCYEAGPCGYVLHRQILACGHDCQVVAPSRIPRTPGERIKTDRRDALKLARLLRAGDLSAVWVPDRDQEMMRDLSRARDDMKGQERKARQQLNAFVLRHGHQWPRGKSRWTQAHYNWLESLRFERSWQQVTLQEYIDAVKAASARVAQLSEHLMQALPEWSLAPVVDSLIALRGIDKLAAIVLLAELGDISRFDSPRELMAFLGLVPSEHTSGPRRRQGGITLTGNGHARRMLVESAWSYRFPARQTMHLKRKAVNASESAKKIAWKAQVRLCGRYRTLTRAGKNTKVVCVAIARELAGFIWDIVRHQMAHPAPQAA

SEQ ID NO: 413318 - protein, 425 aa, unidentified
MGFIPPQHLTDSLPYHWFVGIDWGSQTHQVCVLDRTRRCVAEREVHHDGLSLAQFATWLSELSAGEPTQVAVAIEMPHGAMVEMLVEQGFAVFAINPKQLARFRERHSVAGAKDDRRDARVLADSLRTDLPSFRAVRLSAPELLVLRELSRAEESLLQDFRRTANRLRDHLHRFFPQMLQLCPAADEAWLWDLLERAPTPAHAQLLSEKQVHQVLKAYRLRRQQAPKVLTCLQAPALPVAPGVAEAAQAHCALLVPCLRVLAEQLRSCAQQVNTLLSILTHPTAETGPSDVAIVQSLPGVGRKITTWLFAEAAVPLAERDYEALRTQSGVAPVTRQSGKRRQVVMRRACNNHLRHALYHMARVAMQCDAEFSSVYQALRAKGQRHGQALRNIADRILRILIAMLRDRTLYNPAQRPFLARAQMSR

SEQ ID NO: 413319 - protein, 341 aa, unidentified
MKVSTLGIDLAKNVFQLHGVDHEGHTVLRKRLTRAKFVQFVIQLEPCLIGMEACSSSHHFARLFSRHGHEVKLIPPQYVKPYVKTNKTDAADAEAICEAVTRPNMRFVQIKTEEQQAVLALHTERGILIRERIACSNSLRATLAEFGITIAAGQSHLTRELPAILEDSENGLSPFVRASIYRQANHIRELEEQIKQVEEALASWYKTQTACQRLAKIPGVGMLTATYVVAAVGNAQQFSTAKQFASWLGLTPKEHSSGGKQQLGGISKRGDGYFRYLLVHGARALTAWVNRKGSVEENAWLQGLLERKHYNVAVVAMAAKTSRIMWSMLTHDTEYKPRQAA

SEQ ID NO: 413320 - protein, 387 aa, unidentified
MIYVGIDIAKLNHFASALSSDGEVLIEPFKFTNDSDGFFMLLSKLSSFDKDSIVIGLESTAHYGNNLLMFLVPKGYKVCLINPIQTAVLRKNNIRKTKTDKVDTYIIAKTLMMNDFRYVTLQDIGLIQLKNLGRFRLKMVKQRTRLKIQLTSYVDQVFPELQYFFKSGIHHKGCYALLKEAPSPEAVASMHLTHLTHLLKTNSHGHFKKETALELRVLAQKSVGGGDKSLSIQIAQSIEQIELLDSQLKRTEQEITDIITSLDSVIMTIPGIGAVNGGMILGEIGDIKRFSSPSKLLAFAGLDPSVYQSGNFQAKRTRMSKRGSRAFRYALMNAAHNVVKNNNTFKAYYDKKRDEGRSHYNALGHCAGKLVRIIHKMLTDDVTFDLD

SEQ ID NO: 413321 - protein, 450 aa, unidentified
MREPEEIEDQAYERVVERVCAIDVAKASGKVCTRVPHPSRPGQRRTRVWDVEATTNAILELGEYLAGEEIEKLTLESTSDYWRIWFYLLEAAGLDVQLVNAREVKNAPGRPKTDKLDSVWQAKMTERGMLRPSFVPPVEIRQLRDYTRLRVDLTRERTRYWQRLEKLLEDSLIKVSVVASTLDTKSVRDMLEALIAGERDPKVLAGLARGRMKAKRAALVEALTGRFDAHHAELTRMLLDQIDQLTMQIGRLTTRIEELIAAIPAAQGADADGTTGPSAGRGPDAALLPAIDRLDQITGIGREGAQAIIAEIGLDMGRFPTAGHLVSWAKLSPRTIQSGATSRSGRTGKGNPYLKGVLGEAAAAAARTDTFLGERYRRIVKRRGKLKALVAVARSILVIIWQLLADPTARYQDLGPDYYANRTNKDRRARSRIRQLEALGFTVTLTQAAA

SEQ ID NO: 413322 - protein, 338 aa, unidentified
MALYCGIDLHSTNCWVSVLEEGRRVVREKKVGNDLPAILEFLEPHRAELEGIAVESTYNWYWLVDGLMDAGYEVHLTNTWAAKQYEGKKYADDRHDARWLAHLLWLRILPEGYIYPKEERGVRDLLRRRTFLVQKRTSFLLAMRGAFECRTGLRTSSNDIKKWTVEDVDFHIEDPCASLGVTCLLGPVAAMSEQIQLLEKEALKRGKLRKEYARLTTVWGIGKVLGLTIMYEVGEIDRFAKVGNFASYCRCVKSDWLSNGKRKGSGNSRNGNPHLSWAFSEAAHFATIHYEQAKKYVQKKRAKTNGIVAIRALAHKLARASYYVMKDEVDFDPERLFT

SEQ ID NO: 413323 - protein, 344 aa, unidentified
MAQGTTARVTTVGIDIAKNGVCIHGVDAHGHVVVKKRLARQKVLPFLTQLPPCLIGMEASGGAHYWAREFTQLGHTVKLMSPQFVKPYVQSQKNDPNDAAGICEAVERPRMRGVPVKSITQQDVQALHRIRERQIKARTALINQIRGLLMEYGIVIPQRASQVRHKLPIVLEDAENGLTATAREWLHALAEELQALDQRIAATDQQIERVFEADEACQRLAQLPGIGPLTATALVAAVGDATEFKNGRQFAAWLGLVPRQHSTGGKTTLLGMTKRGNCYLRTLLIHGARAVLRVVDRNTDARSRWLPGVKARRGMNCASVAQANKMARVAWALLAKGDRYRHAA

SEQ ID NO: 413324 - protein, 424 aa, unidentified
MKVTYQTCCGVDVHKSFLVATIVKTSGGIEPSYQKERFSTFNNSILEFKQWLLDNDCHDVCMESTGKYWVSVFNLLEDEINVVIANPKWVKAVKGNKDDAKDSKWIGDLFRLGLVKGSYIPCKKVRILREYTRYRYKLVSCRSSEKNRYQNALTVCNVALDSVVSDIFGKSSTSIIDYLLEQSGSSINHEKIASKLLRSLKFKEDAVIESVEGYQMTDAQKYRMRLIRAHMDYITAEINDVDKMIENMISSTPDFDNAVQFLCTIPGVKRDSAISIISEIGTDMSQFEGSKRLCCWAGLTPGNNESAGKKKSVRITRAGVYLKPALVQCAHAAVKSDKSPYYQKKYEALVKRRGKKRAIIAIARMILTAIYQMLSTGEQWNPSDLYKIDMPEALVEKQKAKAIKQAKKLLQQEGILPPDEPLAS

SEQ ID NO: 413325 - protein, 340 aa, unidentified
MNSKRVSIDLAKNVFQVCTFSETGKIHTNQKVSRTQLSRVIQQIEPTIIAMETCYSANYWGRRFQAMGHTVNLIPAQHVKPFVRGNKTDNNDAIAIAEASLRPNMRFVPVKTLHQQDIQIQHRIRQRHVSERTALVNQMRGILAEYGVIVSKGWRKLQQQLPDILEDGENELTPIARENIVELAEELRTHSKWIDGDNLRLKLMMEDNEDYHRLLGAPGFGPIVSSATIAAIGNGAQFKSGRQMAAWLGLTPRAEASGERSVMKGITKRGNRYLRTLFIHGARAIVTWCEKKDDPMSRWIKQLIARRGKQKAIVAVAHKMARYAWVILNRKESYKLAKTN

SEQ ID NO: 413326 - protein, 416 aa, unidentified
MIPAVIERCAGIDVGKKFLAVCVMTGPAKEEAHYEVRKFGTVRAELVRVREWLKAEGCTHVVMESTGCYWKPVLNVLEDDPDYELHVVLANPQQVKAITGHKTDPHDARWLAHLLRHGMVRPSCIPSRALRDLRDFTRRRKQVITAASQERNRVQRVLEDANVKIGDVLSDVFGLSGQLMLEALVEGRASHIEIAQLAKGNARRKIAELEAALEGHQMRQAHRMLIRHAMQHMAFLAREVEELDKEIEDLIRQAGLTESWKLLQTIPGIQETAAATILAESGAEMAQFPTPANFSSWSGVAPGNNESAGVKKRAPTVRGNPHIKAAMVESGWSASRTKDSEFQDRYNRLKVRIGHKRAIVATAHFLALTIYEVLATRAPYQPRQPRFEVRRITRLRRHHSRRLRTLDHWLREQDCG

SEQ ID NO: 413327 - protein, 363 aa, unidentified
MICWASALKYSKRSRIGGIEMGGSRIYVGIDVHKNFSFVCVMKENGEVILEKKVRTEELEKLLEDIENKTIILEPTTTAINLARKLRKKNEVLLSHPYKTKLIAESKKKTDRVDARVLADLARTNFLPTAYLPPDEIVELREIIRERIRLKKLSTSIKNRIHSILAKNGIKYEGNLFNTEGREFLYSLNNKWIDRYLRILSSIEEEIKEIDKEIRHKCLENEETMLLTTIPGIGYFSALLIYAEIGDVKRFPNSKKLCSYAGLVPSIRQSGNKVITGKITKEGNKLLRWVLVQCAFVAIRNDERFRNFYERIKQRKGPQKAIVATARKLLTVVYAVLRDKKPYIIHTPTNYYGEEFTPVTNWA

SEQ ID NO: 413328 - protein, 344 aa, unidentified
MTIVEERPAITAGVDTHSEVHVAAALDSLGGLLGTREFPATAAGYASLLGWLGKFGDVALVGVEGTGSYGAGLARYLARRGVRVVEVDRADRADRHRNGKSDPLDAVSAARAALSGRAAGEPKGRDGAVEAIRALMVAKRSARHERTQAINQARALILTGPDELRARFAGLRAAALAEAAAALRPRPGDAAEYSVRIALRELGRRVEFLDDQIGRLDDLIVPLVTARATSLLGLYGVGHDTAALLLIAAGDHPERLRSEAAWAHMCAVAPIPASSGKTRRHRLNRGGNREANHALWRIVITRMSAHPATRAYVERRTKEGLSKKEIIRCLKRYVAREVYPHLRG

SEQ ID NO: 413329 - protein, 314 aa, unidentified
MSSLVFVGIDVSQARLDVAIRPGASFSLTHEESAIATLVEQLCALGPTLIVLEATGGMEIPLTSALATAGLPVVVVNPRQVRDFAKASGHLAKTDALDAQVLAQFAEVMRPQPRPLPDAEARALAALLTRRRQLVEMLTAEKNRLLSAPSPIRTRLRTHITWLERELQSINTALAEAIRQSPVWREKDELLRSVPGVGPVLTSTLLASLPELGTLTHKQIAALVGVAPLNRDSGTLRGRRTVWGGRAQVRAVLYMGAIVAARFNPVIRVFYQRLQRAGKAKKVALTACMRKLLTILNAMLKHRMPWREVEAHHA

SEQ ID NO: 413330 - protein, 348 aa, unidentified
MDEIIRVGLDTSKHVFQLHGVNAAEEPVLRKKLRRKEMMTFFERLTPTVIAIEACGGSHHLARSLEAFGHEVRLIPPQYVKPYVKRGKNDAADAEALCEAMSRPTMRFVPIKSAEQQAALMLIGLRDRLIRNRTQLANSIRGYAAEFGLVAATGICRIEPLLERIVADENLPALARELFGVQAEDYVLIQTELKVIEAKLMAWHRANSCSQRLAQIPGVGPIGASMLIMKTPDPGLFRSGRQFAAWLGLTPKDHSTAGKVRLGVITRAGDEVLRSTLIVGATAVLRRVREGSRKNPSPWLLDLLKRKPPKLVAVALANKIARIAWKLMTSGEIYEASGRRSTAAVAAS

SEQ ID NO: 413331 - protein, 337 aa, unidentified
MLYVGLDVHWKTSTLCILDANGQEVKCRTFAHGGGWQALLRECQAIKEPFSVAFEASCGYGYLHDELGKLAQRVVVAHPGQVRLIFRSKRKSDRVDSRKLAKLLYLGEVPPVHVPSTQIRQWREMIEYRQAMVAKRVRTKNALRALLRGQGIAAPRGLWTGKGLAWLKTIAMDGQLRTVRRDMLLEELELFSRQIPAVTRQLDVAGQAHPGVSLLETIPGVGPRTAEAFVAYVDQAQRFGSVHSVGAYLGMVPCQDSSAGVNRLGHITREGPATARKLLVEACWQMIRRSPRVRELFERLCHGKKERRKTALVAVARHAACWMLSMLHSGECWREAA

SEQ ID NO: 413332 - protein, 393 aa, unidentified
MKNRTKVQTRRSKLLSRQTKAQSTQQNLSVQNNDPNDSEQTAKAPLAAVAGIDIGDKHCHLRLINFDGELIDETQISTRPAPLEKYFRRWPRLRIVIEAGTHSNWIRRTLAGLGHEVLVANPRRLRLIAQSYSKNDRHDAWWLAELGRTNPELLSPTEPRSAQTEQHRIWLRSRESMIESRTKTINSLRGMAKSQGLRLGTCGPTQWVSKVREHCPRELHPALLPLARIIAALTREIRQLNKQLEQLADKVYPATARLRQVNGVGALTALAYVLALDNDAGRVKRSRRAGAMVGLRPKQRDSGQSAPQLGITKCGDKLLRRLLVQSAQYQLGPFGQDSALRQWGLKLAAGTNRRAKRRAVVAVARKLAVLLHVLWSKDVDYDPFYGITPEKAA

SEQ ID NO: 413333 - protein, 345 aa, unidentified
MENMYYIGLDVHKKTISYCVKDGGGRIYAEAEIPATRLGLDMWMKTLPQPWTAAMEATIFTAWIYDHIKPHAVAVKVAHPLMLRAIAAAKKKNDRIDAHKIADCLRCDFLPECYMASTEIRERRRTLRYRNLLVRQAVQMKNKIAVLLMEAGVSYNKQKLHKVGYFRELLATNPDIDEGLKPLLRLCRETVVRLGKTESALVRSLQRDSLLMERVERLMTIPAVGPITALTWALEVGDVQRFSSIKKAISYCGLCGAENSSANIIKRTPLSKQRNKHLQTTLIEAAKMAPRNSPELAMIYDREKQKGNANRATLAVARKLVAYLVAVDRRQKDFLIVERENRTAA

SEQ ID NO: 413334 - protein, 340 aa, unidentified
MSTPSHTPPSIVTEAATFIGIDYHKKYSVYHAVDAAGSELGKGRIEHHSPHDFATLVKRWSNARVVFEASMNWHWLYEVLEQSMPGEHITLANAYKTRIIAEAQVKTDKIDARILALLLRAGLVSSVHIPCKETRQRKEVLRQRCFFVRQRTMLRNRIHRLLGAQHDLKLPQCSDLFGKKGMGFLEKLELPAPAGLLLKQQLDMLKNVQARIKEDEAALVQMMSTTEAQQHVLSIPGMGPILAAVVVSEIDGISRFNSAQKLCGYIGLCPSTSSSGGKTYNGKLMKHCNKWLRWAFVEAAWVAMGCDSYCPGLSPYGVLFNEALRASQVATSAVETTSTD

SEQ ID NO: 413335 - protein, 385 aa, unidentified
MSQLNDLSRSLNCLEQDRTIIAVIEMSQSNWLVAGIVPGIERHPLKKLAPNEEDLLRLLIRWRAEATKKGRTIVRIAVAFEAGRDGFWLARWLCARDIEAYVIHPTSVAVSREHRRAKTDRLDTGLLKRVFIGWLRGEPDHCHMAAIPTLEEEDAKRPNREREGLVRERTRIVNRIKSCLVRFGIRNFKPTLRKAPERLSMLCTPEGVPLPPNTLFELRRDMARLRFVIEQIKEIEETRAQRLEQAPQENSHAMVRLIARVIGVGVETADMLVHEVLARNLRDRRAVARYAGLTGSPDESGSRRREKGLAKVGNARVRRGMIQLAWRFLLFQKDSALAQWYRARTEIDGRKRKTMIVALARKLLIALWRLVTTGETPAGVVLRAA

SEQ ID NO: 413336 - protein, 269 aa, unidentified
MQTITTIGFDIAKSVFQVHGVDAAGEVVIRRQLKRRYVLAFFQKLSPCLVGIEACASSHYWSRELQALGHTVRLMPPAYVKPYVKRQKNDMADAEAICEAVTRANMRFVPTKTREQQSCLMLHRTRHLFIRQQTAVINSIRAHLAEFGIVAPVGRKGVTELLHVVADPSDKRVPEVARACLAALGTQLLSLKQQILEFDRLIMAWHRSNQTSKRLHYIPGVGPMLATALVASVADPRTFRSGRNFSAWVGLVPKQHSSGGKDRLGSISK

SEQ ID NO: 413337 - protein, 396 aa, unidentified
MAGDDRREFDCMAHQVACIDEWAKSLHKRFGGTIAIALELAKGPIVYALQKYDFFVLFPINPSTLAKYREAFKPSRAKDDPTDAELALDLLLRHPERFAPLQPESVAMRTLLSLTEHRRELVNDKIRLTNRLANTLKQYYPQALEWFDQRDTILFCDFLTRWPTLAQVKRARQASLKAFFHAHNTRRPRVIGARLESIKAAAPLTEDPGVIVPCRLHALVLVEQLRVTLQAIDRFDREIADLAPTLPDYPLFQGLPGAGPHLAPRLLAAFGEQRQRFQGADELQKYAGIAPVTERSGKKSWVHWRWQCPTFLRQTFVEWAGQTINKSFWAGAYYRQQREKGSSYQAAVRALAFKWIRILYRCWVSRTPYDETTYLNALRKRGSPLLNNLTLNPQNA

SEQ ID NO: 413338 - protein, 353 aa, unidentified
METIVAIDLGKNKSVVCEMNRGSLKTQYRTVRTHPELFHDLFAELDVSHSIVLFEVGNQAGWLSDMLRGMGLNFKAANTNDPAWKWANNPTKSDKKDAHRLAMMYHHGFFPEVHIPRKEVRQKRSLIGYRQKMVGRMTQVKNSIRALMCTMAIDLPAGRNCWTKKQLKALSEYAAPFAAIEDPCELWRGQLYTELQHYAALEEQLNTVETKLEAINRQNTAVTLLQTVPGVGPRTAEALVAVIDDPHRFKSCRQVCNYVGLTPRRYQSGEMDRTGRISKRGNPLLRMLLVQAGWASLQFAWARDIYNQVGRGSVKRRKIAIIAVARHMLMRCWAMLRDNQPWRCSVEKVAAWK

SEQ ID NO: 413339 - protein, 350 aa, unidentified
MLYTGVDYHRSFSYLTTMNEKGEVVSQKKLPSNGEIVDFLKSFGESMQIAIEATPSWYWLYDHLEDVGFDVKLSHPLKTKAIAYAKVKTDKVDSATLAHLLRSNLLPLSYVPEKSTRLNRELLRYRASLVKIQTGVKNKIHTILAKNNVTHGYSDLFGKEGMVFLHSLTIPENYKIALEGYLAVLDMVRREIRVASKKVQELAEENREALLLMSIPGMGYYSALLTASEIGDVKRFRSAKQLCAYAGLVPSTHASGNTCFHGHITKQGSRWLRWILIEAAIHAVKRPGVLRRFYFKIEKKKGGQIAKVAAARKLLEWIYHILRDGRTYQEMEKIADLMDRGEPGNSSGSV

SEQ ID NO: 413340 - protein, 359 aa, unidentified
MQTQSKELNFEGQNIFVGIDVHLKSWNVSIFTENLHHKTFTQPPKAEVLFEYLKRNFPNATYLSTYEAGFCGLWVHYKLKELGINNIVVNPADVPTTQKEKMRKSDPIDSNKLGRSLRNKELDKIYIPRPETLEDRSFIRVRSTIVKDMVRMKLRIKSMLYFYGIEYPDEFQKSSTHWSKKFLNWLNEIQLKYPTGTDAIGLLIHESELQRELLLEATRKIRILSKTEPYIKNMELITSVPGIGLITGIQFMTEIEDIKRFENENKLAGFVGIVPNCSSSGDNDKVGEMTPRGHSFLRKGLIESSWVAVRIDPALSLAYYNYCKRMEPNKAIIRIARKLLNRIYSVLKNQKRYETGRVK

SEQ ID NO: 413341 - protein, 410 aa, unidentified
MYGKAGPMIYAGIDIAKNDHVVGATDEHGRDASRPMKFANSAGGFDRCIAYLEGLAESKSDLLVGMEATGHYWLPLFCRLQDAGYDVVVINPMRTDAMRRFKGSSRVKTDIVDCVLVAETLRCGGFQPSRLGDEAVIELRQLTRLHQALKESVADLKRQVIVALDQVFPEYDSVFSDTFGESSKAFLKRCPTPEECLAVRADSLARTLERASRGKLGRAKADEIKGIAKASCGIGLATSAFSFQIKLLIDQIDFIEGQVSEVEARIRAGIEEVEPLILTIPGIGYALGAQIVSEIGDVRRFRNASSIVKYAGINPSVSQSGKFSSEESHITKQGSPYLRRALYLAAMAQLKLKSPFYDYYAKKRADGKSHREALVAVARKLVHVIYAVLSKQEPYDPNVTKSPELASRSE

SEQ ID NO: 413342 - protein, 350 aa, unidentified
MDMVVIGIDSHKSTHTAVAADGNGRRLAERTVRATSAGHLELVRWAARFKDRRFALEDCRHLSRRLSNDLLVAGEAVVRVPPKLMAGARRSSREPGKSDPIDALAVARAAIREPDLPIATLDGPEREVRLLVDHREDLVAERTRMENRLRWHLHELDPGGEPIARSIARRATLDGLEANLATRPGQVARIACELVIRIRDLTLRIDGLETEIARLVRDLAPALLGLVGCGALTAAKLIGEMAGIGRFRSPAAFARHNGTAPIEVWSGNRERHRLSRSGNRQLNVALHRIAITQLQRPGPGRTYFDRRRSLGNTKAEALRALRRQISDEVFRRMRRDDASRPSATALAAVA

SEQ ID NO: 413343 - protein, 353 aa, unidentified
MGQNPTARLGQNSIAKPHVFQVHGVDAAGKAALKRKLRREEVIPFFEQQERCTVVLEACGAGHHWARMLTQLGHEAKLLAPEAARPFVKKGKKNDAADAAALCAAASQPEIKFVPVKSLEQQGVLALHSVRTLLVKQQTMLANAMRGLAAEFGLVVAKGVHRLDELEAQVQAEASMPATAKQAFAELHGHSQAAATRIAGLEAQIVAHARQDATARRLATIPGIGPITASLITATVGDTIGSFKSARHFAAWLGLVPRQHSTGGKTRLGRITKAGNSEIRRLLVLGATSMVFRAGQWNSTAGAWLRGVLERRPVRLATVALANKMARIAWAVMTRGETYQAKGRAPAAAAAVA

SEQ ID NO: 413344 - protein, 393 aa, unidentified
MVYVGIDVAKDKHDCFIANSDGEILYDVFTIQNDMDGFEDLFFKIKTSSKDLSKVKVGLEATGHYSCNILGFLHNKGLTTIVINPLYTSLSRKSVSLRKTKTDKVDARTIASMIMSDVSLKPYSDTLYHNEDLKSLSRYRFNKVSERAKLKQSVSRLVNILFPELEKLVSTLHTKAVYELLSEFPGAHQVASANLKHLTALLISESKGHFGRDKANEIREAARRSVSSYLPAKSLELRHTIKLIRELNAEIAEIETEIKKIMDSIDSPTLSVPGISYALGAVIVSEVGDFSRFDNPDKLLAFAGCSPSTYQSGQIYSTHAKMEKRGSRYLRWALLNAAKFVCKWEPTFAIYLRKKREEGKHYNVAVSHAAKKLVRLLYHLETTGEKYIPQTLS

SEQ ID NO: 413345 - protein, 461 aa, unidentified
MSQKRPKGKKEKSARQPMDWKALEIVHPDAAGIDVGGQEHWVAISPERDPEPVRRFRCFTVDVEEMARWLVEKGIRSVALQSTGVYWMPVFEILEQHGLEVYLVNAQHTKNVPGRKSDIQECQWLLKLHAFGLLRNSFQPTDEIRIARTLWRHRGNLVAEASSTIQRMQKALIEMNIQLSTVLSDLSGVSGMTILGAILEGERDPQQLAALADPAVKARPEDIAKSLQGNWRAELLFVLRQQVELYGVYQKKIAACDLQLRQHLESLGGKIDLKTQPLGPRPQGKRGSRNAPEFDLRSELYRVTGIDWAQVNGIDVLTAQTVMAEAGADLHEFASEKHFASWLGLCPTNERSGGKILNRKTRQVVNRATVAFRQAASTLLRSQSYLGAQYRRLRTRLGAPKAVTAMARKLACLYYRLIKHGQQYVDKGTAYYEARYREQQIRVIVKKAQKLGLQVVIPQSA

SEQ ID NO: 413346 - protein, 391 aa, unidentified
MYIVGIDIGKRHHEASIIDGQGNLQGKSLRFANTHTGFNKLLEAARKAADRDHQIVFGMEATGHYWLALYTHLRREGYPVHVINAVQSDALRGMYIRQAKNDSRDSFIIAEVIRFGRFCETSISAPDLHALRELCRHRFWIVDSISDLKRKVIALLDQVFPEYEKLFTNTFGKTSLQLLSEYTTPEELLAVDTDKLAETIYAASHGHHGLEKALEIKDAARNSFGILLDCDSIALLIRQYIEQIRFVEKQVDSIDIEIARLFSAFDNQLTTITGIGPTLAATILSEIGDIRRFDSPAKLAAFAGIDPSVKQSGNFTGTRVHMSKRGSPYLRRAIWLVATVAAFKDPAISIYYQRKRAEGKSHLTVLGHVSRKMVNIIFAVLRDNSPYSPAV

SEQ ID NO: 413347 - protein, 333 aa, unidentified
MMNINPQGWVANRDQRPNAGIDVSKQHLDACWGAQELRVDNDATGWDELIAKLKDVNVDLVVIEATGGYERGLVCALQDADIVVARVNPRQARDFAKSMGVLAKTDAVDARTLRDFADVLARHKDRAKYITAPVDAQRLELATLMVRRRQLVDMRVAEGNRLELASPVAARSIRSVLKTLDKQIAGIDQNVDDHLGRHFGKQRELLDSVKGVGAVTILTLTAALPELGTLGRRQISKLVGVAPLADDSGKRKGPRRIWGGRSEVRSVIYMATMSAINYNPVIKVFHSRLIAAGKPKKVAIVACMRKLLTILNAILRDQTPWDPRKHVQTPKSA

SEQ ID NO: 413348 - protein, 312 aa, unidentified
MNNDTIGVDVSKDHLDAHRLANGAARRFANDRRGHKALIKWLAQTPRYRVVFEPTGPYHRAVERALGVAAVPFVKVNPRQARRFAEATGKLAKTDRLDAAILARMGASLELQARPARSEILLELKELYVAREALVKDRTAARNRGKVLTLSLLKRQNAQRLEQIDRQIATVEAAILQIIEADASLADRFAILTSIPGVSTITAFALLIAMPELGALEAGQAANLAGLAPIARQSGRWTGRSFIRGGRADVRQALYMPALVAARFNPDMKAKYAHLIQTGKPAKVALTAIMRKLVVLANALLKANRPWTPKTA

SEQ ID NO: 413349 - protein, 372 aa, unidentified
MPDVISTAPADVRLWVALDVHKFSIVAAVLPQSGGRPEVTRIETTEKAIRRFIKSLGGPEGLAVSYEAGPGGFALWRLLGSIGVACDVIAPSLVPVRAGDRVKTDRRDAKKLVSLFRGRLLRFVQPPTPETEGLRDLLRCRDDIRCARTAARHRVAKQLLRHGRIYRDGKKAWTLRHRAWVLRQRLDDPLAHEALSQMLTHLDSLDRQLAALDAQLEQIAECEPWGWQVDKLRTFRGISTLTALGLIAEIGDFARFGHPGELASWLGITPSEYSSGDQQHRGHITKSGNRHARRLLTEAAWHYRHPPRRPTTGPEPSRRAWQAQIRLHARQRHLTQQGKRSTVVTVAVARELTAFLWAEMTQQPAREELQAA

SEQ ID NO: 413350 - protein, 344 aa, unidentified
MDHYAGIDVSLEYSSVCVVDASGKVVREAKVVSEPEALIGWFGSLGFGLARIGLEAGPLSQWLYAAMKQAGLAVELLETRHVSDAFKTMPVKSDRNDARKIAQLMRLGWFRPVHCKSITAQEIRAMLTARKLVQSKLLDLENSLRGILRGFGLKVGKTTRTNFARRIEELVKGHPNLQTIGQALLRARAVLLAEFNGFEKRVRAMSRLHEKARLLMSAPAVGPIVSLTFACAIDDPSRFTSSKQAGPHFGLTPKKYQSGETDYTGRISKHGDASVREALYEAAHIILTKPIKGCSALKSWAMRIARRAGTNKAKVALARKLAVIMLRMLKDNVPFNPAAKPATA

SEQ ID NO: 413351 - protein, 341 aa, unidentified
MSKRLVPNCAVLHCGIDVSAAMLAVAVQPEGSDGFELREFANSTAGCRQLVAWLDRWQAPVRVSLEATGIYSLDVALALDRAAGIEVAVLNPRTVHRFAESLRRSKTDAADAVALAEYSRRMPFVAWVRPPEAALELRAISRHSATLTEEHARLKNRLHAACGSTSTPRCVREDLRRSMAGLEKRLLRLRREALAAIAKDAGLEQKFQHLTGITGIGEASAVQLLGELAGLDPEMTVRQWVAHSGLDPVHEISGTSVHKPSRISRRGSRHLRRALYMPALSATRFDPYMKAFYTQLQARHKTKLQALTAIARKLLHAIFGIFKTGTPYHPEKLFPQLLLIS

SEQ ID NO: 413352 - protein, 389 aa, unidentified
MSTQHKYVGLDVHKDTSTITVAESGRMGEIRCYGTISSDLNAVERALAKLRADGATLHVAYEAGPTGFVLYRRLRQLGIDCIVVAPSKTPQPKGGRHKTDRRDAELLARLLRAGELTAIAVPDEVDESIRDLARAKQRLKSFLLRLGYHYTGPGNWSAPHQRYLRALRLSLPAHQAVLEEYLLAFDQGTKRVARLDDRLAAQVPRWVHYPAVQALMNLRGFQLTAATVLVAEIGDIHRFAHPRHLMAFLGLVPREATTGDARRLGSITKAGNVHARWMLIETVQSATKPPKVSAPLALRQEGQPADRRELAWKVQCRLYKRGWHLLNRGVLKTQGHRRAGPRDGWLCLGHAPLGACARRANRGAGRAGPATSLTPHSRTGPPVPVPLFR

SEQ ID NO: 413353 - protein, 347 aa, unidentified
MRFYTKQHKYYCGIDLHTKKMYVCILDGEGQIRLHQNIKTEPESLLRILTPFREDVVVAVECMFTWYWIADLCIEENISFVLGHALYMKAIHGGKAKNDKIDSHKIATLLRGGMLPQAYVYPVKMRATRDLLRRRNHFMRKRAELFAHIQNTRSQYNLPDPLGCIAKPQNREGIVQRFDDPSVQKSMAANLEMIKAYDHTLTQLEHDIIASAKEHDLRSYALLQTIPGVGRILALVILYEIESIERFPSVQDFVSYSRLVKCIKESNGKSYGPSGKKIGNAHLKWAFSEAAVLFLKGNEPGKRYLERLAHKHGKAKALSILAHKLGRAAYFMLKNKEAFNQKQFLNL

SEQ ID NO: 413354 - protein, 341 aa, unidentified
MCEYIGLDVSLKETAISVRRDGQRVWRGKCPSDPGAIAGVLRRRAPNAKRVVFETGPLSVWLFHALSAEGLPAICIDARHAKAALDMAPNKTDANDADGLAHLAEVGFYREVRVKGFDSMLVRTRVAARRRLVRMSTELSNQIRGLMKTFGLVVPVAKGGRFESEVRRLLEGQDGLAGVIVPLLDVWIAVRGRAAELGRQLLSYARHSADCLRLMSIPGIGAITATSFVTAVEDPANFRSSRAVGAWVGLTPRRYQSGEVDYDGHISRRGDAHLRGLLYEAATVVLTRANADSTLRAWGLKLRERIGFKRAAVTVARKLAVIMHAVLKSGQTFQRETKPMA

SEQ ID NO: 413355 - protein, 353 aa, unidentified
MRTYYVGMDVHGASIVIVVLNGAGKVVMQYVAETSAERVRDFLKQLRGKVYVTFEEGTQANWLHDIVRPLVTEVVVCDPRQNKLLLSGNKSDRIDAQKLAELLRNGALKAVYHGDHGMRMLKELVRTYDCLVSDTTRVMNRLKAIFRGRAIPCGGHDIYRPDRRPQWLAKLKEPGARQRADFLYRQLAALKPLGHEAKRLMVKEARRQTASPWLLSVPRLGVVSVAQLLAIVGTPHRFRSKRQFWTYVGLAVVTRTTADHEVVNGVLQRSRRPLATRGLNRNHNHVLKRVFKNAATTACHSGPFKAAYDARVKQGMDPSLARLTIARQLSAITLALWKRGQQFNPERMKQQAA

SEQ ID NO: 413356 - protein, 344 aa, unidentified
MDHFAGLDVSVKETNICIVDDTGKIVREVKVASEPEALLAVLKNPAYNFKRIGLEAGPLSQWLFGALAEAELPVVCVETRHMQAVLKAQINKTDRNDARGIAQMMRVGLYRPVHVKTIRSQKLRMLLTHRQLLQSKAIAIENDLRATLRNFGLKVGMVGKVRFEARIKELVENLPDLTALVEPLLIVRRVLREQIVILHRRLLAVVRDDEVCRRLMTVPGVGPVVSLTYRATVDAPARFRKSKAVGAVFGLTCSKYQSGEIDRSGRISRCGDEMMRVMLYEAAQSMLRSKKWSWLKAWAMQIARRRGMKKAIVALARRLAVIMHRIWVDGTEFRWTREQAPAAA

SEQ ID NO: 413357 - protein, 340 aa, unidentified
MARRKEKSRAVGVGIDVSKTELAVCVRREGGALERSTVANGAAGVRRLVRSLAGCACPIVTEATSHHGWLAAVSLVEAGLDARVINPILAVKYTKSGVRMVKSDPADAATLALMAEVDGKLPPTFSATREGLAWRKEYGLVETLKRKCSEMRVAVAGAREAAASLGLDASAGLAPAEGALKALDAAARKAEAALAARAAGLSGGLAARLATIPGVSASAAGLACQLLATGGGRDAKSWVAFAGLDVSVRQSGAWRGKSRLTKRGSGALRARLYCCAWGAVRNHARFRALYDELRAKGRKHAEALVIIARKIVRTMFAVASGRAVRYDEALAFPAGKASVA

SEQ ID NO: 413358 - protein, 334 aa, unidentified
MKKEKEMKESIGIDVSKLTLDVFIYTKRLHKQFQNNRKGFESLRKWVNGEAGDLEEVIWCFENTGWYGVLLGHFMHENKLHYCCVNALEIKRSMGLKRGKTDKQDAEEIARFAWLRKEELKTSIPMPIKLIELQRLMSLREQLVKQSTALKNLNKGMMVTLEKKTGDTALGIIKQTLKQLEVQIKKVEKEMEGLIKTDDQLKQNYKLSKTVKGVGAVLAIQMLLHTHNYTRFEKWREFSSYCGLVPFPHQSGTSIHRRPQIHPISDKKMKSLLSMSAISAIQADKELKTYYKKRVEEGKPKMVVLNIIRNKIVSRVFATVRRGTPFVEMNKYAA

SEQ ID NO: 413359 - protein, 318 aa, unidentified
MTQSTTLTAGIDTAKDKLDIAVHGQAHTFSVKNNIGGWKVLAAELTKAGVTRVGIEATGGYERGVVRHLQAEGFSVLVMQPLQVKAYARLHLRRAKNDSIDATLIAACASAIDPASAEPDPRLDALVDQLTFIEQTEEDIIRCKTRLEHIHDPRLRRSVAADIARLEKRRATELRRVEAALRAQADLATRLDLVLSVPGIGVRTAIALILRLPELGKVSREQAAALAGLAPFDADSGKHKGERHIAGGRSRLRRSLYAAALPASFRWNPAVKALYGRLIKAGKSHKAALVACARKLLIFANTVVARGTPWEDRTAITA

SEQ ID NO: 413360 - protein, 346 aa, unidentified
MGKSITDLSSVTTVGLDLAKHVFQVHGVDASGRVVVAKAIRRNKLLEFFASLAPCLVGLEASGSAHHWARELIKLGHDARIMPPAYVKPYIRRQKNDASDAAAICEAVTRPSMRFVGVRSLENQAALMRHKAREMLVAQRTQLLNGLRGHLTEVGVIAPQGLRFARELAELIEACDETIPFEVCEALAPLVVQLRNLDEAIARLDRIIAKLAQKDETARRLMSIPGFGPITASAMAATIQDTSSFAGPREFAAFLGLTPKQNSSGGKPKLGRISKMGNRYLRKLLVVGAHAVLFHRKPHTDPLRMWAKKLIDKKPFKLVAVALANKMARIAFAILRGKTVYREIPA

SEQ ID NO: 413361 - protein, 480 aa, unidentified
MIRSVGIDLSRTGSHQVRCLDEQAKPCDSFSFDSTLEGLENFEKRVFSNGDTPTIIFEPTGLAWIPMAVYLRARHPECQMVKARLQKVAALRRYLRSYTKSDRVDGVTLAKMPFIDAEQLDEAYLPPVEYHSLQRLTRQRERLMKSITIRKNRIGSIINGYLPDLRKAFSDEWSDRARLFYRQRLNPFTVVRDGKSALETFLVSVKAKGAQTESNRVYQACQKLAEFYEKSKAAGMINEDFFDDLQEEIACELRLMETEEAEVERVSVRIEELYGHLHPSDYLRSIPGIGVRTVQVFLAIIGDPHRFRSQSAFANWTGVVPGARQSADTEGKGLRMTKAGPSMMKRALFQAGDIARRYDPQLAHLYYREMVHHGKTHLQAMGAVMSHLGARIMAVLREGRPYELRDSQGKLLTKKEAMELIRSAYKVPEETRQARRRRKPNEGRLTGRRTREAAKAPQSGPLIPPPKTVYCGEELQSIAN

SEQ ID NO: 413362 - protein, 340 aa, unidentified
MYPFYLGIDLHLKRTYVVLMDTEGEVIDERRLQNAEMAGYLEQHVPQETYAVLEATRNWPFMYDMLSEHVERVELAHPKEVKAIANAAVKTDQIDAGVLAHLARLNYLPTAYAAPKEVRDLRLYTRHRSWLIRHRTQAKNRLQAVLASYNLASPVSDLFGVKGREFLEEVLEELRPAARRVITDNLTLIDRLDEQIKELEQEIPLTKEQAHTIQILMSMPGVGKVTAMTILAEIGHISRFKSSKALCNWAGLTPRVRKSDAIVRHGKISKQGSAHLRSAMGQASMVASRFSPRWYRVYERLAKRCGKRGARVAVARRLLTVIYYMLKRDQPYQEDYHRGA

SEQ ID NO: 413363 - protein, 427 aa, unidentified
MRSIALDVHRDFCEVAIKDQSGLRLAGRVKTAPGELELFAQSLAPDDQVALETSEPALAIARILEPHVGRVVVANTRKVRAIAESKVKTDKLDASTLCELLAADFLPTVWSPDEFTRALRRRLQRRAKLVRSRTRAKNECHAVLARNLKSKPPMSDVCGRKGRRWLAALELPADESETIDCCLREVDFLDSEIASIESELAAQALGCEEIRRLMTVPGVSLVTAATFVAVVGDAKRFSSPKKLVSYVGLDPRVRQSGETPARHGRISKQGSPEARHMLCEAAWVLIRTPGPLRAFYERVRARRGAQVALVATARKLSVLFWHLLTREEDYAFQRPTLTRRKLLGLELKAKDGRRSWPSGHALGTQQDRERERQFAEQIETAYRRLVADWQPKHARSGAGATRGRAFSSHLLREETAARQGSAPEPAL

SEQ ID NO: 413364 - protein, 324 aa, unidentified
MNSNSKKEMIPPVVNPDTTFVGLDISKGRLDSFVPGGQPREDANTPEGHAALIQHLRTLHCPRVICEATGGYEKAVVAALLAAGTEVCVAQAGRVRYFALAEGLLAKNDRIDARLLARFGEKIQPRCELPADPHATRLREMLEYRRVLSDQIVAAENRLELASGYLREGLQLQIATFKSSIMQVETDIATHLSTHPDLDGKAKRLRELCGVGPVLAATLIAYLPELGRLDGKVISSLIGVAPHPKDSGQRRGRRSVAAGRGCVRHVLYMAAVSATRFNPILAAFYRRLRDEKGKPHKVAIVAVMRKMIVVLNRMIAEPQFSLAS

SEQ ID NO: 413365 - protein, 328 aa, unidentified
MGKVGPERDGRMTSAGTFVGLDVAKKRLDVALRPGGAPWTVANDPHGVATVVERLQSLEAVTLIVVEATGGYELAVVAALTAAGLPVVVVNPRQVRDFARALGQLAKTDAIDAGVLAHFAEAIRPEWRPRPDDLTQLVQGWLGRRRQLLEMVQAEHNRLALAAAAVRPQIQRHLEWLKQQVREVDKELRTQLRRSPVWREQDDLLRSVPGVGPVLATTLLADLPELGRLNRQRIAKLVGVAPLNQDSGEHRGVRRIWGGRAPVRTTLYMATVAAIKHNAVIRAFYLRLCAAGKPKKLALTACMRKLLTILNAMLHQRTSWKPVAELET

SEQ ID NO: 413366 - protein, 450 aa, unidentified
MGQGALSRGDVSRNARLAALRAVLPRDHAILGIDLAQSRQAAALTDHDSRVLARWRPRCSPWRLDDLLERAQRAALSAGFSGITVACEPTGHRWLIVQQLAAGRGVPLVCVQPLVVARAREAEDYTRGKSDDRDAVLIARQAAQLHCYLPEQAGAGWARLRHLGARRSRLIGDSSACILQVKDLLEVAWPAVLTAAGDPLRSATWLACVSVALAGGDGKLDTVHAAGQSQFVAEARAGLAAWGATRVCGRIAEAVFAALRDPAGVLTQRPGALERAAAALRDWKVVRAELAIVNAAMLKLLDQMGIATLAGSIPGVSTTSVAAILAETGDPTRFSSARAMVKHAGLAPAENSSGNHTGEAKISRRGRPALRLAAWRAVWGALRHNPIYAARHSELTGRTIDKLTTQQANAAIAAALIRHIHAIITGRVAWDADIAAGRRRPGQEVNAKAA

SEQ ID NO: 413367 - protein, 391 aa, unidentified
MEVMDEAGKVLGRRRLPEGAGGIAQLHALIGGLLGEDAEDGEVLVGIETDRGPWVAALVAAGYVVFPVNPLQAARFRQRHGVSGAKSDAGDAHALADMVRTDSHQLRPAAGDTPRAGGIKVLARTHKTMIWERTREVQRLRHQLREYFPAALEAFADLDAPDSLELLGKAPEPARAARLTRAQVSAALKRAGRRDITGRATAILTALRSEQLAQPPALTTAYAATVRSLIAVITVLNDQVKALQGQVEEHFGQHPDAEIIMSQPGIGPILGARVLAEFGDDPRRYADAKARRNYAATSPITRASGKRKLVAARFVHNDRLVDALNAQAFSALTASPGARAYYDQQRTSGHGHNDALRRVANRLVGILHGCLKTRTLYDEETAWGHRQAQAA

SEQ ID NO: 413368 - protein, 343 aa, unidentified
MQTVTTIGLDIAKSVFQVHGVDAAGQVVIRRQLKRRYVLAFFERLPPCLVGIEACASSHHWSRELQSLGHTVRLMPPAYVKPYVKRQKNDTTDAEAICEAVTRPNMRFVPTKTVEQQSCLMLHRARHLFIRQQTAVINSIRAYLAEFGIVAPVGRRGVEQLLEVVADPADCRLPEVARTCLAALGSQLRALKAQILEFDRRIMAWHRSNATSKRLDAIPGVGPALATALVASIADPKAFRSGRDFSAWVGLVPKQNSSGGKDKLGSISKQGDRYLRSLFTAGALAVIRYAKIHGTGHRPWLTALLARRPTKVAAIALANKLARMAWAMMARNERYKEPAALTA

SEQ ID NO: 413369 - protein, 274 aa, unidentified
MEYVGIDVHKKHSQICTCTEAGEILHQRIETQRERFAAVFGARPQVRILIEASTESAWVAQCLEARGHEVIVADPNDAPMYAQRSRRVKTDRRDAEALAHACRLGAYHPAHRTSERQRHVRAVLAVREALVRSRTRWISVVRALLRQHGYRLRSGAAESFLSRVTALALSADLQAEIAPLLRAMHSVNAQLATVEQRTETMAQGDEVVERLRTAPGVGPLTALAFVATLDEVERFDNAHQVESYLGLVPREWSAGEQQQRGKITKQGSGRLRAV

SEQ ID NO: 413370 - protein, 420 aa, unidentified
MTRREDSRIIRIVHPICCGLDVHKESVSACIIFPDDKGEEQSDVKIFGTFTDDLIRLRDWLAEHKCPVVAMESTGVYWRPVHNVLEDSVTVVLANARDMHNVSGRKTDIGDSKWIAGLLRHGLLKSSFIPPQDVRQWRDLTRLRKKYVYTVGDYKQRTHRLFESANIKIDSVVSDLFGVTGRNLMQLLVADRELTLSAIQTCVRGKLKGKEEELFRSIQGFFTDHHRFVLKMLLSTIATLEAQIEALDLQIRGAMKEHDALLDRMKQAPGIADVASREILAEIGSALDSFPKDTALVAWCGLCPGNNESAGKRKSGRSPVRKHHLKTIMIDVAWAAVKKKGSYFKDKYYRLKARRGAKRAIVAIAHRILLGWGAYHVIKDGADFRDLGGDYLTLRNKSQKVFHLRKQALAMGFDLVPQAV

SEQ ID NO: 413371 - protein, 401 aa, unidentified
MSGIKGSFNGFVGIDVSKDKFDVCGITSDEAKLFQLSATMDRKGFDKLKGHLASVSVSSVLIGMESTASYHVNLFSYLVSEGYNVILINPLLISNYVKMQLRKTKTDKKDAVVIAQFLRTNGDSLIQRVTSSLISDLRDLARQRESLVDEMTALKMEIKRLLNITFPELEHMVGIFTKSILKLLQRYPSAFALKDADLGQLSQTLIADSYGHKREAFATELIKTAHTSIGSSSPAKEMILKQKIALLLHLEDALQEITDVLIEMSRKLMEEDINIMTSIKGIGDKTAVSFLIEMGGDINQYDRSGKIIAMAGLDPAVYQSGNHEGKGRITKRGNRHLRRVIWLMTTRVIHYSDMFKVYYLKRRKEGLPYKMAVLATAHKLIRVIYAMLTQRTSFCPQANSL

SEQ ID NO: 413372 - protein, 364 aa, unidentified
MLRVAHFVDAVVGGDTHVDTTSLCVVSPVGAVLAEITIDNDEDGYAQAVTWVLQSVPSERFLVGLEGTRSYGAGLCRALQAVGIRVVEVERPSRGERGRRGKSDTGDAVLAANKVLAMPPDRVPAPRAGDGVREALRLLTVDREQMTTQRTRLVNQLYADLLTGNAEQHALRKKDLTSGTLRKLAGARGRSRRPSDEQARLVGLRRKAQDIVRLDQQIRENERQLNTILDEVAPQLLEQVGVGPVVAAQLIVSYSHHGRCRSEAAFAALAGVSPIEASSGRITRHRLNRGGDRRLNRALHVVAVTRVKHDPRTRAYIQRRSKDLTDREIRRMLKRYITRDLYGVLRTIDALHPKRTTSTVTPAA

SEQ ID NO: 413373 - protein, 330 aa, unidentified
MEVVHTRCAGMDVSKRDAKVCVRHAGAGRRKTVETVTTWSSMTTQILALREHLAEQQVTCVVMEATGDYWKPFYYLLEDLPGVEVMLVNARHVKTLPGRKTDVADATWLAQLGAHGLVQGSFVPPEPIRQLRDLTRVRTAITRERGREVQRLEKLLEDAGIKLSSVASDIMGVSGRAMLEALIAGNNDPRVLADLAKRRLRSKLPELTEALNGRFNDHHAFLTRVHLDLIDRHTEAIEQLTGRIEVMMEPFQGFHDLICTIPGISVLTADVIVAETGADMSRFPTAKHLASWAGTTPGNNESAGKVKSSSTRPGNPYLQGALDAAAMVCG

SEQ ID NO: 413374 - protein, 338 aa, unidentified
MLAAGRWSPNGCTAVRRIEYKDGMRTMEAKFVGIDVSKATLDVDCLLVSTPRQFSNDASGIAGLVEWLVGSGVERIVLEATGGYEVAVASALAAAGLPVVVVNPKRVRDFAKAQGILAKTDRLDARVLALFAQQIAPPVRALPDAAQRDLAELLDRRHQLVVMRTQEQARMATVLPVARSDVKQHIAWLDKRIGKHEGILLKRLRANEIWDAKVTLLDTVPGIGPVNLFTLVGRLPELGTLNRQQIAALVGVAPFNDDSGKRRGQRYIRGGRADVRCALYMATLAAKLWNPVIAQMYDRLIAKGKPFKVAMTACMRKLLTILNAILKSKKPWENRLAT

SEQ ID NO: 413375 - protein, 370 aa, unidentified
MLKERLLQCTTNQEVETVIIGLESTSVYSFHPSMFLHHDEDLKRFGTKVFLLNPKQVANFKKSYSDMNKTDEIDAFVIADYLRFGRNQMSIVKESQYVALQQLTRSRYQLVRMLTKEKQHFLQHLSYKCNTFSQEVDSSIFGNAMMELFLEKFSLEELSDMPLEELAEFLQEKSKNRFGEPKCVASTIQKAVRTSYRLDKVVEGSIDILLGTSIEIIRIYQKQIKELEKSIKRIMAGLTQTLESIPGIGPIYAAGIIAEIGQIERFDDETKMAKYAGLYWRTYQSGRFTAENTSLSRNGNHYLRYYLVEAANSVRKHVLEYQEYYAKKYNEVPKHQHKRALVLTARKFVLLVDALLRNHQLFTLERRVKV

SEQ ID NO: 413376 - protein, 375 aa, unidentified
MSDHSEAFVAFDSSKLRNAVAIADSGRMGEIRFLGEIENSTAATRKLVRKLAGKYERLMFCYEAGPTGYELYRQIKDLGHECIVVAPSLIPKKPGDRVKTNRRDAVSLAKLLRAGELTAVWVPDRHHEAMRDLTRARDTAVDDLRSKRQQISAFLLRKGLHYCVGKKTWTQAHLNWLMSQKFEYPEHRLVFEEMMMAMRQAQERLERLEQAIRAAVPGWSLADLVTALMAMRGIDLISAATFLAEIGDLSRFQSPRELMAYLGLVPSEDSTGDSIKRGPVTKAGNHRARRMLVECAWSYQHPPRVSKDKQEKVAAAPRAVREIAWKAQSRLNRRYRALIGRGKLKTVAITAVAREFAGFIWAVARAATAARATAK

SEQ ID NO: 413377 - protein, 415 aa, unidentified
MFFAGVDIAKKQHEVCVLNADGEQVLSMPVTNSVAGTERLLQAIHNRISPDPGLVTFCMEATGHYWLALYSFLTQRGYTVHVVNPIQSDAARDLYIRKSKTDRKDAYILADLMRMNKTQPTSMASEPVLRLQTLSRTRFAFVDQVSSLKQRVLGILDRIFPEYPQCFSDVFIKTSRELLKTFSTPEELAEVDLSELAEFLAEHSRGRLGAERARQVQSYAQSTFGISIAVDAFALELKLLLDQIEFIENQISAIEQAIDEAMAELAAVNQPQALPKGVYHVIETIPGIGRVLAAAIIGETGEIDRFASARKYVAFAGLDATVRESGQFAGTRNRMSKRGSPHLRRAIWLAAINARRFNPELRAYYEAKRAEGKHVGVATGAVARRLAHLIHALWRDQRVFDPDYRWAPSRADTNT

SEQ ID NO: 413378 - protein, 322 aa, unidentified
MQKATTYIGIDISKDTFDVAIPKGESFDSFQLPNDSLGFESLLATLPAGCCCVMEATGAYYCALAVFLHGHQRQVSVVNPLSVSHFARMLLRRAKTDKADARLLSQFGAQQQPAPWRPLPVHLTALRQELAVLEQLNKQRLALSNQRKSLALVPQHSQRALQVIGAQVESLDGAIGKLEGDMQQSMKDNYPGLFQLLQSIPGIGPKTALVLVAVTQGFTAFDNFKQLVAYVGLAPRHYQSGKSVRGKAAICKMGMRQVRCLLYMCAQTALKSNPVCKALFERLRQKGKPFKLAKIAVAAKLLKQAFAIAKSGLAFQPDYTAK

SEQ ID NO: 413379 - protein, 490 aa, unidentified
MANKSTKKGKASNRMLPVMHVDAAGIDIGAEEIFVAVPADRAADSVRSFGTFTRDLHELADWLQECRVRTIAMDSTGVCWIPFYQILETRGFQVFLVNAQHVKNVPGRKSDECDCQWIQYLHSVGLLKASFRPPDEICVIRSLWRHRESLVEMAAEHTMHMQKALSEMNLQLHHVLSEITGMCGLKILDAILAGERNPIKPASLCNWRVRSPRETVAKSLEGDYRSEHLFALRQSLVGYRFYQTLISEVDQELEVKMRDLPRAVTGPEQMPPRTKTRIYQRAGNEPAFDLKAELFRIAGVDLTDVPGISTITAHTILMEVGPDVSRFRSASAFASWLGLCPEKQVSGGKVLYTRSRKVKNRAATALRLGAHSLHRAKNYLGEFHRRMKWRLGGPEAITATAHKLARIVYPPAWTALGIVELLGAIALVLPGVFHSHTNLTIAAAIALCIESLLFIWVHTRYTERTPIIMSAVLGIVMAFIAYGRFALAPL

SEQ ID NO: 413380 - protein, 421 aa, unidentified
MKSTAASKLRQIPQGYLVIGVDPHKKTHAAVSITQDFTIHAKFKFSNSMEGLEMMLQRTKAEMIKTGCRGVIFAIETGGHYWRNLAYVLDERGIPFHFINQFTLKRRREGKDINRRKNDYRDSEVAAQLLCTGEFTESKLPQGVYAELRAAHNAYRRLVKERTRITNLLKGLLDSLFPEFTSVFKDPCALTAMSVLSTCAIPKVISNMSEDEFVTTVKAEHHGRLMRKKLLVLHHIAKTSIGIEASARSVSMEISFLVEKFNLIKQHIRTIEGTLVRFVDETEEGKYLLSIRGLNYIAVAGLLAEIGSFKQYRNAKQLIKMAGSNPTESESAGKRGTHTPMSKHGRPVLRYCAWTSVIPMLRFNSDFRAWAKKMRERPAHANPLNGREVVGACLNRLLRLSFALAKKQSYYQMPELARTAV

SEQ ID NO: 413381 - protein, 347 aa, unidentified
MIVFGVDAHKRTHTVVAANEAGAQVGCLMVAATTEGHLRLLRWAEAFGLRRWAVEDCRQLSRLLEADLIRAGERVVRVPPKMMANTRRRARSRGKSDPIDALAVARAALAEPDLPAAFLDGPARQLRLLIDCRETLIRQRSAAQSQLRWHLHELQAGWDPPARSLDLTHTLNTIETRLADYNSIVADLARQLLQHIRHLTCQASDVHTQISRLVTTVAPHLLSIPGCGPLTAAKLVGETADIRRFPTPDKFAMWAGVAPIPVWSGNTPHHRLNRGGNRQANCALYRIAITQLRIHPPAQDYLKRRLAQGNTKPEAIRALKRHLANSIYRNLTLDTATHHTTPQTIAA

SEQ ID NO: 413382 - protein, 314 aa, unidentified
MDLLYARCAGLDVHKVTVVGCVRVPSAEPGARQAETQTFATTLRGLGALTEWLTTHGVTHVAMESTGVYWRPVFAVLEGTVQVQLVNARHVKMLPGRKTDVRDCEWLAQLLECGLLRGSFIPPAAVRDLRDLTRLRKALIRERGHHVNRIAKTLELANIKLGSVVTDIMGKTGRAILHALSAGLDDPEPLAACAQGSIRKKQAALYEAVEGRLTPHYAFLLQQHLSLIEALDAHIAMLDARIEAAMAPFAETAALVQTMPGVAARAAQAILAETGMDMSPFPTAQHFASWARLCPGTHESAGKRRPTTTGKGAT

SEQ ID NO: 413383 - protein, 323 aa, unidentified
MRTEPAEIQCVLGLDVSRDTVTLCDGRTRHTVTIANDADALRTALLPYQGTATLAVCEATGGYEDILLGVLLELAIPAHRADPAKVKAYIKSFGKRAKNDPIDARWLSRYGRDRAATLPRWQPVDLTQQKLELLVARRLDLVAMRVQEQNRLKAPRSRLIADNIRDHLAELERHIEALNAEIDTLVGESRDLALRAEQLRSVPGIGPVLVPLLLAVMPELGTLNRRQVASLAGVAPHPKDSGKASWHRSTTGGRRQIRPALFIAALAACRGDNPLATAYKALLKAAKPKRVALTAIMRKIITIANARVRDALPHQNEIMQLNA

SEQ ID NO: 413384 - protein, 360 aa, unidentified
MEGNQERSAGRIVGGVDTHKDLHVAAVVDECDRVLASQSFATNRHGYKQMLDWMRAFGSLQRVGIEATGTYGAGLLRYMQKAGIEVLEVTTPDKHDRRKRGKNDDLDAQNAAHAAFAGKRTATPKSRNGMIESLRVLKACRKTAIAARRVALQMIQNTIVCAPDELRELLRKMTRMQLIRTLAAWRPDLTDYRNVTSAYRITLKSLGRRYLELHDEIADLDTMIVALVDELAPNLVARNSIGHESAAQLLLTAGDNVQRLRSEASFAALCGVSPVPASSGKTTRHRLSRGGDRAANSALHIIAIGRLRTEPRTQAYVAKRIAEGHSKLEAIRCVKRYIAREVFSLIKQRSQENHPASTAA

SEQ ID NO: 413385 - protein, 415 aa, unidentified
MKVHRNCCGLDVHKQTIAACLIREDGNGKSYKEKRLFGTMTQELRELSGWLREAEVSAIAMEATGIYWVPVWNVLERAGFHLLLINPEHYRAIRGKKTDLKDGERIAELLQDGRLEGSFVPDTELRVLRDLTRYRVKLVEHQSSVACRIQKLLEQCNIKLASVASNVLGVSGTAMLRALAGGETDAQRLANLAKKQLRKKIPALQLALDGCLLPHHRFLLGEMLHELSHIESQLARLEAEIESQMQPFEKALSAWMSIPGIKHRVAWTLVAEIGTDMNVFPSAADLASWVGVCPGNNESAGKRKSGKTRKGNRWARRALCEAAWVAAKAKKSYLAAQFRRFAATRGSKRAIIAVAHTILTIGYHMLQRGTLYQDLGANYFDQRHILRTTKRLVKRLEALGHRVILQSPILNPSIG

SEQ ID NO: 413386 - protein, 387 aa, unidentified
MYYIGIDVSKYKHDCFIATEAKSIKAFQFDNNRLGFDLFLTTLKSLDQSQEIRIGLEATGHYGMNLKQFICASSYTFLEFNPYLTHQFSKAMSLRKTKTDKVDAKTISSMLGPVDYKTLHTSFYHINELKQCVRYRDFKMKQRSKIIVELTNILDRAFPEFKAFFNHRLVGSAMFILKRFKSRSRIARFKQTDYDPINSYSKGKITNVKFQKLKLLAMNSIGYETDTDILLISESIQSYENLTSTIETIENKIIEIMKDIPQTLTSIPGLSLISAANIIGEIGDFRNFSNPAQVISFAGLDSSVNQSGTMETRGHLVKRGSGLLRMTFWQVTFSALKYIPTLYDYYLKKKAEGKHHKVALTHCARKLIRTIYYLGYNQQVFEQTQFR

SEQ ID NO: 413387 - protein, 392 aa, unidentified
MEVQDETGRRLAKARLPEGIAGIARLHGLVGRFLPEDVDPAEVKIGIETDRGPWVAALIASGYQVYAVNPLQSARARQGQDVSGAKSDAGDAHVLADLVRTHSHQLRTVAGDSKQAGAVKVLTRMHQSLIWDRTRQVLRLRSSLREFFPAALEAYDDLDSPDVLELLTKAPEPSRAARLTRAQISAALKRARRHDRDTKTTAIMAALRTEHLTQPPVIAAAYGVTVRALAALITTSNEQITALEGPVEACFGQHPDAEIYLSQPGLGPILGARVLAEFGDDPTRYDGARARKNYAGTSPITRASGKKKVVLARYVRNKRLTNALHQQAFSALSGSPGARAYYDALRDRDISYNAALRQLGNRLVGILHGCLKTHTRYDEATAWNQHTQRVAA

SEQ ID NO: 413388 - protein, 450 aa, unidentified
MSRPQVIDDEEHERVHERVAAIDVAKDSGMVCTRTPHPSRPGARRSTVWTVTARMKAIRGLGRQLKKDGIEIVTLESTSDYWRIWFFVLEACGLAVQLVNAAQARNLPGRPKTDKLDAQWLARLTEMGLLRASFVPPKAIRDLRDYTRARTRLVHERTRCWQRLEKLLESALVKVSSVASKLTTLSAQDMIKAMIAGQRDPKVLAGLARGRMKARHDDLVEALDGMFDDHHGELAGLLLDQIAFLDTPIAALTARAAELTAAMPAAWGVDPDGTTGPGAGTTPGAPVLNAVARLAEIPGISEDLARTIIAETGLDMSRFPAAARLVSWAGLCPSARQSGPRTRAGKKGQGNGYLRGALGQAAIGAARTDTFLSERYHRIARRRGKAKAQVAVARSILIIIWHLLADPEARFTDLGYGYYQARTDKDKKIKNHIRQIEALLGHPITITNAA

SEQ ID NO: 413389 - protein, 309 aa, unidentified
MEIIVGIDVSKDRLDVHVAPSGESFFVDNSEAGIDGLIQRLKGTDIDVLAMEATGGYERLATAALTAAGLAVLVVNPAQVRAYAQALGRRAKTDAIDAAVIAAFVAAIQPPIRSLPDVETQALQALVTRRRQIVQMIVAEENRLLMVQSKQAQKSFKRLLAALRRELVSLDADLDNQIRKSPIWQVNEALLTSVPGVGERSARMLLAEMPELGTLDRRQVASLAGLAPWTRQSGKWHGKTFIGGGRGRVRSGLFMAALVASRHNPELKAFRDRLVASGKPKIVAVVATMRKLLTILNAIIRDQKPWQNA

SEQ ID NO: 413390 - protein, 343 aa, unidentified
MIAVDPHKASNTAAVLDPVPETVIESARFANTTDGYAQLTAFAGRWAQRCWAVEGCFGAGRSLAQRLVADGEMVLDVPAKLAARVRVYSCGHGRTTGKHDAVSAGLAALDGTGVLPVAGDDALVSLRLLCDRREELTAQRTQAVCRLHRLLAELTPGGMRRELPADKAQALLALIRPADDVGHVRVHIARDHLADIRALDARIQIAALVTASGTGLTGPSGIGPVIAGRLLAEAGDVARFATKDTFASYNGTAPIDVSSGDQIRHRLSRAGNRRINHALHMMAVTQIRYPSTPGRLYYERKRREGKTPKEALRCFKRRRPLDREEPIGVLRLTPTGRRFGRAP

SEQ ID NO: 413391 - protein, 356 aa, unidentified
MHTSEQVRSGHIVIGVDTHKHVHVAAVMDTIGGILATLTIPTDTGGFQQLLDWAAPFGRILAFGVEGTGSYGATLASFLRRSGHKVVEAGRPDRRLRRMNGKSDTLDAENAARAVLAGFATATPKSADGGAEMIRQLKIAHDQAVEQRSAAIVTIKAILVHAPDTLRAETAGKTQIALARHLAGLRPRHLDTPEDALRHTLRTLAKRWQYLDAEAKELTKMIADLVQRTAPQLTKSFGIGVDTAAEILIVTGDNPERMKSDGALAKLASIAPVPTGSGMTSGRHRINHGGHRQLNAAIYRTVIVRMRFHQPTIDYVARRTTEGKTKREIICCLKRYVIREVYHLLRPAPRTASAAS

SEQ ID NO: 413392 - protein, 323 aa, unidentified
MQGQKSPERSARPGVYVGVDVCKDWLDVYLHPIGQKLRVSNTPEGLKALKRRLAELSVELIVMEATGKFHRQAHRTLHAAGFAVAVVNPLRARLFAEAVGQLAKTDRLDARVLALMGQTLEPSALAPAPEAVEALQELARARAAAKAEETALSNRRGASQTAFLKAELGRRLKVLAGHIERLEAEIERRIGADPALKRRYDIVVTIPGVGPVAAVALVIGLPELGTCSAKAAALLAGLAPLACDSGAKAGERHIWGGRAFVRTGLYFAAVAAARCNPQLRDDYNRLTDAGKKAKVATTAIMRKLVVLANTLIKEDRPWQPIHA

SEQ ID NO: 413393 - protein, 408 aa, unidentified
MNKTIVHHEGAAALTAAGHHTKTRPATVKLGVDIHSQFYVVAAQYDHAAIKPPRRFAPEQFVPWVETLLRAGHEVHIVYEACGFGFGLYRRLRVAGAHCYVIAPQKLDEARTGVKTDPRDAIMLCQRLSRYLDGNTRELAVIRVPSEAEERARHAPRQREQLVRARKKLQAQGRGLLVNHGLPAPAHWWKEQTWNRLGRLLPEWILAHLEIYRPILRALDEQIAALSTQLEAAAPGDLPRGLGALTSVVLSREVCDWARFKNRRQIGSYTGLCPGEHSSGAKRVQGSVTKHGNARLRAILVECAWRLVRFQPQYAPVKKRLHILAAGARATGSARKKAIVAVARRLAVDLWRLHTGRGTAAQLGLAIGESTCRLTPAAETAVSVRGEQVPPPARQAASSKQQAASSNQ

SEQ ID NO: 413394 - protein, 346 aa, unidentified
MLIIGCDFHPGFQQVAIFDNQSGEIEQRRLRHREEAEQFYRGLAAGVLVGMEACGQYPWFERLLAESGHELWLGDASAVRAAVVRRQKTDRRDAEHLLDLLRQGRFPRIGVPSLEGRDVRQLLVHRHKQVQARTRVKNQLQAIALSQGMQKKRKLWSQSGRAELEKLELLPYAAGRREQLLHRLDQLEQEIAGLNRQVEEEVKQRAAAQRLMTHPGVGPVTALAMVLTLGPAERFASGKQVASYFGLIPSEHSSGGRQQLGHISKQGSSFMRFLLVEAGQSAARYDPELGRFYRRLAVRKHRALAKVAVARKLAVRLYLMLREEWNYAQLCRAVVQVSPSHSVVAS

SEQ ID NO: 413395 - protein, 400 aa, unidentified
MISVGIDVSKEKSTVCILKPYGEVVSRPFEVCHVEKELSELTSMLLRLNDDVRVVMEATGIYHLPVLSYLKEKGLFVAVINPFEMKEYRCQGLRRVKTDKQDAITISNYGIDHWYKLKNYEAEESVYAELKLLGRQYRHYMRMRVESVLELTHLLDYTMPGIKTLLKGWNETNGKDKLGDFAEEYWHYDNITKKSEEQFIKSYLKWAKEKGYHQSQDKAVKIYALAKEGIPTVSSDTPSTKMLVQEAVRVLREVDNTLMTILTQMQALAKSLPEYPVVRAMGGVGNVLAPKLIAEIGDVRRFHSGKALIAHAGIDAPPYQSGQFIGTERKISKRGSSSLRKIGYEVMRCLKTHKEPEDAAVYRFILKKEKEGKSKRAAKIAGLNKFLRIYYARVMEVYQK

SEQ ID NO: 413396 - protein, 343 aa, unidentified
MHIASIGIDLGKTNFHLVALGEHSKVAVRKKFSRKQLLAYTANLQASLIGLEACSGAHFIGTALRNQGHEVRLIPAQFVKPFLKSNKNDFLDAEAIAEAVARQNMRFVPIKTDDQLDLQAMHRVRDRLVHRRTAVINQIRGFLLERGLSFAKGPANLRNRMPAILEDAEQNITPRMRMLLDQIWQEWKRLENDIAIISEEIERISNEDEACQRLRQIPGIGPLVSTATVAAIGNGAAFNKGREFAAWLGLVPRQHSTGGHAKLYGISKRGNIYLRRMFIHGARAVLLRVKNKTVSFGPWVHQLELRAPRNKVIVAIANKLARIAWAVLSKQMDYRPTPVVATA

SEQ ID NO: 413397 - protein, 327 aa, unidentified
MREQQNNRQERTIIGLDLGDRWHRFCVLGESGQVVEEGSVANNRVALSELSSRYPGALVVMEAGCHSPWVSRHLKQAGCEVIVSNPRKTRAIYQHERKSDRRDALMLARIARMEPALLYPVRHGSEEAQQDLLRIKLRDSLVRARVGLINSLRFTLKSLGYTIANPSTERFHKVIQSALPESVVQMIAPSMQAIEELSLRIKLLDWEIRTLAHTKYPETSWLEQIPGVGPITALYFVLKIGDPARFERVRDVGAFTGQLGSVYSGTVRSSERFASVRTSARCQRHGPSQKARRSGRGPQTGRAALNSVEKQESLSSVPPAAGKNEDP

SEQ ID NO: 413398 - protein, 310 aa, unidentified
MTINPDVVGIDISKLRLDVFDPRHGHGERFMNNAETAADLAARFAAAGQRVVFEATGAYDRQLRLALQAAGVTFFRVNPGQARDFARAAGYLAKTDAVDARMLAVMGRALELRPAEPLQPDREQLARLHKRRDQLVAMRSQERTRRRGEIDPETASSIDQHLGWLDQQVRELDRRIRRLIAASPGLAEAERRLRSVPGIGPVAAATLLALAPELGARSSKAIAALAGLAPFNADSGQKRGKRMIRGGRKRIRDALYMAAVSASRCNNRFAAFYKSLRAANKPPKLALIAVARKLLVTINAIVRDQTAFQA

SEQ ID NO: 413399 - protein, 349 aa, unidentified
MEVTTIGIDLAKNIFHIHGVSRSGKEVFKKRITRDKFLEFMANQPKCLVGIEACGGANHWARELIKLGHDVKLMAPQFVKPYVKTNKNDHKDAEAICEAVSRPSMRFVPVKSIEQQDVLSIHRVRERLVKNRTALANEIRGLLHEFGIIAPQGINKIVQHLSDAIEGTKLSEMSIETFRVLLDDFNENTKKIIALEIRLKQIAKNNENHKRLMDIPGIGLIGATALIASIGNAANFENGRQLSAWLGLVPKQYSTGGKERLLGISKRGDVYLRNLLIHGARAVFNSRTGVIKKSGKIEKDDSKFSQWMINLQTRRGYNTSVVAVANKLARVVYAVLKNDQPYNEVKVCC

SEQ ID NO: 413400 - protein, 436 aa, unidentified
MAKVITFEQVNAHGAAIDIGAEKIFVSPDGVRVWVYQTFTADYRKCVSDLRAEGIQKVCMEATGVYWVALYELLEASGMEVCLVNPKEVKQVKGRKTDVQDCRWIQKVFSAGLVRQSYVPSGKIKELRMIVREREDIIEMGSAYVNKMQKALELMNIKLKPILSQIHGSSGIKMIEAIINGERDAERLLHLCDRSIIKNKGELVVKALEGNYNDSWIFLLEQNLKMWQVHQRQIQIIDKRIEYLLQELANGKEDVKGVVAPKAIRHHPPKIENLHQKLLNIYGVDGNSLSGLNDYTLLKLLGEVGTDMSRFPTAKHFASWCQLAPANNQSGKMKRAVKMRNGNRAGQIFRNVAQGLLNSKYIAIGSYMRRVRAKKDSKVAVKAGARKLAVAFYNLLNKGAAYVEQGAKKYQDQLMEREKTYLKNLAHKHNLHLVPA

SEQ ID NO: 413401 - protein, 413 aa, unidentified
MSYRLAAVDVHKKMLAVVIADVAVEGNYEFERRKFSATPAQFQALAEWFVERGVEEVVMESTAQYWRPVWATLERYWKPVVQKREGAGPKSGTLHLCQAKSNKGPKGRKNDYGDGERMVKRLVAQELTLSFVPDPEQRLLRTVTRRRYQLTRAKVGFKNQLESLLEQAHLKLSSCVSDLLGVSARRMLKAIAKGETDPAALAAMADRNLRATPEQLRDALGACAEMNGVFRRLIQMALDELDVVESHIEKLNQEAMELLKGQEEVVERVAQIPGFGVASALQVIAEVGIDATAFPSEKALASWVGVCPGNEESAGESQSTRSPKGNRHMRRLLNEAAQSAVKVQGGVFDVTFRRLLPRMGYKPAIWAIAHRLCRVLWIILHKRVRYEERGPAVSAKSKRVRTQRMIRELRKLG

SEQ ID NO: 413402 - protein, 399 aa, unidentified
MLAVGIDISKSKSVAAILNQDGSMHTSPFEFHHTQPELDAFIKYILNSKQSATILMENTGHYHYPVLKAFQEAGLPVCMVNAYQIKKFGDMDLRKAKTDKKDAVRIARYALEKSYSLVPYTSMEQKYEDLKFLARQYNQRMLTLKTNKVFLLNLLDETMPGITNILPLTTRTPETSLSVLFINRFKSYDRIKKMGKSRFLDAFEKIARKSRNRQTKTYGLAIYEAALRNITTRGENEYTLAAQDQCLELVCESQKAADSIILKMQTLAETLPEYAVLRSMAGVGDRLGPLILAEIGDIRRFHSGKALNAYAGNDAPPYQSGTFESHNRHISKRGNAALRKYCFEVMQALKLTRPQDDPVYLFLLKKEQEGNPYNVAKMAGVDKFLRIYYARAMETLKQQ

SEQ ID NO: 413403 - protein, 366 aa, unidentified
MGGIFAVPTQKHTNQGGSQMKFYTKQHQHYCGIDLHTKKMYVCVLNSIGEIVAHRNLNTDPEAFLELIAPFREDIVVAAECMFTWYWVADLCAREGIPFVLGHALYMKAIHGGKSKNDKIDSHKIAVLLRGGTLAQAYVYPAKMRATRDLLRRRNHLVRKRAELFGHVQNTRSQYNLPDPLGRIAKPKNREGVAQRFDDPSVQKSMEVDLEMIEAYDRILTPLEREIIKTANGHNALSYNLLKTIPGVGRILALVMLYEIETVERFKTVQDFASYARLVKCAKESNGKKFGAGGKKIGNAHLKWAFSEASVLFIKGNEPAKKYLDRLTQKHSKGKALSILAHKLGRAAYYMLKNKVAFDQDKFLSH

SEQ ID NO: 413404 - protein, 395 aa, unidentified
MLYIGIDLHGKQMTVCVRDEAGNVILRQQVSTRPGKVKEFLARIHAMGDGRYVVILEVCGFHDWLVKSVKAEPGCVDVVLIQPEQASKKKTDRRDAARLSEILWVNRQRLLAGERVHGVRCVYQPTEDERQDRQVTSVRQRLGRRRTQTINQIRHILRRDNLEWERPTKGFQTKKVKAWLKKLALDETDRLEMDQLLEQWDLWERQIDQVDKRIEERFEKNAAAKVLATIVGVSCYMALAIASRIGKIDRFVRGRSLANFFGLTPGSHSSGETQRLGSITKQGSQMVRFLLGQLTLHVLRKDAKLRKWYKGIKTRRGSKIGRVAVMRRMTTIIWRMLSKGEAYRYEGVTEPRRPDPQSPSKACVEPGRAATLEAYAGKAKPKADQASTGSSSLSE

SEQ ID NO: 413405 - protein, 403 aa, unidentified
MTTFFAGLDWASQTHAVCIIDAQGAVHERFDIDHTAAGLAELRRHLMAAGSPPVAIERPSGLIVDTLVEAGFTVFPIHPNAVKATRPRYRSHGAKSDASDSYLLADLLRTDGHRFKPLAPQGDEIRALRALVRGRDDLVATRVQLANQLRSLLDSFWPGASAIFADVDSPIALAFVERYPTPESAARLGPKRMAAFCAQHAYCGRRSVEELLARLHQAPIAGTGELEADAKGELARSLARTLARLVEQIRLLTSRIEHHVASLDDGRIVMSFPRAGRICAAQILAELGSVRERFDSDAQLAAEAGVAPVTYQSGKSKSVTFRWACNHRLRAALTCLADNSRHASAWANRVYTAARTRGCDHPHAIRILARAWVRILWRAWTDRKPYDPAQHPGARLAFQTTKG

SEQ ID NO: 413406 - protein, 364 aa, unidentified
MYDSTTTVTVGLDVHARSVRLAAVRADELLEERTLPYDEDAVERVLRRWPGVRCCYEAGPTGFGLYRHLIGRGIDCSVVAPGLVPQRPGDRIKTDPRDARKLARLLAGGLLEPIHVPSRELEAARDLVRAREDARLDRMRDRHRLSKFCLRHGRVLPTSSWTVVRRKWLGEQRFEFAAQQITFDSYVHTVDLVDARIEQLERAIRETAEQEPWCGLVARLRCLRGIETLTALALVTEIGDFDRFKTAEEFMAFVGLVPSEHSSGEKRRQGSITKVGNSHVRRLLVESAWHARRRPKVGYELARRQRGQDAVVVERAWRCQQRLYTRWQRMAGRGKPQQKIVVACARELAGFVWAIATEQPLRNT

SEQ ID NO: 413407 - protein, 339 aa, unidentified
MTEYVGIDLHRQRSVIVRMTPAGEVLDTVRVENDPVALSLAIEAAGPNPEVVLEATYGWYWAADLLEDCGARVHLAHPLGVKAFQHQRVKKDQSDARQLADLLRMNRLPEAWIAPPATRELRELVRYRAKLVATRSGLKAQVHAVLAKEGVRVPMTDLFGAQGQVMMDRLALAPAYASKVRSLRHLIDILDAEVAAQHREVGRTLALDPGYRAIQRIPGVGQVLAAVLVAEIGEVRRFSTAAKLCSWAGLTPRHRESDTVVHRGRITKQGSKLVRWATIEAVQKLRAGSKQRNDFVRIAERRGRNIGRVAAARRLLTLVYYGLRDGEVRCLDRNTEQAA

SEQ ID NO: 413408 - protein, 329 aa, unidentified
MSALVCGLDVHKDSTYATILNSEGKIVDQARMENDKVASYLSRFKVEKVAVESSTCVAPLYRQLKKKGFDAVVSHPKKTKLIAETKIKCDRVDSMAIAQLLRTDWLPLSYVPDEEMDALREKVRRRAFLVRERVRLRVKIKSYLMYQGLKWPADHGLWTKDGVVWLHGLELAPVESYLRLIGLFSEEIKLLSKELQGLAREDEDVKLLMTIPGIGYYSALLIASEVSDIARFPFGENLCSYAGLVPSTYASGGVVRHGKITKEGSRWLRWIMMECASTHVAKYDTWISRSYRCLVGCRGKKTARVAAARKLLEVCYSVLKFKRPFYDQP

SEQ ID NO: 413409 - protein, 350 aa, unidentified
MDATTIGVDLAKSVFQLALANAAWRIIGRRRLTRPQFERFLASQPAAHLVMEACGTAHYWARVARTHGHRVTLLPAQYVRPYVRRNKTDRTDAEALLEAVRSGGIDPVTVKTAEQQELQALHRVRAEWMATRTARLNAMRGFLQEHGVTIPLGARTAIATIPRLLADTEAPIPARLRAVLTHLLEDVRALDKNLVALERDLAAIADADPVVSRLMTIPGIGLITGTALVATVGHIHGFRAARRFASWLGLTPNERSSAHRRRLGAISKMGDAYLRCLLTHGARSVLLAAHRTHARRRVLTRLQQWALSVDARRGHNKATVAIANKLARMVWAVWSREVVYEARPALPAAA

SEQ ID NO: 413410 - protein, 466 aa, unidentified
MQPNRRRSLGKPRVSPTVFDRLNPHVAGIDCGSGEHFVAVPPDRDPHPVQSFPTFTSDLLRLADWLAACRVTSVAMEATGVYWIPIYEILDARGFEVLLVNARHFKNVPGRKSDVSDCEWIRELHSVGLLRGSFRPTDAIVALRAYMRHRQTLVESAGTDTQRMQKALVQMHLQLPLVVSDITGVTGLRILRDIVAGQRDPQHLAAHRDARVRASTADIVAALTGHYRPEHLFVLQQNLELFDACQAQLAACDRAIDAHVQTLTAQRPPPVTPLPDPRVTKKPHDHQPRFEIRTPLFQLTGGVDLTQIDGVAPYTALKLISEIGLDMTRWPTEKHFTSWLSLAPKNKISGGRLLSSRTPPSANRAAVVLRMAAMSLGRTQTALGAFYRRLAARIGKPQAITATARKLAALVYRALKGELVYRDPGADAYDIQQRARVLRRLRQRAATLGFSLVNRDTGEILAPAIP

SEQ ID NO: 413411 - protein, 365 aa, unidentified
MWEAPVKRQRMSDGLDVHARSVLGCALDGDTGEVFQRRLCPDHREIVGWLGELPGPVAVSYEAGPTGFGLARALAAAGITCEVAAPSKLIRPAGDRVKTDARDAAHLARVLHLGQVTAVTIPSASQEAARDLVRARDDCRGDLMTARHRVSKLLLRQGIVYSGGRAWTGDHERWLRAQRFDDPALQLSYEAAWDAMLACLDRRRRLDSAITAMAADSEFTPVVHRLGCIRGVATLTAFGLAVEIGDWHRLTGRTIGAYVGLVPSEYSSGDTRAQGGVTKTGNGHVRRLLVEAAWHHRSRYRPGAELRRRWDLASPAARARGQAANRRLHNRWTGFDARQKRPVIANVAIARELAGWCWSLAIMPD

SEQ ID NO: 413412 - protein, 376 aa, unidentified
MENDSTLYVGLDVHKDSITVAYAIGMGDVELLGKFGTTQIEIDRLCKRLQSKARHVRVVYEAGPCGYGLYRRLIAKGFDCMVCAPSLIPRKPGDRVKTDRRDAIKLVRSLRAGDLSAVHVPTVEDEAFRDLARAWSSARDDLKQARQRLKSFLLSHGVQYSGRANWGPAHRRWLSTLSFSSAWQKLAFNEHRRTIEDRLAQCERLEAALREAVAGWRFYPVVLALQAMRGIQFVSAIGLVSEVGDLSRFEHPRQLMAWFGVTPSEHSSGDKRRRGSITKTGNSYARKLLVESAWSYRHPARVSIDIQRRHEGIPKQIIDRAWDAQLRLCRRYRKLVMRGKSPQVAIIALARELAGFIWDIGRMGMTLALPQDRQPA

SEQ ID NO: 413413 - protein, 346 aa, unidentified
MLYAGLDLSRKRLDFHLLDAEGATVDVGASPPDADGLRGLSERLERHGAPIRAAIESMNGARFVHDRLELSGWQVEIADAQKVKGLAPLACKTDRIDAWVLAELARRDLVPAIWLPDPQVRAERERARWRLHLVRHRSSLKQRVHAVLLTHGKPCPVSDLFGVRGRQLLARLGLPEPWQATIDASLRLIDELDREITDCERDLRRLGADHRYVPLLCTVPGISWVLAYTIAAEIGDIDRFPTPRKLAGYSGLCPRVYQSGERDLRGPLSKQGPRYLRWALVEAATHACTAPVYRDRYQQTKARIGKQRGAKVAQVDLARRLSEAIWHMLSRGEPFAPKGATDPLAA

SEQ ID NO: 413414 - protein, 391 aa, unidentified
MSMYFIGIDISKYKHDCCIISAADQKVVSKVTIKNNKAGFNELLTIIHSLANPADIRIGFESTAHYALNLELFLENSLLTFMEVNPVLISEYKKSKTLRRTKTDSVDCESIARWLMTVEYKPHSKGFYHAYSLKSLTRLRDKLIRQRSFYLVKITNVLDHTFPEFKPFFNERLSKTALYLLENYGSAEKMARMNSASYEKLRSVSRGKFSPQQFLRLKELAVNTVGVNNSIFDVELNSLLSLYKSLVKEIDTIEKEINKLIEEVHPHYMSVPGIGPLSAAVIYSEYGDISNFTNPGQMLAFAGIEPGINESGTESHGGKMVKRGSSQLRYTLINCCLPLIRFDMTFATYYAKKRGEGKPHRVAITHVAKKLIRVIYALESQDIDFNAQELR

SEQ ID NO: 413415 - protein, 396 aa, unidentified
MKPDGTLVGRSFRFTNTKQGFEFLMDKLAAVDSSLENFEFGMEATGHYWLNLYTWLADNHATVHVINPLQSDALRNLYIRKTKTDSVDAKIIAQVIRIGQYSETKLADDRMLMMRDLCRQRFFLVDMVANLKRKIIVMMDRIFPEYQGFFSDTFGKSSTAILKHCTTPEEITLFGEDNLAQLLQVASNGKFGLKKAQELISLARNSFAARLSSKTLSLLVKQMMDQMELLQNQIGILEKHISSHFKSFGTKITQIPGIGPVLGASILSEIGDISRFANPKKLCAYAGIDPSVKQSGQFLGNENHMSKRGSGYLRRCLWMASFVSVNHCREITIVYKSQVSKGKTHFQSMGFVCHKLLNIIYTVLKNDIDYSPMLCINPAITARTSRRIARAALKAR

SEQ ID NO: 413416 - protein, 349 aa, unidentified
MRFIGVDLHKTNFVVCFLSEDDRSQTETFILNAQGLSRFKRRLRPDDQLAVEASANTFYFCRQVKDRLAKVVVVDTYRFAVIARSKKKTDKKDAAMLARFLKLGWLPEVPVPSEPIEQLRHLFQARESLVRMLTQLKNMAHAALVRSGYAMKRSAFASPRTRGRMAKLENLSTVDRQMIEMTPRQMSEIEQEVGKLEAEIIQRGKGLPGLQRLLQIHGLNMIGAIGLLVEIGDIEQFDTSKQLVAYAGLATSVRQSNQTERRGKISKQGRKRLRTICIRAVLSMVNRTKTPLMEFYAEKKREKGAGKAICATARKLLVIVFVMLKKELDYWYVEDRLYNQKLKALRACA

SEQ ID NO: 413417 - protein, 337 aa, unidentified
MNKITLIGIDTAKQVFHLVAVDGPGRYVWRRKVLRSRLMSTLAQLEACEVVLEACAASHYWGRCIGEAGHRVRLLAPQHAKPYRRGQKNDYRDAEAMVSAALSPGMHFVGIKSVAQQAEQALHRVRSRLLSQRNAAANELRGLLGEYGLVFGRGLKPLREGARCFVETEQASSLGLVEVIHDVLEEMDRLARRMQHYEGLISARVQADEVSGRLRDELRGVGPLSASALRVKAAEVRDFGNGRNYAAYLGMAPGHRGTGGKVKIGKIKRGHDRYLRQLMIHGARSALRHLGDKQDPQSRWMRGLVQRRGFNIAAVALAHKNARQAWAIMAREQQALR

SEQ ID NO: 413418 - protein, 463 aa, unidentified
MAARKPKRMGAQTVEDEDYQLRYERVAGIDVAKGSAMVCLRLPPGPGKVRRTCRTWEVMARVPDIEALAAELKAARVERVSMESTSDYWRIWVVVLEGAGLDVQLVNSSQARNLPGRPKTDKADAQWIARLTEMGLLRGSFVPPPEIRALRQYTRQLVHLSQDRTRYWQRLEKLLESALCKLTSVVSGLAGSASCLAMLEAMIAGERDPQVLAGYARGPMRSKHAALVKAFTGMQFGPEHVFSASSDLRMIKMLDAEITGLEQQVRDHLAAIPAAWGTDADGVTGPGAGTGPDAAVLPAVDRLTEIPGVGPAIAAGLIAEIGLDMSRFPTPHALVSWVGMAPVPNQSGPRKGRGKKGHGSSYARRLAGQAGNGAARTDTFLGQRHRRIRSRPAGGGWKKANVAVGRSIIIIVWHLLKDPAARFTDLGPDHYAKHTDTNRKARNHKRQLEALGYDVILTPREAA

SEQ ID NO: 413419 - protein, 269 aa, unidentified
MIYAGLDLHKSFCQTKICTKEGELVKEGRIKTEAEDIEEFFPGLEDLTIAFEASGNYEYFYDLLEGLGHKVVLAHPLKTKMIAEAKIKTDKIDAKTLAELLRGGFLPTSYVPPKEIRELRHLVRHRLFLGRVRAIIKNQIKTELQRKNIKYPDGAGIFMEKGKKWLRSLKNPVIDSYLAIYEAVDREVKNAEREIEKAGKEYKEMKLLTGIVGIGMYSALIIYSEIEDCSRFSDEEKAFSYAGLVPRVHQSGNTSYYGRITKEGSKYLR

SEQ ID NO: 413420 - protein, 460 aa, unidentified
MSKSQNPTKEVIPIMKKRIYRRMPVNDFQPQTISHADLGGKLVFAIDVAKVDMVAAVAAADGRVLHTICWKAPEQNPTVLSILRGFRTAGVTVEAVMEPSSTYGDVLRHQFERDAFPVFMVSGKRTHDAKEIFDGVPSLHDAKAAAIIARLHADGLSTRLRGEGPDRRQLRAALAIMDLHQERYLQLVHRLESWLARHWPELPTLLELTSSSLMALLARIGGPADVAAAPDQTTKLLLGISHRLVADRKVAAVIVSANTSVGVPLVGLERDALMAIAEDAYRAHRAFTTAKTKVDQLAATTSAATLAPVVGHTTAAAVFAEVGDARSFPCARAFLKAMGLNLKEKSSGTVQGQIKITKRGPSRVRQLLWLAIFRWIQTDPIANAWYQRKEQRDGGRASRAAVALMRKLAKGLYHVGRGGSFDSSKLFDTRRLQVGDVPRSFVGKGTKPSPSMLNAQISEG

SEQ ID NO: 413421 - protein, 392 aa, unidentified
MFYIGIDIAKHNHEVSIIDDNGKALGKSFSISNSQKGVDKFNTYLDSFNITSENCVIGMESTGHYWINLFSFLVNLKFNVFIINPIQSDAFRKMYIRKTKNDSKDSYIIAQIMRFGEYSSSNISDENIFALRQLSRYRTSLVDECSSWKRKIISILDQVFPEYSNLFSDTFGVTSKELLSKYPLPENMLELSTEELTNLLNKASKGRLGNEKAQEIKEFAKNSFGVSFAKQTFSFQIKQIINQISFIESQLKELDNEISNMLKELNSEITTITGIGDVLGACILSEIGDISRFEKASQLVAFAGLDVAVKQSGEFTGTEMKITKRGSPYLRRAIWLAATVASFKDPALSIYYKSLIARGKKHLTAIGAVSRKMCNIIFSVLKNKKAYTPNIW

SEQ ID NO: 413422 - protein, 359 aa, unidentified
MTATMTWVGLDVHARSTHAAAIDRESGELTRARFGAGVEEVVDWLQGLPQPIHGCYEAWPTGYAVYRATDAAGLRVDVVAPSKTPRAAADRVKTDRKDAELLVRLLLAGSLSAVAVPPARVEAARDLARAREQLRADLARLRQRVSKLLLRYGRVYDGGTWTQAHRQWLAAQRFEHVPTELAYLDALAAIDGLLARRAALDERLSLLATEPDHWPTVAKLRCFRGIETLSALVLHLEVGDFGRFQRPGQLAAWLGLVPSVHQSGESETRGSITKTGSGFARRILVEAAWHHLREPRIGVTLQNRQAGQPEHVLQFAWRAQHHHYRLHQRLRGRGKPGNVAVVAAARELACFLWAAAVAD

SEQ ID NO: 413423 - protein, 330 aa, unidentified
MSEVTLIGIDLAKRVFQLHGARSDGSVAFRKKLSRGQLLAFVAQQPICLIGMEACATAHGWGREFEKLGHNVRLIPPVYVKPFVKRQKNDVADAEAIVEAAMRPTMRFAAVKTEDQQARAMLFRTRQMFVGQRTQMINALRGHLAEHGLVAARGPAHLKTLADAIADGDPALHPEVRDLGRMYLEQIEGLNARVADLDAKMRCAAKKADSVRRAQTMPGVGPVTALAIETFAPDLATFKRCRDFAAWLGLVPKLHSTGGKAQLGNTSKGVVTLTRAAWSERSVRFSGDICRIIPRFECFETVVPDGEGGAATGWDSETIAGCGLHGNETL

SEQ ID NO: 413424 - protein, 453 aa, unidentified
MARKQKTRGRASADFSTIHPDAAGLDVGATFHVVAVPPDRDEQSVRTFRTFSGDLHRLADWLKEVGIRTVAMESTGVYWIPVFEILEARGFEVLLVNARDVKHVPGRKSDVNDAQWLQQLHACGLLRGSFRPREGLAQLRAYLRHRERLVEYAASHILHMQKALMQMNVQLHHAVTDITGVTGMRIIRAMVSGIHEPEALAEFRDARCAASPDIIRAALTGHYRPEHVFALRQALELYDVHQAKIAECDTEIETVLRTLNAERPTPEAPLPAVRHAKARNEPKFDARPALYTLLGADLTQIHGFGPYTVLRLVAECGDDMSKWPTAKHFTSWLSLAPGNKISGGRLLSSKTRRSANRAAALLRMAAVNIGRTHTALGAFYRRLAARTGKAKAVTATARKLAILFYNALRFGMDYADPGASYYEERYRQRVLDNLRRRAQQMGFALVADPASNG

SEQ ID NO: 413425 - protein, 339 aa, unidentified
MYYSGIDQHKRDCMITTYDDAGHRVKQQRVPNDHARLRAYFAQFSGSHAAVVESTGFWYWLADLLDELGIELTLAHATRLKAIAAAKVKTDRLDSDLLAQLLRAGLIPAAHRIAREQRGPRDLLRLRLRLVAKRGSSLNSLERLRDKFHVTRRDALDSWYQQQIDIHEAQVAFLTRQLHDLEAALHPELIPNADIQRLPWIPGIGKVKAFTIVSAVDGITRFPTEGQFLSYARVVPGAANSGGHPRHRPGNKQGNRYLKIAFSHASVRAIQYFPVIKTFYQKQRRRKPVVVARAIVAAELARIVYQVLTKQEDFNGTFRGVPLQRTKTRQWPRLATPAA

SEQ ID NO: 413426 - protein, 350 aa, unidentified
MTITHYIGFDVHKKWIFYCAKTKDGTVVDEGKIPATRQAVRAWAEQRSEPWMGGLEATLFSGWIYDELKPYAAELKVAHPARLKAIAASKKKNDRIDAGKIADMLRCDLLPECYMAPSWIRELRRMLRYRNLVVRQAVRLKNRIAGLLMEEGVSYDAGRLHGKSYFAALVDSLKVPASLLQLLRLSRASLEMFEGIGRRLIRELETNPQLYARVALLQTIPGVGVILALTWVLEIAEVKRFGSNRQAMSYCGLTSALRESAGKQQRGPISKQRNAHLQTILIEAAKVAPRWNPELAALHERELARGNRNRATLAVARKLVAYLMAVDRSGKPFQARGSAVESESVEQVAV

SEQ ID NO: 413427 - protein, 387 aa, unidentified
MYFVGIDISKFKHDCAIVDEFGDVITPSWSFQNDREGFSLLKELLDALDGKKKIGLEATGHYGQNLKLFLENNDFSFMEFNPLLINRFVHSKSLRKTKTDSIDALMIAQYLMTVEYKPYPPSFYTLEKLKSLTRFRDSLIRQRSRQLVELTNILDKVFPEFKPFFKGRFSATALYILSHYASPEKISNMNSKSYEPLRRLSRGRFSMVDFVELKTLARNTVGSTSDYLLQEMEITIDIYNQLQSKVEEIELQIHDCVLALAPPILTIPGIGAASAAVILSEFGDLSNFNNPSKLLSFAGMEPGYFQSGTSESTGKMVKHGSSHLRYAMMNCAQTVINNEPTFAAYYAKKRAEGKEHRVALTHVAKKLLRVIYTLQTKELSYNPDLVR

SEQ ID NO: 413428 - protein, 344 aa, unidentified
MPSIVGGMDIHRKQVTFDYLDLVTGEVKCGQIAPADRASLRAWLRRFAGVPGVTFAVEACTGWRYVAEELQRAGIEAHLAEPADTAAARGRKRRAKTDKADSRLMRDLLAGGRLPECWIPPPQILEYRALLETYHALRREHTAWIQRVHAVLFHQGAPVFHDLSRAGAPQELAALARTHLSPAGQQQVALYLRMLEVTGGELDALRRQLVSAAGQLRGARVLAGQLYGVGPVTALALTCWLGGAGRFSSARKAVRFTGLDITVYSSDGKRSPGHLSRQGPPVLRWCAYEAGKTHARAGAPGHDYYAAVKDRKGGKRAALSEARKIVRRACHILGELGDDAFAMA

SEQ ID NO: 413429 - protein, 330 aa, unidentified
MKTNPQPVYVGVDIAKATFQVHVQGQQSEFDNAPTGHTKLCKQLLALAGAQVICEATGGYERPLVTALQLAKIPVAVVNPAQVRAAARAQGQRAKTDRIDAAMLTDYGQRYQPRLTPPITPSQRTLADLALWLKQLIAGQTVAKIQAEHHDDAFVCQQHRVLIKHYQSQIEKVEAKLQALLAQDQVLRQRVECLDAIAGVGTRTALLVLAHMPELGQMNRQQVAALAGLAPWTRESGTMKGIRCIGGGRGEVRRILYMSALSAARRNPVLREVYQRLITKGKRPKVALTAVMRRLLVYMNHLLKLLATQSEPNQPGTPTDKKITENSCKN

SEQ ID NO: 413430 - protein, 364 aa, unidentified
MDVHLRSTTVCALDADTGEAVTRRFPGNPWGEIAGWMDGFPGPSLAAYESGYLGFAPQRELAGLGVECVVAAVSKIPRSAADSASKNDRNDAARMAKAILAHDISPVWVPSPEVEGIRDLAGAHDGATARLATAKQRLLAFLARRGFVYGGTTPAGNPRKYWTYDFLRWLDKVRPEDDGGVRALAALRNEVEAAAEARADLLSEYRAAVDASPIAAEAAALQSIKGCAFALAAAFSAEVGDFTRFRSGRQVTAYFGLAPSQRSSGDSVRLGGISGAGNALVRKLAVEGSWCYAAARHQPKLMPRDTGVPLEIRMHGRKGSERLLRRREEMLARGMPAAKANAATAAELVRWRWALGMMCREGAE

SEQ ID NO: 413431 - protein, 354 aa, unidentified
MSQKLNTAITVAGIDIGKNSFHVVGLDKHGAIALRQKWSRGQMEARFANMPLCLIGMEACVGAHHLSRKLQALGHDARLMPAKYVRPYSKGQKNDFRDAEAIAEAVQRPTMRFVATKTADQLDLQALHRVRERLVGQRTGIINQIRAFLLERGIAVRQGLRFLRAELPTILATRTDVLSPRMLHIIEGLADDWRRLDERIEGLSTEIGALACGDPACDRLMTVPGIGPIISSAMVAAIGNGTAFAKGRDFGAWLGLVPKQISTGDRTILGKISRRGNRYLRVLFVQAAWVVLIRPKSWERYGLKPWIEAAKKRLHHNVLAIALANKLARIAWAVLNKERKFECIRTNKMSPRAA

SEQ ID NO: 413432 - protein, 343 aa, unidentified
MDHFAGLDVSVKDTSVCIVDDTGKIVRELKVASEPEALLAVLTSAAYLFKRIGLEAGPLSQWLFSALAEAGLPAICVETRHMRAVLQAQINKTDRNDARGMAQMMRAGLYRPVHVKTLRSQKLRMLLTHRKLLQSKAIAVENDLRGTLRNFGLKVGMAGKLKFEARIRELVENLPDLAVLVEPLLIVRRVLREQIAVLHRRLLAIVQDDAVCRRLMTIPGVGPVVALTYRATVDVPARFRNSKAVGAVFGLTPSKYQSGEIDRTGGISGCGDEMMRVMLYEAAQSMLHSKRWSWLKAWAMQIARRRGMKKAIVALARRLAVVMHRIWIHGTTFRWTREEALAA

SEQ ID NO: 413433 - protein, 310 aa, unidentified
MSKTNYVGVDLSKAELVADLSTETAPRVFPQTVEGRSALLAALPLGAHVICEASGGYERALVATLQAAGIPVSVVMPVRVRAFACAQGLRAKTDPIDARLLSAFGAALQPAPVLAQTRAHAELQELVRTRRVLIEQLNDEASHLEHTALPLLVELAQARRKLLESQMETIEARLRELIALDAAWRWRAERVQQVCGIGEVSAWTLLAELPELGSLERGQAGALLGVAPHPDDSGPRHGRRRISGGRSGARKVLYMAALSAAHRNTILRAFYQRLIGPKNKPKLVALTAVMRKLIELLNRLLADPNFKLAT

SEQ ID NO: 413434 - protein, 317 aa, unidentified
MSNPESFVGIDVAKAWLDVAWLDGATLRIDYTDQAVAGLAERLRSQPPTLVVMEATGGMETELASALVAAGMAVAVVNPRQVRDYAKACGRLAKTDRIDAMVLAAFAAAIRPQVRELPNEHTRALSDLLARRRQLIDMRVQEKLRLPRASSVQRTSLREHIAWLDERIDRLDVELTHALRSSAAWRDKDDLLKAIPGVGSLTRATMLGLLPELGTLSRRQIAALVGVAPFNRDSGRQQGQRVIWGGRAQVRRTLYMAAVAALRCNPVIRGFYQHLRSQGKPAKVALTACMRKLLIIMNAMLKHHCAWSPALDTQHGC

SEQ ID NO: 413435 - protein, 450 aa, unidentified
MQTGDIDVWLGLDVGKSSHHACALDHDGNTILDTPVDQDEKQLRRTIAKLQRRGTVLVIVDQPNTIGSLPLTVARDMGARTAYLPGGAMRKAAQLLPGGSKTDRRDARVIASTALRMPETLRDCEPDDETMAALRLLSGWDEDTAHELTRTVNRLRGLLLHLHPALERALAGDRIKSDTALGLLEHYKGPDGLRRAGAARIREYARRHGLKGTAITDAVADAIAEQTVTVPGTRAAESLIPQLASDIRRLRDRRTDISRQVEELLADAPLLTVLTSMPGIAARTASQILLAIGGDISRFKDAAHLAAYAGIAPVTRQSGTSIHGERPARGGNKRLKNALFQTAFVAIRLDPESRAYYDRKRAEGKRHNAAVMCLHADDATSSTACCATARSTNPAAPTPPPQRHHHEPKQPPHTPPDHDKTRHTPASNALDKLHRDTPHRPTGYAEGSSA

SEQ ID NO: 413436 - protein, 424 aa, unidentified
MKVTYQTCCGVDVHKSFLVATIVKTTGGIEPSYQKKRFSTFNNSILEFKQWLLDNHCHDVCMESTGKYWVPVFNLLEDKINVVIANPKWVKAVKGNKDDTKDSKWIGDLFRLGLVKGSYIPCKKVRILREYTRYRYKLVSCRSSEKNRYQNALTVCNVALDSIVSDIFGKSSTSIIDYLLEQSGTSINHEEITSKLLRSLKSKEDAVIESVEGYQMTDAQKYRMRLVRAHMDYITAEINDVDKMIENMISSNPDFENAVQFLCTIPGVKRDSAITIISETGTDMSQFSSSKRLCCWAGLTPGSNESAGKKKSVRITRAGVYLKPALVQCAHAAVKSDKSPYYKKKYESLVKRRGKKRAIIAIARMILTAIYQMLSTGEQWNPSDLYKIDMPVALVEKQKAKAIKQAKKLLQREGLLPPDEPLAS

SEQ ID NO: 413437 - protein, 329 aa, unidentified
MSRATSSATLSFVGIDVSKTSLQIAVRPSQEEWTCANEPAACADLTQQLQALQPERIVIEASGGCEHLIVAHLAAAQLAVVVVNPRQVRDFARALGQRAKTDSLDAHLLAHFGDAVRPELRPLADAEAEELKALLQRRRQLVEMLVAEKNRWQQVLHLPRLAQDVQAHIRWLEQRLHDGDRDLRQHLERQPLWKANDALLQSVPGVGAVTSLTLLAHLPELGTLSHKELAALVGVAPYARQSGGWRGKRAISGGRSQVRAVLYMATLTATRCNRVIKAFYERLLAAGKQKKVALVACMRKLLTILNAIVKHQQAWSEAAHFARNGPPHS

SEQ ID NO: 413438 - protein, 444 aa, unidentified
MEQSTRFVGMDVHKDTIVAAVTATGEVGNATAYGTFPNTAAALETLVKRLRQAGSGPIKICYEAGPCGYGVHRTLTKMGEDCMVVAPSMIPRKSGDRQKTDKRDAASLAVLHRGGLLTAVWVPDAAHEAMRDLIRTRLATVRAVRAARQQLSAFLLRHERTYPGNKPWTKAHRRWLADQSFAQPAHQIVLEECIEAVRQGEQRRDRVDGYLRAQIPSWSLFPLVQNLCALRGLDMIAGAGLAAAIGDPSRFATAPDFMAYLGMVPSEHTSGPKRRIGAITKTGDVHARTLLIEAAHSYRLPARIGRHKVAAVDAVPVAVRAIAWKAQTRLCQRYRHMMARGKLKQVVVTAIARELAGFVWSIACITSDPVVSKKVTELHDVGTALCEEVTIESEGVAQQVQQITPGTGQPRVPRRSKSLKGTTARRAGPTPANQGGIGQQERTG

SEQ ID NO: 413439 - protein, 338 aa, unidentified
MELKRVGLDLAKNVFQVHGVDGYEVVRCRRQLRRSEVLKFFAGRPPCLIGMEACAGAHYWARELAKLGHTVKLMAPQLVKPYVTSQKNDANDADGICEAVGRPKMRFVAVKTVAQQEVQAAHRIRSELIRHRTAKVNQIRGLLAEFGLVVGRRIEVLRRALPELLEDGDNGLSGGVRRLVDGLRRDLVQLDERVAEVEAVIVAEARANEACARLQTIPGIGPLTASALVSAVGDGRQFKNGRQLAAWVGLVPGQDSSGGKPRLLGISKHGDTYLRTLLIHGGRAVERTCGAKTDPRSEWLRALGSRRHKNIAAVALANRNARVAWALLARGESYRAPA

SEQ ID NO: 413440 - protein, 339 aa, unidentified
MDTVTGEVVRRRLSPTVDGVLAWLAELPAPVAVAYEAGPTGFGLARKLTSAGIRCVVAAPSKLQRPPGDRVKTDARDARHLANLLRMDQIVEVRVPTVEQEAARDLLRSREDVRGDLMRSRHRVSKLLLRQGIVYYGGQAWNGPHEVWLRGQHFTAPGLQMAYDTALETVLLTAARRDRLDRAITEMAGNSEFTPVARRLCCLRGVSVLTGFGLAVEVGDWQRFTGGTIGAYLGLVPTEFSSGAQRSQGSITKTGNTHARRLLVEAAWHHRNAYRPGPTMQARWDQAPAAARARGHEGNHRLHHRWEVFTARKKRPVVANVAVARELAGWCWSLAVMGD

SEQ ID NO: 413441 - protein, 338 aa, unidentified
MRLYAGIDLHANNSYLAVIDEADEHVEAKRLPNDIESVRRVLEPYRENLAGIAVESTFNWYWLVDGLEESGYKVHLVNTLAAQQYKGLKYTDDKTDARWLAHMLRLGILPTGWICPREKRAVRDLLRRRSQLVRQKTANRLGLRNVLERSGAKRLSGNALKRVSENDLTEWIEDPNVRLSMQASLAVIDTLSEQIERIEKTVAEHAVLDDSYRLLTSIKGIGATLASTIQYETGDIGRFSAVSNYVSYCRLVRAERNSNQRVKGLGLRKNGNAYLSWAFHEAAHFAVRFQPDARRWYEKKRSRTCPLVAIRALAHKLARAAYFMMRDQVPYEPKRLFG

SEQ ID NO: 413442 - protein, 331 aa, unidentified
MAMYCGIDLHSNNNYVAIQNRRQEDIVCRRLRNDLGTVLEFLEPYRGELETLAVESTFNWYWLVDGLKEAGYDVRLVNTTKASDYSGMKYTDDRHDARWIAHLLALGILPEGYIMPPEERGLRDLLRRRSLLVHKRTSFYLSIKSIFARSLCKQVSVQDISSWDSDTVRRMFDDPHVAESVVAMLPVVRVVTAQIKRIEEFALQTGKLRDEFSLLLTVPGIGQVLALTIMCETGDISRFRKVGNYGSYCRCVKSEKFSNSKKKGKGNRKNGNKYLSWAYSEAAHHAKKYEPLAKRYFDRKKSRSHPMVAARALANKMARALLPRDARPGSL

SEQ ID NO: 413443 - protein, 320 aa, unidentified
MMTQNDLVVVGIDVAKDKVDACIRTVTERRTFPTIASGRRSLIAWLGKHQVGKAVMEASGGYERVWAKALRQAGLQVRIVDPKRVRSFAQSAGRLAKNDKIDAEMIAWFAETFSEAPSQVEDPAQEELKALVKGRTSLIDLRARLEMQKEHETPPLVQKAHARLLKKLAGEIATIETVIGAKIKATPAFAVRAEIIQSVPGFAEATALTLLAGLPELGQVSNEVAAALVGVAPYDDDSGKRHGQRCIKGGRRWVRNALYMPCVGAATLNNPVFKAFYQRLIAKGKAPKAALVACMRKLIVILNTMIARGEKWDPKRYQVA

SEQ ID NO: 413444 - protein, 319 aa, unidentified
MAQNDLVVAGIDVAKDKVDVCIRSLSLKRTFASTAEGRRELASWLRRQKVGKAVMEASGGYERDWAKVLRNAEIEVRIVDPKRVRSFAQSAGRLAKNDTIDAEMIAWFAETFDEARGQAYDETREQLHQMVNARQALKGMQAKLESQGEHGLPAAVQRMHARILKTITVELVKFEAAIAAMIQATPRFTELAEIIESVPGIGRTTSAALIAAMPELGQANNKIVAALLGVAPYDDDSGRRRGERHIKGGRRRTRNVFYMACLGAATQHNPVLKAFYDRLVAKGKEKKVALIACMRKLISILNIMIERRQKWDASRYAVS

SEQ ID NO: 413445 - protein, 369 aa, unidentified
MAPPRMPEAVIGLDVGKLSHWACVATRDGEILLSAPVANREGDLDSLFGRFPDALVVVDQSRNIGALALARAKAAGMSAAYLPGLAAHGAARLFAGDAKTDERDAMVIAKTALGIPDALLPVGDPGPTVAAARALAAQRNFLTCENTRSKNRLRSILLESCPAFEALVDLSDGPQLRLMASLGGAWSVADAGPRRAAALTRGAARGKIEALVRSTASSTRPDAAAIAAEDRAVRLLARRISENSAEIDVITAEISALLEGDDTYRCLLTVPGIGPKTASELAISIDIEDFPSHDRLASYCGLAPRNRQSGTSISSVTASRQGNKRLKNLLIFSCNCLTRTEGRWGDYYARCRERGMPHGKALKALARKS

SEQ ID NO: 413446 - protein, 422 aa, unidentified
MSKRRNRVCGADIHKDLIVATIRDDTQSLFQEEFGTTQSELKRFRDWLLANKCKQVAFEATGIYWLPIYDFVSSSIDTIVANPWKIKNIPKDKTDAKDSQWIASLCLNGQIKRSRILSKDDRDLRTLTRARSGYVKTRTQFRNRIHKYLASNGIKLSSCISDIFGKSGRYILQCLIEGRSIDSILDGIPSGQVRKKRDLIEAALGNGLDEISRMLIKDTIDLLNSLETKIEMASQEAVNRLQAKSKDLAIVMSIPGIGFVSGSVILAEIGNYHDFKTPEQLAKWCGLSPGDNESAGKKRPCGITKQGSKYLRTVLVQIAHVVAGKTNTKLSKFFHRLSKRKEYNVAITALARKIICLVYHLLINQELYQEGICRKRGSKPVEKPPAASHSTEKQLEDKVAAIVEAFYHLKVKGRKKSLDGGG

SEQ ID NO: 413447 - protein, 365 aa, unidentified
MMRFYTQQHRFYVGIDLHARTLHLCVLDSAGSVVADRKLPCHFDSVLQAIEPYRQDLVVGVECMFGWYWLADRCAEHSIPFVLGHALYMKLIHGAKAKNDRLDAHKIARLLKGGNFPMAYVYPRGMRETRDLLRRRMYLVHKRAELITHLEILNAQNNLPPFGKKLGYAANRAELHIPERFADPSVRMSAALDLALCDKLDELIGTVELYLTRSAKVDDVQTYHRLRTVPGVGPILALVLLYEMHNVARFEQVGQFLSYARLVRCEHESAGKKLGSGGKKIGNAQLRWAFAEAACLFLRASERARQWKQKQEKKHGPAKVLGILAARLARSVYHMLRKEEAFDEERFWHGQAAAVQPAGSRTKGS

SEQ ID NO: 413448 - protein, 445 aa, unidentified
MTLLQLDEKRKQIKNKIIIGIDPANEKHQGYIIDEYGISIGKTFSFGNNHKGITTNLWYHLKKRLEPDQINPDTLIFAIEASLDFWQILAAYLENKGYKVALVSPLTTKKTRALPGNDFSRTDPKDARLVAENTKEGFFHWYRHDTPREKAMKTLSLTYNKIRKDLQSNQARLRSQVKRIFPEFMQIVTLNTETAIHLLTKYLFPEEFINMDIETTTKEIRKIYWKNNKSTLLELQASAANSIGIIKSREEKIADKITVTTLITLIKTLKQQQKTIKKELVKLAKESPYFEIITSLNGISDLTASLFLAEVVNPDKYNHFKQMQKLAGLNLRLNTSGNSRSYYRINKIGNSRLRWVIFQMTTETSKYIPEIRIKYLKRQLKQSGYTKNITACSAKLLQLLFCLMKNKQPYEYRAESQVLLVDLEEQYYRKTKVYKTKKSTEANYA

SEQ ID NO: 413449 - protein, 341 aa, unidentified
MSNYSYFCGIDLAKNHFSLHAVDQNGKVILHKSVTRSKLLTTIANMPVMRIGVEACGGAHYWARTLNKLGHDARIMAVKYVVPYRTKGKNDLNDAVAICEPVQRPSTRFVPVKSPEQQAILSVHRMREHWVRERTALMNRMRALLSEFGLIIPVGRSSLVKQVPLMLEDAENELPHLARTVIADAYHHLDELNQRIADTEQVFDSFAKVNTNVQRVMKVRGIGPQTATAILASIGNGTQFDKSRDFSAWLGLVPKQYSTGGKPRLGRITKHGDKYLRTLLVHGARTVIANLGDKQDKLSQWCRGVLERRGMNRAIVALAAKNARIIWSLLHNQTEYENYAA

SEQ ID NO: 413450 - protein, 445 aa, unidentified
MARKRKKQRLEVVHPRCAGIDVGSREHWVAVDPESTENPVQRFTTFSDDLYRLADWLQSLQVEVVAMEATGVYWIPLYEVLDARGFQVHLVNSRATRQVSGRKSDVLDCQWIWQLMSHGLLSGAFRPADAVCSLRSFVRQRAGKVQEQSRCIAHMQKALTQMNVQLDNVVSDLTGKTGTAILRAIVAGERDPHTLAKLRDRRLRADEETVARSLHGNWREEHLFALAQALDHYDFLSEQIVACDQAIALALTALPSLSAEPASEPQKPLRNAHRTATQQKQLHQALHVVMGVDLCAIPTIGIETALVLASEIGPDLSRFPTPAHFCSWLALAPPTHISGGKPVPGRKPKIFNRAGQAIRQAASNARRSNSFIGASHRARLARMDSAKAIKATAHQLARLIYSMLTNGQAYVERGMEAFEAQSKDRQLRSLQRKAHKLGLSLTAAA

SEQ ID NO: 413451 - protein, 350 aa, unidentified
MDRYIGLDAHSSSCTLAVIGPSGRKLRSQVLETNARVLIDYIRTIPRNRHFCLEEGILSNWLYEVLTPHVQEMVVVSIRQSRGPKDDKRDAFALAEMLRVGAARSRVYKERGDFGALGELCKGHNVLVIDSTRAQNRIKSLFLSRGIPCSGSRIYSAGKHEEWIEKLPIKSQPLAETLYLEYDALEELHKRAKKAMLKEARKHLIYRILRTVPGIGEIRAAQLMAVVVTPYRFSNKRSFWAYSGLAIIMRSSSDWVRTQDGDWLRTNIGKTRGLNKNFNRSLKSIFKGAATTVTGQSRNGQLYQHYQQLLEGGTKPNLAKLTIARQIASIVLSIWRTKEVYDPKKLRRAK

SEQ ID NO: 413452 - protein, 345 aa, unidentified
MSMVSGVIGGVDTHADVHVSAAIDTNGGVLGIESFPVDSGGYRSLADWLAGFGEVVRVGVEGTGSYGVGLARHLHNVGVEVVEVDRQNRQARHRFGKSDPIDALAAARAALSGTATVTPKRRDGPVEQMRVLVVARRSARRQRIQALNQIRQLVITGPDEIRTRFKDRYKNGLVSEAARMRPRKGNDPVAYTTNIVIRNLARRVEDLNDEIDSIDAALGELIVDVAPSLLGLYGVGIITAATLLVAAGDNPDRLHGEASWAHLCGVAPVPTGSGKTSGRVRLNRGGNRQANAALHRIVLTRMASDDRTRNYVRRRRAEGLSTPEIMRCLKRYVARETFKHLARAA

SEQ ID NO: 413453 - protein, 411 aa, unidentified
MDRVYDKCCGIDVHKKLIVACFKQGNKQELREFGATTRELLEMADWLKEGDCEMVAMESTSSYWKPLYNILESCDLKAMVVNAHHMKAVPGRKTDVKDAEWIADLLQHGLLTASYIPDRGQRELRELVRYRKSLVGERNRELNRLQKMLEGANIKISGTISDINGKSARNILEHILSGKTIDSAEYDILYQKKVIAHNLKATKEQIIDDLNGVMSELQRKMMRILLSHLDELNAHISELDDDIDNFMKPEEKKAAETIQDIPGIGNTSAQAIISVIGTDMGRFPTDAHISSWAGLCPGSNESAHKRKSGRTTKGNALLRETLVVCAHSAVKNKNSYFSAQFARISAHRGKKRAYVAVAHSMLVAIYHILKDGVVFKDLGSDYYNQFNRERKINAYLKKLKALGWEAPVVVA

SEQ ID NO: 413454 - protein, 342 aa, unidentified
MRSVKRGGRSCHFMSALVCGLDVHKDSTYATILNHEGKIINQMRMDNEKVLSYLAHYKVNRVAMESSTAIAPLYRKLASKGFDVMVSHPKKTRYIAEAKIKSDRVDSKTIAELARLDALPLAYVPNEETAKLREKVRRRAFLVRQRAKLKVKIKIVLTYEGIKPPLDHGLFTLKGVEWLHSLSLESVDSYLRIMNTFSREIKLLSKQLVGLAEEDEDVKLLMTVPGIGYYSALLVKSEIGDINRFPFGERLCSYAGLVPSTYASGRVVRHGGIIKEGSRWLRWVMVQAAQTHVHRFDSNVTRMYNRVAQKKGHRVALTAAAHKLLLVCYSVLRNKRPYYDQA

SEQ ID NO: 413455 - protein, 386 aa, unidentified
MRQANDLSRSLAAFDQATTLIAVIEMSQSSWLVAGIVPGLERHPLKKLTVDEGALLRLLQRWRDEVIRLGGKVECIAVAFEAGRDGFWLARWLRAYDIEAYVIHPTSIAVPRQHRRAKTDRLDTELLKRAFLGWLRGEREHCSMAAIPTLEEEDSKRPHRERESLVAERTRIINRMKGCLARLGIRGYKPNLQRATKLLPALRTPEGTPLPPNALAEMGRDLARLHFVEGQIREIEAARLERLHQDPTEKSHSMVRLLTRIIGVGVETADMLVREVLSRNLRDRRAVARYAGLTGAPDESGSKRREKGLARAGNSRVRRGMIQLAWRFLMFQKESALVQWYRSRTADSRQGARKSLIVAMARKLLIDLWRFVSTGETLVGVAMRPA

SEQ ID NO: 413456 - protein, 338 aa, unidentified
MTGFTLIAMDTSKHVFTLHGVDERGQVRLRRELRRQQVETFFAKLPATEVVLEACGSSHHWGRVLTALGHRVRLIPPQYVKPFVKRSKNDRIDAEAISEAAQRPSMHFVPVKSAEAQSEAMILSVRELLVKQQTQLMNALRGHAAEFGVIAAKGTSHIDALLERVAADPAVPATAQAMFAELGAAIADLSARVIELDRRLAQLHKTNPVSRQLAEVPGIGPVSALTLTLTVDARQFQSGRHFAAWLGLTPKQNSTGGKHRLGSISRQGNERLRQLLVLGATSVLRRVIPEQGKGSAWLQALVQRRPRKVVAVALANKMARVVWAMMTSGEAYRRQPAG

SEQ ID NO: 413457 - protein, 467 aa, unidentified
MGRKGKRTKGIEEAHPFAGMRQVNPNAAGVDIGAVEIVVCVDGENKTQIVKGFGNYTVDLQSIGTWLKEHKIKTVAMESTGVYWIPLFEVLESMGFKCLLISSRSLRRVPGRKSDIEDAQWIQTLHSYGLLESSFRPQADLVALRTMLRHRAQLLEHRAPHIQHTLALAPRASVQKALLQMNVQLSQALSDVMGETGQAIIRTIVKGERSPQLLAAFRDPGCKKSEEEIGKALTGTWRDEHLFVLKQSLELYDFYTQQLEVCDKEIDRQYALIRPDWETGELPPIPKKKQKTHSKNAPENAKEIRLHLKRINGVDLSLVDGFGVSLAQTVTMEVGSNVSEKFPTEANFCSWLGVAPKHEISGGKVLKNKTLKTKNRAGQAFRMAAQSVKKSDTVFGVMYKRFRSRQGPAQATVSTAHAIARVVYRMLKYKVEYETINVNEYEKKYEEQQVKYFKKKAAKLGYQLIPA

SEQ ID NO: 413458 - protein, 366 aa, unidentified
MKKDSIRIRNGKGDWEGNKLTIGMDLGDRTSRYCVLGEEGEVLMEASVATTQKGLSEAFGVLPPCRMAIETGQHSPWVSRHLSGLGHEVIVAHARNVRLIGESTRKDDRLDAKTLARLARIDPALLSPVRHRSAEAQAHLTRIRARAVLVGVRTALVNAIRGLTKAYGERLRKCHPEQIRKELAAELSSELRTALEPLFQEVQSLTERIQHYDHEIEKIAKQHYPEVAQLQQVNGVGTLIALTYVLTVDDPHRFGKSRDLGCYIGLRPGRRNSGNSQPQLHISKEGNRYLRTLMVQGAHYILGPFGKDSDLRRWGLKLAQRGGRNAKKRVVVAVARKLSVLLHKLWVSGEVYEPLRNHREEKRAAA

SEQ ID NO: 413459 - protein, 345 aa, unidentified
MKNTIAGVDLAKEVIQVCLCTNNKVHSNIEMPHHEFLTWLFTSKPMSIIFEACGTSNYWKQRAIEAGHDAQLISAKLVASIRQNQKTDKNDALAIVQASQLTDIQFVKGKSVEQQQLQSMMRLRELAIKQKTASSNQIKALLLEFNIRVSPKKGGLKGVIESLLEDAENGFSFEFRHALNAAWGLHLGLLDSIRVYDRCLETSIDEHDDCKRLLKLEGVGTLNAINLYIALGCADLGVFNKGKDASACIGLTPLQHSSGGVTKLGHIRKNARSSTLRSQLITGAMAVVNQIMKRTAVTKKEAWIQGLVARRGKKCAAVALANKTVRTAYVMLTQGTEYKAELVAA

SEQ ID NO: 413460 - protein, 350 aa, unidentified
MLIIGCDYHPAFQQIAFVDTDTGELQERRLQHREEAEKFYRDLAAQEMKVRVGMEASGHARWFERLLGELQIELWIGDAAEIRTKRVRKQKTDRQDAQLILKLMLKDDFPQIWVASWENRDLRQLLWHRHRMVQARTRIMNQLQAVALNEGLGCKKRLWREAGREQLEAFRLAPWASRRRQDLLELLDRLNPTIADLTQTIEREVEKCPEAQRLRTHPGVGPLTALAFVLIIGRADRFQCGKQIASYLGLVPLEESSGNRRRLGHITKQGNSLLRFLMVEAAQVTVRSIPEWRSKYFHLAMRRGRKIAKVAMARRLAVYLYWMWRQGWDYEQLKKFGPHAGQPENRDGVQ

SEQ ID NO: 413461 - protein, 345 aa, unidentified
MVLERTSVGLDVHARSVVAGVIDGYTGELWSERLAPTSEAVVAWVLRLPGPVAVAYEAGPTGFGLARALAAVGVRCVVVAPSKLERPPGDRVKTDRRDAERLARLLRIGELPGVRVPTVAEEAARDLLRAREDARGDLMRARHRLSKLLLRQGLVWQQSAWTRAHERWLQGLRWEQPWVRVAFDEALGAVLAVQTRRDRLDGAIVELAAQPAWAPLTGRLGCLRGVGVLTAVGLAVEVGDWQRFTGATIGAYLGLTPSEQSSGAQRVQGPITKTGNTHARRLLVEAAWHHRKPYRPSRALLARQAGQPDRGQTAGRAWQPAAPPALAPPGRPRQAVHHQRRRGRP

SEQ ID NO: 413462 - protein, 338 aa, unidentified
MIATIGLDIAKHVFQVHAADAKGRVMLKKTLRRSQVARFFSTLAPCLVGIEACGGAHFWARKLEAQGHTVRLMAPQFVKPYVKSQKNDAADAEAICEAVTRPSMRFVPIKSVDQQAILAVHRVRQGLVKLRTAQVNQIRSLLAEYGLVMPRGIENLRALPALLDHATDLPETFRLLMRGQLEAIRALDRRVAELERDIRAWHRAHPASRRLAEIPGVGPLTASALVATVGNAASFRSGRQLAAWIGLVPRQHSSGGKTRLLGVGKRGDGYLRGLFVHGARAVVSSPRRQRTGSSWLDRLLARRHTNVAVVAQANKTARIAWALLRHDDHYHDAAAVAA

SEQ ID NO: 413463 - protein, 386 aa, unidentified
MQKLIDLSRSLTPLKPDGTLIAVIEMSLSSWLVAGIVPGIERQPLKKLAVDESTLLKLLIRWREEAKKSGHRIERIAVAFEAGRDGFWLARWLRARDIEAHIIHASSVAVSREHRRAKTDRLDTELLKRAFLGWLRGERDHCKMVAIPTIKDEDAKRPNRERESLVGEQSRIVNRMKAALVRLGIRGFNPKLKKAVERLDGLRTPEGEPIPPNTLAELRRDMARRRLVSDQIRQIEDARLERLEQAPSDGPHAMARLLARVIGVGIETADMLVQEVLSRNMRDRRAIARYAGLTGSPDESGRKRREKGLARSGNARVRRGMIQLAWRFLMFQKDSTLAQWFRARTENARSTRKTMIVALARKLLIGLWRLVREGAVPDGVVLRPVS

SEQ ID NO: 413464 - protein, 449 aa, unidentified
MPLSTLPRILCIRVPHAGGAAVEEEAMEIMYERVAGLDVHKATIVGCVRLGTGRKVTRECRTFDTTTDGLLALLAWLVECRCSHVAMEATGVYWMPVWKILGEGDFALIVANAAHIKNVPGRKTDMNDAMWIADLLACGLIKASFVPEEDVQELRSLLRTRKQLGREQTRHVQRIQKTLAEANVQLDSVLSDIMGASGRRMIEAMIGGMRDPRKLAALADQRLKATPKQLYDALHGRLTDHHRFLLKLHLRQWDGLDATIQEIDLEVEARIARMDKEVKAGTAPFCDLIELLCTIPGVSTLSARTILSEIGRDMSRFPTAGHLVAWAGLCPGQNESAGKRKPARLRKGAPWLKTILVQCAWAAKRKKDSYYKAQFFRLQSRRGPQKAICAVAASILTAIYHILRDGTEHHDLGADHFNRHSAERQTRRLVAQLSKLGFEVQLQRTAEAA

SEQ ID NO: 413465 - protein, 339 aa, unidentified
MEHVAIDLGARKSQICVRSADGQILEEKRWPTKDLDTYLAGRPTSRVIVETCAEAFCVADAARKLGHETRVVPATLVKTLGVGARRLKTDLRDARALSEVSSRIDLPSVHIPRTESRDRKTMCGMREALIGARTKIINTVRGWLRSRGRRIERGGKASLRQRVEVAWEGQLPSYVDRQLKLIEVLNTQIAEADAEMKSWATADETCTRLMTVPGVGPLTALRFVAALDDVTRFESAHQVESYLGLVPGESSSSERQQRLSITKAGPRALRWVLVQAAWALHLRCRRPEAIPLQLWAHRIEQRRGRRTAIIALARKLAGILFALWRDGSVYEGSRGAKMI

SEQ ID NO: 413466 - protein, 430 aa, unidentified
MEEVDEQELHVERVAALDLGKAALEACVRVPHESKPGRRLQEVRGYAATTTALLALADWLHSWGVTRVVMESTSAYWKGVYWLLEAEGFECWLVNAREVKNVPGRPKTDKADAVWLAKVAERAMCRPSLVQPRPIRQLRDLTRYRRSLIQDRTREMQRVEKLLEDAQIKLSSVASDIFGVSGRAMLEALIGGQRDPKVLAQLARRRLRVKIAALEEALRGFFTDHHAVILRMMLDNIDRLSEQIAALDATIEEAIAPFAAQVAQLDEVPGVGVTAAQELIAEVGVDMGRFPSAAHLVSWAKFCPQVHESAGKTKPKGRGKGNPWLAGTLGNIVATAARTDSFLGARYRRIAKRRGKQKAMVAVGNSVLVIVYHLLSDSEARFTDLGAEHYEARIDKQRRARNLAAQLQAVTGQRIVIRDGKAVIVQPEAA

SEQ ID NO: 413467 - protein, 373 aa, unidentified
MKKDSSSEQSPKQVRKAHRQQGSLTVGIDLGDKQSCYCVLDGRGEVIQEGSIGTNKKALAKMFGSMGRSRIALEVGTHSPWVSRLLSALGHEVVVANPRQVKLISASSRKDDRVDAQTLARLARVDPQLLRPIQHRSARAQGDLMVIRVRSALVEARTGLINTARGLAKSLGERLPICGSDQMGVEQTESLPAELQQVLEPLLKEVVSLTEKIEEMDRKVEQIGRETYPETKLLQQVKGVGPLIALTFVLTLGDKARFQKSRDVGCYVGLRPRRGDSGESQPQLRITKEGDSYLRKMLVQGAHYILGYRGPDTDLRRWGLKLAARGGKRAKKAAVIAVARKLGILLHRLWVTGEVYEPLRNAHTQQEMKKAAA

SEQ ID NO: 413468 - protein, 344 aa, unidentified
MYKADRTRRRVVVHGVFISMSTMAYLGIDVAKRKVDVALLRPDGKVRSKAVLNTTAGAAELLAWVARYHEGPVHACLEATGTYGLALAEALADAGYVVSLVNPARIAAYARSRLTRSKTDAVDARLIAEFCAKETPPRWVPPSPEIRALQAWVRRLDALDQMRTQELNRLAAEPADAAVRASIQHVVDLLEDEMQTLRARIHNHFDAHPGLRAQRDLLTSIPGIGQATAAVLLAEFGGLTQFRHAAACAAYAGLVPQHRESGTSVRHKPVLSKLGVPLLRKALFYPAMVALRFNPIIVAFGERLRQKGKHKMVVIGAAMHKLVHLAYGVLKTGKAFDPKYRLVP

SEQ ID NO: 413469 - protein, 340 aa, unidentified
MNATTYGLDVAKRVFQLYWVDAHTGEIVNRRFGRDELIGFLAQRPAGRVALEACGSGHWWARKIQALGHEVVLLHAKFIRPFVQTNKTDAADARAIWTAVQQPEMRTVAAKTEDQQAMLALHRMRALLVKSRTMQVNQLRGLLYEFGATFRSGRQAGLAEMRARMAELEQALPAMLFDGLRDQLQRIDGLEQDIGQLEKRIGAWQKQEAACRAIAEVPGIGRLTATALVAMIGDARTFKSGREFASYLGLVPRQSGTGGRVRLGSISKRGDPYLRTLLIHGARSVMYHAKVPTPWLTEIQARRPANVAAVAVAHKMARTAWAILAHGRIYEKDYVSVKPA

SEQ ID NO: 413470 - protein, 338 aa, unidentified
MIVIGVDVHKHSLTAVAVDEAGRMLDETTVVATDDGLLTWAGQLAGERLWALGDCRQLTRWLERELLAAGEELVRVPPKLMAPERRAGRARGKSDPIDALAVARAALREPRLSRPRPDEQPFRDLKLLVDHREDLVDERRRAQQRLRWHLHQLDPSFVVPARRLDRSMHLERVARWLARREQEVQVRVARELVARCRSLTRTIVELDAELERRTAETAPALLELPGCGALTAAKLLAEVGPIDRFQTDAQLARHSGVAPLEASSGRVQRHRLDRGGNRQLNAAFYRIAITQARYHPAARAYLERKQAEGKSRREAIRCLKRQLARVVFNTLKTSPALT

SEQ ID NO: 413471 - protein, 472 aa, unidentified
MKLPPNKSSSQAKKLEKSGATHLDQINENAAGIDLGSAEHWVCVPPDKDEKNVRRFGCFTPDLIAMVDWLTQCGVTTVAMEATGVYWIPVFQILEARGFEVKLVNAHHFKTVPGRKTDVKDCQWLQQLHTYGLLSGSFRPEDQVCVLRSYIRQRECLIKSAGIHVQRMQKALIQMNLHLHKVISDVTGLTGMAIIRSIVAGERDPQVLSKLKDPRIKSSTVEIAKALTGDYRSEHIFVLKQELSLYEVYQQEITSIDTEIEKCLASFEIKVKDEPPPSKRKRRKKPIGNNSNFDLRQYLYQITGIDFTLIDGLDVLAVQTILSEVGLDHERFPTVKHFCSWLGLCPGQKITGGKVKSFQTRRVVNRAANAFRMAAFSLTQSRSAMGAFYRRLRSRLGAPKAITATAHKLARLFYQMWATAAQYTDPGMDYYEQKYQEQILRNLRNKAHTLGLELVPISQAPQNTPSSPTLAT

SEQ ID NO: 413472 - protein, 309 aa, unidentified
MEVFVGIDVSKDRLDVCVLPSGETFAVSSDGEGLALLADRLLVLHPASVAMEATGGFEVVAAGVLASAGLPVVVVNPAQVRSFAHALGRRAKTDPIDAYVIARFAEATRPQLRPLADAEQRLLSDLTVRRRQILQMLTAERQRLSRTSEPRLKKSLKRLIMALEKELGEVDGEIDQAVRASPVWRRKEALMQSVPGVGRITARNLLADMPELGTLDRRQAAALAGLAPFTRQSGKWRGKSFIGGGRTHVRCALFMAALSAARYNPALKLFHQRLIQAGKPKMVALIAVARKLLIILNAVIRDQTPWQSA

SEQ ID NO: 413473 - protein, 341 aa, unidentified
MQIRSIGIDLGKTTFHLVGLGERGKSVIRKKLSGKQLLAFTANLPPSLVGLEACSGSHFLGRALSQQGHDVRLIPAQFVKPFVKSNKNDYLDAEAIAEAVERENMRFVPIKTDDQLDLQALHRVRERLVSRRTAVINQVRAFLLERGITFRKGPATLRRQMPEILENAAAQLSPRMRNLLATLWQEWKQLEEQIDCLSADIETICIADPACQRLRQIPGVGPLVATAVVAAIGNGAAFHKGRDFAAWLGLIPKQYSTGGKAKLLGISKRGNPYLRKMFIHGARAAVLRLKRDGSLLGAWMNGLEARAPRNVLVVAMANKLARITWAVLSSGEPYRAAALAA

SEQ ID NO: 413474 - protein, 405 aa, unidentified
MFDTEDVGVFLGLDVGKTAHHGHGLTPAGKKVLDKQLPNSEPRLRAVFDKLAAKFGTVLVIVDQPASIGALPLTVARDAGCKVAYLPGLAMRRIADLYPGEAKTDAKDAAVIADAARTMAHTLRSLELTDEITAELSVLVGFDQDLAAEATRTSNRIRGLLTQFHPSLERVLGPRLDHQAVTWLLERYGSPAALRKAGRRRLVELVRPKAPRMAQRLIDDIFDALDEQTVVVPGTGTLDIVVPSLASSLTAVHEQRRALEAQINALLEAHPLSPVLTSMPGVGVRTAAVLLVTVGDGTSFPTAAHLASYAGLAPTTKSSGTSIHGEHAPRGGNRQLKRAMFLSAFACMNADPASRTYYDRQRARGKTHTQALLRLARQRISVLFAMLRDGTFYESRMPAGVELAA

SEQ ID NO: 413475 - protein, 343 aa, unidentified
MKIIRVGVDLAKNVFQVHGVDRNEKPVWRRKLNREEWLKVLLEKIEPGCEIGMEACGGAHHWARKLQSQGYRVKLIAPQFVKLYVKSNKNDANDAEAICEEMSRLNMRFVSVKTVEQQDIQAVHRIRAGLMEQRIAKANQIRGLVCEYGLVAPKQISHLRAAIPCWLEDAENGLTSRFRKLLNGVWADLLSLDQRVKELDQEITAIAAADPVAKRLQQLRGVGPMIATALLATVGDASQFANGRQMAASLGLTPKQNSSGGKEKLLGISKRGDAYVRCLLIHGARSMINVSKGKDDRLSLWVMRIANTRHPNVAAVAMANKTARIAWAMIRREGDYQPQLAAG

SEQ ID NO: 413476 - protein, 400 aa, unidentified
MTYVGIDVSKVTFVVAYSSVKTNKTRTFKNTVNGVHEFVQTISASEHNCVLEATGNYSALLVYLLSEAGITISLENPLKIKNFARVMLTVTKTDEIDARLIALYGEKMQPAPYKLRSDAILVLKQKRTVLRQLKKQLVATRNLKGSMEVLPFFDPKCKKTIEKTITFLEKQIKEMEEELASLAQGEYKKQMDLLTSIKGIGVTLAAALIVATGRFSYFDNAKQLTRYLGLSPTYQQSGTSVNVKGHINRNGDSSLRSQLYVAAFSSLRCNTECKACFDRLRSNGKPGKVVVIAVANKLVSKPSLSSRKGNPMSMDSNPKSHNSSCGGNAMRQGTEHTAPTSFSCTITCMIMLIIVNRIQFLYYSSYYKVFKVNNLFFFINNRPYCDGQQVPPASVRCIFL

SEQ ID NO: 413477 - protein, 351 aa, unidentified
MNKKYLCFGLGLDISKATFDACFGGKLSNGDFKVIRTKKFKNNPTGFEAFITWIEQNRVKNKLEKLDFKIMMEVTGVYHESVLYCLYRKGYQVCLELGSRVKHYCKAIGLESKNDNIDSKGMCQMAYTLNLKLWKPVSESILNIRSLLRHRKALLKTKTSLGNQLHANKISEVKDPEVANSLIKMIKQLKQEINIIEARAKLLSKSDTEFHRKVMMVTKSVFGLGFISVLTVVSETNGFKEFRNRKQLESYAGLDIIENSSGVFSGKRRISKKGNANIRTVLYMSVLTIIKSKSKPYYDLYSRLMKRNGGISKKANVAVQRKLLLIIYTLWKKDEAFDISHYASVKEVVPA

SEQ ID NO: 413478 - protein, 369 aa, unidentified
MPTMTHPVPTPQPMSSTGRVTGGVDTHKDTHTAAVLDACGRMLGHQQFPTTPAGYALLLTWLRSHGELDKVGIEGTGAYGAGLALHLRVAGVELVEVDRPDRSTRRGRGKSDPVDAEAAARAAQAGRATGVPKDRTGRVEALRALRVARRSAVTARADTQTQMKSLIVTAPDQLRAQLRTLGDRQLIRHCATRRPDHTAVGDPTTATVMALRALARRHQQLTVEIDELDGLIAPLAAAINPALCALLGVGPDVAGQLLVTAGENPQRLRSDAAFAMLCGAAPLPASSGRTLRHRLNRGGDRHANAALHRIVLCRLRWDPRTRAYADRRTTEGMSKKEIMRCLKRYLAREIYTALLNPHPSSIPAVHSAA

SEQ ID NO: 413479 - protein, 351 aa, unidentified
MLIIGLDYHPSFQQIAFVNTETGECGERRLEHGDQEAERFYRKLKEGGVSVRVGMEATGHARWFERLMAELGFELWIGDPAQIKAKRVRKQKTDRQDAQLILTLLMENRFPKVWVPSVENRDLRQLLWHRHRLVQMRTRVMNQLQAVAMNEGLRRKKGLWSKSGRAQLESFLLAPWATRRRRDLLELLDQLTRSITELSTAIEQEGKKRPEVVRLMTHPGVGPLTGLAFVLIIGPPERFRCGKQIGSYLGLIPCEDSSAGKQRLGHISKQGNSLLRFLLVEAAQIAVRDDPNWRRKYVHLAMRRERRIAKVAMARKLAVCLYWMLRKEWNYQELLKFGSHAGQLETGHGVE

SEQ ID NO: 413480 - protein, 349 aa, unidentified
MRHIGVDLHKTNFVACFLAADDTRRLETYPLTGDGLARFKRQLDASDELAVEATQNVHYFYDEVKSHVSRVAVVDTYRFGVVAKSKKKTDRADAAALARFLKSGWLPEVPVPSEQVRTLRQLLQARETLVSMRTKLKNMAHAAFSRNGIALTRAAFASAAGRARLASREDLPAADLLVLRVALRQIAQLDAEIKAVEAEVVRRGKTLRGVSRLLQVHGLNLLSAVSLLAEVGDIALFETSKQLVSYAGLATSTRQSSETTRHGGITKRGRKRLRTVVIQAVLSMVNRTDTPLMEFYRKKKREKGAGKATCATARKLLTIIFVPLKKELDYWYLEDRLYNRKLRALNAAA

SEQ ID NO: 413481 - protein, 333 aa, unidentified
MKNQESHPVLGVDISKLTFDVAWLLEGSEKRHKFNNNLAGFSQLMSWLSKLMVEDLHVCMEATGRYYEPLAEFLLSHGYLVSVVNAAKIKGHANAELKRLKTDSLDASLIARFCLAHHPPAWMPQPTEIREVQEAERYLVSLKAMRTQETNRLKAGLLCAAVCVQIEIHIQQIDSNIAEIEKFLRLQLKKHEKLAKHFNLITSVIGIGEVTAFTWLGELGYCDTFKHARQLEAYAGLSTRKVQSGTSVHGRERLSKVGNHYLRTAFYMPAMSAIRCNPAMIEFKDRLTEHGKPPKLIVGAVMRKLLRIAFAVVKTQKAFDYKHVASPPKALAC

SEQ ID NO: 413482 - protein, 314 aa, unidentified
MNSPLFVGIDVSQTRLDVAWRPGTSQTFAHDEAGIATVVEPLRGLDPTLIVLEATGGLEIPLTSAVAAAGLPIVVLNPRQVRDFAKASGQLAKTDALDAQVLAQFAEGMSPQPRPLPDADTRALAAVLARRRQLVEMLGAEKSRLLNAPNSIRKSLRAHIAWLERELEHTDRGLANAIRQSSVWREKDELLRRVPGVGPVLTSTLLANLPELGTLPHKQIAALVGVAPLSRDRGSLRGRRTVWGGRAQVRAVLYMGAVVAARFNPVIRAFYQRVHHAGKANQVALTACMRKLLTSSMPCSKHRTPWRETDAQHA

SEQ ID NO: 413483 - protein, 396 aa, unidentified
MTTIGIDIGGRTHVVARCRDGTSRADREILRVNQSRAGFAALDAWLGRQTEPVTLVTMESSGHYWMPLASHLCRRDIPVAVVNPLAAKYFAKSRLARTKSDPADARSLAEMAMRDTPPARDPLTGVELRQAARFAMTLVAEQAKVCQRLIRLVELGFPELGELFDDPTCRTAREVLRIAPTARAAARRRPTTLANANAGPGRRRLGTAKAERLQTAAVDSIAVPELDAEVAFEVGLLLDQYDLLERQIEEADRRVAGLLDGETARRLQTIPGVGPSIAAALLAEIGDIDRFTDFDQLLAYAGVHPAERSSGRKGANPETAWRMSKAGNSHLRAAAYRMALVGIQHNPVIAAHYARKRAAGKSKMNALGHCMRKALSIVWGVWRNGRDFDPNWGVEA

SEQ ID NO: 413484 - protein, 377 aa, unidentified
MKAPSTRPAAVLGLDVGKSSHWACLIDRDGEVLDSAPVRNREAELDALFASAPAGTLVVVDQFRNIGSLAVRRARAAGLGVAHLPGLAASRAAGLFAGEAKTDERDAAVIERTALGVPDSLSGVPGRGEALEAARALSSQRDHVVACATRDKNRLRAVLLESCPALEAAVDLSDRRWLELLAGFGGAWGIARSGAEGPRAEAAGEAAAASTAPPPALVEAENRQVRFLAARISEALDEAGALEAETAALLEGDETYACLLTVPGIGPRTAAQLAVSVDIGRFPDHDHLASYCGIAPRVRSSGTSVRSVRASRRGDARLKSLLIFSCNSLVRSSGRYGEYYRACRARGMGHGRALKAVARKRLRAIYAVMRDRVPYRE

SEQ ID NO: 413485 - protein, 361 aa, unidentified
MSHTSVWNNATEMPAVTIGLDLGDRTSRIYELSAAGERLTEASLPTTPSALVKYFGKRAACRVVLEVGTHSPWVARTLTELGHEVVVANPSAVYGKGRRRKRNDRMDAEFLARQGRADVKLLHPIRHRSAAAQADLALLRARDQLVQTRTGLINHVRGAVKAIGARLTRCAAEAFPRRVRAEVPEALRPALTPLLEVIGELSQRIAGYDRQLVAAIRDRYPVAMRLQQPAGVGPLTALAYVLLVEDPQRFGRSRDVGAYFGLVPRLDESSDSRPQLRISKAGDGLGRRLLVSAAHYILGPFGPPCDLRRYGEALAARGGKNAKKRAVVAVARKVAVLLHRLWVSETAYDPDYLATRPPRAA

SEQ ID NO: 413486 - protein, 352 aa, unidentified
MHYVGIDLHKRYVTVCALDKSGEVVAEYRRLSNTAEAVLGFLERLKGPVAVALEATLHWAWLHDLLSGAGYEVKVAHPQQVKLICHARCKTDPVDAHKLADLLRTDLLPAIWVPDAETRAKRRLLRGRAFLVRARTRVKNRIQAYLAEQNLRVPVTDLFGKAGRQWLGVVALPEAVRLQVELLVELVEVLDERVKRLDREIRERVAVSPEAQRLMTVPGIGPYLALLIEAEIGTIERFRTSHELASYAGLVPSTRSSGGKTAHGGVGPAGSSWLKWALVEATQVLKRSPGPVRFHYERLVRAKGKQKATVAAARKLCCYLYWMLREGWSYEEWLERRERLEVRPVQTLASVA

SEQ ID NO: 413487 - protein, 341 aa, unidentified
MMIIGCDFHPRMQQIAYLDRETGDCGECRLSHPEAAAEFYRSLCGRPVRVGMEATGNFHWFRRLMAELGHEVLLGDPSAIRAACPRKQKTDKRDARHILTLLLEDRFPVVWQPSVENEDTRQLLLHRCRLVRMRARVKNQLDSIAKNEGLLSKRVWCAMRRQQIEALPLSGWDVERRKDLLALLDELNRRIEPLDEAVKKTAEGSAEARLLMTHPGVGPVVSLAYVLTLGDWRRFPRGKQVASYLGLIPTEESSSDKRRLGHISKQGNTLLRWLLVEAATKAQRYDASWHRQYVRLSMNKHHGVAKVAIAHKLAVRLYWMLRSGQDYTRVMERGSHAGQSV

SEQ ID NO: 413488 - protein, 409 aa, unidentified
MNKVNIAPFEVFCGIDVGKSLNHIVALDRYDDKPLINRKVPQEEAEIRAALEEAGDFGLALVIVDQFGAFGRLVVGVAKSMDIPVAHMSPRRFRQVAETYGEDKFDEKDAYILADASRTTPRNIEFVGNRAESMAEIKVLSSRRDDIVEERTRCYNRLHDFIHQVSPPLEELFSKRKLHNDLEIRLIARYGGPIGFRQAGRARASTWAAELKYHCVDGPKKVEQVFDVLDRQTVMLPGAAVIEEQIRSIASRIIELLAEEKRLNLMIEQRAKMIPEVDLLQSIPGVGPVYAALIAVEIGDIGRFRDSNHLASYAGVAPRKEESGTSVHKRRKRKGGNRRLKNALMQSSQRSVQCDPLAREYYERKRAEGKKHLQALRALARHRVTVIFAMLNEGTFYEPPVEVDENGRG

SEQ ID NO: 413489 - protein, 345 aa, unidentified
MQPMYYIGLDVHKRKISYCVKDGGGRIHAEGSLSATRLDLDRWMKALPQPWSAAMEATMFTGWIYDHLQPHAAVLKVAHPLMLRAIAAAKKKNDRIDASKICDCLRCDFLPESYMASAAIRERRRTLRYRNLLVRQMVQMKIKISALLMEAGVSYNKQRLHKAGYFRELLASNPDIDEGLCSLLRLCRETVVRLGKTESALVRSLERDSLLVERVERLMTIPAVGPITALTWALEVGDVQRFSSIKKAISYCGLCGAEKSSGNTVQRTPLSKQRNKHLQTTLIEAAKMAPRNSAELAMLYDKEKQKGNANRATLAVARKLVAYLMAVDRGQRNFQIAETSSNIAA

SEQ ID NO: 413490 - protein, 436 aa, unidentified
MRGYRCSMIMGFTKPIEHSNLITKEGDLMNPLYVGIDVSSKSNVVYFMLPNGDKHSNFSVANSHDGSTQLVKRICSALTSQSLDTVSIGLEATSVYGDNLVYFLREDASLASFNRKIHVLNPKQVNKFKESYNDLPKNDWIDSFVIADCLRFGRINKEVYIGDYHYKALQNLTRARYFAVCNLTKEKQRFMNVLFKKYSTMTQEKVFSDTFSTTALAVYDEFESAEALAYMDLQELTAFIIEKGKNRFPDPDAVAKAIQKAARSSYRLPKTVNDSVNQVLSISITSMKALESQIKEFDKAIAAQMKLLPNVLISIPGIGPVYSAGIMAEIGDINRFDNQAALAKYAGLAWTQHQSGNFEAQNTRLIHSGNRFFKYYLCEAAFSLVRCDKEYSNFYHLKYKEVNKYQHKRALALTARKFVRLVFTLLKDNRLYRPAE

SEQ ID NO: 413491 - protein, 375 aa, unidentified
MHRRRAVEDRITYVGLDVHKEGIVVAVAEGGLRGEVREYGRIANTAAALDRLMRKLGSTGVRLRFCYEAGPCGYGIQRHLSARGHECVVVAPSLIPKRAGDRVKTDRRDAAGLARLHRAGELTAVWVPDAEHEAMRDLVRARLDAVHALRRARQQLSGFLLRQGCHYGRPAWTKLHRRWLAGLKFEQAVHHIVLEDYIAAVEAAEARRGRLTAQIEAMLPDWTLAPVVAALQTMRGMALVNAATLIAELGDLSRFANPRQLMAYLGLVPCEHSSGASVRRGGLTKAGNSAARRLLIEAAWCYRFPARVSRELLLRQEEQPKPIREIAWKAQLRLCARYRRLARSGKPANVVTAAIARELAGFIWAIARRVPPAAG

SEQ ID NO: 413492 - protein, 399 aa, unidentified
MQETTQHDAVDVFVGVGKGRHHAVALDRNGKRLYNKALPNDEVKLRALIAELKTHRRLLFVVDQPSTIGALPVAVARAEGVLVAYLPGLAMRRIADLHAGEAKTDARDAAIIAEAARSMPHTLRSLRLADEQLAELTMLRGFDDDLAAQVTQTSNRIRGLLTQIHPALERVLGPRLDHPAVLDLLERYPSPSAPAAANEKTLANRLTKLAPRLGKNWAAEIVQVLNEQAVIVPGTQAATIVMPRLAQQLAALRKQRDEIAAEVERLVLAHPFWPVLTSMPGVGVRTAARLLTEAAPKAFATAAHLAAYVGLAPVTRRSGSSIRGEHPSRRGNKVLKRALFLSAFAALRDPVSRAYYSCKIQQGKRHNQALIALARRRCDVLFAMLRDGTIYPPKSAPDA

SEQ ID NO: 413493 - protein, 317 aa, unidentified
MTTKIKNYYIGVDISKDTFDVYRLPGDKHYTYQNDSKGFQAFIQVLKRLKGQVLIVCEATGGYEIPLAQKLHDKEFKMVIMNPRKIRDFGRAVGFLAKTDKLDAKLIALFAERVQPAYRKKDFSKLELVALHQRQEQLKTLIQAEKNRLAHTSKDIAGSISKLIDFLNNQLDDISKKLEQTINADCDLRNKVEIVQTCKGIGRLTAQNMLICVPELGTISKKPLTALVGVAPFNRDSGKMRGKRMISGGRYQARRSLYMSTLVAIKHNPPIRDFYNKLLEKGKPKKVAIIACLHKLLIIINAMVRDMLPWQKMNMGT

SEQ ID NO: 413494 - protein, 344 aa, unidentified
MRNPNILAIDLAKNVFQVCKTDSQGNVVFNREVTRLKLKALLCKQQSSLVAMEACASAHYWARYARDLGHQVKVMSARSVKAFQTKQKTDKNDALAIATAASLQHIHSVKIHTVEEQALQALERARHLALAQQVAQSNQIRGLLSEFGVVIAQGMSALRVNIPLVLEDAENGLPDSFRAVLHRLWAQLNVQIEHVDMLTKQLELSVNTDPVCQQLMKLEGVGPLGALGLALRLGKGENFTNGREASANIGLTPKQHSSGGKERIGHISKRNADKRLRSILFQGALSVISSVIKRPARTTKEQWLKALIERRGKKVAAIALANKTVRTAYALLKSNSEYQPQLLA

SEQ ID NO: 413495 - protein, 407 aa, unidentified
MIFVGDDWAEDHHDVHVMDTTGARLGTRRLPEGLPGIGQLHELLAQHADEPGQVVVGIETDRGLWVQALLAAGYQVYAINPLAAARYRDRHQVSGAKSDAGDAKVLADLVRTDRHNHRPIAGDTAQAEAIKVLARGHQNLIWARTRQTNALRSALREYYPAALDAFDSLHDRDALAVLGRAPSPGQGARLSRSAIRAALAKAGRQRNLDTRAEQIQAVLRRPELAAPAPIAAAYAATTTAAVGIIGELNRQITELENQLAAHFEQHPDADIYLSLPGLGDVLGARVLGEFGDDPNRYADAKSRKNYAGTSPLTVASGRKRAVLARYVRNRRLYDAIDAWAFCAITTSPGCRAYYDHRRAVGDLHHQALRALGNRLVGILHGCLRHHTSYNEHTAWSHRNQDQQPAAA

SEQ ID NO: 413496 - protein, 353 aa, unidentified
MSDDKYIAFDVHQETTVISVLNAAGREVKTAILPTQAQPLIAFLEGLRGTLHLTLEEGTYAAWLYDLLQGRVGKLIVCDPRHNALLKEGNKTDAGDARKLAELLRAGMLRAVYHGSRSLRGLHELAHAYEALREDTTRVMNRIKAFYRSRGIGCAGRGVYRKGQRASWLERLPAGASRLRAQLLHEELDQVGSLRRKARSALLAEARKHTVAARLRQIPGMGPLRVALLMAHVQTPHRFRSRTSFWTYVGLGVVYRGSSEYRLAAGRAVRRPQALQPRGLNPNHRPELKEIFKSAALSAIRQAGPFKNYYDPRLQQGVDPAILRVTVARKLAALTLSLWKKGGHYRVPGPQQA

SEQ ID NO: 413497 - protein, 457 aa, unidentified
MTRQKHSRPARDIAPVHPHAAAVDIGATLHVAAVRPGCDPEPVRTFGTFTTDLHRLADWFEQCGVETVAMESTGVYWIPLYEILDQRGFEVVIVNARDAKNVPGRKTDVSDAAWLQRLHEYGLLRASFRPKGEIATLRSYLRQRERLLDQAAAHIQHMQKALTEMNLQLHHVVADVTGVTGLRILRALVAGERDPDTLAAYSDPRCKAPAETLRAALVGNDREEHVFALAQALELYEIYQAKVAACDQQIEAVLERLKAANPPPAATLPPARPRRRQANEPGFAVREALHAILGADPTQIDGIGPSLALTLVGECGTDLSAWPSAKHFTSWLSLAPHNKISGGKVLSARTRRSGSRAAALLRLAAVAVGRTATALGAFYRRLAARVGKAKAVTATARKIGVLFYNMLRHGMDYADPGASAYEARYRQRVLSNLRRRAKSLGYVLQKADPASAAIAVS

SEQ ID NO: 413498 - protein, 453 aa, unidentified
MAKKAKKLHTKKGVELKIVNPNAAGIDIADTEMQVCVPVDRDGDNNRRFGSFTRDLNEICEWLVDCGINTAAMEATGIYWIPLFFKLKESGIDVILVNAHEVKNISEKKTDEADAEWLMLLHTYGLLKASYQPENEARQVRNLARHRGNILKASGKEVQHMQKAMEQMNIKLSNVLSDIVGKSGRAIIDAILKGERCPEVLAQLADGRCKRSKEDIALSLEGTWDEDHLFELKQAYDLYNYLQTQMTECDHKIEELLMSYAAVVDTDMSGLVKCNKAICKKNAVDFDVERYGYAIWGINPMTIPGMSAGSVLQLIGELGHNFVDKFDTPEKFCKWCNIVPNNRISGGKLISSRVPKRKNPVGQVFRLCANSLKDAKNPLGFYFRRIRSRGGHMQAIVATAHKIARIFYVMVKNKCTYDETKVGLDEQELLRKKIERTQRALDKLNARLSAAIC

SEQ ID NO: 413499 - protein, 531 aa, unidentified
MAGKLSGSRRRSQTKSRAKNRQHLQKPSGAVTNRVTKVGGDRFAIVCIDPAKNRSEWMMADYFGKLLIEPQTLEHQSGHFKAAIVLVRQAQQKYQIEDTIVVVERTGNYHLAPKRAFASAGFETRVVHPFATKQYRMPADPGNKTDETDLHAQHRAAVAGFGLCERELPITYRELQLRSRHRRNLVEKSSSLACQIRDNLHLSMPGYAALFDRLLEHKTAMLVSRCCESPAMVLELGRDGICERLREKSLRCNQRTIDKILSWASQSADAPIEDGALHHAIWTDLEELHQHLSRQIEAIERDLASALVQTPYVRLMAIPGINVVSAADLAAEMGPIDGYANSNAITGRCGLFPSRHQSDQTDSSGPIIRKANRRLRCALMRIADNLAAHCAYYRGLAEQDFARGVDIRASRVKTAKKFSRLAFACVAGDQPLRHPAFRAPDSILEKLREFHRLHETPMQQVLADLTRVVEQLPGHTRGHEATVVATALREHAKRKRAPVGIGELLTAVLARIGVNPNDVTENHPPENEDRP

SEQ ID NO: 413500 - protein, 341 aa, unidentified
MKKFIRIGVDLAKNYFQVHALESENGRAVTRKLKRSKMHEFFSQIEPCLIGMEACGSAHYWGRELKAMGHEVLLMPPAYTKPYVKRGKNDAVDADAICEAMSRPGMRFVPIKSPEQQATLMLHKTRELLVKQRTMSVNALRGHLSEFGIVAAKGIGRVDELLDLAESDATLPNAARASVKVLAQALEGLDKAIDDLEKEISSAHAQNEMSRLLDKVPGIGKLIASVIAASVPDPSVFKSGRDFAAWLGLTPRQNSSGGKQTLGAITKQGNRYIRKMLVLGATSLLNVVGKRKGALRDWIVGLLAKKPARLVTVALANKLARILWAMMKTGECFRTETFTKA

SEQ ID NO: 413501 - protein, 394 aa, unidentified
MKLVGIDVGKNSHHFCVMDKETGEFNVTPTSFSNNKEGFDFLINSLKPYSKKSILIGMEDTGHYHVALLKFLLSNGYTVALINPKTTDLTRKMEGGITKNDKLDTITICDVLDTPERKKQYRITKVDRFDLYEQRQLTRHHHNLKEELNVYCNRLQKSIDLVFPEFNTLFSSKYSIVYMNLLKTFGSSEAIASTDIRTIRKCFEIKGRGNRISLTPEKLKECAKNSIGISSEVETIQIKHLVSQITLIKEQIAEIDKKIEEFSITNNSPILSIPGISHFSGTSILAELGDIGNYSKPSQIIKFAGVAPYHYESSQYNAQHTGITKKESKYLRKTLYQIILTVINNNPVFKKYYRLKISQGKGHRCAQGHCIRKLLRIIYHLLETGQSFDPALLR

SEQ ID NO: 413502 - protein, 384 aa, unidentified
MNKLDSKVACAGMDVHYKFSNVTFRDIDGRIVSRQRLDHPDRQGLAVRLGRWPQGVPVVMEASFGWGWLSDVVEAAGLEVHLSNCFKVEQMRKARGWVKTNKKDADLVSLLPFEPSDWWKVWRAPPAVRNRREQMRFRGDLVASQTEVKNRIHAIFHRHGIFHEFSDLFGGRGRRFLVELCIGGSAYLSPEALQALRGQVRLLDHLRRQLADIARVLRKQLAKTPLIRRLDHIDGFGLILSHVLTAEIGQIERFRSHKALASYSLLAPRSNDTGQEDPSQSPKGRHLGLRGNRTLKWAFLEAARGAVRSGGRWRAIYDRVTAGGTKDRNRGYIKVARELVKVVYVVWAKGVDYQANPPARPGRKTHQNKSRSGTGQLYHPMVHA

SEQ ID NO: 413503 - protein, 307 aa, unidentified
MQYIGIDMSKDTFRACFDESTILIFNNNPVGIRQFLKQLSPKALIGVEATGVYHLLFAHIVSEKGLQVTVINPLLTHRQIQTSLRKVKTDRTDAVAIRKALMTGLGYVFVDTVESLALKTIVSERESLVKMRAETKQRIHVHKLKQQAVTEKIFNPYTPVIKALSTQIKLLEKQMKGFEKDTQALLQSIPGVGPVTAASLVACIGNISRFNAPEKLTAYIGLDPRVYQSGTSINGKGYISKRGNASLRCILFNAAFIARRHIPELKQFFNKKISEGKHYFSAQVAVERKLVHLIYAVWTRNTPYQER

SEQ ID NO: 413504 - protein, 404 aa, unidentified
MDDPITGYAGVDWATDAHAVCVVDDQGTAVVEFDVDHSAEGLAELCRRVQRGGACRVAIERPDGPVVDALLEAGLEVVVVSSRSVKALRERYGTSGNKSDRSDAYVLADCLRTDGHRWRSLEPDSPATITLRTHVRARKDLVETRVAVANQLRAHLRIVFPGVVGLFRDIDSPISVRFLERFPSATRAAWLSEKRLGAWLRANGYCGRKTAAVLNARLVAAPAGLTGEEGDARGAVTLAYITVLKTLRAQIDELTTLLDELLDAHPDAPIFRSLPRCATIRAATLLAEIGDCRARFPDAESLSCLAGVAPSTRASGRHRAVTFRFSSDKKLRDALCDFAGDSWRANAWAEARYRQLRAAGKSHPHAERILARSWAHIIWRCWQDNTPYDPSRHGGHQRLMHDAA

SEQ ID NO: 413505 - protein, 289 aa, unidentified
MISERTSVGLDVHARSVVAAAIDERTGELVQRRMGSSTEEIVAWVTGLPGPVAATYEAGPTGFGLARALTAAGVRCVVAAPSKLQRPVGDRVKTDARDAVHLARLLRLGEIVEVVVPSVESEAARDLVRAREDARGDLMSARHRVSKLLLRQGIQYTGGKAWTVAHDGWLRSQWFELVGLQAAFDAAYEAMIQAVDRRDRLDAAITRMAADSEFTDVVNRLCCLRGVSTLTGFGLAVEIGDWTRLDGHRIGAYVGLTPSESSSGASRALGGITKTGNGHARRLLIEGEC

SEQ ID NO: 413506 - protein, 346 aa, unidentified
MEHYVGLDVSLKLTAICIVDRSGKIEREGVVTSDPETIAAFVKSHAPHVARIGLEAGATSTWLWTELNKMGLPVICIDARHAKAALKMQINKSDRNDAVGIARIMQCGWYKEVRVKDLDSHAIKALLVSRALLVKIKRDIENQIRGLLKNLGLVIGQAKMNVFAVRAAELADARPAVAAAVEPLLKARDAVGRQIADLDRKVLRLARNNAQVRRFITVPGVGPITALCFLATIDDPTRFKRSRSVGAYAGLTTRRYASGEIDWTGRISKCGDKMLRTYLYEAANVLLTRIEKWSALKAWGIRLAKRSGLRKAKVAVARKLAVILHRMWIERTEFKWSSKEAANQPA

SEQ ID NO: 413507 - protein, 339 aa, unidentified
MSKQPSSAQTVSFCGIDVSAKTLAVAVQQQDRPLEQRQFANTAAGHKALIAWLGKREGTARVSLEATGMYSLDLALALDAAEGVELAVLNPKTANRFAQTLGRSKTDAADAAALAEYSQRMPFARWRRPGRGALELRAVSRHLATLTEERARLRNRLHAAESSAIAPRCVREDLRRSMAGLEKRILRLRKEAVALIAQDAEMRRKFQRLIGIAGIAETSAVQLLGELAALDPEMTARQWVAHSGLDPAHRISGSSVRPPSKISRHGNSQLRRALFMPALVGARFDPHMKAFYTLLQQRQKSKMQALTAVARKLLHAIYGVFKTDTPYDGSKLFPGLKQA

SEQ ID NO: 413508 - protein, 410 aa, unidentified
MNYQNYLFVGVDTHKNQHTAVVINCFHKSLGYTQTVNDPDFFENFLTKLNSLSHNNQTLIFGLEDTQGLGHSLAQWLIEKGYTVKEVNPSITKRERDHSTNPDKSDLVDAEAIANALYANLDKLPTVEKDATYKAISQLNNHRKSLVKRQTQLKNRLHNLIHQQYPQYEQFFSDPFGKTAMAFWEKFPHPAELKHYGQKRLNKFLKDQAKNISNSKAKTILSLINKNSKQDISTETRSSLIPMLISQLRLVMNHIEQINQKLKEAIDKSDYKLTTMPGIGFILAAEFIANIRNINRFDSASKLARYAGLAPAEYSSGKSRKQSFKKYGNRDLNHAFYTLALQQIGTTKNGGIKNPVAYNYYRKKLAEGKARKVALTCLQRRLVDIIYAMMRDNSAYKLPEIPKYEVSKAS

SEQ ID NO: 413509 - protein, 341 aa, unidentified
MQVTTLGIDLAKNVFQVHGVDAAGKVVITKKLRRSQVLPLFEGLPRCLIGMEACATSHHWARELKTLGHDVRVMPASYVKAYVKRNKSDAADAAAICEAVTRPSMRFVPVKTAEQQAVLMLHRTRDLLVRQRTQLINAMRAHLAELGLVAAQGRDGLTALIGIVRNKESRIPDLARKALHVLLDQLDALAHQIGGIERHIHAEHRSNDASQRLETIPGIGVIGATAIAATVPDPTVFKSGREFAAWVGLVPRQNSTGGKERLGSISKQGDRYLRRLLVVGATAVIRHARTHPDKHPWLIELLARRPAKVVAVALANKMARIAWAVLARGETYRSPPLAARV

SEQ ID NO: 413510 - protein, 342 aa, unidentified
MGEVVTIGLDIAKSVFQVHGVGADGEVLIRRRLTRARMLPFFAKLPRCLVGIEACNNSHYWARELIALGHDVKLMPAQYVKPYVKRGKNDAADAEAICEAVTRPTMRFVAVKSPKQQSLMMLHRVRLMLNRQRTQISNAIRAHISEFGVVAPVGRLGVERLLEVVADVGDDRVPEDARICLQMLAAQLEVVKRQILENDRRVLASARRTELGRRLMDIPGIGPLLASAFVASVADPTVFKTGRDLAAWIGLVPKQNSSGGKDRLGSITRAGNRYLRQMLVVGAMAVIRYAQRHGTKRPWLVQLLARRPAKVAAVALANKNARMVWALMTSGERYREPVPMAA

SEQ ID NO: 413511 - protein, 355 aa, unidentified
MTSTKYIGMDVHKESISIAVMNAFGKIVMECVIETKASILLQFIHGLRGDLHVTFEEGTWAAWLYDLLKPHVTEVVVCNPRKIALLKDGSKSDRIDARKLTEQLYLNKLQAVYHGEHGLRTLKELARSYLTITKDLTRVMNRLKALYRSWGIPCAGNEVYAPRHRSEWLGKITEPGVRRRAEHSYQQLDVLRLMRQEVRRDLLVESKKHKAWKLLRQILGIGPIRAALLVALIQTPHRFRTKRHLWTYSGLGLETHDSAQYRVVEGQLQRSKKPATLRGLNENHNHDLKDIFKGAAMRASTAAGPLHDFYEALLAKGRKPTMARLTLARKIAAITLIVWKKEVRFDANYLKLQAA

SEQ ID NO: 413512 - protein, 339 aa, unidentified
MQLYAGLDLHSRNTYIGILDQEFNRIFKKRVSNNLQLILQTLIPFGSQLKGLVVESTYNWYWLIDGLMENGYQCVHLANPSAIKQYEGLKHADDQHDAFFLAHLLILGILPQGYIYPKKDRPVRDLARKRMFLVQHRTAHILSLQSLISRCCAKKVSSNEMRHLTLDDLQHLLKEEHLILSAQANLDNIRFLTQQIKQIEKTINKKIKLNSAFQNLLTVPGIGNILAMTIMLEVGDIRRFAKVGNFASYCRCVPSKRLSDGKSKGHGNRKNGNRYLSWAFVEAAHLTRRHCQQFRRYYNRKVAQANTSLATKALSNKLARICYYIMRDNVPFREELSSP

SEQ ID NO: 413513 - protein, 449 aa, unidentified
MSKISPQINGLPVIHTRAAGIDIGSRFHVVAVPANLSEDPVQTFQAFTADIQRMTDWLKTIGVETVAMESTGVYWVPVFEILESAGINVIVANARETRSVPGRKSDINDAQWLQRLHACGLLRASFRPDRAIAALRAYLRHRERLLDYAAAHIQHMQKALTFMNLQLHHVVQDITGVTGMKIIRAIVAGQRDSQVLAEFRDVRCKSSVETIRAALVGNYQPEHVFALKQSLALYDFYQAQVDECDIEIEQALVVLKADKPEPEDPLPKARHRTKQPNAVNFDVRASLYQMVDVDLTQIHGIDPFLALRLIAECGTDLSKWPTAKHFTSWLTLSPGCKISGEKVLSAHSRKSNNRLTAHLRLAAVTVGKTNTALGAFYRRLAARIGKAKAVTATARKIAVLFYNAMRFGMNYRDPRADQYEQKYRERVIKQLHRRAAEFGFELKDIECVS

SEQ ID NO: 413514 - protein, 395 aa, unidentified
MTPLIYVGIDVAKQKHDCCILNAQGEVLQRIFTFTNDWSGFSKLQTAIQDAVTSQQDPSIKAGLEATGHYSENLLAFLRSIGIEPVVLNPLRVSLYRKALSLRKTKTDKVDAKCIAGLLMSDESNPVPPSYQTQELKVLTRHRLRLVSMRSKAKIQFSRLTDILFPELCTVCWSTTQKSMLALLKVLPGARKIAACRVDRLSAILTQASQGRYGRAKAETIKALAQQSIGRESEALSFELTQVIETIEFAQRKIDELDKVIHACVQTLQTPLISIPGISYCLASIILAEIGDISRFASPDKLLAFAGLEPSAYQSGNFTASRTPMTKRGSTYLRWALLQAARLVAMRCPEFKVYQARKRAQGKHYFVVLGHLAKKLVRVIFHILTTNECYRPQTA

SEQ ID NO: 413515 - protein, 338 aa, unidentified
MTLYAGIDLHSNNNVIVVQDDEDKVVGRRRLTNDLRTVSAWLEPYRADLAGVVVESTYNWYWLVDGLMEQGYALHLANTVAIQQYDGLKYRDDASDARWLAKLLRLGELPEGYIYPRAERAIRDLLRKRSQLVRQSTMNLLSIQNLFARSRGERISANRVKDLTPEAVDAAFEDANVALAVKSALKVMDCLQEQILSLEKAVHGQVRLHKGYQKLLTVPGIGKILALTIMLETGDIDRFPGVGNYVSYGRLVGSSHLTNGKRKGSGNTKNGNAFLCWAFIEAANFAIRHNEAIRCYYQRKQARTKRIVALKAVAHKLARACYYIIKEDVAFELTRAFG

SEQ ID NO: 413516 - protein, 403 aa, unidentified
MNSVGIDISKGRSMIAVMRPFGEVVISPFEVRRTDSELSELARQLKSLDGETRVVMEATGNYHTPVAKLLHDAGLYVSVVNAKLVHGYGNNDLRRVKTDKKDSVKLANYGLDRWLTLTRYVPEEDTRLLLKNCYRQYRQYSKVQTVLKNNLISLLDTVFPNVNRLFSSPIRGDGSEKWVDFVAEFWHCRCVSEKSQKAFTNKYQRWCRKHGYNFSEAKAHTIHAEACGHIDVIPKSETTKLLVEQAVAQLRATSAALAALKHEMQALASMLPEYPVVMDMFGVGPTLGPQLMAEIGDVRRFYSKKALVAYAGLDAPPNDSGDVIGRHKSMSKVGASSLRRTLFLVMSVYLQNAPLDESVYQFMDKKRAEGKPYRVYMMASANKFLRIYYATVKAYLESLEQTA

SEQ ID NO: 413517 - protein, 315 aa, unidentified
MDAIRERCAGLDIHQETVVVCLLSGPLEKKPRSVTETFGTTTRELLRLQEWLEQQGCTEIAMESTGVFWKPVWNILESTCTITLANPHRIRNMPGKKTDVKDAEWIAKLHRCGLIEGSFVPDEPIRDLRDLTRYLRKLKQNATQEKNRIHKILQDANIKLTTYVSDLFGVSGRALLDSIVNGEVLDVHEVRKLVHTRLKMKVPSLVEALNGRLRLHHRKMIRRHLDHLQYLESEIQTLEAEIEELVQPYMEEIELLDTIPGVSTDAAASIVAELGTDMSPFPSEAHLASWVGVCPANHESAGKKKVKRTNAGTEV

SEQ ID NO: 413518 - protein, 420 aa, unidentified
MNSINIGQRGRFVKSFYMVVGVDIGKAFHMAVVRLRDGSFSKAFRFSSDASGFADFWDWLNKWYEQDGFSGILIGLESTGHYWETLAYWLRKRGIEVVQVNPLHTHKAKDLYDNNPGKTDKKDARIIADLVSQGKFLHCIIPQGRYADLRQLVLLRKRLVTERTRKLNNIHRVIDLLFPEFGSVFKNIKTKSCHYLLTHVYTPDLLLSFSYKRLVKTLHKISHGKLKVEKLADLYKLAKSSVGIREGINGIKIVLYHGLSRYMQLNKEIKHLEELIEEVVGALEETVYLRSVKGVGLITAAVILGETGGLSHYSSAEEVIKLAGLNLYERSSGRHRGKRRITKRGRSVLREGLYLAAVSVIRRDGVLRDFYERLINKGKARAVALIAVACKLMRLLFALVRARRFYVTNYSECEAELGVI

SEQ ID NO: 413519 - protein, 375 aa, unidentified
MATTRRTECSAGDAPLYVAFELSAREWKLACAPSGGVAPRLRTLRDDARLDLPRELALARRHFQLPATAPVVSCYEAGRDGFWIHRHLTSLGVRNVVVDAASIEVTRRARQVKTDRLDALRLLDLLVRAEAGRAAWRVVRVPPEAAEDARHVMRERRTVRADRTRVRNRLRGLLATQGVRVPLRRDFLTRVAAARRWDGTPLGPGLQQRLRREWEALQAIETRLTVVEPRPATWREPAPPAVAALQRLCGIGDAGAWTLGLEVLSWRTFRNRREVGSFLGLTPTPYASGAQRREQGISKVGPPALRALLVQLAWQWLRYQPRSALTQWYTARFAGGGPRARRIGIVALARKLWIALWRYVTQGVIPDGAVVKAAA

SEQ ID NO: 413520 - protein, 332 aa, unidentified
MSKVRFIGLDVHADTIAVAVAEPNGEVRSLGVIPNRPESIRKLVKKLWPAEHLRACYEAGPTEYVVYWQLTALGVRCEVIAPTLVPVKAGDRVKTDRRDALKLARGYRAGDLTPVWVPDAAHEALRDVVRAREAAKKDQLRARHRLSKFLLRHGRRPPVGTKAWTRTYLAWVKQVVHFEQPAQEAMRLDYVHEVDHAADRVARLDLAITKAVTHAPAAMRAVIDALQALWGIALTSAVTIAAEVGTLSRFTRPRQLMGYGGLGPSEESSGGRTRHGGITKTGNAHLRRIVVEAGWAYRHRPAISGALRKRQAAASEPVKAICATSTIVAGQI

SEQ ID NO: 413521 - protein, 339 aa, unidentified
MGLHCAVDLHGDNGFYGIVDETGKRLFSKRMPNDLDTVLGFLAPYREQIDGGVVVESTYNWYWLVDGLMDNGFKARLANPAAMEQYNGLKNTDDETDAFFLTEMDRLGILPVGYIYPKEERPVRDLLRRRLLLVGQRTAHVLSFQNMVARERGEQISSNNIQKLWPQEVCKFFDDPRLVLMGQTNIETIRFLTKQIHAIENMVLAEEKLRPEYEKLLTVPGIGKILALTIMLETGDISRFQKVGNYTSYCRCVKSARLSNNKKKGENNSKNGNRYLSWAYVEAANFIRRYCPEAKAWHQRKAAKSKQVLATKALASKICKACYFIIKDQEDFDLKKIFG

SEQ ID NO: 413522 - protein, 347 aa, unidentified
MIIIGCDLHTRCQQIAMLDTETGEVVEKRFEHENGEAKRFYQSLEPPVLVGIESTGYTLWFAEMLSELGHELAVGDAAKIRASETRKQKHDRRDAWHVLELLSEGKFPRLWLPSVEEREVRVLLEHRHQLVQMRTRAKNGLQAIALNYGVRRRQRLWTAAGLKQLQALPVGEGTERRRGDLLRLLHQLDGWVGELDRRLEAEAERRPEAKRLMTHPGVGPLTALATVLILGEVERFAETRQVTSYVGLIPAEASSGGKQRFGHLTKQGSRLLRFLLVEAGQSASRGDAGLSRAYKRLTFRKGKSIAKVAIARKLLIRLYIMLRDKIDYQEFCRRGSHAGMLGDVALA

SEQ ID NO: 413523 - protein, 369 aa, unidentified
MEQCKSVFVGIDVSKTRNAIAVADDERGGEVRFLGEVDASEQSMRRIVRRIALKHERAHFCYEAGPTGYGLHRLISSMGYPCTVVAPSLIPRKPGDRVKTNRRDAIGLAKLLRAGELTAVWVPDSSHEAMRDLVRARAASVELLGTCRQQVSAFMLKHGRVFPRKRGWTMRYLCWLQEQAFEHPAHQIALQEMVEAVRVAKERVVRLETSIEALVDAWSLAPLVRALQALRGIDLIVAVTFATEIGDLRRFDSPRQLMAYIGLVPSERSTGNTVRRGGITKVGSARLRALMVESAWTYRHPPRVGARKLYRLEKTTPKVRELAWKAQVRLTARYRALSARGKKSTVVCAAIARELTGFMWAIGREAQMA

SEQ ID NO: 413524 - protein, 387 aa, unidentified
MANSMRCVGLDVHVRETQAAVLDLGTGEVSYRRIRGRPHEVVPYLEGLEGPLRAVYEAGPTGYGLARRARERGLDVGVCAPGHILRRRQDRIKTDKRDAERLARLLLAGELRLVHVPEPWQEELRDVVRCREDLRVDLMRTRHRISKLLLRRERYFPGPGRAWTHRHRDWLSGLRFADRASQVVLSDYLHAHDVLLARRERVEAELFELALASPFAQTVRNLRCLRGIDTLSAVGLCCEVLDFERFRAKQLGSFLGLVPSEDSTGEEQRRGSITKAGSKHARRLLVEAAWHYRHQPYVSDKLRRRQLGCDPRAVDIAWRAQRRLYRRWQRLAGERGKLETKVAVAVARELSCFCWEIATSTNGPNNGDTAAGAARSDDGNGAIQGRA

SEQ ID NO: 413525 - protein, 411 aa, unidentified
MVKENFIYVGIDLHKETHTAVMIDCYNQKLGEITFPNRPADFPKLVTKVKKCNTDAKEVVYGLENAYGYGRPLAVWLIDKGYFVKDVNTAISHRQAKHRGAMYRKSDSDDAGAIALATLNMLDKLPDACPNDAYWSLGQLVHRRDNIMKQRTRLVNQLHEQLCIAYTSYKQFFNDISRPTALYFWEHYPSRKYLKGKSVEDLRAELVPVSHNKCSTRTCEKILDAIAGDKVKNNAYQDARDMVTLSIVSDLQHYDKQLAEVDKMLEQMYKMLGCTLTTIPGVNVITAVKILAEIGDIKRFSNANKLAQFAGIAPLHLSSSGKGKDLATKQGNRRLQATIYFLAIQMVQISSKGTPRNPVVRAYYEKRKAEGKTSQQALICISRRLISIIYGMLKSGTEYRMPVMENTGETV

SEQ ID NO: 413526 - protein, 466 aa, unidentified
MSVRKSVSHPPIRSVRFVQVEPCVRVTKQIESAMGKDGLSPLQILSGVMNMNAAGIDVSSRKSTVAVLRPFGEVVKLPFDVRHNAGDLAALAKQLKSIEGETRVVMEHTGRYYESIAKVLHEAGLYVSAVNPLLIKEYGNNSLRKVKTDKADAMKIAKYALDNWTELRDYTPMDTIRYDLKTLNRQFQLASKQKTATANNLVALQEQSFPGIRKLFDSPVRSDGTQKWVDFTHDFWHVDCVRSCCQNAFTERYRKWCKRNRYQFSMEKAAEVYALAKSAVVLVQKTSITKTLVQEAASQLTAISRSVETYRSEMNKLASQLPEYPVVMEMFGVGESLGPQLMAEIGDVRRFERKQSLVAFAGIDPAPSESGDYCSRSNRTTKRGSPYLRKTLFNIMTVHLQRAPADEPVFQFLDKKRAEGKPYYVYMTAAGNKFLRRYYGKVMAYFSTLEGLPPVDMDSTGLHHAE

SEQ ID NO: 413527 - protein, 354 aa, unidentified
MNNLTFKNNTFFVGIDTHLKNWKVTIRNSGLELKTFSMNPSPITLFNFLTKHYPDGIFIIVYEAGFCGFWPQRKFKELGINCIVVNPADIPSSNKEKVVKTDPTDSRKLARELENNSLKPIYIPDVYAEQLRSLMRVRFQLVQTQTRIKNRIKMLLYNYGIIIPKEHLNNSRWSGYFINWLHSVKLSCNAGQLSLNNHLLQLQQCRDNLKMVLHQLREEAKNKFIEPIITSLDSVPGIAFITAMSLFTEIIDINRFKSFDHLASFVGLVPSLYSSGDTQYSRGISFRHNKFLRPLIIEAAWTAIRKDPAITLAYSQLIKQMSKQKAVIKVAKKLLSRIRHVWIQQEQYQFVLVA

SEQ ID NO: 413528 - protein, 388 aa, unidentified
MFYVGIDISKYKHECFALGDFGEVIYDNFSFSNDAEGFAELLQVLSSRKKECTRIGFEATAHYALNLKLFLEKNGYSFMELNPVLVSKFTKSQTLRKTKTDKIDARIIAQYLEQVDYKPYPKSFYHNYSLKSLTRLRDALVRQRSVYLVRLTNVMDCIFPEFKPFFANRFSLTALFILENYGSPVNISNMNLRSFDILRRKSRGSFTMEKFVRLKQLAANTVGESNAIYALELKTILDLYSQLDSKISELENEVTRIIAEINPPSLSIKGIGPLSAAVIVSEFGDINRFSSPDKMLSFAGLEPGYFQSGNAAFAGRMVKRGSGILRYTIINCCRSMRLHNEVFSAYYFKKVDEGKPHRVALSHMAKKLVRLIFALESTGAVYDPAKQR

SEQ ID NO: 413529 - protein, 351 aa, unidentified
MWIIGVDYHPSVQQIAFVNTDTGECGERRLNHSDGEAEKFYRELKAADCCVRVGMEATGHARWFERLLAELGFELWIGDPTKIKAKRVRKQKTDRLDAELLLQLLLEDRFPRVWVPSPENRDLRQLLWHRHRLVQMRTRIMNQLQAVAMNEGVRRKQALWSKSGRAQLESLLLAPWAARRRHDLLELLDRLSPTIEELSAVVEQEAKQRPEVLRLMTHPGVGPTTALAFVLIIDSAERFACGKQIASYVGLIPCEDSSAERRRLGHITKQGNSLLRFLLVEAAQAAVQRDPDWRRRYIHLAMRRERRIAKVAMARKLAVSLYWMWRTQRDYQQTVKFSSHAGESDYVHGVQ

SEQ ID NO: 413530 - protein, 320 aa, unidentified
MQTQSEALYVGADVAKDEVVVACAEGSFPVRPIVNQRIALVAFLKGLPAGSCIGMESTGIYHELLANLAHKRGFTVFVLNPKDTRHYAKGVGLRGKTDRVDAEMIARMIEREHAQLHPWIPPTPEQREIARLLKRRATLSSLRQALAMTLKGLEGFATDLKTLQMRFDRVIARIDARIETLIESSPERKEHVTRLRTINGVGPVVSAALVNALEHIPLASADAFVAFTGLDPRPDDSGQHRGKRRLSKRGSSELRRLLYIAAMSARKTTTWKPLFEHCRAKGLSTTASLVILARRIARTAWSMYTYKTEFDPVRLTKGLT

SEQ ID NO: 413531 - protein, 341 aa, unidentified
MRIIGCDLHARQQTIAMLDDQTGELVEETLTHDGDMVRSFYAGLPRPVVVGIEATGSMGWFLALMEELAITCHVGHPATIRHSEPRRQKHDRRDARLLLDLLRQDRFPAIWMPSLEQRDLRALLLHRDQWVRMRTQVMNALQGIALGHGLRRGTQLRSRTGQAALAALPLQPHAGDRRSELQALFKHLNTHIEELTARVTIEAQARPAAQRLMTHPGVGPVTALATEVFIGEPTRFADAKAIASYVGLIPSEYSSGSRQRLGRLTKQGNRFLRFLWCEAAMHATRRDEGLRRFYRRKLQQKGVGKARVAAARKLGIRLWILLRDQIDYAEFCRRATPATAR

SEQ ID NO: 413532 - protein, 377 aa, unidentified
MRMFVLDRMKLVNVTDEKFEIQKGFDFEEYMRHSFKVMHEELYSVRVRMIAWCLKDEAGLFVKCGKIKAERKALDKWVVDLPDNWVAAMEATLFTGWVYDFLLPHAREIKAAHPEMLKAITAAKKKNDQADAERIADLLRVGLIPECYMAPQKLRELRRVLRFRNHLVRQAVRMKNKIAGLLMEVGAPYSKKKLHGQVYFHQLMDRLEEVPDFVLDMLSMSRAGLDLFTKIQKRLVQALRRNEHIRGRVNRLMTISGVGEVLALTWVLEGGDPKRFSSVRRAVSYCGLTSPQKESAGKNQRAPISKKRNKHLQTILVEASKLAPRWNPQLAEVHERELARGNKNRATLAVARKLTAYLLAVDKSGKDFKMKQLKAAA

SEQ ID NO: 413533 - protein, 343 aa, unidentified
MHTITTIGLDIAKSVFQVHGTDAAGQVVIRRQLKRRAVLAFFQKLQPCLVGIEACASSHHWSRELQALGHAVRLMPPAYVKPYVKRQKNDMADAEAICEAVTRANMRFVPTKTPEQQGCLMLHRTRHLFIRQQTAVINSIRAHLAEFGIVAPVGRKGVMELLQVVADPSDKRVSEVARSCLAALGNQLLSLKEQILEFDRMIMAWHRSNEPSKRLRYIPGVGPMLATALVASVADPKTFRSGRNFSAWVGLVPKQHSSGGKDRLGSISKQGDRYLRSLFVAGALFVIRYAKIHGTKHRPWLTALLARKPTKVAAIALANKLARMAWAMMARGERYRNPVALAA

SEQ ID NO: 413534 - protein, 323 aa, unidentified
MNKDIIYFGIDISKDVFDVMDSNGNYFQFENDFNGFKNFVKLLGKKSHCVMEATGYYHYKLAYYLIENNIRVSVENPLSVKRFIQMRLSKIKTDKSDAKMICLYAQSVDLKLWEGQSKSQIECLQITRLLSLYFKQTTALKNKIHGEEVLGNPSLLVVRSLKRSLKQTQKEIKSLEEKLTQIVKQDHQELLTRLESIPGLGRKTSIMLIVLTDGFERFTSASELCSYSGLTPIIRQSGTSIKGRSRISKMGNRKLRNLLFMCSFTACKNNKACKALYDRIVAKGKSKKLALIAVCNKLLKQAFAIAKSGLIYDETYRSTLVKN

SEQ ID NO: 413535 - protein, 380 aa, unidentified
MRRVSGLDVHKDTVFLCIVDDDGVVFRSKYGVLTPELEQMAGVMVEYGVEEAAMESTSIYWMPVWRVLEPHFSLRLVNPFFIKQLPGKKSDVKDAEWIATCLQKELIKGSYVPDELIQQLRQYDRRIFDLSKDIAYKLTKLDAALQRCNIRISNYVSTTQGKAYQGIVRLISEGVTAAEELIKSVHGRTVNRVGKDVIFNALSGVITVADIDTIRQLREEVELARRHKDECQARMDEICRQYFPEQYKNLQTIPGVQARSATAIIAEVGTNMEAFQTASHLVSWAGLKPRNEESAGKIKSRKVTHGNKYLRKTLVECSWAASRTQGCYYNRFSYIQCTVRHKNRMKVQVAIARKILTAAWHILHDNVPYRDFTPDIVPSE

SEQ ID NO: 413536 - protein, 346 aa, unidentified
MTIVEAVPAVTGGIDTHGEVHVAAVLDEVGGLLGTQSFRADPDGYAELLSWLQAFGEVSKVGVEGTGSYGAGVARFLARAGVHVVEVDRQNRQARRQSGKSDPLDALEAARAAQSGRAHGTAKSRDGSVEAIRVLVVAKRSARGARIKALGQMRQLTFSAPDQLQSRLKGLPIAAFVATAQGLRPTRSPDVVTAATKSSLSSLAHRVADLEEEISDLDAMITPLLKEAAPELLGVYGVGIDTAAALLVAAGDNPERLRSEAAWAHLCGVSPLEASSGKVTRHRLNRGGDRQANRALWHIVITRLASDPRTQAYMERRVKDGRSKSEAIRMLKRYVAREVYRYLPRA

SEQ ID NO: 413537 - protein, 430 aa, unidentified
MKSNTQNTKIEAITETTLVLGIDVGSETHYARAFDYRGIEYSKKPLKFSNDEAGFVTFKAWILDIKEKHGKDKVVSGMEPTGHYWFNLGKFLQDNEMKPVLVNPHHVKKSKELDDNNPTKNDRKDPKVIAGLVREGRYMIPYLPEGVYADLRTASNMRFQLQAELTRIQNRISRWFNIYFPEYKTVYGQPDAKSGMLILKVAPLPEDILTLGIDGVNQIWRDAKVRAVGKARAKTLIEAAEHSVGSKEGEISARMEIRMLLDDYESRNTRLQEVVALIEELVKKIPMAEKLLEIKGVGIKTVSGFLAEVGDISRFNNPKELQKLAGLALVENSSGKHKGETTISRRGRKRLRYLLFEVAMSLVSKNPEFRELHSYYTTRKLNPLKKMQSLMAVAAKLLRVFFAMLTKGVDYDSKKLVGDIKRPEVYLQAA

SEQ ID NO: 413538 - protein, 372 aa, unidentified
MNSIVYVGMDVHASNYTLSCYTLSSDECFATVQMEPDVKNILTYLKKVQRNLGAPCEFRCGYEAGALGFSLYYQLQKHGIPCTVLAPSTMPTFHRNEIKTDRRDAMKIARCLAFGAFRPVHIPTKEDAAVKDFIRMRDDHKIALKKIKQQIQAFCMRYDLHFTEGRSYWTQRHLAWLKGIALDDLLREVLDEYLVTLHQLADKIERLDARIEELAQGERYAENVKKLSCLIGVRTHTALALVAETGDFRRFAKAEQYAAFLGLVPGERSSGDKQSRTGITKAGNTHLRRLLMEASQCYGRGKPGYKSRLLKERQQGNMTEVIAYADKANDRLRRKFYRMVLRHNKKHNVAVTAIARELSCFVWGMMTGHTAI

SEQ ID NO: 413539 - protein, 309 aa, unidentified
MKEPSVYVGVDVAKEWLDVAWGTEHQRVTNCRRGWKQLGDWLGESEVPVHVICEASGGYERGLVKALQGYGIKVSIAQATRVRQFARAVGIAAKTDEIDAQVLCAYGYALRPCVSATLGPEQEKLRELERQRRHLTRLLVAEQTRALQLCEAVTRTSNRSLIRQLTKQIDWIDLLIEKVIDQSEELTAKAKKLTAISGVGRRTAALLLAQMPELGLLNRGQAAALAGLAPLNRDSGKWRGKRTIFGGRRAVRSGLYMAALVATRHNPILAAFYQRLRAAGKPPKLALTATMRKLLLILNSSLKPQSMYA

SEQ ID NO: 413540 - protein, 404 aa, unidentified
MIFVGVDWSETHHDVCVLDETGDVLARMKIPDTLAGVRALHELLAPYAEEPDEVIVAIEKDRGLIVTAMLGARYRVFAINPMSVARYRERHVISGSKSDPGDAKVLAEVVRTDRHNHREAEGDTENADAIKVLARTHQSAIWSRQREMNSLRNALKDYYPGALVAFGTGLAESDAVEVLAIAPTPALGAQLSLAKITSALRRGGRERNLERTAKKIQAALREDQLRERPMVELAYGTITGAHVAMIRAYNAEIVQLEAALTKDFEQHPDAKIIRSLPGLGMVLGARVLGEFGDAPNRYADAKSRRNYAGTSPVTKASGKSRVVLARRSRNKHLAAAADQWAFCSLQRSPGAREYYDELRARHKTHRKAIRQLANRWVGILHACLEQHVNYDEDRAWKHRADIAA

SEQ ID NO: 413541 - protein, 489 aa, unidentified
MKTTEDQPKKASRTRRSKGRGHRRTRTPQDLPVVRPDTAGIDLAVTSDIWVAVAPDREGETVRAFSPMSHGLEALVSYLQAMRVTAAAMEATGVYWAALYTRLMEAGIDVTLVQPRDVRRLNRPKSDIADCQWLQYLHSVGLLKKSFVPPPRILAVRAIARQRERLVTEGAMHLQHAQQALDEMNLHLHHVLSDLGGTSGQAIIEAMLAGERDPQKLAALCHRRVRTDRAIIAQALTGQWREEHLFVLGQAYASWKSVQEQIGACDARLWDLAQALQVRVSEDALAKTPVNRGPGRPRKDEPVAQPPRKRCKSRNGLNGGEQWVPRFHALFGVDLTAVPGVSILLVLCLLVEIGTDWSAFPSAGHFAAWLGLCPHNDRSGKKVLRRRTAPGQTRLKAMLRMAAQSLWQSQSPLGDQYRRLKARLGPAAANTAMAHKLARILWHLVHHQVAYDQSIFSQLDQQQTQRQTRRLRKQAQALGFELTPLPKAA

SEQ ID NO: 413542 - protein, 410 aa, unidentified
MHTFCGIDWAENHHDIALVDDRGQLVAKRRIDDDAAGFSALVQLLADHGDTADEPIPVAIETGRGLLVACLRSTGRSVYAINPLAVSRYRERHSVARAKSDHADAMVLANILRTDADAHRPLPADTELAQAITVLARAGQDAAWQRQQVTNQLRSLLREYFPAAIEAFQAARSGLAGTEARAILGAAPTPASAAKLSKPQLRRLLLKAGRQRNIDAWADRLHTIFAPEQLRQAPRVEAAFGEQTRALIMQLDASCRAVDHLAEASAEAFAQHPDVAILTSFPGVGTLTGARILAEIGDDHSRFADARGLRAYAGSAPVTRASGKSLVVMQRKVKNQRLAAVGYIWAFAALTASPEARAHYDRRRAVGDGHAAALRNLYNRFLSQLHHCLTTGDIYRPERAFPVPQSPTAA

SEQ ID NO: 413543 - protein, 347 aa, unidentified
MYPFYLGIDLHLKQSYVVLINTEGAVIDKCQIRNQELGRYLKERVPTETYAVMEATRNWPYFYDLLEGHVDRVELAHAKGVRSIATAAVKTDQIDATVLANLARLNFLPIAYAAPKEIRDLRQHLRYREWLVDERRRVKNRVHAILAGYNLVSPMTDLFGRAGREWLAGVQETKLRLTAVVVMEKMMEMIGQLDEQIKELAREMPVPEVLEPKIEVLRSMPGVGRLLAATILAEIGSIQRFSSPKALCSWAGMTPRVHQSGAVLRHGRITKEGSRYLRSAMVCAAITAIRVSPRWSGVYERIARRSGWRSAKVAVGRKMLNVIYYMLKRGEHYQEGYEQQRRLNQGA

SEQ ID NO: 413544 - protein, 413 aa, unidentified
MVNTARKGGLMDFYVGIDVSKFKHTVAIIDEEGEIRKKSFDISNSREGFSSLLNELGLLGEKEQIKIGMEATGHYMNCLVRCLISNGYQFQIYNPSLISKFRDAESVNLAKTDNLDAMLIAKYVATHPFTSSPQLSYLIGEIRKISRAKYFLFGDKTACYNHLLRYLDEVFPEFVSFFKKNEDGTRKNMGRNLFESPTIRWLLSEYTSPQKMARMRIETGETLRRMSKGSISFNRFNQLRELAKNSIGYSTEVDEQIIRNLVTQVRIIDEEIEMLNELLEPFMEEINSPLLTIPGIGINLAAMIIGEIGDISRFENPEKLIKFAGLDVKVYQSGTINHKGHIRKRGSPILRYALALSVQKLRIHSPVFSEYYYSKLRQGKATNVAIIATTRKLIRVIWKMMTTNQVFENIKRD

SEQ ID NO: 413545 - protein, 546 aa, unidentified
MANLLGASLSRSRRSGLLRQEVAAHGFRLSKADISFAVIHERAKRPRTARQSELVNNCAASHNAGGGRPALARSRSSLAYPKRVTFRLPAEPVALAPTSNRKAPHEGHYISSMDSRAKRRKNRKQQNKTMKDPQQWQQHRAFGALDWASQTHCVVVVNQTGKVIEDFQIEHSALGWKKFREKLQSYGSIPFAIETSQGAAVEQLLGAGMTVYPLNPKSAQAYRERKAPSGVKDDELDAWSFADALRVDGHGWKALKPEEPLIKELRLLCRDEVSLIEQRTAFIQQLRHALAEYYPAALEAFEDWASVSAWMFLERFPTPQALAQAGKRKWQNFLHSRRLWGRDQGPRRMEIFARATEFAGTAATVKAKSLLALSLVQMLFTVEKQLGLYRRRIEELFASHPDHDLFGSLPGAGSKIAPRLLAEIGDDRERFDGDAQSLQCFGGTGPVTKRSGKYRHVQQRWACNKHLRHAMHLFAEKSLSRCVWAERYYQHHRQKDRSHADALRRVGHRWLKIIHRMWIDRTPYDAELHHRNQLQHGSWIFQLKAL

SEQ ID NO: 413546 - protein, 398 aa, unidentified
MRAIGLDVHKHFAEIAVLEPGQAIRHLERISTTPAALRTFAQTLNSTDRVVLEASINTWPIAELLRAHAGQVIVSNPMRTRAIASAKIKTDRVDSAILAQLLAADFIPPVWAPDPATQTSRRQVANHQSLVQQRTRLRNRIHAILDRNLVAQSFTDLFGKAGRAWLADVSLPVEERHQVDSMLRLLDALEAELHGAVERIAQAALADRRVLRLMTIPGVGLTTAVALVAVIGDVTRFPRPTHLVGYLGLDPRVRQSGNRPAFTGHISRQGQAHARGLLVEAAHATIRVAGPLRAFHERISGHRGKQIAYVAVARKLAVLAWHLLTHNSEYRWTPPSLTAHKHRQVQLKAGAPHQRGRSIVGIRTQQTSDQEREPLRQAEEAYRTMVAARRAKGAREKT

SEQ ID NO: 413547 - protein, 423 aa, unidentified
MPYRIAGIDVHKRKLAVVVADVEVEDEYQFERRWYGSNPEQLRVLSEWLIEQQIEEVVMESTAQYWKPVWGALERYWKPRCQSREGAGRMSGTLHLAQALSNRGRRGRKKDFRDAERLVKRLVSQELVLSFVPDTEQRMWRTLTRTRYQRRRDKVRLQNQLEALLEEAHIKLSSLVSDLLGASARRMLKALADGETDPAAVAALADQRLRATPAQLHDALGACTELNPVYRRLVKMTLEGLQFVEQQIGQLDQEMASLLRQHQDAVERLAVVPGLGVDSAQQIIAEVGAKAATFPSAEKLSSWVGACPGEEESAGVNRSRHSPKGNRQMRRVLNQAANAAVKHKGSIFEIVYRRLVPRLGHNKTIGVIAHRLCHLIWIILHKGVRYEERGPAVSEKSRQRRTARMVRTLRILGYRVEPLTNPT

SEQ ID NO: 413548 - protein, 354 aa, unidentified
MQIERSGTFPNLTIGIDIGDRSCAVCVVDGSGEVVRRDRVRTEEAELRGWFDGWERARVVIEAGTHSPWMSRMIESLGHEVVVANPSRMRGTGKRKTDRVDAEYLARQGRADVRLCYPVRHRGEEAQRGLIAIKSRDVLVRSRGSLIRSVRGSAKSLGVRIGKCSAESFVAQARRDFSEDLERMFEGILRAIEELSREIRSYDKAIERSCEEEHPETKLLQQVAGVGPLTSLAYVLIIDDPGRFRRSRTVGAYVGLIPGRNDSGERSPELPIHKEGNVLLRRLLVQSAHYILGPFGPDTDLRRWGLRLADQGGARAKKRAIVAVARKLAVLLHRLWVTAEVYEPLRKTELKRVA

SEQ ID NO: 413549 - protein, 347 aa, unidentified
MRFYNRPHQYNCGIDLHVKTMYICILDSAGQVLVHRNVPSTPAAFLEIVAPYRTELVVAAECMFTWYWLADVCAAEGITFVLGHALAMKAIHGGKAKNDRIDSHKIAVLLRGGMLPQAYVYPSAMRSTRDLIRRRLHLVRKRGQLLAHIQNTRAQYNLPVFGRKLAYRGNRDGVAEHFPDPNVQKSIEVDLALIDQYDALVTDLELTIVREAKRHDAEAFHRLRSVPGIGKVLALTILYEIHDITRFDRVQEFASYARLIKCLKESGGKKLGTSGAKMGNVHLKWAFSEAAVTFLRHNREGQRLLARLEKKHGKGKALSILAHKIGRAVYYMLARGTVFSMEKFLAA

SEQ ID NO: 413550 - protein, 342 aa, unidentified
MDRLSPVTRIRKVGFTMENELHFIGIDVAKAKLDVDILRPDGRHRGKKFENTPSGHEALVRWLRSHDVRHAHVCMESTSTYMEDAATYLSDAGYTVSIINPALSKGFAQSEGLRSKTDKVDARMLAHFCREKRPSAWEAPNPTERALKALVLRHQALTEMQTQEKNRQETAPEVQLASIDILLECLSAELARIEKQIKDLTDNDPDMKQRRKLLNSIPGIGEKTAAVLLAYTGLKLKFATARQFAAYAGLTPKQHESGSSVMRTSRMSKAGPVHLRRALYMPAMSALYHTVWGKAFRERLEGNGKRPKVIIGAMMRKLAQVAYGVLMSGKEFDASQHEMLRE

SEQ ID NO: 413551 - protein, 345 aa, unidentified
MPPMYYIGLDVHKRKISYCVKDSSGRIHAEGSISATRLELDHWMRSLPQPWSAAMEATMFTGWIYDHLKPHAATLKVAHPLMLRAIAAAKKKNDRIDASKICDCLRCDFLPESHMASTAIRERRRTLRYRNLLVRQMVQMKIKISALLMEAGVSYNKQRLHKAGYFRELLATNPDIDEGLCSLLRLCRETVVRLGKNESALVRSLERDSLLVERIERLMTIPAVGPITALTWALEVGDVQRFSSIKKAISYCGLCGAEKSSGNTVQRTPLSKQRNKHLQTTLIEAAKMAPRNSPELAMLYDKEKQKGNANRAMLAVARKLVAYLMAVDRGKRNFQRAETSSSIAA

SEQ ID NO: 413552 - protein, 394 aa, unidentified
MRFAGIDIASETHVAAVVEEAGRVVLRPAPFGEDAAGYQKLREWLGSPSDLLVAMEATGHYWQNLFAFLAAEGFAVALLNPLRTHRFAGEDLARTKTDAIDALGIARFAAQKRPAPTRLPDSTTQELRELVRLRARLQQDFDDRVRQLHRLVDLGFPEFTRYVRTLDSELATAILHDYPTAAAFQGVALRRLAALRYDGRHKVGEELARTLLDAARTSVGRHHGPAYRVQVRYFCEDLDLLRRRLRELERDIERTLREHEVGTLLTTIEGIGSTTAARLVGELGDPAEFRSAAALVSYVGLAPGKRDSGKRQLRHAPLSPIGHAALRHALWMPTLTAVRKNPWLRAYYEHLRAEGKPAKVAMVAAMRKLLIAVYSVAKHRKPFVPRLATAEVTA

SEQ ID NO: 413553 - protein, 340 aa, unidentified
MKQFSRIGVDLGKNVFHIHALESEGGRALTRKLSRTGMRKFFTAIAPCLVGMEACGSAHYWARELRALGHQVRLMPPSYVKAYVKRGKNDAVDAAAACEAVSRPSMRFVAIKSEAQQATLMAHKGRDLLVKQRTMTVNSLRGCLAEFGVVVAKGMHRVEELAQKAAEAKLPEMAMMTAQVLLEQLARLDAAMAELTRQIVRAKSDNAMARLLTEIPGVGALFASRVTASVPDARAFKSGRDFSAWLGLTPRQDTTGGKIKLGAITKKGNRALRRLLVLGATSLLRMAHKRKGALADWLSALRARKRGKVAAVALANKLARIVWAMMTTGEAFRAEVFART

SEQ ID NO: 413554 - protein, 345 aa, unidentified
MKEISVLGLDLAKTVFQIHGVDTEGEVVIRKQLRRSQLHRYFARIAPCLIGLEACGGAHYWSRELTRLGHCVRLMAPAFVKPYLKSNKNDRNDAEAICEAVQRPNMRFVTVKTPEQQCVLHLHHGRRLLVQQRVALGNHIRGVLLEYGITLPQGVQVVSRRLPELLEDGDNELPMLSRHLLAELQAQHDDLQQRIGVLQGQIQAWHQASAASQRLATIPGVGILTATALAATVGDGQAFRNGRQLAAYLGLVPRQASSGGKDRLLGISKRGDGYLRQLLIHGARAVIHHIRRRLKAGRPGGNPWVEQLLQRCHVNEVAVALANKMARMAWVVLVRQETYQVPAPV

SEQ ID NO: 413555 - protein, 348 aa, unidentified
MPSIAAARGVTYLGLDVHRDTISVAVLGPGHEAPTVDRIANDEPSIRRLVAQFSNPGRLRACYEAGPTGYELARLLDRLEVRCEVIAPALIPKAPGDKIKTDSRDCRRLARLYRAGELTPIRVPTVAEEAVRDLCRARADMSADRTRARHRLSKFLLRHGRVFRAGSAWTYAHERWLLGQRFDDPALATTYAHYRATLQARDAALDAIEADLASWHDRPPFADAVARLAAYRGVTRLGALTLASEVGDWRRFASAPQFMGFCGLTPANTPAASAPGGARSPRPATVTCAPSWSSRPGPTNTGPRPPWSCAAARLACHPRSPLEPGPRSSDCAAAFAGWRPASTSGRWW

SEQ ID NO: 413556 - protein, 357 aa, unidentified
MADLETTVIGGVDCHLDTHHAVALDTHGRRLGDQSFPTTSHGYHQLLAWLQHFGRVHAVGVESTASYGAGLTRYLVGAGLTVIEVNQPHRQVRRRRGKTDALDAEGAARSVLAGEATAVPKDTTGSVEAIRQLRLARASAVKARTAALTQLGEVLATAPAALRERLSGPASLHARATRCARLRADQARLQLPLEAAKFVLRSLSQRILALDAEIARFDAHLATLVASVAPRTTALLGVGTLTAAQLLITIGQNAARMGDEAAFAHLCGVAPIPASSGKTNRHRLNIGGDRQANAALYLIAVCRLRYCERTRAYAARRTHDGRSKRDTLRCLKRYIAREVFHTLRADLAALTAQPAPA

SEQ ID NO: 413557 - protein, 352 aa, unidentified
MDKQRLGDGEIVGGVDTHKHAHVAAVVDRTGRLLGTFEFPTTSAGYRELLRWLREHGSVSLVGVEGTGSYGAGLTRYLAREGVAVVEVIRPNRQLRRRRGKSDPVDAEAAARAALSKEANATPKSADGPVEAMRMIRLARCSAVKARTQAANQIDALVTCAPQSLRSQLKELSVLRLAERARRWRPGDIQDPLSACRATIKGLARRWSQLGAEIAGYDKQLLRLTQRVCPELLARLGVGFEVASSLLVAAGDNPDRLHSEASFAALCGVSPLDASSGQQRRHRLNRGGNRDANRALWVVAMTRLRVDERTQAYAARRTKQGRTKREILRCLKRYIARELYSVLRCNTLLTPP

SEQ ID NO: 413558 - protein, 342 aa, unidentified
MTYYAGIDVSLECSSVCIVDASGKIVREAKVASEPEALIAWFGSLVFGVERIGLEAGPLSQWLFAGLKEAGLAVELLETRHVRAAFKTMPVKTDRKDAHGIADLMRLGWFRPVHCKSMGAQEVRAVLTARTLVQAKLHDIEMSLRGILRGFGLKVGRTTSNRFAGRIKELVGGHASLQVIAEALLGVHAVLLREFKGFEKRVRMMAREDGNTRLLMTTTGVGSVVSLTYASAIDDPGRFKRSKMVGAHFGLAQKKYQSGETDITGGISRCGDESVRTALFQAAHIILTRPVKSSVLKSWGHRLARRIGMKRAKVAVARKLAVIMHRMLVEQKPFNPAAAAAA

SEQ ID NO: 413559 - protein, 473 aa, unidentified
MADRRLVGIDLGIASSHTVRVLDGAGETLAKRRCWPTRESLTEVETVALTGAAKGTRLEVVMEPTGPAWMPIAVFFASRGHLVFRVSSQKASDLRKFFSRHTKTNGIDADTLARLGIVDPGGLVELRLPDADRATLDRRVRATDRLTALASEHKVRIKDLVRQVLPMSPLSGDLGVSDLAVLERYADPNVLVNAGAKRLTTLIAKASYNHLGAERAAKWLAAAKASLELYAGCPAMAFADLAAEVVTEVRLLRAVQSELAVHAAVREAAYVKVDPEGLARSLPGLAEVGGPAVVAAMGAPDRFKRGKQFRCFTGLVPRASETGDTDRKGQPMSKAGSSLLRTTFVRAADTARKQDPQLARIYYLQMTERGKDHLGALCVVAACLAERAWAVMARGEPYEIRDTDGRAVTPSEAKAIIDEKWTVSDQVRARRRSKKKRAGKAPKDVLTGQPKPNATSAGQRGDLPHPQSSALAG

SEQ ID NO: 413560 - protein, 341 aa, unidentified
MNYFAGLDVSLRSTHICVIDDDGELLAEGKTDSEVTNIIAFLDELDVEITEVGLEAGTLTQYLTYGLQFAGYEVICMEARQANAALSAMRNKTDKNDARGIAQLLRSGWYSRVHVKSHRVRALLSSRKAVLAKCIDLEQEIRGIFKVFGIKLPARLGHGSFDPKVRPLIEADVALSHALLPMLDARLVLYHAFRELDNRTRHMAHDDPVCQRLMTAPGVGFVTALTFKAGVDDPARFKRSRTVAAHFGLTPRRFQSGEIDFDGHISRAGDADVRSTLYVATNSMLTRSSKWSPLKAWGMKLAKSRGHKRAVIAVARKLAVILHRMWIDNTQFRWSAEAARS

SEQ ID NO: 413561 - protein, 344 aa, unidentified
MPMNIAILGIDLGKNSCSVVGLDGTGRVVLKRRFHRDGVTKLAGGLPACVMAMEACCGAHHLGRVLRDQGHEVRLISPEYVRPYVKSQKNDDRDAEAIAEAATRPTMRFVELKSEVQLDMQSLHRARDRLVGERTALINQLRAFLLERGMTAPQGRRKLERFLEALLAQEQLSLSPRTRLLVEDQRGEWRELDRRISAFDDEFAEAARTDEQARLLTTIPGIGALNATALTAAIGNAQTFGRGRDLAAWLGLVPKQMTTGGKPKLLGISKRGNVYLRKMLIHGARAALPTLSKGETPLGGWLRGLLARAHVNTVVVALAAKLARIVWAVLRSGQRFEMKAVTTS

SEQ ID NO: 413562 - protein, 455 aa, unidentified
MYFEKRDLPQYNSIVLVRARKAQIPIGECLYMKRTQNEKILQIKNETLIVGVDIAKKIHHARAFDNRGVELGKLVKFENSAQGFAAFDAWLAKIQQKHGMTEAVVGFGPTGHYWFNLGDHLAECGHKLAILNPYHVKCARELDDNSPSKSDQKDPKTIAMLVKDGRYRDVYIPDGDYQELREMVRERERRQERLGSLSSQIIRWLDIYFPEFVTVFKDWRGKAAWIALRRFSTPKRMAEVGAQEILLAWREEMKRPSLKKAEALCSTAEQSIGRTQGSGAAVRSLQNIMTEYELLTMQMEQLEEEMQECLFRIPHAAELLAIKGVGMVAVAVFVSEIGDIRRFTDPRQLIKYAGLNLRTNSSGEFKGKTKISKRGRRRLRHALYKAMIPILATNEEFRSLHQRNLTRTQNPLTKMQSIIALCGKLLRVIFALLTKGVEYEPSKIKVVTTDVAQAA

SEQ ID NO: 413563 - protein, 348 aa, unidentified
MRFYTGQHRYYCGIDLHARTMYVCIQEHASGEVVLHRNLRCDPELFLKTIAPYRDDLVVATECIFCWYWLADLCAREGITFVLGHALYMKAIHGGKAKNDKIDSRKITVLLRAGALPQAYVYPPGMRATRDLLRRRLFFVRKRGELFAHIRITFHQYNLPIPGGQLLYQCNRAKVPDAFCDPIVRASVEADLELAGHYDGLIRSMERTILEQAKVDDLSTLILLQTIPGVGPILSLTLLYEIHDITRFPRVQDFVSYARLVKSQKSSAGKVLGTSGAKIGNAHLKWAFSEAAVLFLRKNPRGQKYLDRLRSKHGKGKALSILAARIGRASYFMLRRNTAFDPDRFMSN

SEQ ID NO: 413564 - protein, 353 aa, unidentified
MGDQSLRGEVILGVDTHLDVHVGVVISDTGRLLGTLAVPTDKAGYFKLLSWASSLGSVRRAGVEGTGTYGAGLARLLRDHDVEVLEVNRPDRAKRRLQGKSDPTDAEAAARAVLSGNATAVPKTQAGAAEAMRAVSVARRSAVKAKTQAINQLRALLVSAPQEIRERLWKPNPADCVDGCARLRSLGTTPLLQALTSTLRLLAKRWLMLAEELKELDANLDRLTSQHAKRLREQFGVGPQTAAVLLAVAGDNPERLRSEAALAALCGASPLQASSGKTTRHRLNRGGDRSANNALWTIAMVRMRSDPRTRAYVERRTADGMSNKEIHRCLKRYLVRALYPLILADLADSARLS

SEQ ID NO: 413565 - protein, 408 aa, unidentified
MKTLHRRCAGLDVHSDSVVACVRLTVRTKASHEVRRFSTATRDLLELADWLAAQGITHVAMEATGIYWKPIWHILEGRFELVLANAAHIRNVPGRKSDVNDAVWISDLLAHGLIRASFVPPAQIQDVRDLTRTRTQLAREVAQHIQRIQKTLENANIKLTSVISNIIGTSGRRILKAMIAGETNPIKLAELGSTRLKCPRAELTAALDGRVRAHHRFLIAHHLSLIGELERHIAAFDARIEKLLRPLRDAVAQLITIPGVSQVSAQVILAEIGADMTPFPTSGHLLSWAGLVPRLDESAGKRRSTRVRKGAPWLKPVLVQCAWGAARTKGTYYQAQFFRLKARRGPKKAAIAVAASLLTAAYHMLKNGTFHQDLGADFLVKRDKARIVTKLASRIKDLGYDVSFTPAA

SEQ ID NO: 413566 - protein, 412 aa, unidentified
MLKIVYPICSGLDVHKSFVYACIASTNERGVTTYKSQRFSTFTKGLKELLEWLKQNNCEDVCMESTGKYWIPVFNILEYDCKVVLAHPKYVKSIRGKKTDKKDAKWIADIFKHDLVMGSFIPPPDIRQLRDLIRYRFKLTSYSTGEKNRAQNCLTVSNLKLDDVFTDVFGKSANAIIEHILEHPNEPFDVRKFVDGRCKTPIEDIQAAVDGAICSEQADKLRIIRTHLSDLDKAKANLDSVILTLAEKFIPQINLVSSVPGIKSFSAITIIAEIGVDMSVFLSAKHLCSWAGLTPCNDHSAGKKKTTRISRAGAYIKPLLVQCANAVVKSDKHPEIKNRYLKIKKRRGHKKAIIAIARMLLTAIYNILKKNEPYNADLYKKADEPSKNFTVSVDYAIRVLQSKGYSISPPGV

SEQ ID NO: 413567 - protein, 394 aa, unidentified
MNGTENQGKGRIIGMDIHPTVFSACALENTDARTVAELFMHDRVDMDDLERWHKKNHQPGDLYVMESCNNSFETAERLKKLGAHVVVLESLRIGQIQKAYLKDDKVDARKVARVYLSGLGVEVWQPDEKTRERREVLAVYDRVKRDSVRCRNRIWSWLTQHGIKKPEGLKLAEESSLNWLLQCRQWSLRQELLIRTMHSNLVYAQSKRKELKRLMAAEIAEDPELLKLQQLCGLRLVVIYALGAVIGDISRFKNPKRLVAYIGLQPSVKQSGISDRCGGLRHTGRKDLRCLLVQAAHAILRMGPSNNSLATWGRALTYRKNRNVAAIAVARKLTVYIWYLLRGFFTPLQNLSTSFRTKLQKLAVEIGTPMRREMGYKTIQDFIHKKEEILLAGG

SEQ ID NO: 413568 - protein, 341 aa, unidentified
MDITIVGLDLAKNVFQVHGINSAGDIIVRRRLRRARVCGFFAGLAPCLVGMEACGTAHFWARELVALGHEVKIIPPSYVKAYVRRGKNDAADAAAICEAVARPNMRFVPIKTEDQQAALMLHKARALLIRQQTMLVNALRAHMAELGMTAPQGRGKVENIIAVIEDDEDESIPALARAALKPLVTQLRANEDATAALDAEIKAWHKGNAASQRLATIPGIGFLTASAIAATVPDPSFFRSGREFSAWLGLVPRQNSSGGKDRLGRISKQGNPYIRRLLVIGATSMLRYARAKTAPGANWVNGLLERRPARLVTVAMANKTARIAWALLSKGETYRAPIAAV

SEQ ID NO: 413569 - protein, 397 aa, unidentified
MTAAIWAGIDAGKTHHHCVAVDESGRRLLSRRIANDEPELLELTTDVMALGDKVTWGIDLADGGAALVIGILLNHVQLVHYISGRAIHRASESYRGEGKTDAKDAAIIADQTRIRRDLHPLHPNDETVTDLKTLTSRRMNLVADRTHTVNRLRAQLTGIFPGLERALDLTNKGPLTLLTGYQTPAAIRRLGARRLETWLRNRKVLRANQLAETTVEAAERQHTSLPGEKLAAQMVHTLAKEVSALNEQIAKVDKLIEARFRGHRHFEVITSMPGLGIILGAEFLAATGGDMSIFGTADRLVGFGGIAPVPRGSGMISGNLRRPQRYNRRLQRVLYTSALFSIRRSNKSRRFYDRKQAEGKHHTQAVLALARRRVNVLWALLRDGRCYELAPLTTLSA

SEQ ID NO: 413570 - protein, 355 aa, unidentified
MSEQFVGIDWATRRARWHAVKPTGVVIDEGWTPADEDGLAMLVGHLGPDAVACLEMMSGAAWVRDRLTAAGWTVQIADARKAKAVGSLAAKTDKLDARVLAELARRDLVPQVHVPTFGDRELKERLGRRMHMVRLRTAAMNRAHGVLSQFGVTLAFKRLREPDRDELLVQRGVPEVWRRSIAEAVAVVAMLDQRLIPLEQELRPLARADPRVQLLVTIPGVGDLLGLTIASEIGDISRFPSAGKLIGYSGLTPRVYQSGQKSSTGKLSKSGSTMLRWAAIEAAQQAGRPNNPWHQLYLDVKQRCGGKGNPAKAAVARKVLIATWHVLALQQPFNPSRPRGASAPVPASSSCVLAA

SEQ ID NO: 413571 - protein, 334 aa, unidentified
MENIALIGIDLGKNSFHIHCQDRRGKAVYRKKFTRPKLIEFLATCPATTIAMEACGGSHFMARKLEELGHSPKLISPQFVRPFVKSNKNDFVDAEAICEAASRPSMRFVQPRTESQQAMRALHRVRESLVQDKVKTTNQMHAFLLEFGISVPRGAAVISRLSTILEDNSLPLYLSQLLLKLQQHYHYLVEQIKDLESQLKRKLDEDEVGQRLLSIPCVGTLTASTISTEIGDGKQYASSRDFAAATGVVPRQYSTGGRTTLLGISKRGNKKIRTLLVQCARVFIQKLEHQSGKLADWVRDLLCRKSNFVVTCALANKLARIAWALTARQQTYVA

SEQ ID NO: 413572 - protein, 391 aa, unidentified
MVCVGIDVAKDKHDCCILDSDGMVRADCFTIPNNMDGFKQLLQTIRNCTKKSDKIKVGLEATGHYSYNILGFLLDNDLAVYVMNPLHTNLYRKSLSLRKTKTDRVDARTIATMLLSDVDLKSYTDTAYHNEELKSLTRYRFEKVQERAKLKQSVSRLVTILFPELEQLVPTLHIASIYSLLGEYPGAKQVSEVHLTKLTNLLTTASKGRYGKDKAIQIRDAAKTSIGSVMPAKSLELKHTIKLIKELTSEIDEIEDSIQQIMDELHPPILSIPGVGIQSAAMILAEIGDFSNFESPDKILAYAGCSPSTYQSGKLTNCYAHMEKRGSRYLRYALYNATKYVCHWNPVFAKYLAKKRAEGKHYNVALSHATKKLVRLIYALQKSGKAYLTAA

SEQ ID NO: 413573 - protein, 436 aa, unidentified
MEEVTDEPLYRDRAGGIDIGKAEMHATIRVPSDKDPARRASETRSFATTRRGVLALADWLRSWQVPAVVMEATSTYWMGPFFRLEAEGFECVLADARQVKNLPGRPKRDPSDSSWLAQCFERGAVRPCFVATKEFRVIRLHTRYRRDLINERSREKNRAEKLLETAAIKLSSVITDLHGVTGRDIMQHLIAGERDPKVLAQLARTRARAKITELQHALEGAEFFTGHHARLLKTMLERIGQIDAQISGLTAVIEELLAPYEEQLAQAESMPGWGRRSAEDAVAETGVDMTRFATAGHLVSWAGRAPLDHQSGKRKGQARHKKGNTYLGGVLGETAVCAGRTQTREGARYRKLARSRGKNKACVAVGNTQLKVYHQLLSNPGMRYRDLGPDYYQRRAQNRRKIGYHVRELEALGLEVTLCRIPGPDPGPGQAATPAA

SEQ ID NO: 413574 - protein, 312 aa, unidentified
MGMTDTTPILAIDVSKDRLDGFAADCAEAFSLANTPSGHAALTKRAKASRYIVVVEASGGYERALITACLQAGVALRLLDPRRVRHFARASGQWAKNDRLDARVIAAYAAAIAGPLHTPDPEAERLAELVTYRRQLLDIETTLANQAEHLTDPELKRDAKLRLNTLKLRLIRLDQRIEAAIAASHKLTRKSEILRSIPGVGPVLSATLLASLPELGQLGRRQIAALVGVAPMDNSSGKRHGPRSIYGGRPAIRATLYMAALTAGRFNDTLAAFRDRLRKAGKKPKVAIVAVMRKLLVLANALMRDNRTFAKT

SEQ ID NO: 413575 - protein, 340 aa, unidentified
MKKILFIGIDFSKSKFDASLLKSMSDEEVVSGSFENNRGGYVLFLKWVSDHTRIKKEDWLFCGEHTGLYSRDLTEFLSKKNLTVWLENPYQIKCSCGIKRAKTDKIDALEIARYAYRFQDKCTPYQPVDKAIESLSLLLSYRGRLIKEKVLLEVSAKETRRVISRDTTSRFVFENSMRNIERIKKEIKAVEEKMHQILMDSPLKENYLLTVSVKGIGLVTAVALIVYTNNFSTFNTARQLACYCGVVPFEKSSGTSLNRGKHISHLANRELKTLLTLCARCAIEHDKELNVYYHKKLSEGKEYKVIINNVRNKLIHRIYAVVTHKMPYMENYLNPFRKCA

SEQ ID NO: 413576 - protein, 351 aa, unidentified
MIEGVFRLFRTGNIKRRRKTVLYVGLDVHKEFCQASVLDENGEEISNERVVTSIEELDRFLDRFQEARFVLESTGVWEFVYGIVEARGFDIVLAHPLKVKAISSAKIKTDKVDARTLARLLYLDMVPSSHVPSREVRDLRELLRHRKALVEKSTAFKNRVHAELLRRGIKRPEALKSAFSSDAIAWMRSLDIRTVSWNLDMVEALQTQIKDVNRVLLRRFEEMEDAQLVATVPGIGFYGAMLIAAEIDDVRRFETPAQLCSYAGLVPSVHQSSSSCHYGHISKQGSRHLRWMMVEAVHVHLWCCPDSKLSRFYRKLARKKGKQVARIATARKMLHMIYWMLLNKEDFKVTG

SEQ ID NO: 413577 - protein, 389 aa, unidentified
MLLDHPSDGLTAIRTHIGAIFASLELSRSNWLVTSLSPGKGEKMSRHIIAAGNVAELLTLFAELRRKTEVRTGQSYPIITIQEAGLDGFWLHRVLQQEGIESHVVDPASIATPRRRRRAKTDRLDGETLLRALLAYKRGEPRVCAMVVAPSPEEEDRRRLCRERRTLIAERITHVNRIKGLLFAQGISDYAPLRRDRRARLEALRTGDGRELPLHLKAQIDREFDRIELLLGQIKAVEAAQDALLAAASKPASEEAAPDPVTMLLALKGMGANFAAVLWSEAFYRQFANRRQVAAYAGLAATPWQSGGIRHEQGVSKAGNPRLRTTMIQLAWLWIRHQPQSALTRWFKERSQQGRKRAIVALARKLLVALWKYVTQGVVIEGAVMKPAA

SEQ ID NO: 413578 - protein, 346 aa, unidentified
MKHLFIGLDVRKKSWSVTIQEGKVVLKRFSMEADADALLHYVHKHYPAYEVECCYESCCLGYQIYRDLSAEGWQVLVVNPGDIPRIHKQKSSKTDKIDSRYLCQQLAAGQLKGIYVPNEQQEQFRSLFRRRNDLVKNLRRIKSHIKGMLLYYGVTIPEHYDNPNWSKAFLQWLTKVKWTYTSAGEALKSRLHEYAFLHKEYLHLSNELRSYARKYYKKHYYLLRSVPGVGPFIAIGTLAEVGDLRRFKGIDRLSSYIGLVPSLYSSGTNSFTKGITARSKHLLRSYLIEGAWIAAKKDPELMQYYQARKGADHKKLIIKMASKTLNRMYSVIKRGEPFQVKVPVLA

SEQ ID NO: 413579 - protein, 341 aa, unidentified
MMIIGCDFHPRFQQIAFVDRETGEYGERRLNHPEEAEQFYRSLVGRPVRIGVEATGDFRWFRHLMEELGHEFLLGDATAIRAACPRRQKTDKRDARHILNLLVEDRFPVIWQPSAENDEMRQLLLHRCRLVRMRTRVQNQLDSVAKNEGLLSSRVWSAKRRSQIEALPLPGWYGHRRADLLGLLEELNKRIKPLDEAVCKAAEGNPEACLLMTHPGVGPIVSLAYVLTIGDWKRFPRGKQVGSYLGLIPTEESSGNMRRLGQVSKQGSVLVRWLLVEAAVHAQRHDPSWHRQYVRLSMNKHHGVAKVAIAHKLAVRLYWMLRSGDDYSKVMERSSHAGQSV

SEQ ID NO: 413580 - protein, 356 aa, unidentified
MAVVILAVDLAKAKSLFCWFDTADQSHRFKTVPSTPATFHEALLEQPVDRVVIEVCDMAGWVKDLCEALSIPIQVANVNVEGWRWKNVKNKTDKTDVLKLARLSMMNDLKTVWLPDRTTRHWRSLILYRHKLIERRTAIKNAIHALLVAEGRAMKAGKEAWTEQSLANLWKLAKPIGECSKDALWSGHLWMELKNLDHLMEQIEALDRKLDGLGDADHRVIRLKTIPGVGPRLSELVVAVIDDPKRFKNARQVGAYAGLVPRRYQSGQIDRVGRISKAGCGKLRKLLVEIAWGMLQHNTHGQNVFGRISKGQKTRRKQAAVALARRVLVWCWAMLRDGSDWRDPTSRPAIGAIGAT

SEQ ID NO: 413581 - protein, 389 aa, unidentified
MDSAGRRLAKARLPEGVAGIARLHALIGAQLGEDVDGPEVAVGIETDRGPWVAALVAAGYTVYAVNPLQAARYRERHSVSGAKSDAADAHILADMVRTDAHQLRPVVVDSPDAEGIKVVSRAHKTLIWERTRHTQRLRHTLREYFPAALEAFEDLDAGDTLELLGKAPDPASAAKLTLGQIRAALKRARRRDIDTKAAAIQAALRAEHLGRAAVITTAYAATTRSAVAVLITLTEQVTVLQGQVEASFGRHPDAEIIVSQPGIGPILGARVLAEFGDAPKRYADAKARKNYAATSPITRASGKKKVVLARFVHNDRLVDALMSQAFSSLQASPGARAYYDKQRDRGLGHNPALRQLANRLVGILHGCLKTRTHYNEATAWSHQTEKAAA

SEQ ID NO: 413582 - protein, 387 aa, unidentified
MPDDAPRPALAAIRTDLGAIFVSMELSRKAWLITSLSPGAGEKMSRHAVVAGDVAGLFERFAELKRKASARTGGDFPIIVIQEAGLDGFWIHRVLEAEGIESHVVDAASILTSRRRRRAKTDRIDGETLVRTLMAYKRGEPRVCSMARPPSPEEEDHRRICRERKTLVVERVEHVNRIKGLLFAQGVFDYEPLRRNSRSRLEALKTGDGRPLPLHLKAQLVRELDRLELLLAQLKAVEAERDALLMEAGGEARSPVAMLAQLKGIGPEFAAVLWSEGLFRHFDNRRQLAAYAGLAPTPWKSGSIDHEQGVSGAGNPRLRTTMVQLAWLWLQNQPASALSLWFQERVQRAGPRMRKRTLIALARKLLVALWRYASAGVVIEGAVMRAA

SEQ ID NO: 413583 - protein, 375 aa, unidentified
MAKSGILAKCHDLQESFSATTGAITIGIDLGDRFSYCCVLGPDGAVLTEGRVVSTPQGMARHFQQLPPTRIAFEVGSHSRWVSELLTNWGHEVILANPRNLRLISDSIRKSDRVDAHTLARLARIDPKLLSPIQHCSAEAYSHMTLLKGRDLLVRTRTRLTNAVRGVMKAVGLRLPSAGGTTFPSKTALLVPDDLKPSLLPLLETISHVNKQIYQFDKAIERVAREQYPQTARLRQISGVGPVTSLHYVLTIGDPTRFEHSRDVGAYLGLTPRRRQSGDIDQQLRISKAGNRRLRSLLVQCAQYLLGRFGPDTDLKRWGARMAERGGKNAKKRAIVAVARKLAVLLHRLWVTGDTYRPLHNEMGWSPGSALPQAS

SEQ ID NO: 413584 - protein, 391 aa, unidentified
MSMYFVGIDISKYKHDCCIISAANQKVVSKVTIENNKSGFEELLTIINSLSNPADIKIGFESTAHYALNLELFLENSLLTFMEVNPVLINEYKKSKTLRRTKTDSVDCESIARWLMTVEYKPHPKGFYHAYSLKSLTRLRDKLIRQRSFYLVKITNVLDHTFPEFKPFFSERFSKTALYLLENYGSAEKMARMNSVSYEKLRSLSRGKFSPQQFLQLKELAANTVGVNNSIFDVELNSLLTLYKSLDKEIYILEKEIIKLIEEIHPHYMSIPGIGPLSAAVIYSEYGDISNFSNSGQMLAFAGIEPGINESGTESHGGKMVKRGSSQLRYTLINCCIPLIRFDMTFATYYAKKRGEGKPHRVAITHVAKKLIRVIYALERQDIDFNTQKLR

SEQ ID NO: 413585 - protein, 385 aa, unidentified
MQKLNDLSRSLTPLDPDGTLIAVIEMSQSSWLVAGIVPGVERQPLKKLAVDESALLKLLHRWREEAAKAGHRIKRIAVAFEAGRDGFWLARWLSARDIEAHVIHASSVAVSREHRRAKTDRLDTELLKRSFLGWLRGERDHCKMVAIPTTKDEDAKRPNREHESLVGEQSRIVNRMKAALIRLGIRGFNPKLKKAAERLDGLRTPEGEPIPPNTLAELRRDMVRRRLISDQIRQIEDARLERLKQAPSDGPHAMVRLLARVIGVGVETADMLVQEVLSRSMRDRRAVARYAGLTGSPDESGRKRREKGLTRSGNARVRRGMIQLAWRFLMFQKDSTLAQWFRARTESARGTRKTMIVALARKLLIALWRLVREGVVPDGVVLRPA

SEQ ID NO: 413586 - protein, 408 aa, unidentified
MERFYLGVDWADQFHQVWVSDFDGKKVVEKKVTQNIDGLAEFGRWLDEQRAKPIELWAAIEKPQGRIVDFLLDHGVEVYPVNPKALDRARDRFRMSRSKSDGFDAYVLAQFLRTDHGHLRALKPNSVQAQELKLLTRDQQRLGHQKTRLLNQLTATLKEYYSRPLEVFSDLETQIALDFLKQNPTPDDLSKLTRRQWNRFAKREHHLGAERAQELWEQLNQPQLTVPEHVVRAKAHLLRVLLGQLDPLRKAVKSYEERIKSFFGSMPAAELFKGLPGAKTGTIIATLWAELGDAKSRWESFRHLQAEAGVVPVTKTSGKSRVVQFRFSCNKIMRHAAYWLAFVSLNRSEWANHYYRDQRAKGHSHHQSLRALGAKWLKIIFVMWRDHKPYDENYHLANIARQKMRQAA

SEQ ID NO: 413587 - protein, 351 aa, unidentified
MVVVGADVHKRTHTFVAVDEVGRQVGQCTVEATTKGHAKALVWARREFGEEVTWAIEDCRHLSARLERDLLTVGQAVVRVPPKMMAEQRRTARTRGKSDPIDALAVARAFLREPSLPVACHDEVSREAKLVVDRRESLVNTRTRTINSLLWRVHELDPGRAPKSRSMDLVKHQQILKAWLETLTGVVAEMALDELNDIIALTVRIKEFDKRLAVLVKQEAPSLLALAGCGELSAAKLLGESAGITRFHSEAAFARHAGIAPIPVWSGNTTGRVRMTRSGNRQLNCAIHRIAITQARMPGTLGKAYYEKKLAEGKSTTEALRCLKRRLARVVFQLLTTDHNNRQTPALPAAA

SEQ ID NO: 413588 - protein, 342 aa, unidentified
MKEVSIVGLDLAKRVFQVHAAGSDGSVVLRRKLSRGQVVTFFTELPKCTVAMEACATAHYWAREIGKLGHDVRLIPPAYVKPFVKRQKNDAADAEAIVEAATRPSMRFVVPKTESQQACSMLFRTRDLFVRQRTQLINALRAHLAEHGVIAPQGTANLALLAEIIEDHEAGLELIVVETGRLYLEQIAALSSRIASLEKALRSEAKRSQSTARLMSMPGMGPITAMAVEAFAPTMTTFRRGRDFAAWLGLVPKQHSSGGKQVLGRTSKMGQRDIRRLLIIGAMTVIRWACRKAPPENSWLARMLARKPRMLVAIALANKMARSIWAMMTRNEDYKDSVLPAV

SEQ ID NO: 413589 - protein, 356 aa, unidentified
MNNSIAGLDLAKNVFHVVFFDRHFKEVRKRMLRRNQVLAFFANTPPVLIGMEACSGSSYWGRELIKLGHEVKIIAPQHVKPYVRGNKNDYNDARGIAAAAKIPGMPTVPVKTIEDQDIQAAHRMRTQCIRDRTALCNSMRGLLAEYGIVLARGVSKVRKGIPELLEDPDNALTPFFKEMLARRYEQLVEIDGHIDFYTQKIKQRAKEDDACKRLQTIPGFGPINASAFKSAVGDGSAFSKGRDVSASLGVVPRQHSSGGKDNLLGISKRGDRYLRSLLVHGARSTVRAAANKDDQLSQWINRLRERRGIHKASVALANKMARIGWAVLHNKTTYRASLGAGAMGGDASGGGSEQGL

SEQ ID NO: 413590 - protein, 466 aa, unidentified
MAHKRKNIKSKKQKRSPRSLKAIQPNAAGIDLGSREHWVAGPPLEDETPNVERFGTTTPELFRLADWLKQQGVETVAMESTGVYWIPLFEILESRGFEVVLANARQIRNVPGRKTDMIDSQWVQLLHACGLLRGSFRPSDDICQLRALIRERNTMVEQRSDWVRRMQKYLDQMNICVHQAVSDITGVTGMAIIRAIVDGERDPHTLARLRDRRCRKSEAQIAEHLTGNWRAEHLFNLRQALKMYDQLCAVITDYDSEILSYIATLQPADTSDESAPPPASKSKAKNLVKRGQEPMRQALYQLCGVDLTTIDGIGVDTSTVIVSELGLDFTVFPNENHFVSYLRLAPNLSISAGKKVPKKSKASTCTRVATALRMAALTLRRSKTALGAFYRRVAWRKGASVAVFATARKLAQLIYRLVRYGQAYVDTGTEAYEARFKQRRIKFFTKALNDMGYNVEPLKTEEAILA

SEQ ID NO: 413591 - protein, 387 aa, unidentified
MPQVNDLSRSLAAFDPISTLVVVVEMSKTSWLASGVVPGVERQPLKKLEPDATALLRLIERWRIEAVRAGRPIRRIALAYEAGRDGFWLARWLIARGIEAHVIHSASVAVSRERRRAKTDRLDAAMLMRVFLGWLRGERGHCGMVAIPTMEEEDARRPNRERESLVNERSRIVNRMKSALARLGIRGFKPHLRKAPERLAGLRTAEGTGLPANIIEEFRRDMARLALVREQISSIEKTRAERLERAPDTGPHAMVRLLARVIGIGIETADMLVREILSRNLRDRRALARYAGLTGSPDESGLKSREKGLAKAGNARVRRGLIQLAWRFLMFQKDSALARWYRTRTEGPSGARKTTMIVALARKLLIALWRLVTTGEVPDGVELRPAA

SEQ ID NO: 413592 - protein, 438 aa, unidentified
MSNKVIFNLDELFISVGIDVGADFSWMSIALPNQQFVGKPYKILHNSIDSLTTAVSKIKEAEELYSLESRIFLESTGIYHYPLFCYLRDKGFNCSVINPIITKNSTNINIRKVHNDRFDSKKAALVGLKPDLKVSLMPSDLALNCRNLCREYYDLMDNRSAYVNKLQGELRMAFPQYLGIFSKVTINTSLTLLETYTSPSAFLKADKQEIIDIIKSTARFGLTYAQNKYNAIIQAATDANQFGYIIDSNIKRIRLYISFIRKYDEEINNILESLHELVDANEDSDFVKQIHLIETFKGAGFLSAVSIMGEIGDFSAFSKPKQLFAYFGLDPAVKQSGKFEGTKVQMSKRGSAIARRVIHTLTLQSISISRNREAKNPVLREYYLKKCDSKPKLVAMGAVSHKVCNMIFAILRDNKPFKIIAPQEHIKQYNSAKCDIAA

SEQ ID NO: 413593 - protein, 471 aa, unidentified
MGKGSGNGTTRGDRRRNARRERLRALLPRDGAVIGIDLAEDKQALAVIDHDGRVLARKTVKVKAFRLGEALDWAVGQARAKGFAQVTVACEPTGPRWLQVQRLCAERGLPLVCIQPLMSHIAREQQDYTTHKTDESDCVLIARLAVELHCYVPEELDEAWAHLRHLGRRRQQLITMATASGQRILDFLSVAWPTVTETCVDPLKSVTWLAALQVVTARCGADPGRLAAMGTEAFTAAAGGAVAGWGGKKAWGPISRRVFAALTDTEGVVVSSRRGLLRRIADELGDLQRTRAQLRAVEADMVAVLGELGLSKLADIPALSAVGAAAILAETGDPRRYDSSSSLVKHAGMSPSDNASGTFLGDAHISRRGRPGLRLTVWRAVWPMLRFNPVMAAKYAAMTQAADDAAAAADTGSRQASAAAAAARARRAKARVACAASLLRWIYCLVVHGTSWDPDAASGPARRPAVPAEAA

SEQ ID NO: 413594 - protein, 426 aa, unidentified
MAYRIAGIDVHKKMVAVAIADVEVVGTWRFERRQIGTSPSQLRALAEWLVEREVDEVVMESTAQYWRPVWEALERAWQPRMRQARRGPRAGALHLAQAQSNEGPRGRKRDFPDAERLVKRLVAQELTLSFVPDVTQRLWRTVARRKYQSTCNRVQLQNRLECVLEEMHIKLSSLVADLLGPSARRMLRAIANGETDPGAVAALGSRRLHATPDQLRDALGACTDLHPVYRRLLALTLDELEVIERHIHQLDEELAQLLRGHQDAVERLAAVPGLGVDSAQQIITEVGPTAATFATAKRLASWIGACPGHDESAGINHSHRAPNGNRQMRRLLNQAAHAAVKAKGSIFELVYRRLVVRLGHAQAIGAIAHRLCRLVWKILHDGVTYEERGPAVTKHRAHRRAAKMIRELRSLGYRVEPTTPPASALA

SEQ ID NO: 413595 - protein, 352 aa, unidentified
MQTNVRHFIGIDVSKPFFDAALMTVVNYQKQAIESAQFENTEPGLKSFQKWLKSNKVSFDKNTVLVIENTGIYHRLLWAFCNKINLQLHIGNAAHIKWSFGIARGKNDEIDAIRLCKYAFKESDELKMNQPLNPKLMQLKDLQTSRKRLLSQKNANQTYLKELKDINQKTVQKALEGVYKTTIEGLEKSIVTIEKLIKVLIKSDNTLQTNYTLLLSIPGIGDITAVYLIVCTNNFAGNISGKQPQRRPLASYAGVAPFGHSSGISIKKREKVHKMANKELKKILHMGAMSVIHCNPEMKQYYDRKTLEGKHSLSVINAVKNKLVLRAVAVIKSQAPYVDNFAKSNQTIKKVA

SEQ ID NO: 413596 - protein, 339 aa, unidentified
MASEYVGIDLHRRRSVIVRLTPDGEVLEQVRIDNDPVALALEIAQAGPNPDAVLEATYGWYWAVDVLEASGAHVRLAHPLAIKAYAHRRVKNDSIDARTLADLARMNRVPEAWIAPPEIRELRELVRYRAKLVALRSGLKAQVHSVLAKHGVRVPMTDLFGLAGNRLLDELSFPAPYAMRISSLRELIGIYHSQVARFDAEIRTLLAEHPGYRAIQAVPGVGPILGAVFVAEIGDVTRFSSAPQVCSWAGLTPRHRESDTVVHRGAITKQGPRLVRWAAVEAVQKLRTSTKQHRDFRRIARRRGKNIARVAVARKLLTLVYYGLRDEEVRCLPRPKEAA

SEQ ID NO: 413597 - protein, 461 aa, unidentified
MKNKHSNPKKKKFKKIALDENWEKLNPNACGIDIGARELFVCVPSDRDKESVRRFGSKTPDLEEMAQWLKDCRIESVAMEATGIYWIASFQLLERKGFKVVLVNPRQIKNVTGKKSDVMDCQWIQKLHTFGLLGGSFRPADPYCVARTYMRLREDLTAGSSAQIQLMQKALHQMNIQLSHVLSDITGSSGLAIIEAIIAGQRDPIALAELASRRVKSTKDVIAKALIGDWREEHLYCLAQAHQMYLRYQLDISQCEAKLAGELEKLPNKVDPNLKPLPPKIDRKKEVNENLRLGLYCKFGVDVTAIEGIGPTVALTLLTEVGADLSAFPSEKHFCSWLGLCPDNRISGGKVLSSRTRRVVNRMADVLRMSATTLKNSQTALGAFYRRMVARLGPAEGITAVAHKLARLLYGLIKHGHEYIRTGMEEYEKKNAHWKMKALRKMAESLGVQLLEPQPVTAGVS

SEQ ID NO: 413598 - protein, 329 aa, unidentified
MSALVCGLDVHKDSTYATILDSRGKMVNQTRMNNERVLSYLSRFSVGKVAMESSNQVAALYRRLQSKGYDVVLSHPKKTRYIAEAKIKSDRVDSRAIAELARLDALPLAYMPEKEISVLREQVRRRAFLVRERVKLRVKIKAVLTYEGIKWPSDTGLFTKKGVEWLHGLCLEPIESYLRVIKPLDDEIRLVSRQLRKLAGEDEDVKLLMTIPGIGYYSALLVKSEIGDVNRFPFGDRLCSYAGLVPSTHASGNTVRHGGITHEGSRWLRWVMVEAAQTHVHKYDTSVTRLYNRIAERRGRKSAVVAAAHKLLLICYSVLKNRRAYYDQA

SEQ ID NO: 413599 - protein, 317 aa, unidentified
MSFIGIDVSKKTLAVAAVGPDAEVRQASFGNDAAGHEALQAWLRPLSPCQVALEATGSYHQRLQQSLVQVGLRVNVLNPAQVSYFVKSHARRNKTDRADALLLALYAQERPAGQSSPLPGLATSLARELAALQDDLTRLKNRLEAVEQGVAHRAVPTSLKRRIRALEEEKQALEAQLEHDTRQTQANELALLLSIPGLGVRSACLLLAELGDVRRFSDAAKLVAFAGLTPRRVESGTSVRHRTAISRIGSPHLRRLLYMPALVAVRFNPPVKRFYDALVARGKAKKSALVAAMAKLLKIAYAVLTHQQPFRPVPPPA

SEQ ID NO: 413600 - protein, 318 aa, unidentified
MEQSRQPPIVGLDVSKAWLDGYLPATGKRLRVSNDPGGIDRLLRSLAHPGGSLVVMEASGGYERAAHQALVARGVPAAIVNPKRVRDFARGMGLEAKTDPVDARLIARYGAVMRPAATPVPDPARAELREILACRRQLIDEITVRKQQLEHLQSPSLRARTTKVLALLRQEERELSKLLRQQIQADAALAADFALLTSMPGCGPILAATLLAEMPELGVLDRRKIAALAGLAPVAKDSGLRGNRRVIKGGRGQVRRALYMAAVASLRIRASPLKQRYAQLVAKGKAPKLALTALMRKMLVTLNAMLKTRQAWKDQRET

SEQ ID NO: 413601 - protein, 342 aa, unidentified
MDHFAGLDVSVKETSVCIVDDAGKIVREVKVASEPEALLSVLANPAYHFKRIGLEAGPLSQWLFSALADADLPVICVETRHMQAVLKAQINKTDRNDARGIAQMMRAGLYRPVHVKTLRSQKLRMLLTHRKLLQSKAIAIENDLRATLRNFGLKVGMVGTVKFEARIKELVENQPDLAALVEPLLIVRRVLREQIIILHRRLLAIVRDDEVCRRLMTTPGVGPVVALTYRATVDVPARFRKSKAVGAVFGLTCSKYQSGEIDRNGRISRCGDEMMRVMLYEAAQSMLHSKKWSWLKAWAMQIARRRGKKKAIVALARRLAVILHRIWVDGTEFRWTREVAAA

SEQ ID NO: 413602 - protein, 353 aa, unidentified
MGIVVALDVHRKQITYKALDRDTGELRRGRIAPAARVDVRAWLAQFAGCEAEFALEGTTGWRFVVEEIERAGHTAHLADPAETAAKRGRKRRAKTDNADCDLQLRLLLAGELPESWIPPVHILELRTRVRMRKTLIDQRTAWQQRIQAQLFHQGIPAGLRLRTQVGRDALAQAELSPAGRELVTLGLRMIDALDLELAPLDRELRGFARRQRGCRTLIAGLYGVGPVSATAILAELGDARRFASSDDAVRHSGLDVTVYQSDSKRSPGRLSHEGPELLRWALFEAAVSAARAGSPDHAYYLRVADRLDHTRACLSVARKLCRRAYHILRELGDEALAPVDCDPHAEEAIAAAA

SEQ ID NO: 413603 - protein, 401 aa, unidentified
MQETQQHDAIDVFIGVDVGKGQHHAVALDRHGKRLYNKALPNDEAKLRALIAELKTHGRLLFVVDQPSTIGALPVAVARAEGILVAYLPGLAMRRIADLHAGEAKTDARDAAIIAEAARSMPHTLRSLRLADEQLAELTMLCGFDDDLAAQVTQTSNRIRGLLTQIHPALERVLGPRLDHPAVLDLLERYPSPSALAAASEKTLANRLTKLAPRMGKNLATEIVQALSEQAVIVPGTQAATIVMPRLAQQLAALRKQRDEIAAEVERLVLAHPLWPVLTSMPGVGVRTAARLLTEVAHKAFASAAHLAAYAGLAPVTRRSGSSIRGEHPSRRGNKVLKRALFLSAFAALRDPVSRAYYSRKIQQGKRHNQALIALARRRCDVLFAMLRDGTIYQPKSAPNA

SEQ ID NO: 413604 - protein, 406 aa, unidentified
MICIGIDIAKRSHVASAVDEDGGTVVESFKFDNTANGFAKMLKRLRKADATPENSLVGMEATGRYWVALFDFLISHGYEAAVINPIQTDAFRGVWTVRKVKTDALDAAMIADLVRYKRYEPSALGDEATEELRNLARYRLSLVERSTALKNRATAILDRTFPELAGLFSNAYCPTHRELLQHCATPDQVLGTDVGTLERILREASRGRCGRAKAERLKALAKESVGVGFGSKTLAFEARLLMEELDFVQDQVKEVERELARLLERTQGKWLVTIPGIDVALASVIAGEIGDPNAFDDPHRLMGYAGMDPTRSESGETVRSDGHMSKRGPGALRWAFMQAADCARKNDPYFGDYYDRKRGVDGKHHYVALSGVARKLMGVALAVMKEGRPSEPAPPRNHRPGHLKEA

SEQ ID NO: 413605 - protein, 341 aa, unidentified
MEQATTIGLDIAKHVFQLHGADAAGHLLFRKRITRVKLLGFLAAQTRCVVAMEACAGAHYWAREIAKLGHHVRLIAPAYVKPFIKRQKNDAADAEAICEAAQRPSMRFVPVKTEEQQANGIVFRARDLLVRQRTQCVNALRGHLMEYGYVFPKGITHVTTLVALVEDPQSSLPDSVRVILKLLVDTFTALEAQIAVLDTEINQRSKSDPTARRLMTIPGVGPIASTAITALVPAPEGFPAGRDFAAWLGLTPLQKSTGGKQKLGAVSKRGERTIRRLLIIGASAVVQQASRRGAPNGSWLAQMLARKPKMLVTVALANKMARVIWALLVKGGTYRAPAVAA

SEQ ID NO: 413606 - protein, 368 aa, unidentified
MKKNSTSKKSSTEVKVKEEVLTIGMDIGDKTSRCCVLGGDGDIRLEESVATTKKALLQKFAGMPRCRIAMEVGTHSPWISRLLKGLGFEVIVANARQVQLIYASSRKNDKMDARMLARLARVDPQLLRPIQHRGEEAQADLMTIRVRADLIEARTKLVNAARGFTKTQGDRLPACDTDAMGVDKLETLPEWLKEELLPLLEIVESLTEKIQALDVKIEQIARTKYPETELLRQVSGVGTLIALTFVLTVEDRERFQKSRDVGCYVGLRPKQSDSGERQPQLGITKEGDQYLRKMLVQGAHCILSQRGPDTDLKRWGLKLSERGGKNAKKRAIVAVARKLAVLLHRLWVTGEVYEPLRNNQPAPKQKAA

SEQ ID NO: 413607 - protein, 363 aa, unidentified
MNYVGVDIHKKYSVLCAVDEVGKKVGEGRVEGNSEKGFARFFAGLEGPSKAVLEACWNWGLIHDLLEEIEEVEEVVLAHPLKTRLIAEAQIKNDRLDAYALGTLLRGELVARTHIPGRETRARKNLLRQRLYWARLRTMLRNRIHALLDRQRGMQLPQCSDIFGVRGLGFLRRLELGEPDGTLLREALALHDLIAQQIKAQEKRIVAEFEDEAEHRCLRSVPGIGATLAAVIGCEIDGILRFGSAEKLCAYAGVVPTTYASGGKVVHGRLLSSCNKWLRWALIEASWVAIGCSAYFGTFYQQQRARGKKPNTAITIVARRMCRILYQLLQEKRDFEKQPPRAHSKSCPRLLRVKTDGNTTACC

SEQ ID NO: 413608 - protein, 387 aa, unidentified
MSQPNDLSRSLVPLDQDSTIIAVVEMSQSSWLVGGVLPGIERQPRKKLEPSPERLLALLHRWRDESVRAGRTITRIAVAFEAGRDGFWLARWLEARGVEAHVIHPSSVAVSREHRRAKTDRLDTELLKRGFLGWLRGERGHCSMVRVPTIAEEDAKRPNRERECLVKERTRLVNRMKGTLARLGIRNFRPTLRNAAEHLAALSTPEGSPLPPNVAAELERDIERLRLVISQIKQLEEVRRQRLEEQPERGPHAMVRLLARVVGIGIETADMLVNEVLSRPLRDRRAVARYAGLTGAPDESGARRREQGLAKAGNARVRRGMIQLAWRFLRFQKNSALAQWYQARTADHRGATRKTMIVALARKLLIALWRFVTIGEPLDGVTLRPAS

SEQ ID NO: 413609 - protein, 347 aa, unidentified
MFYVGLDVHAKSIVICVLTEFGKVYQRCTVRQIDQMLQFLEGLGGPFQVCFEASLDYGVLDEMLSQIAERVVVAHPGKLNAIYRSKRKNDRNDAELLAKLLYIDAVPIVHVPSGRVRAWRELITFRTRLVQKRTRAKNAVRALLRSLRIVVPCKMGLWTCKGLAWLRALSFDNEMHALKRDLLLDEITNLNVQIFRVEKELARFAAKSPAVALLRTIPGVGPRTAEAVVAFLDDPKRFARSKQVGAYFGIVPSQDQSGPVNRLGHITKQGPATVRHLLTEAVWQAVRRSPTVKAYLERVQRGDPARKKIAIVATAHYLVRVMWSMLKTGSKWQEQVTVQEEERLMTA

SEQ ID NO: 413610 - protein, 487 aa, unidentified
MCCTDMPAGALFAQVEAFQTVNPVCFLVVNRPAFPPQLNMNTRTTVADPGFRYLPDTQGYRPIIPPALPVINGSALHQQSASPPDTDTVSLPQKMHRLTFQTLIFILQLPQTPQFGHAQTSEFLLPVNGMDYLLPLRLTVRNVLTRRITMNIVFLGIDLAKNVFQLCGLNQAGKPVYTKRTGRKELLQTLANIPACLIGIEASTGAFYWQREFEKLRHKVKVISPQYVKPFVRGQKNDGNDAQAIAVALMQPTMQFVPPKSPEQQDIQALHRARQRIVNRRTATVCQIRGLLLDRGSPIGSAVSRARRAIPLILEDAENGLSSRMRRTIAELYELFNDLGRRIHFFDKEIETVFRQSEACQRIARVKGIGPKTATAIVAAIGKGTEFKNGRHFAAWLGLVPHQHSSGDRQALMNMMKKGDKHLRTLFIHGARAVVRVATNNNDGHMNQWVNQLKERRGFNKTTVAVANKNARIIWSMLRNETEYQVV

SEQ ID NO: 413611 - protein, 366 aa, unidentified
MKKNSTVATRRKQIFKQAKLTIGLDLGDRTSHYCMLDEAGNVILESNLPTTSNGIRQAFRRIPRCRIALETGTHSPWVSRQLAQMGHEAIVAHARNVRLIGESSRKDDQFDARTLARLARIDPGLLGPVRHRSAQAQIHLTVIRARAALVSTRTALVNAARGLTKSYGQRLNQCGTEQMNRDRSKGLSQELREALDPLLREIESLNERIAEYNGRIEQIAKEVHPEVARLKQVKGVGTLIALTYVLTLDDPHRFRRSRDAGCYLGLRPGRRNSGQSEPQLHISKEGDRYLRTLMVQGAHYILGPFGQDSDLRRWGLKLAERGGKNAKKRAVVAVARKLAVLLHKLWVSGEVYEPLRNNHKVRSAVA

SEQ ID NO: 413612 - protein, 349 aa, unidentified
MAEQRISYTGERIDVGIDVHKETYTVTCLWQRQMVKTATVPADPVRLAESLPRWFPGARIFSAYEAGFSGFVLHRALTTAGITNIVVNPASVAVAANDKVKTDRRDAKRLARDLADGRLRGIYVPTEAEELARLLPRTRAQLVAHRATITRQIKAKLHQFGLITPASRRLMSSRYLREMAAWELPPELRVSLTLLADQWRFATRQLLEVRRLLREQAKAQVALETVYRSVPGVGEVVARTLATELGDMTRFANERALFSYTGLTPSEYSSGTAIRRGHISRQGVSRLRHVLVETAWRALPRDPILQAMFDRIAATRGKQRAIVALARRLLGRIRACFRHGTTYAVGTVG

SEQ ID NO: 413613 - protein, 412 aa, unidentified
MSKMEITAVGIDVSKGKSTVAVRRPGGEIVMMPFTVLHTAKGLTELTNTLRSISAEIRIVMEHTGMYWRPIALALKEGGFFVSVVNAMLIHDFSDNSIRKVKTDRADSLKIANYALTFWQELRDYSVEDETRQMLKIQSRLYERTLNSSIALRNGLISLLDQTFPGANKLFDEQRAKSGHIKWVDFVRRFWHKDCVAALSFSSFADTFQKWCKRTGYHYSLADAERIHGIARNSVATLTKNDSTKLLITQAVDSLNAVYDTLQILRNEMQRLASMLPEYEVVMAMQGAGPITGPQLMAEIGDVRRFTSKGALVAFAGVDAPPFQSGTFDSKSRHVSKRGSPHLRRVLFTICSVILQHSDHENAVFQFMDRKRTEGKHFYVYTVAGCAKFLRIYYAKVKEYLNNIDSCSDYVV

SEQ ID NO: 413614 - protein, 432 aa, unidentified
MNESIPAASLEGVAAYIGIDWADQKHDVVLRSAAEPNNVEHRVIEQKPGALMEWIGQLQRRFGGQGQILVCLEQSRGALIYHLMGYEFLELYPVNPLQLARYRETFSPGGAKDDQPDAGLLCELLYCHRDRLRAWKADSELTRKLAFFNEGRREAVDQRTRLSNAIKSQLKVYFPLALELLNQDTSTALAADLLLRWPSLETLQKQIPHQLRKFFYAHHCRGESRMLERLQLVQQAQALTQDSGVIEPAAFRVQMLARQLKNLLPDIARYDQKIAELFAAHPDRFLFENLPGAGRVLAPRLLSALGSDLNRWESAQEIATLYGVAPVRRASGKKSGKKGEKKASVHFRQACPKFLRQSFHEFAGCSIRYCCWARALYEAQRAQGKGHHAALRAVAFKWIRILFACWKQRIPYDPQRYLQALQQRASPYANAC

SEQ ID NO: 413615 - protein, 350 aa, unidentified
MKKNSRVTQRQPEETIGVDLGDKISRYAILNEEGEVMEEGSFRNNAESIAKHFGKQGHSRVALEVGTQSAWIAREFKKLGHEVIVANSRELKWITSSDTKNDRNDAVKLARLARADRNLLAPVEHRTAEQQADLAVIRARDALVRSRALLVNTARSLAKGFGLRLPASITHTFGARALAALPENLHLAMQPLLEQIDALSVKMRDYDRRIAEVAAKHPEVERLASVPGVGTLTAAAFVLTLGRRERFAHSRDVGSFLGLRPQQRQSGERDPQLGISKSGDKYLRKLLVQCAHHILGQWGRDSALRQWGLLKGNTGAGKKRAVIAVARKLAVLLHRLWTTGEIFKPFPKMV

SEQ ID NO: 413616 - protein, 345 aa, unidentified
MKYIGIDYHKQYFVATMMNEQGEVIRRDKASTDRLSIRRYFQNADPCEETKAVMEACYGWEYFYDEASDLVDELIMAHPLKTRLIAEARIKTDTIDSETLAHLLRADLIPQAYAPDSETRGRKNLLRYRSSLTAMKVRIKNIIHSVLTRNHIEDTGFTSLSDKFGKQGLSYLRSVTLKGEDTAIVNNYLDLLEETERKIKAAEKQIRAVCREDKICTLLQSIPGIGPILAVTIRYEIDDIGRFMSAGKLSSYAGLVPSTYSSGNRTYQGKITKQGNKWLRWAMIEAAQKAPSNDLWLRGFYQRISKHGKKIARVAVARKLLEIIYRVWKEENPYYKKGTVALPFV

SEQ ID NO: 413617 - protein, 390 aa, unidentified
MFVRTALGWDLHRRFSTVSQVEQHAPGEFRVIKRARLEHADREAMRAWLAQLPPGTPVALEGAFGWPWVADLLTELGLDPYLGHPPALKVLAKNEAKSDRADADRLARFWLRGTFPKCYLSTPEVRQIRERVRYRMALARTRTEIKNRAHAVLHRHGILHDFSDLFGKGGRAFLKALDLPAASRHVLDGWLNLLDDVTALLADVEQWMEQNLEEDAIVSRLKTIPGIGLILAHVIRAEVGQLDERFVNRRKFTSYAGLAPLADDSADRRGRRHISPACNHTLRWAFIEAAATVQHAKNCPRSLRSLHYRLTLGNRVRKQEGRVAEARELAELVYVIWKKGEPYREIPSPQARRAALPGGNCCAAGALQSVRSKETRHPIVHGIRSGETLS

SEQ ID NO: 413618 - protein, 408 aa, unidentified
MARYYLGVDWADQSHQLYVSDESGRKIRELEVQQTADGLAELGRWLEESRGQGIELWAAIEKPEGRVVDFLLDHGVVVYPVNPKALDRARDRFRMSPSKSDGFDAYVLAEFLRTDHAHLRALEPNSAEGQELKMLTRDHQRLGRQKTRLLNQIGITLKEYYPVPLEVFESLDTKIALDFLKAYPTPQALSKLTRRGWKRFAKRDHHLSEARCSELWDKLNKPQLAVPTHVVRAKAKLLAALVMQLEASVKAVDSYSQEVQSFFAAMPAAEIAKTLPGGKSGTTVASIWAELGDAPKRLNSFRHLQAEGGAVPVTKASGKSRMVQFRFACNKHLRQAMYWFSFNSLQRSEWAKKYYRNQRAKGHSKHESLRALGAKWLKIIFVMWRDHKPYDENYHLANIARQMMRQAA

SEQ ID NO: 413619 - protein, 351 aa, unidentified
MSIIGCDVHTRYQVVAWMDEETGEIQVRRLEHDGEEVRRFYTQWPQGTVVGIEATFPALWFERLLAELGHELWVGDAACIRASEVRLQKTDPRDAEHILDLLRTGRFPRIWVPSMEERDLRQLLVHRMKLVRARTQVKNQLHALAMSQGVCRKGRLWSAQGRAELERLALLPWAARRRKELLEWLDRLDEQVRELDRAVEEAGRARPDVALLRTHPGVGMVVALAYVLTVGPVERFPKSRQLVSYWGLNPREHSSGGRQRLGSISKQGNTMMRWLLVEAAQTAARFDPELRRHYQRLKSRRNSGVAKVAVARRLAIRLYWMLRTRHNYAQLVHTSGSPSSAVVPPPAGSKV

SEQ ID NO: 413620 - protein, 411 aa, unidentified
MKMAGIDVHKKVLMVVVIETTSPEEKPERRRFTTLPGDLSRLSSWLRAQDVQEAVMESTAQYWRTVWLELEPHMLLHLAHAFSNRAPRGRKHDFKDAERLVRRLFADELILSFVPNGEQRIWRNLTRMKMQLTRDRIRLQSQMECLLEEMRIKLSSVVTDLLGASGLRILRALAAGETEAKRLAALGDNRLKCTEEQLLDALTGSSQPMHREMLALQLERLQLIDTQIAKLNNLIAQGMKPHQEAVMRLAEVPGLGVDSAQQIIAEVGVQAGTFSSAAELTSWVGTCPGKDESAEQNHSSRSAKGNKYLRRVLNQAAHAAVKKRGSYLQVVFRRLLPRLGYQSAIWAIAHRLCRVVWKILHEGVRFIEKGSEPDPQTKKKRARMLVQALRRLGYDVAITATHLATQNAMQL

SEQ ID NO: 413621 - protein, 328 aa, unidentified
MKVMYERVAGIDVRKDMIKVAVRSPGDKPWARKTEILTFRTFYGVLRAMARELRRRGVTHVVMEASGVYTGPVCYALCEEDFTEVAVVNPAHARALKGHKTDARDCARLAELSGCGLLQGSYIPAAGLKEMRDLSRYRMKTVQARTPEIQRLAKALESAGIKLGSVASEITGKGPVAMIEALISGERRGAVMADLARGRARTAGKLADLSMALEGRFTDHHALMRRLHLDRITAPDAAVADLEARIAATAADWQREIGLLKTIPGSGDIVAWAWIAEIGPAPHQWFASHRKLASWVSLAPGSNVSAGKRKHARTGDAGCGVPKLDQST

SEQ ID NO: 413622 - protein, 357 aa, unidentified
MNTTQKISFADAHFFIGVDMHRKNWKVTIRTGGIELKTFSMNPSPLELIAYLHKHYPDGIYHIVYEAGFCGFWALRIFQQHKVDCIIANPADVPTTNKEKTNKSDPIDSRKLSRELENKSLRGIYIPSPEQEELRMLMRLRFRIVQSQTRVKNRIKGLLYSQGIDIPLRFSGNARWSRAFIRWLESLPMNTSAGHFTLQNLILQLIQLRQHNTIVLRQLRTEAKDQHIAPILNVLLSVSGVAFITAMTLYTEIIDMKRFPDENHLAAFIGLVPSLQSSDDTIYANNLTHRQNSFLRAMIIESAWTAVRDDPAMTLKFKELSKRMNQQEAIIRIARKLVRRIRHVWLTQEHYVYALVA

SEQ ID NO: 413623 - protein, 389 aa, unidentified
MLIQPIAPVAKNEFAPVFVALELSRSKWLVGVGTAQKWTVRRHQVQGGDLDGLLELLGRISASEEKRSGLPVQVHVCFEAGRDGHWLYRALKAAGYDVYEIEPASVSVDRRARRAKSDGVDVDKLVRTLARLLRGEFDACRVVEVPSEAEEDAKRPHREYERLVKEQTSHRNRVKALLFAQGIREFDPMASGRLERLAALPIMPRLKAELSRECRRLARIIDDIAEIEAEMKAEIVPSKKARPASAASSTPDPAQTKVAQLYRLKSIGVHFSTVLVREVYYRTFQNRRGVGQYIGLAPSPFQSGDMARDQGIAKAGNKRARKAMIELSWLWLHHQPDSALSKWFRRRVGDQKGRVRRIAIVAMARKLAVALWRYLETGLIPEGAVLKRA

SEQ ID NO: 413624 - protein, 257 aa, unidentified
MKKKFNYETIMGIDISKKTLDICLTNNNEPIFQTKIDNTAQGLKSILKKLKSLHIRLEETLFCCENTGIYTSPLLFFAQKHTLNLWVENPLSIKRSLGLTRGKSDKADAHRIAQYAYRYQDQYRPWTPARERIKNLETLWKRRKSIVKIQNQLNNKLKEIKSMQGETAYNKEKSAYKGILQGIKKDITKIEKELKEAIASDKELKNLHEIITSIDGVGSVTATYLIVLTDGFKTLNNPRKSACYAAVAPFEHTSGRV

SEQ ID NO: 413625 - protein, 343 aa, unidentified
MKKYAGLDVSMEETAVCVIDDEGAIVAEAKVASDPAAIAGFLAPWRNELARVGLEAGGLSPWLCHGLRELDVAAICIETRRMKAYAKASPVKTDRRDAQLIALAMRAGLYREVHVKSEDSQKLRLALTARQTVLRQARQLQGKVRGDLKPFGIRLGKVGSGGFAGRVKELLAARPDLWALVRPLIELRAVLLEQVRAYDRLLRGFARTDAVCRRLITAPGVGVLTAVGFRATIETPDRFRRAADVPVALGLTPRIDQSGERERCGAITKAGDQLMRALLFEAANALLTRTRRSCALKRWGLALAKRRGMNRARVAVARKLAIILLRMWRDETEFRFGAADQAA

SEQ ID NO: 413626 - protein, 432 aa, unidentified
MIAAIIERCAGIDVGKKFIAVCVMTGPADGEARSETRIFGTTVAELKQARSWITEEQCTHVMLESTGSYWKPIFNILEGQVKVALANPQEVKARKGHKTDQKDAWWLAHLLRHGMVTPSFIPPQPQRELRDLTRRRRKLIQTASAEKNRISKVLEDANIKLGNVLSDVFGVSGQLMLEALLQGKTPETTELADFARGSAKKKIPALVAALQEHQMREHHRQMIRFSVEHMRFIEEQLVDVDQLIRAKIAEAGYTKQWELLRTLPAVRENAAVVLAEMGPDPAQFPDEKHLGSWSGLGPGNNRSAGRNKSSHTNKGNRWLREALTESAWAVSMMKTGHLRDKFWRIAAKGPPQRSRPIAVVAVAHDLLKLAYFVLQRGTPYEERRGQPMTEEQKQRLIRHHIRRLGKLGVPVRSSRPSAAPTHSKSKTSPSNR

SEQ ID NO: 413627 - protein, 348 aa, unidentified
MIVIGVDTHKRSHTLVAVDAVTGGMLGERTVPASDDGALAALRSVVALDENRVWAIEDCRQVSGRLERALVAFGERVIRIPPALTANSRRSARERGKSDRIDAMAVAHAALRDGVDSFPAAFLDEQAMEIRLLCDYRDQLVNERTRVANTLRWHLLAIDPELEASLRPSGLLGPRVRARVARRLARLGGGSQVRIAKALLRRVSEITRQELQLRAEMTELITAHSPQLLAERGCGTITAAILIGHTAGAERFPTDASFARHTGTAPIPASSGNTTRHRLHRGGDRQLNRALHMIALSRARTDPLTRAYLDRRAADGKTKLEAIRCLKRHLARHFWKLLFQNPQLPKLT

SEQ ID NO: 413628 - protein, 337 aa, unidentified
MMIHVGVDLHQRFCYCTAVKASGEVIGQRSVVNEAESLQRYMRSLPQPVQVVVEACGFWPAFKKAVENEVERVVMVHPQRVKAIASARLKNDRVDSATLAHLSRCDLLPEAWMADEATRQLRLQVRLRVTLGRERTRLKNLLQAVLHQEGQRKPVSDLFGKRGRQWLASLELSAAARQVVDTYLPLIDDLDGRIAQQERQLAALAKEDARARWLQTIPGIGSYSAMVILAEIGNIGRFPTKRSLASYAGLVPRVHESAGKRSYGSITRAGSETLRWILLQVAQVAARHDSAASRFYERLRKKKRPQVAKVALARKLLCAVWALLRHGVCYDPQVFAA

SEQ ID NO: 413629 - protein, 463 aa, unidentified
MAARKPKRMGAQTVEDEDYQLRYERVAGIDVAKGSAMVCLRLPPGPGKVRRTSRTWEVMARVPDIEALAAELKAARVERVSMESTSDYWRIWVVVLEGAGLDVQLVNSSQARNLPGRPKTDKADAQWIARLTEMGLLRGSFVPPPEIRALRQYTRQLVHLSQDRTRYWQRLEKLLESALCKLTSVVSGLAGSASCLAMLEAMIAGERDPQVLAGYARGPMRSKHAALVKAFTGMQFGPEHVFSASSDLRMIKMLDAEITGLEQQVRDHLAAIPAAWGTDADGVTGPGAGTGPDAAVLPAVDRLTEIPGVGPAIAAGLIAEIGLDMSRFPTPHALVSWVGMAPVPNQSGPRTGRGRKGHGSSYARRLAGQAGNGAARTDTFLGQRHRRIRSRPAGGGWKKANVAVGRSIIIIVWHLLKDPAARFTDLGPDHYAKHTDTNRKARNHKRQLEALGYDVILTPREAA

SEQ ID NO: 413630 - protein, 341 aa, unidentified
MSGAYEGRQIVGIDLHRRRSVVVRMTETGERLETVRISNDPDYLRQVMVRAGEAPEVVLEAAYGWYWAADTLAELGATVHLAHPLGVKMFSLRRVKNDARDAADLADLLRMGRLPEAWIAPPATRELRGWVRHRAKLVALRSCLKNQIHAVLAGAGVAVPMSDLFGPGGRELLAATRLRVESGSRIDSLLRVITVLDFEIDLYARLVAGRLRSDPGYVAIQQIPGVGPVLAAVFVAEIGDIARFARPEQLASWAGLTPKHHESDTTVHRGRITKQGSTLVRWAAVEAVQRVSAHTRLGQTRDRIGERRGRNIGTVAAARELITLVFYGLRDGHIRCLPRPA

SEQ ID NO: 413631 - protein, 411 aa, unidentified
MDVFCGIDWAEGHHDIALADRDGQLLARRRISDDAAGLAALLGLLAEHGDSAEDPIPVAIETPRGLLTACLRATGRPVYPINPMAVARYRDRHSVAGRKSDHGDSFVLANVLRTDMHAHRPLPADSELAQAIAVLARAQQDAVWTRTGAHNKLRSHLREYYPAFLAAFAGSRGGIMRPEARVILAAAPTPAAASALTLAQLRGLLRKAGRSRGIDAEATRLRGAFCAPQMRQLPLVEQAMGRQAIALLGQLDAACAAADDLEQAVIESFNQHPDAGIITSFPGLGTLTGARVLAEIGDDRSRFSDAKGLKAYAGAAPVTRASGKTKAVMHRRVKNQRLAAAGYVWAFSAITASPGARAHYDRRKDAGDRHTAAQRNLFGRLLGCLHTCLVTGQHYDEHIAFPASTELPAAA

SEQ ID NO: 413632 - protein, 342 aa, unidentified
MGYFAGLDVSLEETAICIVDEAGHIVREARSASEPDALVAFFGACGLEMERVGLEACSLTAWLHAGLTEAGLAAICIETRQAKAAMGAMPNKTDRNDARGIAQIMRTGWYRAVHVKSPSCRSWRALLTARRMLVNKRRDVENGVRALLREAGLKVGTPSRRDFPARVRELTGDNPVLAELGQSLLSVIEVIDKEVVRLTRRALDEVKAEPTCRRLMTVPGIGPLTALAFRATIDQPGRFRKSRDVGAHLGLTPRRYQSGQTDVQGRISRCGDELARTALYEAAHSLLIRSSKWSALRAWGLSVAKRRGMARARVAVARKLAVILHRMWADGSEFRWGKQAVA

SEQ ID NO: 413633 - protein, 341 aa, unidentified
MKVTTISIDLAKNVFQVMGFTSTGKVVFNKRLNRAQLSHFMQMQLSCRVVMEACYSSHYWGRTFESMGHTVDLIPAQHVTPFVRGNKNDSNDTLAIFEASSRAFIRFVPIKTQAQQEILILHRLRERLLSARTAASNQLRGLLADFGIIFPLGKVAFNEKIQTLSVDESLSVTLNWLVKDVYTEYKTLSVRIKAIEKQLKTDIEANPLGQILLSIPGIGYLNASAFVASIGSGQAFASAKDFAVWLGITPKQFASGNKSVMGGISKRGDQYLRKQLIHGARAIISHAGKKQDALSLWITQLRAIKTFNCTAVATAHKLARIMWTLLQKQCHYTPQVVRGVA

SEQ ID NO: 413634 - protein, 430 aa, unidentified
MKSNTQNAKIEAITEKTLVLGIDVGSETHYARAFDYRGIEYSKKPFKFSNTEAGFVTFKEWILDLKDRHEKEKVVPGMEPTGHYWFNLGKFLQDNEMKPVLVNPHHVKKSKELDDNNPTKNDRKDPKVIAGLVREGRYMIPYLPDGVYADLRTASNIRFQLQAELTRIQNRISRWFNIYFPEYRTVYGKPDAKSGMLLLKAAPLPEDILTLGIDGVNQIWRDAKLRAVGKARAKTLIEAAEHSVGSKEGAVSARMEIRMLLEDYESRNMRLQEVMVLIEELVKGIPMAEKLLEIKGVGIRTVSGFLAEVGDISRFNNPKELQKLAGLALVENSSGKHKGGTTISRRGRKRLRYLLFEAAMSLVAKNPEFRELHNYYTTRRRNPLKKMQSLMAVATKLIRVFYAMLTKGVDYDPKKMVSDIKRPAVYLQAA

SEQ ID NO: 413635 - protein, 414 aa, unidentified
MEVVHTHCAGLDVHKKTVVAALMISRPDGNVHKEVHTFGTMTADLLELSDWLSMHGVTHVAMESTAEYWKPVFNILEDSFEVLLVNAHHVAHVEGRKTDVKDAEWLAELLRHGLLKPSFIPPVGQRDLRDLTRYRTTFVRERATLINRVQKLLESANIKLASVATDVMGVSGRAMLDAILEGTASANEMANLAKGRLREKRPALIKALQGRVKPHHRFVLAELLCQIDGLDETIARFDEQIQAYCAPFEEAVTRWDSIPGVSRCAAETIVSEVGADMDRFPTGDHCAAWAGVAPGNNESAGKRRSGRSRPGNKALRSVLIQAAHAAAHTKGTYLSAQYHRLAARRGKKRAILAVAHSILIIGYNLVKHKDVYRELGGNYFDQIKPQATIQRLLKRLEDLGCQITIQQEPVPAAA

SEQ ID NO: 413636 - protein, 461 aa, unidentified
MRNNRKSGDRPGSTRPIEGLPIVRGKVAGVDLGSERHWVCAPGLEGSGREVADFGATTPELVRMAEWLKVRKVESVAMESTGVYWIAPHEVLEKDFDVLLVDTRQLARVPGRNKKTDPRDCEWIQRLHSCGLLNGSFRPQEQVCMLRTLVRDKANLVCESADWLRRMQKSLDQMNVRVHRAVSDLNGVTGMAIVRAIAAGERDARKLAQLRDRRCRQSKEEIAEQLSGHWREDHLFSLRQSLQMYDAIEERITAYEQEILKKLATMEVEEHPGGVVPPVKNLEKGKAIKKRGQEPMRQALYRMSGVDVTQIDAIGVETVEVVLSEYGPDLSRFPTEKQFVSHATLAPRVPKSGGKPLKHKKRNSASTRVAAALRMAALSLRHSATALGAYYRRLARRIGGDVAVFATARKLATLIYRLLRWGQPYVDEGVEAFEKRYQQQHIKGLAARAKELGYQLMPTTT

SEQ ID NO: 413637 - protein, 317 aa, unidentified
MSKYTTVCAGIDTGKHKLDVAIDGGARRVQVDNNSEGHRSLSAWLRQREVERIGIEASGGYEQAVVLSLRADGFVVIVFQPVQVRAYAKFVLQHAKNDNIDAVLIARCTAAAIDIHEPPDARLAPLAQHLTMIEQLTEDVGQLKTRREACREERIREFWKQEINRLKVLLNRELKQLVTVIREYRDLANRLDLIASVDGVGLRTAVAILVRMPEIGRVTREQAAAIAGLAPYDDDSGLRRGSRHIKGGRQRLRQSLYAAALPAVFYWNPQLKAFYRRLLVAGKPHTLALVACARKLLIFVNTVVARGTSWRSSAVTT

SEQ ID NO: 413638 - protein, 412 aa, unidentified
MDVVYQRCAGIDIGKRTAKVCVRVQGRGSQSTVSTVTSWSSMMPQILKLRAKLVNEGVQRVVMESTSDYWRPFFYVLAEELDVILVRASDVKAIPGRKSDVSDAEWLADLAAHGLVRASFVPPQQQRQLRDLTRARSRLLADRAREVQRLEKELEDACIKLAAVVTDLQGVSARLMLQALIEARDDPAAMADLAIGRMRTKIDQLTEALTGRFNDHHRFMVTFRLKRIDAATADLAELDARIDALIVDAGFDPARDLLLSIPGLGPHSADELLAEIGPDMSVFDAPEQLAAWAGVAPGSHESAGKRKNAPARRGNRYVKRALGIAAKSAARKKTGFLAARFRRLAARRGYQKALVATEHSMIIAIWHMLSTGEYYHDLGGDHYHRLIPARIIRRNIAELEAAGYTVTHQVAA

SEQ ID NO: 413639 - protein, 373 aa, unidentified
MSTNLRNVGLDVHAERIAVAVAEPGGEVRPLGIIPNRPEAVAKLVRKLGPREQLRVCYEAGPCGYVLYWQLTKLGVHCDVVAPTLVPTKPGDRVKTDRRDAAKLAHCYRAGDLTPVWVPDAAHEALRDLVRAREAAKQDQLRARHRLGKFLLRHGRRPPEDVKPWTQRHRRWLDALQFELPAHQATLADYLYEIDHAAARVARLDAALDEAVQAAPAPMRAVIAALQTLRGIRQVIAATIVSEVGSLSRFPHPRELMGYSGTVPSEHSSGSHVHRGAITKTGNAHLRRVLVEAAWAYRFSPKCAKGLRQRQRGQPEVITALAWKAQQRLCSRYRRLLARGKPTPHVITAIARELVGFIWAIGVAVEREQAMAA

SEQ ID NO: 413640 - protein, 349 aa, unidentified
MNEKYVAMDVHKASVAIGVRDGEGKYIMESIVQTKALTLLEFVKGLSGTIHLTLEEGTQSAWLYDLLKPHVAECVVCNPRKNQLLKEGNKGDRIDVRKLSQLLQAGMLRPVYHGDHGTRALKELVHGYESLVRDRTRVKNRLKAIYRGRGISCEGEQVYHPQKREQWVGQLGEWGIEQRAVSLYSQLESLNTQVGEAQRQMLAESRKHKATSILRSLSTLGPISVAMIIATCDTPHRFRTKRQFWTYCGFAVVTRTSSDHYFENGELHKRRKPGLTRGLNRNYNRRLKWVFKNAATSGSRRGPFKPFYDQLLAKGLKPDLAKLTLARRISAIALAMWKKGERFDPKKLK

SEQ ID NO: 413641 - protein, 483 aa, unidentified
MKPKRVEKNKKASCRPTPNNWHKMNRKQRREMTRKIQSEDLSLEVVHPDAAGIDIGNESQYVAVPATRDGQPVRRFGCTTAELKAMADWLKQCRIRTIALQSTGVYWVSVYDILEEAGFQVYLVNARETKNLPGRKSDVQESQWLMKLHTYGLLRNSFRPSQEIRTMRTYWRQRNDLVRAAGRHIQRMQKALTQMNIQLANVLSDVSGMTGQAIVKAILAGERDPYQLAALRNWRVKASEEEIARSLEGNWQNDLLFVLQQEQEGYEFCQKQMAECDQRLQQYLQQLEDRSHGAGLPEEKRKERLRKKKQGNAPQFDLRAELFRMTGTDLTQIDGIDVTTTMTILSEAGWDMSKWKTEHHFVSWLRLCPDNRISGDKIIGKGRLPTNNRVTNALRMAASTLRLSNTYLGAQFRRLRTKLGAPVAIKAMAAKLARLVYRMLRYGMQFIDRGAEFYDAQHRKLQINYLKRKAANLGFQIIESPAA

SEQ ID NO: 413642 - protein, 343 aa, unidentified
MEQYIGLDVSQKETAISIRQGSSRIWRGKCASDPTVLAAIIRKQAPHVKRVVFETGPLSTWFYHSLSAEGLPVVCIEARHAQKILNETLNKTDANDADGLARLAKAGFYKAVRVKGFDAMLTRTLIGVRKQVAGMSIQLSNQIRGVMKTFGLIVPRSKGQVFEGHVRELLAGNDNLAKIILPLIDAWRDIRKHVANLDRQLLAAARESKAAKLLMTIPGIGAITSLSFSSAIEDPDNFKRSRSVGAWLGLTTRRYQSGEIDYDGHISRRGDSHLRSLLYEAAMVMLTRTKSRNDSSLKDWGLRLRERLGVKRAAVAVARKLAVIMHRMLKTGEPFNRLVVVPA

SEQ ID NO: 413643 - protein, 370 aa, unidentified
MKKNSTRPQSPKRAVARSKGPITIGLDLGDKTSRYCVVGDNGELVSEGSVATSRKAMAQRFSGMGRCRIALEVGTHSPWLSRMLTGLGFEVIVANARQVQLISASSRKNDRMDAHMLARLARVDPQLLRPIRHRSEQAQADLMTIRIRATLVEARTSLVNAARGFTKAMGERLPACDTDSLGVEKLEALPAALQQRLQPLLEQIEALTAQIKKLEGQLEQIARIEYPETQLLRQVSGVGTLIALTFVLTVEDRERFPKSREVGCYVGLRPRQSESGQSQPQLRITKEGDRYLRTLLVQGAHLILNRRGPDTDLKRWGLKLAQRGGKNAKKRAIVAVARKLAVLLHRLWVCGEVYEPLRNSRPTPASKQAA

SEQ ID NO: 413644 - protein, 341 aa, unidentified
MNRIAYFIGIDVASEDFTAAILTTPEKPITMREQIPNTSDGFRSFEQWLASCKVTPRNSVVCLEATGVYGEALCYYLAAKSYRVAVEPPLKVKRAFDESGHKTDAVDSRQIAEYAYRFADELTFWQPNDDLVEQIRVLLSTREHFSVQLIANQNTLQALKRKPVQTPVANQAFGRAIDRLKEDIKAIDQEIKRLIDQDPKYGQMIHLLTGIPGVGLLLASNLLVITQGFTRQVTARQLAAYVGICPYQYTSGKSVYKRARSRHYGPSRMRKLLYLAALSLRTHNQHYQTYFLRKVAEGKAKRLVLNNIANKLLKVICALIRDQTPYITNYRSVNPTLLKSA

SEQ ID NO: 413645 - protein, 349 aa, unidentified
MKVTRIGIDLAKQVFQVHGVDEQGKKVFSRQLRRHQLLAFFGNLPQCLVGMEACGSSHHWARKLTELGHEVRLMAPQLVKPYVKGNKNDANDAEAICEAVSRPNMRFVPVKSVEQQDILALHRVRSELVRQRTAKVNQMRGLLAEYGVVVMQGIGQLRRAVPVILDSADNGLSADLRMILMGLREDLVYLDDRVSELDRSIQKLAAHNAAARRLQTLRGVGPITATALVAALGDAHQFKRGRDASAWAGLVPGQHSSGGKDRLLGISKRGDTYLRTLLIHGARSVVKTTQDKQDGLSRWVQSLCARRNKNIAAVALANKTMRMAWALLTRGTEYEADHVRALEPEMAPA

SEQ ID NO: 413646 - protein, 423 aa, unidentified
MKKIRTHAAGIDIGAKKVYVSIEDLPVKSFDTFTQDLEATGVYLVAHGIETVAMEATGVYWVILYDILVSQGLDVWLVDGAGTKQVPGRKTDVKDCQWIQQLHSYGLLNKCFVPDIRVQELRAYQRLREDHIRSGAMHIGHMQKALILMNIRLKEVISQIHGTSGMRIVRAILSGERNAEKLALLCDQRILKTKKEWVIRSLKGHYSEAALFELGQAVACYDFYGEQIAMCDIKLEEVLKKMDLDGTPKPRSKGTRKAIRHNRPDIENMGGHLLGIFEGKDATVLPGITDYNWMQLLSEVGTDLGKWKSEKHFTSWLGLAPKQHNSGKMKRNYKPKGAPRAGLIFKQAAVGLLNSKHIALGAFGRKIRAKKGGLVAIKAVARKLAELYWKLFVKGLEYVENGIQKYQEKMLLNKQRAVTRMAQ

SEQ ID NO: 413647 - protein, 355 aa, unidentified
MNDAKYIGLDVHQATISATVLDCTGKLVMESILETKAATILQFIHGLRGSLHVTFEEGTCAAWLHDLLKPHVTRVLVCDPRKNALLKVGNKSDRIDSRKLVELLRSNLLRSVYHEQTGVRTVKELARSYLTITKDLTRVMTRLKAIYRSWAIPCAGQQVYAPRYRAEWLAKISEAGMRRRAELYYQQLDALRPLHQEARRGLLAEGRKHNALKLLRQIPSIGPIRAVLLLALIQTPHRFRSKRQLWAYSGLALETRNSGEYCMVRGQLKRSKKVVAIRGLNKNHNHDLKNIFKGAAIRAAAVDGPFQEFYAAWLAKGMKSAMARLTLARKIAAITLIVWKKGVRFDAEHLKQQAA

SEQ ID NO: 413648 - protein, 356 aa, unidentified
MNTHRIQDFVAKGKEVFVGLEDSKTTWKIAVRSEKMLIHQASMEAKYPVLKKYLENKFPECTIHLIYEAGFKGFNLYDQLTEDHIDCVVIPPHLVTEPKVNRVKTDKRDARRLALVLENHDFKHGCHVPDKERREDRQVSRTLMAIQKDIIRTRNRIRKLLDFHGIEASFPDKWGRKEFMALKELSLSEPLRISFEVFLTELEQLWAHRKTLTKALLGFCKKERYQKAFEIAKSVPGIGWYTAIRLVLEMGEDLSHFASGKKIAGFVGLTPGEYSSGETIWKGRITGMGSGFIRATLIENSWAAIRKDPVLLNKFRRVWRGTGTKKKAIVAVARMLIVRLRACMVSGTPYVTGVAR

SEQ ID NO: 413649 - protein, 444 aa, unidentified
MQIINPHAAGIDLGSKSHWVCLPGEGSVKDRVKEFKTDTPALEELADWLSMAGVTTVAMESTGVYWIPLYEILDARGYEVVLSDTRTVSNVPRRKTDVLDCQWIQQLHACGLLTGAFRPGEDIVKFRALVRKHTVFTQKAADWLRRIQKELDQMNIRVHRAVSDISGATGMRIIHAIVEGERNPAKLAEMRDPRCSLSKKEIQRQLTGNWRDEHLFNLELDLKTYEYMLGCLSELEEKIRELLADLQTVSEPPPPPASKSKEKQINKRGEEPLRQSLYMMSGVDLTTIDSIGVGTAQTILSEVGPDLSMFPSEKHFISYLRLAPGMDVSGGKAIRGKKKKPQLGSSRTRKALMMAALSAGKTQTALGAYYRSIAIRRGPGVAVFATARKLAQYIYRLLRFGKEYVDIGVKEYEERNYDRRLKSLQTRAMQMGYILTSIEQPAFT

SEQ ID NO: 413650 - protein, 344 aa, unidentified
MIYYAGIDVSLRTVNICVIDDDGELLAETKLASDVQDIVAYLDDLEFDVESIGLEAGTLTQYLTYGLQSAGFEVVCMEARQVKGALSAMRNKTDKHDARGIAQILRSGWYSRVHVKSMESHHIRMLLSSRKAVLSKCVDLENEVRGLFKIFGIKLPPKLGHGAFDVAVRDIIETDETLSQALLPLLDARLFLYQTFRVLDNRTRKMAHADPVCVRLMSVPGVGFITALTFKAGVDDPTRFKRSRTVGAYFGLTARRFQSGEMDIDGHISKCGDADVRATLYTAANALLTRSARWSPLKAWGMKLAKTRGHRRAVIAVARKLAVILHRVWIDDTQFRWGTEGARS

SEQ ID NO: 413651 - protein, 269 aa, unidentified
MRNAVGLDISKLTFDATAIVGNAEYSAKFDNDSKGLDQFSDRLKSLGCQNLHICMEATGNYYEEVADYFAQYYSVYVVNPLKISKYAESRFKRTKTGKQDAKLIAQYCRSAQESELVKRQKPTDEQYRLLRMTAAYAQIKSECAAMKNRHHAAKDEEAAKAYAQIIKAMNEQLEVLKEKIKEQTEKPNCKEGVKRLETIPAIGRMTAAVLFHHLTSSKFETSNKFAAFAGLSPQQKESGTSVRGKGKLTKFGNRKLRASCLCRPWSHTG

SEQ ID NO: 413652 - protein, 353 aa, unidentified
MSVYVGVDFHVHSQTVFWCDTQDGVVNQRRLDHERDDVSIFYAQWPTPVTVGVESSGYAQWFHRLVQEKGHRLLVGDAHAIRQFAKRRQKNDRRDAELLLDLLLHDDFPAVHVPAPVSREILDLLHHRERLVRMRTMLKNNLQAVALNHRVARGAKLFSAQGRQTLASLPLSSAEDRQRRDGFQLLEDLEQRIADLHAELELRAIPDIRVTRLRTHPGVGLLTGLAMVHTLEPLTRFQEGRQVAAYCGLDPVEHSSGETIRHRGISKQGNRLLRTLLVEAAWSAIRPHQDSDLRRFYFHLASHKPAGVAIVAVARKLALRLFRMWKNGIDYDEFRRRGRDVRCARGMTEANSA

SEQ ID NO: 413653 - protein, 323 aa, unidentified
MSDPVILGIDIAKQKFDAALLMGGKLKHKSCKNSTEGFELLSQWLRKQRVDRVHACLEATGNYGDELAFYLHEAGHTVSIVNPARIKGFAQSELLRSKNDKMDAGLIVRFCLAMHPEPWAPPAPEIRALQALVRRADALVTMRTQELNRLGTAPVTVEPSIREHIAYLDEQIEKIKQQIDGHIDDNPELKSKKDLLHSIPGIGPATIAAILSEISIFERFDQVRKVVAFIGLAPKEALSGSSIKGKPRLCKIGHARLRKALYMPALVSIRYNPMMIGFYKRLRSKGKNGKVIVCAVMRKLVHIIFGILKSGKPFDPYYKPHFA

SEQ ID NO: 413654 - protein, 440 aa, unidentified
MSNLLVVDPRAAFVDVGSEQMHVSVGGERPEVFGAVTSQLHALGDWLLAQGVQSVAMEATGVYWLPLYALLEAAGLKVVMVNGRHMRNVPGRKTDMTDAQWGSTLHMHGLLRAGFVPPAHIRRLQDYLRLRAEHVSAAAGHVQHMQKALERMNIKLHDEISDLAGASGQAVVRAILAGERDPARLLALCDKRIQRSKGERVKESLRGTWAEEHLFGLAQAVQSWDHYQSQIKECDRRIEVLLQEYDVDDVPPADGAKSKPRKGPGKNAPEIPQLREILTHICDGHDLTILPGHTEYSVLQLIGEVGTDLTKWHTEKHFTSWLNLAPGTHQSGKRKRSVKRKRNRAGRLFCVMARSLARSKHIALGGYYRRMAARRGGLIANVALARKLATLFWRVMVKGIDYVEHGLQDYETKVLQTKQRALRRLAQQLGVNITPVPGTP

SEQ ID NO: 413655 - protein, 364 aa, unidentified
MDVHLRSTTVCALDAETGEAVTRRFRGNPWGEVAEWMSGFPGPSLAAYESGYLGFAPQRELSGLGVDCVVAAVSKVPRSAADLSSKNDRNDAARMAKAILAHDISPVWVPSPEVEGIRDLAGAHDAATARLAAAKQRLLAFLARRGYVYGGTTPAGNPRRYWTYGFLRWLDGIHPADDGGIRALAALRSEVEAAAETRDDLLAEYRAAVAAGPLSAEVEALQSIKGCGFALAAAFASEVGDFSRFRSGRQVTAYFGLAPKQRSSADSVRLGGISGAGNALVRKLAVEGSWCYAQAGHQPKLMPKGSGVPLEIRMHGRKGSERLLRRRGEMLERGMPQAKANAATAAELVRWLWALGTMCREAGE

SEQ ID NO: 413656 - protein, 386 aa, unidentified
MKTVAGLDVHKDSVYLCILRENGEKIERVYGVLTPQLDSMRDFMAENEVSEVAMESTSVYWIPIWRVLVDSFELKLVNPYFIKQLPGRKSDVKDAQWIAECVMKELIRGSFIPPPLIQQLRLYDRRIFELNAELVRKYSKIDAILQRCNIRLSNYVSNTDCKSYKNVVKRISEGVTSPQELLMLVHKRIINKHGEDTILAALTGVVSEAEIDMLAQYVAESALLEDNKNKCIEKMREICNREFEEQMKNLQTIPGVSERSALTVLAEIGPDVNAFPSAKHLVSWCGFNPRNDESNKKIKSNKITHGNRFIRIASVQCAWAASRTKDCYFSKFYAFHTQVRKKFKLKVVVAVARKILVCIWHILKFNVSYKDFEPQKSVAKDCTQLA

SEQ ID NO: 413657 - protein, 342 aa, unidentified
MAIVVLGIDLGKNSCSLAGLDSAGRVVLRRRLRRGSVEGFVARLPRCVVAMEACCGAHHLGRVFSGHGHQVRLMSPEYVRPYVKAQKNDDRDAEAIAEAATRPTMRFVRVKSELQSDVQALHRARERLVAARTGLINHLRALLLERGITAPQGRAKLAELLCCFADEDDARLSDRIRLLVEDLRREWRLLDERIAAFDREFVTMARQDEAARRLTTIPGIGAINATALAAAVGDAASFARGRDMAAWLGLTPRQRTTGGKPRLLGISKRGNRYLRKNLIHGARAVLPYLVDRDTPLGRWLRKLSSRAHKNVVVVALAAKLARIAWAVLAKGCVYDAGHLEAA

SEQ ID NO: 413658 - protein, 415 aa, unidentified
MFDVLYQRCAGLDVHKKTVVAACRYLDEHGELVIKTRTFRTMTRDLLSLLDWLIEIGCTHVAMESTGEYWKPVYNILEGHCELLLVNANHVKNVPGRKTDANDAQWIAQLLQAGLLRASFVPPAGQRELRDLTRHRSNFVRERTNFVNRLQKVLETANIKLASVASDVMGVSGRAMIDALIQGQLAPADMANLAKGRMRIRKDDLEGALEGRVKDHHRFILTELLAQIDYINQTIDRFDKEIEKLMAPFEEAAALLDTIPGVAIEAAQIIVSELGIDMDRFPTEGHAAAWCGVAPGNRESAGKRRPGGTRQGNQPLRKVLVQAAHAAVRTRGTYLSALYKRVAARRGKKRAIIAVAHSMVVSAYHMIKNKVAYNDLGSNYFDQRNKSAVAERLVRRLSNLGLIVTVHDPEAVPAA

SEQ ID NO: 413659 - protein, 330 aa, unidentified
MIVIGVDVHKQSVTAVAIDETGRMLDERTISVGSEELLSWAEELAEERLWALEDCRRLTRWLERQLLEAGEELVRVPPKLMAPERRTGKGRGKSDSIDALAVARAALREPGLSRPRPDEEPFRELKLLVDHRDAIVGERRRVHQRLRWHLHQLDPTFAVPLRMLARKSHLERVGRWLARQEQELQVRLARELIVSCRSLDRTIAELDRELERRTAELAPALLELPGCGPITAAKLLAEIGPVGRFQSDAQLARHSGVPRSRRAQAGSSGTGSTAAATGNSTPRSTGSRSPRRASTPPHRLTSSANASKAKAAAKRSAASNDSSSASSSTH

SEQ ID NO: 413660 - protein, 416 aa, unidentified
MDRRRYNVCCGADIHKKFLIATILLLDGTKLTKRFSMDLKSLFEFRDWVIANGCEAVAVESTGSYWVPIYRVLEGYVELIVANAYRIKNVPGRKTDTIDSEWIAELCLNGQIKPSRIFAKDARDLRSLTRARERYVDDKTRVKNRIHHILDSNCISISSVLSNIFGKVGRYVLNCLLEGIDIDEIIEGIPVTRIKKKSDQIREAIAGQLSGTDIILIRGYLDQIDAIQKNMEELEAEIRKRIAPLRKNLAIVMSVPGIGFISAAVILAEIGDFNDFDKAEQLAAWCGLVPSVYNSADKNYTGRITKQGSGHIRRILVEVAHVIARTTGKSKLKNFFLRIQAKKGTNIAAVALARKILCIVHHLLTVQEMYQEEERDKDDEVERLHIPKQMMSLDDMIRYVAKAGYEVRKRTPGAGG

SEQ ID NO: 413661 - protein, 442 aa, unidentified
MRLLNANANEHPLRIKLSAHIGTGIIMELQRNNVCGIDVHKRFLIATILSRDGKKDTQRFSVTLEDLLKFRDWVIENGCEQVAIESTGIYWHPVHSVLEGTMDLIVANSYKIKHTPGRKTDVSDSEWIAELCLNGMIEPSRIFPKDDRELRRLTRAREGYVKQMTQEKNKIHQSLDSACIKLASVISDIFGKSGMYLLNCVLEGRDIDEIIEGIPSGRLKKKAGQIKESIKSRLEISQVILIRGSLSLMKSIQERINELDGEISARIQYRKNDLAIAMSIPGTGFVSATAILAEIGNYTDFKKPEQLAAWCGLVPSLYQSAEKTILGGITKQGSKHIRRMLIQVAYAISRTKDSKLKKFFLRIQAKKGSKVAAVALARKILCILHHLLTNQEMYIEDRDKKNKRQKPLTPPSPIEMPIKEMIDYIVRAGYVVTKSDSRRGFG

SEQ ID NO: 413662 - protein, 435 aa, unidentified
MTENRLQVGIDFSTRWVDVCLLNPVDDVPVAQQRFPNSLPGYAGVKQLLLETLETHSYGGCAISGEATGMYWLPFFLHLAADADLHAYDAELYLLNPRWVSWYKKCFAQDHKTDPRDAYYIAHRTRTQPPRVSWQPDTDGLALRSYTRYRFHLVETLTREKCFAGAYLFLKANLYRRLKPFSDIFGVTSRALLSDSATFADLTALPVAELAAQLEALSQGTLPDPLRNAQRLQQVLEESFPLDAPLAAAVQHILTATLEHITFLETQIAQAEAWITPALAQYPAIQQLQTIRGFGPTCAAGIGAEIGAVERFLSGTKWDARRRRYRPRNLRDAEDAIAKIAGLWWPRAQSGDFEAEERRMAKSGNAYLRYYLIQGADHLRKHIPEYRDFYARKYAEATKHKHKRALVLTARKSVGLIVGLLHRNEPYRSKEERQT

SEQ ID NO: 413663 - protein, 357 aa, unidentified
MARRGHRAGIDRHPLKKIAADEADLLALLRRWQAEAAKAGQAITRIAVAFEAGRDGFWLARWLRARDVEAHVIHPTSIAVSREHRRAKTDRLDTELLKRAFLGWLRGEPDHCTMAAIPSLDEEDAKRPSRERENLVGERTRLVNRMKAALARLGIRSFRPTLRNASERLDTLRTPEGAPVPPNTLAEMRRDLARLRFVREQIREIEQARLAQLAKAPGERRNTMVCLLARVVGVGVETADMLVNEVLSRTLRDRRAVARYAGLTGAPDESGAKRREKGLAKVGNARVRRGMLQLAWRFLRFQAESSLARWFRARTVDGRGATRKSMIVALARKLLIGLWRLATTGDVPEGVVLRPAA

SEQ ID NO: 413664 - protein, 412 aa, unidentified
MMTAEPAGVTGGVDTHADVHVVAAVCSTSHRLLGVAEFETTADGYVATYDWLASFGPIDVVGIEGTGSYGAGLARFLSEQGVELVEVTRPDRQARRARGKSDPVDAEAAARAVLYGRETGSPKHRNGLIEAIRLHLLVYDAMVRERTAMRNRLHAVLTTAPAQIRQEVAQISESAQIVTLSRWRVRSGDDVVAVACRQVLRELARHIHSLEEQAEAARARLDALTAEAAPAVRDMHGVGAVTAAQLLTAVGDNPDRLHSEAALAKLCGVAPLQASSGKTRRHRLNRGGNRTANHALWRIAMVRRNSEPRTQAYFERRRAEGRSDREILRCVKRFIVRELYQALTRPAAAVPTGAQLRELRHQAGLTQQQLADRLDVIPGTISRIEHGQLRTPDLRHRIHDLLTPANIPQLAA

SEQ ID NO: 413665 - protein, 382 aa, unidentified
MRASTIGTPTAGHCGTIFVAIELSQKSWLVTLHSPDRDRISRHKLEGGDHCGLLALLESVRARAAGKLGSAPKVVSCYEAGYDGFWLHRLLEAAGISNLVFDPASIAVEQRSRRAKTDRIDGELLLRTLMAHLRGEPRVVRIVRVPSVEQEDARRASRERDRLVKEQTAHTNRIKALLRLVGMAVGYPRRRDWLNWLERQRDRQGQAMPPHLQAEVRREHARLMLVRQQLAALEQAPAAQACPVPAAMTERRDLLQRLKALGPAFATTLTNEVFYKDFRNRRQVGAYCGLTSSPWQSGGIDREQGISKAGNPRARLKAIELAWLWLRHQPESELSRWFRSRTANAGKRAKRIGIVALARKLIVALWRYLTTGLVPAGATMKA

SEQ ID NO: 413666 - protein, 310 aa, unidentified
MEAVFVGIDVSQDRLDVHVRPSGEAFGVNRNGKGLEELIGRLTVLAPQLVAVEATGGFETIAAAALAGAGLPLVVVNPAQVRHFARAVGQRAKTDPIDAAVIAHFVEAVKPQVRPVPGEEARLLAELVTRRRQIIDMLVAERQRERRAQSPRVCKSLARHIKALEKELVEVDADIDTLMRGSPAWRDKEDLLVSVPGIGKTLARTLLAELPELGRLDRRHIASLAGLAPFTRESGRWKGQSMIGGGRSAVRSALFMGALVASRCNPALKVFHQRLLAAGKPKMRALIAVARKLLTILNAIIRDQRPWQTA

SEQ ID NO: 413667 - protein, 343 aa, unidentified
MQTIATIGLDIAKSVFLVHGVEATGQVVVRRQLKRRHVLEFFAKLPPCLIGIEACASSHYWARELQAVGHIVRLIPPAYVKPYVKRQKNDAADAEAICEAVTRPNMRFVPIKTLEQQGCLVLHRTRHLLVRQQTATINSIRAHLAEFGIVAPVGRRGVEHLLEVIADANDTRVPEVARACVATLGVQLRQLKAQILEFDRRILAWHRSSEASRRLNHIPGVGPLLATALVASIADPKVFRSGRDFSAWIGLVPRQNSSGGKDKLGNISKRGDRYLRTLFTAGALAVIRYAKIHGTKHRPWLVALLVRRPTKVAAIALANKLARIAWALMTKGSRYRQPAALRV

SEQ ID NO: 413668 - protein, 362 aa, unidentified
MNESTIIVAFDQHAASVVAAVLLPGQQTPSLQPLAADLPAIGRFVMRVARQGAVRCCYEAGPCGFELQRFLTGRQVSCDVIAPSLIPRRPGDRIKTDRRDARQLAILYRASALTAIHIPTEQEEAARDLLRCREDIRADLLRARHRLSKFLLRHGRRFTGTKKAWTQPHRAWLRGQTWPIAALDQTHHAYLRAVDEALARLQAAEQDLRTLLDLAPLRPRVQRLRCFRGIDDLTALTIAAELGDARRFASAPRTMACVGWVPSEHSSGTRQARGAITKTGNAHLRRVLVEAAWHYRHRPFIGAALRRRQQGAPAAVIAQAWTAQQRLYRRYHRLAARGKPTQHVITAVARELTGFVWAALTQ

SEQ ID NO: 413669 - protein, 284 aa, unidentified
MKLTVIGMDIAKHVFQLHAVNPVTGETERVKLKRSQLLEFFTKREPSLVAMEACGGAHHWARQLQGLGHDVRLICARSVRPFVLRNKTDATDARAIWTAVQQPDARFVAIKSEAQQAILALHRLRAQLMKFRIMQTNALRGLLHEFGQTLPEGYQALSKAIPNALAIAAEHLPAILVDSLREQWARVQATDKDIAILEQRLKIALRENQQCQRIAEIPGVGLLTATAAVATIGNPATFRSGREFAAWLGLVPRQVGTGGKIRQLGLSKRGDTYLRTLLMHGARA

SEQ ID NO: 413670 - protein, 435 aa, unidentified
MQVSVLGIDLGKNVCSIVGLDAAGAVVLRRRVKRETLIGLAAKLPRCIVGMEACCGAHHIGRLFANQGHDVRLMSPEYVRPYVKAQKNDDRDAEGIAEAATRPTMRFVELKAQDQLDMQTLHRSRDRLVGERTALINQLRAILLERGIVVPQGKRNLERHLAVLLDGEEAPGMSPRMRLLIADGRAQWQELDYRIAVFDAEFAAFTKENEDAKRLATIPGVGVMIASAMIAAIGKAEAFEHGRDLSAWLGLVPRQSTTGGKPKLLGISKRGNKYLRKLLIHGARAALPHIAERDTALGRWVRDCSPACVRMSPLWRWPTNWRGSPGRCCGLLLPGGEAPASLRKIPEAVAIARHFLQADKPVAAICHGPQLLIATGLMVGRTATCYRAVKRELEAAGANYLDCEVVVDGNLVTSRQPADIPAFMRAIFRITRLSR

SEQ ID NO: 413671 - protein, 376 aa, unidentified
MKKYSKFIGLDVHKADISVGMANADRGEASYYGTIENTAHACLKIAKKLSRGEEALLFCYEAGPCGYEVYRHLTKAGYDCVVIAPSLIPKKSGDRVKTDRRDAMSLARLLRAGELTPIWVPDKEQEAMRDLTRAREDMKAMERQSRQRLGGFLLRHGKIYPGRSKWTKTYFRWLESLRFETATQQIVFQEYIDIVKDAQQRVASMEEEMRKALTGWTLKPIVDGLMALRGVDLIAAMTIIAEIGDITRFESPRQLMSHLGLVPSEHSSGERQKRGGITKTGNGHVRRVIVEASWSYRLPARKTAHLRKKAEKASKTVQEIAWKAQKRLCSRYWCLIHKGKLPVESCTAVARELAGFIWAIACEITGKGAVVASLNG

SEQ ID NO: 413672 - protein, 300 aa, unidentified
MKNSSGKLSYVGKKVFVGIDVHKRTYSVVTVVEGVIVKKWTTAAIPEKLAIQLGRYFPGAFIHTAYESGFSGFVLHRVLSKAGINNLVVNPGSIEVAVHNRVKTDKRDALKIATLLEVGRLRGIRVPTQQQEQQRLLTRTRQQLIEDRTAIKNKIRMKCHQMGLINPDDHREMSHKLVGELLSRTNSPELSLVIEAYWQVGKSIETQIKKIEQQLNEQAKVDPNETIYRSAPGIGPLSSRILSNELGDLSQFANERQLFSYTGLTPSEHSSGDTIRKGHITRQGNSRVRYIRVASGLASH

SEQ ID NO: 413673 - protein, 346 aa, unidentified
MLIIGCDFHSRFQQIVILDSETGEFEERRLDHLNGEVRAFYSSLPVPALVGIESTGYTVWFAELMSELGHELVVGNAAKIRASETRLQKYDGRDAWHIMELLAEGKFPRIWLPSDEERDVRVLLNHRHSLVEMRTRVKNGLQALALSRNLCEGRKLWTRAGQEAFAALPMREAPSRRRQDLLALLDQLNGWIRELDERLRQEAEKRPEARRLQTHPGVGPLTALATVVVLGPAERFAEGRKVASYLGLIPSEHSSSGRQHFGHLTKQGNSLLRFLLIEAAQSACRWDAELKRDYKRWAFRHGWAKARVAVARKLAIRLYILLRDQIDYAEFVRRASHAGMPGLRLV

SEQ ID NO: 413674 - protein, 316 aa, unidentified
MISYFVGLDVSQATLDVGFFPEKIPHFQVKNDPEGFAQLIACLSELEVERVLLEATGGYERAVLRALRREGLNVVRVNPKRSRDYTSAMGKIAKTDKIDAQMLAKFAREFEDFPQVEPNLDRDELGELIKLRGNLVQHRDDDKRRIKQTICATAITTYTDHIVYLGEKIKELDEAIEKASNVLDSETARRLMSVKGIGVITCGTLMAYLPELGTVTGRKIAGLAGLAPYNNDSGKKNGPRSIEGGRYRVRCATYMSIWSMIRHDPDFNARYNALLARGKRAKVAAVACMRVLLVHLNAMLRDGTEWKEPKLKVPAP

SEQ ID NO: 413675 - protein, 375 aa, unidentified
MIFVGADVHVRNSYFYATDLEGRRLAHGRRGNELGEIVAFCGELLRATGGEVQPVRFVLESTTNSRAIQRLLRQAGEQAGYPAIQADVLDARRLRIIAESVVKCDAIDARVLNELARSNLKLPICYMPDDEEFALREHLRSRADLVRLRTMTKNRIHAVLHRRGILSPRDGLFTANGRRLLNELPLDEAGRSIVNRYLATLDHLEAVITESDRDLRQVMRRPRWAKPAALLQTMPGIGVITALMILAELGDLRRFHSRAAVANYAGLVPVIRDSDTKHYAGGITHRGSCHLRAVLTEAAWTAVNKVPVYAALFQRVSVRRGKQTAIVAVARRMLEDAWGMLKKDEAFRFVPAPGVETSAAGAPRCDQMIASSVAG

SEQ ID NO: 413676 - protein, 400 aa, unidentified
MMTPDDIDVWVGLDVGKSAHHAHALDHDGNTLYDKPLKQDEKAIRTMLGKLSKHGRVLLVVDQPNTIGSLPLTVARNMGIAVAYLPGTAMRRTAQLLPGDTKTDRRDAHVIAWAALKLPETLRDAGPDDETLAALKLLAGHDEDLAHESTRHVNRLRSLLLQTHPAFERALKGERITRDATLALLERYGGPMGVKRAGIEDVKDWAKSNGLRAGRIIDDMFKAIGEQTVTVPGTLMAETIIPSIAHDIKTIRDRRREVDRQVEKLLEDHPLLTVLTSMPGIGVRTASNILLGIGGDIANFKSSAHLAAYAGISPVTGQSGTSIKGERPSRRGNKRLKNALWQTAFVASTKHPPSVAYYKRKREQGKHHNAAIICLARRRCDVIYSMLKNGTLYQEPALVA

SEQ ID NO: 413677 - protein, 340 aa, unidentified
MSIVMGVDQHRAQISAEWIDTITGELSRARIAPADRAGVRRFLARFRGEGLEVALEATTGWRFVVEELERIGAEVHLAEPTEAAALKGKKKRAKTDWADARHLRELLLIGRLPESWIPPTHILDLRARVRTRHLLSHQRTEWQQRMHAVLYHHGFPQRRNLLSLESRQWIAGLRLPAAAREQLDISLEIIDALDIRLVPFDSELHAIARKQPGCRALIKAIYGVGDLTAVTILAELGDVRRFQNSRDVVRYGGLDITVYQSDEHRAPGHLSRQGPPALRWALYEAAQRARFPASPDRPYYEQLAARIGGNRACLALARKLLKRSYHILKELGDHALAPVA

SEQ ID NO: 413678 - protein, 349 aa, unidentified
MYYMGIDHHKQYSHITVLNEKGEVVKAEKVWNTGREVKGFLSGLDDKISGVVEAGYSHYTMMDLMESEGVSMKIAHPEQVKAIAKAKIKTDKRDSRILAYLLRSNLIPEVYCRDKENQESQRVLRHRVTYVRMQTQVKNRIRALLAKQREEVRQIVVLEENLFKESGRKVLGSLDLPGKDQQMLESLLETLEHLKGKIKLSDALVREILRSSEGARLISTLPGFGEFFSVLVSVEIADISRFDSPGNLHSYAGLIPSTHASGGKIYHGKLVHQGNKWLRWALVEAVWPAVKSDFDIRVYYQRMKKRKGANSAKVATARRLLTIIYRVMKEKRAYIPYKREKHTAAFAHI

SEQ ID NO: 413679 - protein, 347 aa, unidentified
MQVITTGIDLAKNVFQVHGVDANDKVVFNKPLRRSQVLPFFAKLPPCLIGMEACASAHYWARELKKLGHDVRLMPAKDVKAYVKRNKNDAVDAAACCEAVRRPTVRTVPVKTPEQQAQLMQHRVRDLLVRQRTQAINALRSHLAELGIVAAQGYDGLRQLLAIIADAGDARLPENARASLSPLVAQIASCQAEIGAIEKRLLAQHRKNADSKRLETIPGIGILGASAIVATVPDASIFKTGRNFAAWIGIVSREDSTGGKQRLGPISKQGDRYLRRILIVGAFAVIKQARAHPEKYPWLTQLLARKPAKVAAVALANKIARIAWAVLTKKEVYRVRPITATPASLGG

SEQ ID NO: 413680 - protein, 348 aa, unidentified
MLKLKQYVGLDVSLKETSIAVIDENDKLVWRGSVASTPEAIAEALKKHAPRAERIGLEAGQLSSWLYHGLRAKGWFVTCIDARHAKAALSLKVNKTDANDALGLAQIMRVGWYREVAVKGHDCQALRALLVARAQIVSQITTVKNCVRGILKTFGHVLPKKLRATYIATVREIIEGDTTLEPILMPMIRTLAVTMEQLQVYDRAINRFARNSEIARHLMTAPGVGTVVALAYITGIETPARFSSSSAVGAYFGMTPRRYQSGEVDRAGRVSKCGDGMVRGLLYEAAKVLLSRSAKPSDVQAWGHALARRIGKKKATMAVARKLAVILHRMWTTGEPFRWTAVPTPAMA

SEQ ID NO: 413681 - protein, 412 aa, unidentified
MYCGIDWAEKHHDVALVDADGKLVAKRRIADSVAGFAELTAMLAEAGDGDEWPIPVAIETSRGLLVAALRASGRLVYPINPMAVARYRERHSVSRTKSDHVDAMTLANILRTDAHMHRPLPADTELARAIAVLACAHQDATWRRTRAGNELRSLLREYHPGFLAAFAGGSATNLATADARAVLAIAPTPAAAATLTKARIVAALRRGGRKRAAAKLAERLHQDLRRPQLRQDPMVEEAMGAQVLRLLATLNTECDSVDQLGDAVAAAFAAHPDYKIITSFTGLGDLTGARVLAEIGDDRSRFADARSLKAYAGSAPVTRASGRSLSVTHRRVKNNRLAAAGFVWAFVASAHSPGASRLYYHRREHGDRHAAALRNVFNRLIGCLFHCLQTGQTYTEVTAFPRPGTQSESLAA

SEQ ID NO: 413682 - protein, 404 aa, unidentified
MYYVGIDVAKEKHYVCILDDTGEIAVKPFWIYTDILGLRRLIERFADLSLDNDDFIIGLESTGAYSENLYEYITDSDYKAVLLNSYQTAKFRDFSTMKKIKNDTIDALVIAELLFAGKYKESHISNDAYHSLKMLGRSRKSLMDKIKTIKREISTVMATVNPEITKVFPNIFSKTALVVINQYPTAMHLQKATPKKLTRLFRHIKGNNFSEDKARFLIDLAQTSVYAGRAHKARASTITSYIRILELYCQEKKQIELQIKQLIVEEIDIIDNSVENLQSIPGVSDKTISAILGECGDLRRFDSAKAFIGYLGLYPTQYQSGNSLSVGRLAKRGIPIAKHALYMAAVGSVLHNSQLNKLFRDKVSSGKSKKEALIILSKKIAVIMYSVVKHNKPYDSHRVFIPNR

SEQ ID NO: 413683 - protein, 351 aa, unidentified
MPSTAQTAIAVVGIDIGKNSFHIVGLDDRGAIVLRQRWSRGQVEARFANMSPCLIGMEACVGAHHLSRKLKALGHDARLMPARYVRPYSKGQKNDFRDAEAIAEAVQRPTMRFVATKTADQLDLQAMHRVRERLVSQRTGIINQIRAFLLERGIAVRQGQRVLRTELPRILATPPDVLSPRMVRVIEELACDWRRLDERIEGLSGEIEELAKRDPGCERLMSVPGIGPLISSAMGAAIGSGNGFSKGRDFAAWLGLVPKQISTGDRTILGSISKRGNRYLRVLFEQAAWVVLVKVKPSRWQGHGLKPWIEAAKKRLHRNVLVIALANKLARIAWSVLARGRAFEVSKLQAA

SEQ ID NO: 413684 - protein, 386 aa, unidentified
MVFVGIDIAKHTHYACVTNDAQKILSAPFPFENDQKGFAKLLSSFASYAKTDVIIGLEATSVYGENLISYLANLGYEIALINPIETSSVRKKNIRNAKTDKIDAKVICKYLATEEYRFLQSKELQTLQLRGLCRFRQALKKSNSRLKTQLVSYLDVSFPEYPSAFSTVHGKGAYAVLSEFPSASAVSKANITKLTNLLCKSSHGKFNRSKAEELKALAKRSVAATDCDMGFQIKQTITQIQLISAQMNDTEKQIVTVFESLNSVIATIPGIGAINGSMILSEIGDIRRFSNPNQLIAFAGLDPIIRQSGNFRAKTTRMSKRGSGVLRYALINAAWNVSLNNVTFKEYYSEKFSQKGRHYAALGHVAGKLTRVIFAMLKNEMVFNLP

SEQ ID NO: 413685 - protein, 368 aa, unidentified
MKVTTFGLDLAKSVFQLHWVDTATGEVCRRRLRREQVLPFFANREPAVVAMEACGSAHYWGRQVRALGHEVKLIAAQLVRPFVPTNKTDAADARAIWEAVQRPQMRFVALKDEGQQSVLALHRMREQLVKARTMQSNQLRGLLYEFGVVLPVGRERALAELPDKLEQLASRLPAMLLTMLERQQARLAELTKDIVAIELQLKGWAKTNAPSRRLQDIPGVGLLTATAAVAMIGEAKHFRSGREFAACLGLVPRQSGTGGRVKLLGISKRGDVYLRTLLIHGARAVLNRRREPEPWLQKLLARRPPNVVAVALANKMARMIWALLAHGRTYEPGYVSTRPVRGQPVPRDTDARLSSMSCCCRCIPGCAG

SEQ ID NO: 413686 - protein, 413 aa, unidentified
MEGLKPLYRRVAGIDVHRMLHVVTALVERAEGTIEQSTREFGGFKRDCRELARWLVELDVELVVMESTGIYWKSLYSHLERAGIETWVVNAHSVKHVPGRKTDITDSQWLAVLARFGLVRGSFIPPQDLRGLRLLSRYRRKLAGMRASEVNRLHKILDDAGIKLGAVVSEINGMSAKAMVQGLIEGKPIDTLLDMARGRLKSKRDDLRAALDGDLTERHMFLLTHLHAHIDLLDQELAQMDAYLLAAMAPYQWAHRLLQTIPGIDQIASALILIEIGDDMTRFGCADRLASWAALCPGNNESAGKRKTGKTRKGNAIIRYILCECANAARATKSSLAAKYKSLKVRKTHNKVIVALAHKMIRLIYLLLTRQVAYRDPEIDYAAMSARKNAPRWIKQLQLIGQWPGQTLPPANT

SEQ ID NO: 413687 - protein, 354 aa, unidentified
MEKHIIEGGGLTIGIDLGDRWSEGRVLDSQGEVIESFRVRTTEPAMDRQLSRYPQSRVVLEVGTHSPWVSRCVTKHGHEGIVANPRRVRLIAENDSKTDGVDAELLARLGRVDPSLLKPIVHRGAQAQKDRILLQARDGFVRARTQLVNQVRGLAKTLGTRAPSCSTEAFAKRVRSSLPGDLFPGLSTLLDTIEGLTRTIREMDREVERVCETRYPETALLRQVKGVGPITALCFVLTIEDPARFSKSRSVGAYLGLRPKHRNSGEQQPQLRITKGGDRLLRRLLVSAAHYILGPFGPDTDLRRCGLRMAERGGKSAKKRSVVAVARRLAVLLHRLWVTGEEYEPLRHASAEAA

SEQ ID NO: 413688 - protein, 390 aa, unidentified
MKNVRDRVKGSVVCGGMDVHYQFSKVAWCDERGAVVRRERLEHRDREALLRRLKEWPAGIPVVMEASFGWGWLSDLMKEAGFEVRLSNCFKVEKMRKARGWVKTNDKDAALQAKLLLEKDAWWEVWRAPREVRERREWMRHRADLVIIQTQTKNRIHAIFHRHGVFHDFSDLFGGLGRRFLVVLMNGQDRQSVHLPTGAKEALRGDLELQDHLRRALAKIGRVLHGNLERNEVTRWLDSVPGFGLILSHVVMSEVGQLERFGSARRLASYSLLAPQSDDTGEALPPGKKPLGRHLGVRGNRTLKWAFIEAAHGAVRRGGPWREMFDRVTHGGTQNRGRGYIAVARALVDVVYAVWRDQREYQTFRPTQPASGSARPGTGRPFRPMIAASK

SEQ ID NO: 413689 - protein, 426 aa, unidentified
MKVMHDRAAAIDVHKDMVKVAVRVPGERRGTRKTDVLEFRTFYGVLEEMGRELRRRGVTHVVMEASGVYTEPVYYALAGLDFTEVMVINPAHAKALKGHKTDARDAIRLLDLYECGLLSGSYIPAPDLKEVRDLARYRMKTVQARASEIQRLQKTLETAGVKLSSVVSDVTGVSATAMIEALIDGERRGAVLADLAQGRLRTAGKMADLSMALAGRFTDHHALMCRLHLDRIQALGEAVAGLDAKIAPLAARYSREAALLKTLPGFGDVIVAGWLGAIGPAPHQHFATAQRLASWATVCPGNYMSAKKSKGGRTGDGGNYIKPLLVQAAWAAVRVPGRLQAKFNRLVRKFGGARNKGAVKRAIMAIAHTLLKIAYQVLKTGTPYTDLGAGFYASRETPQARQDYLIRQLQKLNPGCVITITPAEAA

SEQ ID NO: 413690 - protein, 375 aa, unidentified
MNTTAFVGLDVHARSIKAVALDAMTGEVRSATFAYDAAAVAEWVRSLDPAAKCVCESGVTGLDLQKRLAALGVDCVVGAVSKMIKPSADRKRKNDRNDAEFLARMLSVGNVVEVWVPDDECEAARGLVRALDDAREDLKRCKQRLSKFLLRHGYAFSETTPTGRRKGNWTAAHWAWIKSISFPEKADDDVLAYYVDAARQAMEDKARLERLVEAEASKPRWKRRVDSVRCLKGIDVTSAADLVFEAGEFSRFKNARSFAAWLGLTPSEHSSGESVRQGGITKAGNKHLRRVLVESAWHYLGCSPHSKDLAKGQVPDPAARRHAAKGVRRLVERRRAMLERGVHKNKANVATARELACWCWAVGCMVEGAQGVTAG

SEQ ID NO: 413691 - protein, 362 aa, unidentified
MLYLAIDQHSKQLTVNLRDEAGNVRLRRQVSTKRKGMEEFAQQLAAYHEPYVAIVEVCGFNDWLLEWLPQHGCCEIVLVQPDQRSKKKTDRRDANSLGELLWINRPRLLGGQRPQGLRRVHIPSARDRADRQLTALRHMVAGRKTRCTNRIHHLLRRHNLEQDCPTKGLHTLKAHKWLRQLPLPALDRLELNQQLDQWDLCLLQLSELDTQIAERHAQSLVAQRLTGVIGFGAYSALALAARIGDISRFPRPRSLANYFGLTPGCRNSGEVTQRLGSITKEGSALARFLLAQMVVHLLKREAWMRAWYLRIKKRRGSKIARVAVMRRMTTIIWHMLTHDEPYQPGGGGRTRKRRQMQNVQPA

SEQ ID NO: 413692 - protein, 344 aa, unidentified
MRRPTDKLIAGIDLHSNNLVIGVIDQDGKRIGHQKLDCSLESVEQFLRPFKKRLESMAVESTYNWYWLVDGLMATGYRVHLANTAALEQYEGLKHGDDDSDARWLAHCLRLGLLPEGYIYPRESRPVRDLLRKRAQLVRQRTADILSIENLTSRNSGVQINANRVKQLTVEEVRRQYGQEDLALPLESTLAVIEVLDQQIHRLEKRVKGKAKLAAEFQPLLTVSGVGEILGLTIMLETGDIRRFARVGDYASYCRCVESLRFSNGKKKGSGNRKCGNKYLAWAFMEAANFAIRYDATIKRFYQRKKARSNVAVARKAVAHKLARASYYVMRDRTPFQVEKCFGG

SEQ ID NO: 413693 - protein, 359 aa, unidentified
MASMPPQLDPVSRVVVAGIDTHKDLHVAAVVDTDGVVLGTESFSTTRAGYRAMVRWLRTFGDVRKVGVEGTGSYGAGITRHLTEAGIEVLEVDRPDRADRRRRGKSDTLDAEAAALAALAGRRTSIPKRKDGLVESLRVLRLTRATAIRSRTKALQLLRMHVISAPEELRDQVRNLTRMQLLRTCACWRPDTIGFRDPVVATRIALKSLARRILELNDEIATLDELINPLVAELAPRLLARPCIGVEIAGQILVTLGDNPARIRTEAGFAMLCGVAPLPASSGKTQRHRLNRGGDRQANRALHMAAISRMRTDDKTKAYVARKTAEGHSKLEIIRCLKRYLAREIYYLMREPTTLSKAA

SEQ ID NO: 413694 - protein, 430 aa, unidentified
MPGTAQAGVHDRDQEEARLDVFCGIDWAEDHHDIAVVNRDGALVSRLRVSDDAAGLARLLELLAGHGDSATEPVPVAIETPRGLLVACLRATGRPVYPINPMAVARYRDRHSAAGRKSDKGDALVLAHILRTDRHAHRPLPGDSELAQAIAVLARAQQDAVWDRTQAHNRLRSHLREYYPGFLAAFAAARDGIMRPEARAILAAAPAPADAARLTLAQLRALLRKAGRARGIDAEAQRLRDAFRAPQMRQLPLVEQAMGRRATALLRQLDAACTSAQELQQATAETFSRHPDAAIITSFPGLGALTGARVLAEIGDDRSRFPDARGLKAYAGAAPITRASGKTRSITCRRIKNNRLADAGYAWAFSALTASPGARSHYDRRKTTGDRHAAAQRNLFNRLLGCLHHCLATGQHYDETTAFPTQTTKLPTAA

SEQ ID NO: 413695 - protein, 371 aa, unidentified
MPPTSQPHRKREVKRTNYVGIDVGKNRCAVCVADEKGEILRKLIYMNTRGGIEELAENLSRYGKCRAVLESTGNLWLKTYEILEAHSVPVKLANPLQTKAIAQARIKTDKLSARILTHLLRASLIPECYIPPKETRERRSLLRYRSELVKDRTRIRNEVHSLLDKYDLRCEHKDLFCVGGMRWLEEVELPSEDQAILESQIRRLRGLQREVEAVDSRIASKASMDEEVRLLMTMTGVSHYGALLIASEIGDVTRFQSPEKLVSWAGLCPSLHQSGESTHYCKIKRGGNKHVRWLMVEAAKSASSHDPEMRTLYERTRRRHGSQNAVIRVANKMLRVVWYMLTRREPYRQGKEVLYKNKLMRMEKLASSRLA

SEQ ID NO: 413696 - protein, 404 aa, unidentified
MWYVGLDWADTHHDVEVQDEAGKRVGARRFAHSHAGLHELKAFLLGIAAAPEELACMVETNHGLLISFLLEAGIPVYPVNPKTANQLRKAAGAKTDRIDAHLLAKLGRFDLAELRRLAPDSATVAELKTLTRDQDALIQTQTRLVNQLTACLKEYYPAALQLFAKLQQRSTLVFLQAYPTPQAAQAASLEEITATLRTGKHTNPTQVAPKIVEELHRPQLVANPVMVRAKSRLMLSLVKQLLVVIEEVASYDEAIRPLFLSHDDQKLWSSLPRAGKRLAPRLLAEWGDDRSRYADATSVQALAGTAPVPFQSGNYAKAHKRFACSKPLRNALHQFAWQSTLHEGWARDYYQRKRAEGKTHSMAVRALANVWVRIIYRMWESQTCYHIQTFAAAKLAHAPRQHAA

SEQ ID NO: 413697 - protein, 343 aa, unidentified
MKIIRVGVDLAKNVFQVHGVDRHEKPVWRRKLNRAEWLKVLLNTIEPGCEIGMEACGGAHHWARQLQRHGYIVKLIAPQFVKPYVKSNKNDANDAEAICEAMSRPQMRFVSVKTVEQQDIQAVHRIRADIGTQRTAKANQIRGLTSEYGLVAPREVSQLRAAIPCWLEDAENGLSARFRRLLGDLWHDLMMLDDRMKDMDGEIASIATADPVAKRLQQLRGVGPVIATALRATVGDATQFANGRQMAASLGLTPRQHSSGGKERLLGISKRGNSYLRMLLIHGARSMIRTAKGKEDRLSQWVMRIAGARHPNVAAVALANKTARIAWALMTTGSEYRPDLVAA

SEQ ID NO: 413698 - protein, 341 aa, unidentified
MTISLLAIDLAKHVFQLHGVDHSGAVVLRKRLKRNQLLGFVQALPPCTIAMEACSSAHFWGREFTRLGQSVKLLPPQYVKPYVKTNTHDAADAEAIAEAATRPSMRTVTVKSQEQQDLQTLHRGRERVIKTKTMLLNSLRGLCAEYGIITPKGSSWLTRDLAGTRQQLEAVNSQCLTLLFERSLAEFHRIEEDEKFYTAQLERIATTHPVALRLMQIPGVGLLTATAALAVVAAPQEFKNGRHFAAFLGLVPRQHSSGGKAKLLGLSKRGNSYLRRILVSGAQSILRWSPRRTDAIGRWVTALRQKKPWNLVAVALANKNARVIWHLLRYDVDYCPHGAVA

SEQ ID NO: 413699 - protein, 350 aa, unidentified
MSVNNPNKQLILGVDTHLDLHVSVLINTIGQVICTSEFETNSKGYDKLLRWCQSFGHLTKAGIEGTGTYGAGLSRFLSSHQVTVCEVNRPNRARRRLRGKSDPTDAENAARAVLAGEAKAIPKTQNGAVEAMRFLLIARRSAVKARTQAINQIRAMLVTAPDEIRLKYLKSSQLACIEGCINITVLEGSTLLEMLSISLNLLAKRWLNLTEELKNIDKNLKKITRATAPTLISQYGVGPYVAATLLVTAGDNPERLKKESSFAALCGVSPIEASSGKTVRHRLNRGGSRIANNAIWTITLIRMRSDPRTQQYVARRTSEGMSLKEIQRCLKRYIARGLFPIILNDLAIAN

SEQ ID NO: 413700 - protein, 358 aa, unidentified
MNICGIDIHKSFLQIAVIDSRGNIVYQERCRYSLIDIILLIAKLAKMKCMEIAMESTGCFWIPLYYEFAGRGFKTVLANPSSTKSFGSKTDMLDAVRIARRHRAGALIKSYVPRDRVKIIFRSISRLRRRLKEDRNRVLNRIRRLLTISGVWLDRFVKPNTSRWFSMLEMLASGKSLNEILGLNIGYEYHCMRDRLDCYEANILAQLLSLARRIDEICSFLSKMAESLVEKLYGEEYSLIQTVLGIGRTLAYMILAEIDDVRRFPSARHFKSYCGLSPSLRESGGKARLGRCRHGNPYLRYAFYQAAVVAIRVDDELKRFYDRLRARGKHHKVALIAVAGKLAIRTWHILCNNEKYIA

SEQ ID NO: 413701 - protein, 414 aa, unidentified
METVYRSLAGIDVHKKMLAVVVRKHCGEQVGYEKRKFGTTCVEIQHLAAWLGAQAVTEVVMESTAQYWRPVWYGLEPHFRLHLTHPLKTRAPRGRKSDFRDAQRLADRWSAGDLEESFIPGAEQRSWRWLSRTRVQLKKKLSVIHSHVEGLLEQGGIKLSAAVSDLFGVSGWAMLELIAKGVSDVEVLAQQARGALRKKTTNLKEALVGQLAPVYRLLLRQHMEQVRLLRRQVEELNQALAEAMQEHIAVLHRLCKIPGVDLYAAQELLSEIGPQASAFASAEQFASWVGVCPGSQESAGVNYSHRSAKGNRYLRRLLCQIAWAAIHTKDTFFAGLFARLKPRVEGKGAAWAVAHRIAKIIWVVLHQQVEYQEKGPAPPNERNLVRKFKRLLKEFGSLGLDVRALLDSQLPASA

SEQ ID NO: 413702 - protein, 355 aa, unidentified
MDNRKYIGMDVHQASISIAVVDAAGKLLMECIIETKTATVLEFIQGLRGSLWVTFEEGTSAAWLYDLLKPHVTKVVVCDPRRNALLKAGNKNDRVDARKLSDLLRAGLLTPVYHGESGVRTLRELSRSYLAASKDLTRVMNRLKAIYRSWAIPCAGQQVYSARQRAAWLEKLKEPGVRRRAEQTYQQLDFLMGIRKETRKELLAESRKHPARELLEQIPRLGPIRVALLIALLQTPHRFRTKRQLWNYCGLGLRTRSSGEYRYTGRQLQHARKPPALRGLNVNHNHELKNIFKSAATQASASRNPLGEFYQNLLAGGMEPPMARLTLARKIAAIALNIWKKGERFDPAKLKQQAA

SEQ ID NO: 413703 - protein, 385 aa, unidentified
MSQSSNILLRAINYDHTLVLAIELSNKSWVLAAQVPGLPRTKAQRTIEPNKTALLAAIDGYRARAAALGYSVERVITTYEAGWSGFWLARWLVAQGIEVHVVQPSSVPVDRRMRRAKSDGIDAELLRTLLAWLRGEPRVCSMVPIPDEADEDARRCVRERTELLSDRVGLTNRIGAVLATLGVGDYNPLLQSRRRRLTELRTGLGEPIPPNALTKIERLLARLELVLAQIAELERKRDEVAAADAPDRAGKMIQQLTSLRGIGVQSATVLVREAFVRNFSNGKALGSYAGLTSTPYSSGGIDREQGIGKAGNRRLRTVMVELAWLWQRYQPGAAQVAWFRDRVGSTGRRIRKVMVVALARKLLIALWRFVIDGVMPEGAVMKPSI

SEQ ID NO: 413704 - protein, 364 aa, unidentified
MHATTKPASVGSSAVSLAIDLAKDVFELAFADASGRIVERKRLKREPFARCLENRPPLRIVMEACGSAHAWARRFARLGHEVTLLPAQHVRPYVRRNKTDRADAAGLLEAARCGDIRPVPVKTPEQQGTQGLHRIREHHKAQRTAAINAVRGLLREFGIAIPAGADKVRPATLAALEDGDNDIPMALRHALAGLLDQIAACQEAMAAIEKQLADIAKLDTRCQRLMAASGVGLITATALSAGIGDFARFPSGRHFASALGLTPREYSSGGTRKLGRITKQGDVFLRTLLIHGARSALIVAATARKRGQPLDRTQQWALALAERKGHNKAAVALANKVARRLWASEHHGTSFDPEHISRREPRAA

SEQ ID NO: 413705 - protein, 342 aa, unidentified
MFYAALDVSLRSVAVCIIDDEGKVRLERSVPSDVPDLVRCLNEFGEPIHQVGLEAGTLTQHLTYGLREAGFEVVCMEARQVNAALSAMRNKTDKHDARGIAQILRSGWYSRVHVKSVESHHLRALLTSRKVMQRKCIDLENEIRGLLKVFGVKLPMRLSRGAFDVAVRDTIESDPALSRALLPMLHARQMLFETFMELDRRVRKAAHEDEVCTRFMGIPGVGEITALSFKAAVDDPTRFKSSRTVGAHFGLTPRRFQSGEKDNPGRISHAGDSDVRATLYAAANAMLMRSIAWSSLKAWGMRLMKTKGRRRAIVAVARKLAVVLHRMWADGTEFRHGSEAAA

SEQ ID NO: 413706 - protein, 391 aa, unidentified
MFFVGIDIGKRNHEACIINEHGQILAKTISFANTQPGGQKLLNWLKKFDLDLSATVVAMEATGHYWLTLYSFLRKQHLPVQVINPIQSDALRNMYIRQTKNDAKDAFIIAEVLRFGRYTTTALAEERIIALRQLSRFRFSLVDSISDLKRKVISVLDLLFPEYERLFSDLFGKTSSELLMDYTTPEEIVALDTQKLAEFLAKHSRNRFGLEKAEEIKLAANNSFGIDFALDAYRLQIRLLLKQIQLTEEQLSLLDEEISRILKSIDQNLITIPGVGPVLAAAILGEIGDISRFQTGAKLVAFAGIDPTVRQSGQFSSTHNRMSKRGSPYLRRALWLAATTSKLHNPIMQQFYEQKVSQGKHHLTAIGAVCRKLTYVIHAVLRDNKPYELKV

SEQ ID NO: 413707 - protein, 373 aa, unidentified
MNKDSSSQRSRKQVTKAYRQQGSLTFGMDLGDKHSCYCVLDGQGEVIQEGGVGTSKKAMAKVFGSMGRCRIAMEVGTHSPWVSRLLLALGHEVVVANPRQLKLISASSRKDDRLDAQTLARLARVDPQLLRPIQHRSAKAQGDLMVIRVRAALVEARTGLINSARGLAKSLGERLPICDTDQMGVEQTESLPAELQQRLEPLLKEVVSLTEKIKELDRRVEQMAGEDYPETRLLQQVKGVGPLIALTFVLTLEDKERFQKSRDVGCYVGLRPRRSESGQSQPQLRITKEGDAYLRKMLVQGAHYILGYRGPDTDLRRWGLKLAARGGKRAKKAAVVAVARKLGVLLHRLWVTGEVYEPLRNAHRQQELKKAAA

SEQ ID NO: 413708 - protein, 425 aa, unidentified
MNYKQNEKINQVKESTLVVGIDIGSTKQYARAFDWRGIELGKVFTFSNSREGFEAFKAWMRHLQDKYRKSDVIVGIEPTGHYWFDLGAYLEDEGILLVMVNPYAVKQTKELDDNSQSKNDRKDPKVIAKLVTEGRYSAPYTPDGVYADLRIMVTNRKRLIREMTQIKNRFARWFAIYFPEYTDVFGDYEAQSSMLLLKKVCTPEAIVELGAEKINQIWRDAKLRAVGMKRATTLCETAKRSIGLKKGSSAARYEMKLLLEDYEYKKAQLDAVMEEIEKLCRKIPESEQMLAIKGIGVITVAGFLAEVGDVRRFESPRQIQKLAGLSLRENSSGKHKGQTTISKRGRSNLRAVLFNAAIPLIATNPEFKSLHEYYTTRANNPLKKKQSVIAISCKLIRVFYAILANGVTYDAQKMLSDIHRQPQAA

SEQ ID NO: 413709 - protein, 359 aa, unidentified
MDAQEGAVRRIIGGVDTHKDLHVAAVVDEQDRVLGTQSFASTRQGYRQMLAWMRCFGEVERVGVESTGSYGAGLLRFLQQAGVTVLEVTTPDRQDRRRRGKNDDFDAQNAAHAAFAGIRTVTPKSRDGMIEALRVLSACRKTAVTARRIALQMIQNTIVCAPESLREMLRRMTRMQLVRTLAAWRPDLTAYRDVEAAYRISLKSLARRYLELHDEIADLDAMIAAIVDELAPNLVARNSIGHRGAAQLLLTAGDNPERLRSEAGFAALCGVSPVPASSGKTARHRLNRGGDRAANSALHIIAIGRLRTDARTQAYVAKRIGEGHSKLEAIRCLKRYIAREVFTLIKQRQREINQTRIAA

SEQ ID NO: 413710 - protein, 343 aa, unidentified
MVSGVFGGVDTHADVHVAAAVDTNGGLLGIESFPTDEAGYRSLTDWLCGFGPVVKVGVEGTGSYGVGLQRHLHREGVEVVEVDRPNRQARRRLGKSDPVDAVSAARAALSGTATVTPKRRDGTVEQMRVLMIARRSARMQRNQTLNQLRQIVICGPDEIRARFKDRPKAGLVSEAAGMRPRKGNDPIVFTTYVVIRGLARRIKDLNDEIGSIDRALRELIDATAPSLLECYGVGASTAATLLVTAGDNPDRLHTERSWAHLCGVSPVPAGSGKTSGRVRLNHGGDRQANAALYQIVLTRMSSDAETRNYVRRRRAEGLSTREVMRCLKRYVARQTFKHLPRAA

SEQ ID NO: 413711 - protein, 318 aa, unidentified
MKTIGIDISKLTFDVYSEELGHAQFSNDKDGFKAFKKLLKKEDLVVMEATGCYHFQLANYLFGLNYKVSVVNPLVVKRFIQMKQQKVKTDKQDAMMIALFGIEQNPELWDPEPKFIEEGKLLTTLMQLYVKQQTQLKNKLDNLQSGGRTQGIMISSLKLQLKRIKVELKKLESSLEELLKEHAPEVLTNIRSIPGIGKKTAMLMMVTTNNFRDFTSAKQVTSYVGLAPVERTSGSSIRGRSYISKKGDPMLRHHLFMCSFTACQNNPQCRALYERIEGKGKSKKLALIAVCNKLIKQAYGVCKNDLIYDENYRSRNAA

SEQ ID NO: 413712 - protein, 324 aa, unidentified
MDRQVMGIDVSKETLDYSMYDGKTHVRGSLKNHPKGIKQFFGQYDHKKDTLHVVMEATGTYHLRLIAYLYGAGFKFSVMNPLIIKRYSESKMFRAKTDSVDACLISIYGYEQSPPLFIPRAKHQQEMINLLKAVEDLIETRSEYERRLEALNQNPDAMGVVIRSFKQLIRTVNSKIERLEQMALQIAETHYNDDLRRLVSIKSVGEKTAVVILAYFGCFENFESSKQVMSYIGSNPSPHRSGTSIYGRGSISKKGNSYIRKQLFMTTLTAIQHNPACKDFYNRLREKGKEHKVARIAAMNKLIKQIFAIVKYQRTFDPNFVFSS

SEQ ID NO: 413713 - protein, 315 aa, unidentified
MTQTNMTTAGIDTSKSKLDVAVHGRTERWQVANTLAGWRKLAVRLAEAEVDRVGIEATGGYERGVVEHLRAAGFAVKVLQPAQVKAFGRVHLRRAKNDALDAVLIAACMAALDLSGVVPDPRLAKLADQMTFLDQTGEDIARFKTRLEHIDDPRLRRIVLEDIARLKARKLAQIRDIARQLRSHRDLAARLDLVLSIPGIGELTALAILIRMPELGQVSREEAAALAGLAPFDNDSGQHKGQRRIAGGRSRLRRSLFAAALPAAFRWNEALIALYQRLIAAGKAHNVALIACARKLLIYANTVVQRGTPWIENAA

SEQ ID NO: 413714 - protein, 414 aa, unidentified
MELLHERCAALDIGKKDLKACVRTPSPKGKRSRRQEIRTFATTTNALLELRDWLVGERVSLVVMEATGDYWRGAFYLLEDDLEVILVNAAHAKGLPGRKTDVCDSSWLCQMGECGLLRASFVPPEPIRQLRDLTRYRTTLATERTREAQRLEKELEDAGIKLSSVATDILGVSGRAMLAALIDGERDAQVLAEMAKARMRPKIPRLVQALTGNFGEHHAFLCRLHLERIDQLTAAIGELSARIEEQMLPFARQLEYLATIPGVGQSVAEVIVAETGADMSRFRTAAHLASWAGVCPGHHESTGKRRSGKTRHGNRWLTGALGTAALTAARTKDTTYLGARYRRLTRRAGKKKALVAVEHSILIAVWHMLTNDVEYTDLGGDYFARLDPERAMRRIVRQAKALGFTVRFDPIQAA

SEQ ID NO: 413715 - protein, 346 aa, unidentified
MEHYVGLDVSLKLTAICIIDRTGKIEREGVVASDPEAIAAFIKLHAPHVVRIGLETGATSTWLWTELNKMGLPVICIDARHAKAALKMQINKSDRNDAVGIARIMQCGWYKEVRVKDLDSHATKALLVSRALLVKIKRDIENQIRGLLKNLGLVIGRAKMNTFAARAAELAEDRPELAAAVDPLLKAREAVEQQISDLDRKVLRLARNNAQVRRFMTVPGVGPVTALCFLATIDDPARFKRSRSVGAYAGLTARRYASGEIDWTGRISKCGDKMLRSYLYEAANVLLTRVAKWSALKAWGVRLAKRSGLRKAKVAVARKLAVILHRMWIEGTEFKWSSKEAANQPA

SEQ ID NO: 413716 - protein, 336 aa, unidentified
MEDYQWFMGIDVSKSKLDITLLEGSEKRHYSVIENNEKSIKQFIKDLTAIAGFSLKNCLVCMEHTGIYNAHLLTISKAQAWNLCLESAIQIKQSGGLQRGKNDIIDSYRIALYAYKNKSFLKLWEAPREVILKLKKLSGVRERLLQAKVQLERTLKEDKHFQSKHLSTFLGKCCAKSIKAIEGDIKRTEEQIQLVIVSDEELTRLFSIIESVPGVGRISATEIVITTNEFKNIHDARKYACYTGVAHFEHSSGSSIRGKTRISKKANLQVKTRLHMASLVAAVHYEEFRLYYQRKVAEGKNKMCVLNAVRNKLVHRIFACVKENRLYEKNYDPKFG

SEQ ID NO: 413717 - protein, 343 aa, unidentified
MDHFAGLDVSVKETRLCIVDDAGRIVREVKVASEPEALLQALKKPCFHLKRIGLEAGPLSQWLFGTLAEAGLPVICVETRHMRAVLKAQINKTDRNDARGIAQMMRAGLYRPVHVKTLRSQKLRMLLTHRKLLQSKAIAIENDLRATLRNFGLKVGVVGTVKFEARIKQLVESTPDLAVLVEPLLLVRRVVREQIGILHRRLLAIVRDDEVCKRLMTITGVGPVVALTYRVTVDVPSRFRNSKAVGAVFGLTPSKHQSGESDRTGGISRCGDEMMRVMLYEAAQILLVRSTRWSWLKAWAMQIARRRGMKKAIVALARRLAVIMHRIWVDGTEFRWTREVVAA

SEQ ID NO: 413718 - protein, 347 aa, unidentified
MNAGQNSGSYEQYVGVDIGAEYSSVAVLRPGRETGAAAFSIEQTPHDLLVLQRRLLSAGCAAERTLVVMEATGNYWIRLATSLHQAGFAVSVINPSQAHHFAQALLQRAKTDAIDAQTLAELAVRLQPPLWNPAPEVYEELQQRLTERDSLLNIRQQLRNQRHALHQRTPVVAVVEERLLKLLETVQAQIDTIEREIDAILRHEPIWATSAHLLLSIKGVGPITAAWLLAATHNFTDCHSPEQLAAYAGLAPYPHQSGKSIRRREAIGHTGHARLRRSLYMATLSASRYNPAIKTFYDRLRQNGKPMKVARCAAARKLIHIAWAVVTKHTPFDPAYQQNRQILAQTP

SEQ ID NO: 413719 - protein, 364 aa, unidentified
MQKMSTMQTSGKTIFKGQLTIGLDLGDRSSAYCVLDEAGEIILEQKLPTTPEAMKQTLGKMRRSRIAMETGTHSPWVSRLLKALGHEVIVAHAQNVRLITKSRRKDDRLDARTLTRLARIDPELLSPVQHRSAQAQLHLTEIRARAGLVSARTALVHAARGLVKSYGERLRKCGTQQFRRETMSGLSAGLREALEPLLREVESLNERIQEYDRRIEKMAKEAYPETALLKQGKGVGDLIAVTYMLTIEDSHRFRKSRDVGCFLGLQPGRRNSGESEPQMHISKEGDEYLRTLLVQGAHYILGPFGEDSDLRRWGQKLAERGGKNAKKRAIVAVARKLSVLLHRLWVSGEVYEPLHHSQVMSAVA

SEQ ID NO: 413720 - protein, 347 aa, unidentified
MKYVGIDWGTRRAAWCAFDEHGEMLEGMVSADRDGLARIVHAVGPDAYGCVEMMSGAVWVREQLQACGWRFAVADARKVKAIAPLACKTDKVDARVLAQLAARDLVPELWVPSLSDRELRERLRRREHLVHLRTSARNRMFGLLTQWGLRGSLTTLRKPGAIEQLAERGVPAVWIQSIRTLLEVVDDLDRQITQIELELRPIARTDPRVRLLLTIPGLGYLLALTIVAEIGDISRFPNARKLIGYAGLAPTIKQSGQSSWVGPISKAGSPMLRWAAVEAAQHAWRPSNPWNQLYLKTKTRHGKANPAKSAVARKVLIACWHVLAREQEFRPAASILTTPAPASSTAI

SEQ ID NO: 413721 - protein, 341 aa, unidentified
MKKNLFFIGLDIAEADFAASIYKTPDQPIVTKEAIPNDRKGFDLLLLWLYDHHIDKKNCRICMEATGVYSQAIAYYLLLAGFPVSVEPPLKVKRAFDPIGHKTDPVDSKQIAEYAYRFQDELTSWQPRDEILEKIRQLLSVREQFTKQKVALKNAMHAYSRQRVQVALIKKAHQETLAQIEKQIVRIDKELAKLIKQNPQILQKADYLKSIPGYGILLAAHLLVITENFTKIQNSKRLASFVGIVPYQHQSGTSVFKRAKIRHFGPGPSRKLLRLAAQSVATHDVTFRRYYLRKLAQGKAKSLVLNNIANKLLKVACAMIRNNTRYIKEHRSIHPMYLKSA

SEQ ID NO: 413722 - protein, 370 aa, unidentified
MGKYSEVFVGIDTAKRKHAVAIADAGRDGETRYLGEIDSAPATVERVLKKLASKYEKVRVCYEAGPTGYGLYRQIITLGHECTVVAPSLIPKKAGDRIKTNRRDAVTLARLFRAGELTSVWVPDAVHEAVRDLVRARDTAAADVRKKRQQLLSFLLRHGRIYSGSKHWTRAHARWLATQAFEHPAQQIVFQDAIDAIEDCVSRLHRLEEQLYAIVPNWSMAPVVDAYQAMRGVSFIVAVTFVAEIGDVRRFENPSQLMAFLGLVPSERSTGDNVRRAGLTLAGNRRARRALVEGAWTYRYQARVSAKLQKRLEDIPKQVRDIAWKAQVRLCGRFRRLAAIGKKRPVIVAAIAREMAAFLWAIGQHVAPAS

SEQ ID NO: 413723 - protein, 312 aa, unidentified
MDKVIVGIDVSKDRLDVAVRPSGEVFVVERNAAGLEELVERLRPLGPHLVALEATGGFETVAAAALAAADLPVVIVNPAQVRAFAKAIGQRAKTDPIDARVIAHFAEATGPEPRPLPDEATRLLADLVARRRQIIDMIGAERQREKRAPARLKKSIVRLVKALEKELTSVEGDIDDAVRGSPAWRETEDLLASVPGVGPTIARTLIAELPELGTLDRKQIAALAGLAPHTRQSGQWKGRSFIGGGRTTVRTALFMGAMVGKKYNPVLRAFFERLVAAGKPKMVALIAVARKLLTILNAILRDRQPWRQPART

SEQ ID NO: 413724 - protein, 388 aa, unidentified
MFKTVERPDAPAAIRMDIGAILVSLELSRSTWLLTSVSPGAGEKMSQHETPAGDLRRLFECLAELKRKALARTAATYPIIVIQEAGLDGFWIHRALEKEGIESHVVDAASIAVPRRRRRAKTDRIDGKTLLRTLMAFKRGEPRVCAMAKAPSAEEEDRRRLGRERKTLIAERVEHVNRIKGLLFTQGAVDYQPLRRDRRARLETLCTGLGDPLPPRLKGLIGRELDRLELLLAQIKAVEAERDALLAEQTRQAPAAAPMLLAFKGIGPEFATVLWLEGLFRSFANRRQVAAYAGLAPTPWRSGSIEREQGASKAGNPRLRATLIELAWLWRRHQPNSALTLWFEDRVKANGGRVKKALIVALARKLLVALWKHVTTGLVIEGAVMKTA

SEQ ID NO: 413725 - protein, 342 aa, unidentified
MTLDAESGEIRSQRLPGETAKVVEFLERLPGPTRAAYEAGPTGYGLARALHAAGIGCVVAAPGKIERPAQDRIKTDLRDAERVLRLLMIDGLYPVRVPSVEEEALRDLVRAREDVRGDLMRARQRLSKLLLRHDIVYEDTSSTWTQKHRAWLRAQDLGGGAQATLLDHLGAIDTLELRRGSLETTIAEFVPRSPWAQTIARLRCLRGVDTLSAVGLAAEIGDFERFDRPGKLMSYLGLVPSESSSGQTRRQGAITKTGSRHARRLLVEAAWHYRKTPARGVTLQRRQDGQPAHVVQISWQAQQRLHRVWRRLDTERGKRRTIVAVAVARELTGFCWALARAD

SEQ ID NO: 413726 - protein, 351 aa, unidentified
MNAITVAVDLAKTVFELAITDGQGRLAERKRLSREAFAQFFANRPPCRIVMEACGTAHHWARTFQAQGHTVKLLPPQHVRPYVRRNKTDRADAAALLEADRCPDILPVPVKSEAQQGLQGLHRVRSAWMATRTDRINTLRGLLREFGLPLPQGPSAVLERAPAWLAEGEGPIPPALRPALAELIAEIRTLETRIADLEKQLREQAKQRPDVQRLLAVPGIGLLIATALVAAVGGMEAFRDGRHLAAWLGLTPRESSSGERRRLGRISKRGDGYLRMLFIHGARSAILAALNQQAKGETPLTRLQRWALDLAARIGHNKAACALANKLARIAFAVVRQGRAFDGDFVPAKAA

SEQ ID NO: 413727 - protein, 409 aa, unidentified
MRYYVGVDWADQTHAVWVVDESGTKITARTVPHTAAGFSEWGRELDEWRAQGIERWAAIERPDGRVVDFLLDHGVVVYPVNPKALDRARDRFRQSGAKSDPFDARVLADFLRTDHLHLQALQPSSEAAQELKLLTEDCQRHIRQQTRLVNQLTTTLKAYYPRALEVAELTTALAREFLHAYPTPEALTVLTERQWQRWARGRRVSEARIGTLWAVLQPPQLPVPAHVVRAKARLMQSLVEQLTPVVAAVVEYRKAIEDFFARMPAAQWARTLPIGKRGITAPSLWARLGDAPGRWESFRHLQAQAGTVPVTKRSGKQRVVHFRFACDKSLRHVVDQVAFLSLLSSDWARAYYDQQRARGHAHHQALRALGAKWLKIIFVMWHRQVPYDEQYHLATMTRQQLRQRQTKIA

SEQ ID NO: 413728 - protein, 311 aa, unidentified
MNNTIGIDISKDTLDVHRLTDGQHMQVLNGKRGYTKLLRWIGAQPTPLIIFEATGAYHRQLEQALGAKAIPFVKVNPKQARRFAQASGKLAKTDRVDCEMLAKMGVALQLVPKPTSTESLYDLRELLTTRRALIKDRTAAKTRLATSTVPLVRCQLTKRLRHIESDISHIDAVMLALARQDQIMATRLDVLFSIPGIGMVTALTVLIDMPEIGALNSKQVASLAGLAPMSQSSGKWQGKARIQGGRPNLRHSIFMPALVAIRFNPDLKAKYDQLVAAGKEKKVAITAVMRKLLVLANALLRDNRKWTEKLA

SEQ ID NO: 413729 - protein, 387 aa, unidentified
MPQPNDLSRSLVPLDQDSTIIAVVEMSQSSWLVGGVLPGIERQPRKKLEPSPERLLALLHRWRDESVRAGRTITRIAVAFEAGRDGFWLARWLEARGVEAHVIHPSSVAVSREHRRAKTDRLDTELLKRGFLGWLRGERGHCSMVRVPTIAEEDAKRPNRERECLVKERTRLVNRMKGTLARLGIRNFRPTLRNAAEHLAALSTPEGSPLPPNVAAELERDIARLRLVISQIKQIEEARRQRLEEQPEGGPHAMVRLLARVVGIGIETADMLVNEVLSRPLRDRRAVARYAGLTGAPDESGARRREQGLAKAGNARVRRGMIQLAWRFLRFQKNSALAQWYQARTADHRGATRKTMIVALARKLLIALWRFVTIGEPLDGVTLRPAS

SEQ ID NO: 413730 - protein, 327 aa, unidentified
MQTVTTVGLDIAKSVFQVHGIDAKGDVVIRRQLKRRYVLAFFQKLPSCLVGIEACASSHHWSRELTALGHTVRLMPPAYVKPYVKRQKNDMADAEAICEAVTRATMRFVPTKTPEQQSCLMLHRTRHLFIRQQTAVINSVRAYLAEFGIVAPVGRKGVAELLHVVADPSDKRVPEIARACLAALGAQLRILKEQIVKFDRMIMAWHRSNETSKRLHYIPGVGPMLATALVASVADPRTFRSGRNFSAWIGLVPKQHSSGGKDKLGSISKQGDRYLRSLFVAGALAVIRYAKIHGTKHRPWLTALLTRRPTRSPQSLSPTRSPEWRGP

SEQ ID NO: 413731 - protein, 344 aa, unidentified
MSIVRIGLDLAKYVFEVHGVDIHGKVVLRKRLRRDAVSTFFANLPKCLIGMEASNGAHYWARTLKALGHEVRLISPQFVKPYVKSNKNDQNDAEAICEAISRPSMRFVPPKSADQLTMQAVHRIRQRLIGDRVRLVNQIRGLLSEHGIVVARDIAQLRRRLVEIVGDSAEELGDLLRSLMRELHVELTELDTRIKSFDLRLREIFRDSEQCQRLGKIEGIGPVTATALVAAVGDRSSFKNGRQFAAWLGLVPKQQSSGGRQRLFGISKRGDRYLRTLLIHGARAALARAGGKQDPRSVWLGKLRLRRHPNVAAVALANKNARIVWAMLSGNENYEMQRSVGSAA

SEQ ID NO: 413732 - protein, 378 aa, unidentified
MSNCTRYLGLDVHAETITAAIAEGRGKIRSLGKFPNRPEAVRKLIEKLGGGKNLKVCYEAGPTGYALYWQLTKLGVDCEVIAPSLIPKKAGDRVKTDRRDAEKLAQCYQSGELTPVWVPTLEHEALRDLVRQRAAGKADESRAKHRLVKHLLRRGLREPGNSRAWSHPWWRWVQSLKFDHEAQQVAFGDCVAEVLHMGERLARLDKAIDRLVLSAPPHMQAVIEALQALRGVAKLTAVTIVTEVGTFKRFRRPTEMMGYTGLVPCEYSSGQREAKGGITHTGNAHLRHVLGEAAWHARHRPWLNNRIKRLLPTLPAGVAEIAWKAQERLHKKFARMTFHRKHAGTVASAVARELVGFIWAIGSMVESQHVTKTKAQAA

SEQ ID NO: 413733 - protein, 421 aa, unidentified
MSDFAALLGIDWADAKHDLCLIEATTQHKEFRTLKHTPEALQDFFLGLRQRFAGQPIAVAIEQARGPLLFALLKYDFLTLYPIHPTTLARYREAFSPSRAKDDPTDAEYAAELLLHHRDRLTAWQPDDVTTRSLQLLVEQRRRLVGDRTRISNRLTALLKNYFPQVLAWFPDVRTALVCDFLTRWPTLAVVQQADPATLEQFFRSHHAARQGLLERRLQAIKESQPLVTDAAVLKASVVLLKALLAQMRVTLDAINEFDREIAQLCQTHADYPLFAALPGAGAVFASRLLAALGTQRTRFAAAQDLACFAGIAPVIERSGQSCWTRWRYFCPKFLRQSFVEFAGESVKHSAWAKAHYASQRAKGKNHAAAVRSLAFKWIRIIWKCWQTNTPYDEATYLACLRKRGSPLIQLIEAQLATTEA

SEQ ID NO: 413734 - protein, 375 aa, unidentified
MSSSAIIYLGMDVHKDSITIAVLPESAKAPTRLDRLPNDLVKLKRWLERTAQGGALRTCYEASGAGYVLHRALQEWGYACDVIAPSLIPKRPGVQRKHDKRDAADLARLYRAGELTAVRIPTEAEERVRDAVRCRTTFQREILKSRHYILKFLARRGFVYRAGTNWCTPHLRWLEQLTTETSPLAPEDRLVFREYHALLAYKLQRRDALDRQIEQLALSPALAATVGRLQCFRGISRQNAMVLATELGDWRRFERPGQLATYVGLVPREHSSGPRERKGAITKAGNSHCRHALIQAAWAYHHRPLLSVAIRQRQQGQPPAVIAHAWKAQQRLHQRDQHLTYRKQPAIAVVAVARELVGFLWAVLQDGPMPVPAMT

SEQ ID NO: 413735 - protein, 406 aa, unidentified
METVVERPAALDVHKEQVTACVRVPGKAGRREEHLAEFRTTVQGLLGLRDWLKAYGVTHVAMEASGVYWKPPWAILEDEFECLLVNARHVKQVPGRKTDVSDAAWLCQLLEAGLLNASFVPPKPIRTLRNLTRYRKTQIQERQREANRLHKILEDTGIKLDCVVTDILGASGRAMLDALVAGTTDPAVLAELAKGKLPALREALEGRFDAEHGIVVSAILAHIDFLDEQIDRLCEAIEEQLRPFAAAVELLCSIPGVQRRTAEVIVAETGAEMSVFPAAAHLASWAGLCPGNDESAGKRRSGRTRTGSKWLSIALTEAAQANTRSRDTYLSAHYRRIRARRGHKKAIGAVKHSIIVACWHMLTTGELYNDAGGDYFTRLDPDKQTRRLVAQLERLGHVVALQKAAA

SEQ ID NO: 413736 - protein, 414 aa, unidentified
MRRLIDRCAGIDVGQALLVVCVRVVDEKGRLDQQVRSFGATTPDLLDLRDWLARAAVTHVAMESTGVYWKAPYYLLEDEFEVLLVNAAHLKHVPGRKTDVIDAQWIAEVLSYGLLRPSFVPPRPFRELRDLTRYRKALIRARTSEVNRLHKVLEDAGVKLATVATDVMGVSGREMMRALIAGVADPDALAELAKARLRTKLPQLRRALTGQFRAHHGFLLARMLAHVEALEADIEVLSQRIAELVEPWAGQLMILDSITGVGPRAAEVILAEIGPDMSRFPTAGHLASWAGRCPGQRESAGKRGSATPRKGSPWLADVLTECAWAAVKTKGTYLSAYYRQVMRRQGKQKAVMALTHKILVIAWNLLSTGALYDDPGPAAVTKVSEEQQRRRAIHQLEALGLTVTVQPREGPGAA

SEQ ID NO: 413737 - protein, 352 aa, unidentified
MDITTAGADLAKNVITVCAQDRSGRTMERRDLRRDAFLAWLRRLPAGCIVGMEACSASHYWAREMGAIGLQPRIMAAEFVQPYRKSRAGKNDRNDAEAIAIAVRDPNMRFVAVKSVEQQARLARHRVREGWKEERTAQGNRIRGLLGEFGLVIPKSRAALAKALVEALHDERVPEPVRELVRATREHLDLLGKRIADCDRAIGLACRGDPAAKRLQEMFGVGPTSADAAVATVGDARAFRNGRQFAAWLGLTPRQFSSGGKTRLGAITKRGDAYLRTLLVQGARSALTGAQRCAPERASRLQQWIVQLHARVGFQKTLVAIANKNARVIWALLAREETYNPEAWKAYAPAKG

SEQ ID NO: 413738 - protein, 340 aa, unidentified
MEKVTTIGLDIAKSVFQVHGVDSAGEVVLRRKLTRGRLLQFFEKLPNCLVGIEACSSSHYWARELIARGHDVRLLPAQYVKPYLKRQKNDAADAEAICEAVTRPTMRFVPVKTPEQQSVMMLHRVRLMLNRQRTQLSNSLRAHLSEFGIVAPIGRRGIEQLLVVINDENDQRVPADARMCLRMLEAQLKVVKAQILENDRRVRASARETEVGRRLMEIPGVGPLLASAFVATVADPHAFKSGRCLSAWIGLVPKQNSSGGKEKLGSISKAGNRYLRQLLVVGAMAVIRYAERNGTKRPWLVQLMARRTTKVAAVALANKTARMVWALMTSGERYREPVVA

SEQ ID NO: 413739 - protein, 419 aa, unidentified
MKKIKSKRPYAVNKKVLIATVDGGKEKHYGYFRYPDGTDGKSLPFENNGRGFQEFLERITSTARAHGLEEIIVGFESTGPYMEPLVQFLKSKRGVRLVQVNPMHTKRLKELSGNSPLKTDRKDPKVIADIIELGHALTVVIPEGPAAELRRLTQGRERTITSRTRLFNQLQCLLASFFPEFLQVMKDVTTASAQHLLKHHPTPQDIVKLGEHALTTLLRKVSRGKLREDRARALFEASSASVGIRDGRDSMLLEIRLILETIASYDRFIEDSEAEMVRQLEQIPYSRIILSLKGIGPVTTAGLIGEVGDFTKFGTISEVMKLAGLDLYEVSSGKHRGKLRISKRGRPLMRKLLYLAALSAVRKDGVMHEWYQQALNRGMKKTKALVAVSRKLLVLIFALVRDHSVYVENYAKPTLQEAA

SEQ ID NO: 413740 - protein, 367 aa, unidentified
MSETIKYIGLDVHKNSIAIAVADYKRNSEVRYYGQIENNMDQLNKVLRKLVSDGSELSCVYEAGPCGYYLYRYLTDNGIDCSVIAPSQIPRKSGDRIKTDRRDAMTLARLHRARELTPVYVPSLEDEALRDLVRGREDAQKALRKSKQQLGAFLLRHYIIYSGKTLWSSAHFNWLADISMEHRAQQVTLQEYIDTVKDNAKRVDRLTTQIRDLSEQSQLSPLIKALQAMRGISLIVAATVVAELGDLRRFANPAQMMAYLGLVPSEHSSGEKTKRGAITKTGNGHVRKALIEAAQAYRLPARKSRVILKRQENLSKDVCRIAWKAQLRLCGRYWQLTAKGKKTNVVKTAIAREIAGFAWAIAQEVTL

SEQ ID NO: 413741 - protein, 309 aa, unidentified
MEHFIGIDVAKDRLDVHTRPGGEVFAVARDSNGLAMLVERLQRLAPALVALEATGGYETVVASALGAAQLPLAVVNPRQICDFARATGKLAKTDRIDAAAIAHFAEAVRPPARPLANAEARALGELVARRRQVIEMIIAERHRRRMASQRRVIRAIERHLALLQAELSELEGDIDDAIRKSPAWQADADLLVSVPGVGKVTLRTLIAELPELGHLNRRKIAALVGVAPINCDSGTLRGRRTIAGGRPAVRTALYMAALVASRANPVIAAYYAKLRAAGKTGKQALVACMRRLVVILNAILRDRKPWQPA

SEQ ID NO: 413742 - protein, 397 aa, unidentified
MVLKEWLEPDAGRPARPVLRGRRRSDASLLPDKDSITVAYAIDAGEVELLGKTGTTGADIDRLCTRLQSKAPHVRVVYEAGPCGYGLYRQLVQKGFDCMVCAPSLIPRKPGERVKTDRRDAIKLARSLRAGDLSAVYVPGIEDEAFRDLARAWAAAREDLRHARQRLKSFLLAHGVRYTGSANWGEAHRRWLGRCSFPSAWQHLAFDEHRRTIEDRLAQCARLETALREAVISWRFYPVVLAVQAMRGVQFVTAVGMVSEVGDLSRFEHPRQLMAWLGVTPSEHSSGGKRRQGSITKTGNSYARRLLVEAAWSYRHPARVSPEIQARLEGLPKAIIDRAWDAQVRLCRRFRRLTARGKPINITVVAIARELAAFIWDISRLAMALAIPRSKLPAPCT

SEQ ID NO: 413743 - protein, 403 aa, unidentified
MGFKPVQILYGGGTVYLVGIDISKFKHDCFIITNHGEVIIDSFSFKNDRDGFISFLKVITSLDQSLEIRIGLEATGHYGNNLKDFLFSNGLDFVEFNPYLTKKFSDAHSLRKTKTDKIDAKVIAHMLTFVDYKAYTMDYTMVKLKSLTRLHSRLVKNHSYFLVQLTNVLDNVFPEFKPFFEHKFSKTSLFILKKYKLPSVIAKLDHYKDFEELRKLSRGSFNYSKFDKLVYLAKNTIGSSDESDIIQIDIIIDLIDSLESKLNSLEKIINETVVKLDPPTLSIKGIGKLSAAVIIAEFGNFNNFDSDAKLVSFAGMDVSISQSGNKSSSGRLVKRGSKYLRQTLMNLIPGLLLHNPTLFRLYYKKRREGKLHRAASAHVVRKLLRIIYFLETNNIKYDPSKCR

SEQ ID NO: 413744 - protein, 418 aa, unidentified
MSMKIVRFNCCGMDVHKNLIVATIGITDKETSITQYFQEQFSTLNPDLIRLKNWIKEHDCYDACMESTGKYWIPIFNVLEDEINVYLTHPKYVKAIKGKKTDKKDSKWICDLFKCDLINFSFIPPKEIRALREISRYRSKLIGMRSSEKNRYQNCMTVSNIGLASVLSDPFGKTATNIMNEMMSSDVIDDKKIKSLIHGRCKNKDKILDSLNGFKIESDQRFKIEQASKHMEYLDQVIEACEIEMMKRAYPMKDSFQHITQIPGISSISAILIISEIGVNMGQFVSDKQLVSWAGLSPANNESANKKKSVRISKAGQYLKPLLVQCALASIRSKGSYFEIKYNRIKKRRGHKKAIIAIARMMLVCIYHMILTGENFNPSDYESLMNPNLKKETKLTVESALQFLQQSGIDISSIQATL

SEQ ID NO: 413745 - protein, 399 aa, unidentified
MNRNRTVAGLDIHKDSVYLCIMGHDGTIIFEKTYGVLTPDLRQMCQDMVEHGVTEAAMESTAVYWVPVWNELCNSMELKLVNPYFIKQLPGRKSDIKDAQWIAECLLKNLIKGSFVPGPVVQDMRKLNRRIMDLNEDLTYNTNKLDAALQRCGFRLSNYVSRIKGKSYQSVLSCIIDGERDPGKLIAKVHGRTINKHGRQTIMAAVTGCFSDTDIIIFRQTKAVIDLIEAQMAECQKELTALCGKHFPQQYRRLQTIPGVKERAATAIIAETGVDMKMFVTAASLVGWCGLKPRNDVSNGRYKSRKVTHGNRYLREILIEIAWVASRTRNCFFSNFSYVQTTVKKKSRMKIQVAIARKILVAIWHMLSKEQDFIDIYLKRLEQQRLLEEQLKSLESKVA

SEQ ID NO: 413746 - protein, 474 aa, unidentified
MKAYFLGGDASKGYCDFTLLDQKKNIVEENFQLDDCYEGHQALCRFLEQFFSRYESAIIYAGFESTGGYENNWYQLLWKLQDRFKIQVARVNPFAVKYHKKASLERIETDKISARKIAEYLIAYPEKVGYSKEDYFAGLRRHWKYIRMLKKQKAQLQTQLKAQLYVAQPQILPYCIDGMSNWVLLLLQEYPTAARLATARIKTLSQIPYLSEKKAKVLVSEAKKSVASMHNSSIENIIKSAVEQILNQQKAITEQVKLMISTYDFPEIVILSSFIGISEYSAFGLLLEIGAIERYASVKKLVSFFGIHPVYRESGDGTWGMHMSKKGRKEPRWILFNIAKAAIVHNEMIKQLYEKYVADGKSKMVALGIIMHKILRIVYGMLKHKKKYDPMVDMANRKKAALKKETPKTKPKPDKSRRYQDYDQKAPISRRQTKKRNNKEKKEKKEVINKNWEKGKRTVENDLVTSSTQGYEDN

SEQ ID NO: 413747 - protein, 357 aa, unidentified
MNRITRVGVDLAKNLIQVHAVDTAGKVVANRALKRDKFLLWCAELPAGCIVAMEACSGSHHWARKLEELGMDTRIIAAQFVSPYRVQGKTGKNDANDAAAVCEATSRPHMNFVTTKTIAQQGILSVHAFREGLKEDRTACTNRIRSTLAEFGVVLPKSSEALAAKLSEVTEDANNDIAGVARLVLQRAQEQWKQLNEHIEWCDERIAAHGQDEQVSKAAELKGIGPVTASAIVASVGDFKQFKNGAQFAAWLGLTPRQNSSGGKTKLGGITKRGSSYLRTLLVQGAKAVVFRSLKAQDPISQWTQRLRERSGWQKAAVALANKNARILWAVMTKGEHFDPNHVSMPPALVNHMAVAA

SEQ ID NO: 413748 - protein, 419 aa, unidentified
MNKLYVGMDVSQNDVKVYILDQEGNEATHRFCVDNNPQGAETIVNNILKCCRSLSINKVFIGLESTSVYGWHLQFYLADHQELKPFDPMIISFNSKIVNAFKKSLGEQPKNDWFDALTVAERLRFGRLPKSCPVDFRYLALQRLTRHRFHIVDNIVREKNYYLSNLFLKFSGLCQNQVFSTNFSATATQLFDEFLTLDDIAARPLDELVDFIVEHGKELFSDPKATALALKDAVRKSYRINASVENSLNFVIKSCLDNIQALEKQKKATEKAIAQEILGFNNQYLCLTSVKGIGPTIAAGLISEIGGISRFEDDNALAKFSGLYWSEYQSADFTAEDTYLKRTGNEYLRYYFIQAADQLRKYLPEYSQYYTRKYNEAKTHKHKRALVLTARKAVRLIFALLREEKLYKPPAPKGGISEK

SEQ ID NO: 413749 - protein, 402 aa, unidentified
MTSNFTSIAVFCALDVGKSEHHGTALLADGRKTFDKPLPNNEPQLRDLFARLQRKGRVLVVVDQPASIGALPVAVARASGCEVAYLPGLSMRRLADLHPGSGKTDARDAFVIADAARTMPHLLRSITPDESVRAELAMVLGHDDDLAGDATRISNRLRGLLTSIHPALERVLGPRLRHPAVLALLQAFGSPAALAQAGGEEITRTLLEAAPRMRTAQKMTEQVMAALAEQTVTVPGTAAAGDIIPGLAEALAVILHRREVLEDRIASLLEAHPLAKVLTSMPGVAVRTGARILAAVGDGSAFPTAAHLASYAGLAPTTYRSGTSIQGEGPPRGGNKPLKRALFLASFASLSSPDSRAYYDRKRGEGKRHNAALICLTRRRIDVLHAMLKHRAAYQPTHEQAA

SEQ ID NO: 413750 - protein, 371 aa, unidentified
MTIICGIDAHDNTLTCCIGVDREVPELRRIKNTRNGREWLICYLKDLAGQNGGSRIVAAYEASTLGFGIYDELVEAGIECNILAPTKMPKAAKDRKKKTDERDAKRIFEMLRANVLAGNELPNIWIPDHETRDDRETVRSRLDVGKKLTSLKNQVQTLLKRNGVVKPKGAGNSWTKPYREWLKALQLPTGSRNALSSLLRQIATIMKEIEILDKQVKVLSETDRYEEASKELVERITGVGLLTAMVFLTEVGDMSRFNNRKEIGSYFGLVPSSNESGETDDHKGHITREGPARVRRVLCQAAWSRVANDEREAKVYNRIVERNPKHKKIAVVASMRRLGVLMWHIAAEAQSKAASLHINDESNYTAQAMRA

SEQ ID NO: 413751 - protein, 372 aa, unidentified
MNYNTVYVGMDVHKESFSLCAYTIEAEKASHYQRTEADYKKVLNYLEFLRTIYGDDANFICGYEAGCFGYTLYHQLTANNVKCIILAPTTMLEQRSKKRIKTDRRDAEIIAKCLAQHNYSPVHIPTAKDEETKEFLRMRDDHKLALKKVKQQILAFCLRHNYRYDGKSHWTAAHLKWLKALTPEALYKEILDEYMLTYQTLSDKIERLDKRIEELATQDEYKEAVKKLCCFIGVKTHTALSVLVEVGDFKRFASAQHFASYLGLVPGEDSSGDDQNRLGITKAGNRHVRLLLTEASQCYARGQVGFKSKELKSRQSGNTPAVIAYADKANERLRRRYYKMVLNKYKKHNVAKTAIARELACFMWGMMTDNIA

SEQ ID NO: 413752 - protein, 364 aa, unidentified
MEQITRGGVAGEVVRVGVDLAKCVIQVHAVDALGRVVTRRALRRDAFLSWCAQLPPGCVVAMEISSSAHHWARRLAGMGLQPRLMSAQLVKPYRSEGATGKNDANDAAAICEAASRPTMRFVPVKSVEQQSMLCVHRLREGLKADRTACINRIRGLLAEFDLVFAQGPEALSSVLADVLEDGSNEMNALARRVIEHARAQWRELEVHIAWCDERIAQHARDNAAVRQAAQLMGIGPVTASAVIATVDDFAQFKNGAQFGAWCGITPSQDSSGGKTKLGRITRRGDTYLRSLLVQGAKSAVMTAHKRSDPISRWTLALRERSGWQVAAVALANKNARILWAVMTKGIRFDPRHVSVKPCAPAAAT

SEQ ID NO: 413753 - protein, 313 aa, unidentified
MPMQTVIGIDIAKHHFDLHLLPSGKTKHFANNTRGIRQCRRFVLGVQPDKIVLEATGGYERALVMDLQAAHLPVIVVNPRRTRDYARAMGWLAKTDEIDASVIAEFATSPRVVVRPLPDTKARKRQALIARRDQLVQMHVAEQNHLEHAFDKDIVRSIRQVLKTLKRQIDHIEKQVAELIEADETLQRQFAILYSTPGIGETTAAMLVTQLPELGHCNRRQIAALVGVAPLNRDSGQFQGKRMTGGGRRRVRTRLYMPTLVAIQHNPVIRAFYQRLLNQGKAKMTALVAAMRKLLTILNAMVATNELWNPNIA

SEQ ID NO: 413754 - protein, 347 aa, unidentified
MSITMIGLDTAKSVFQIHGVNETGKVELRRKLRRSDLIAFFEKQERCTVVMEACGAAHHWARILSGLGHTVKLIAAEAVKPFVKKGKKNDAADAAAICEAASRPDATFVPVKSVAQQGILALHTTRSLLVKQQTMLANAIRGLASEFGLVVPKGLHNLEPLVALVEADEAVPAQARRAIAELYKRFGELATGIQAFETAIVAHARSDATARRLATIPGIGPITASLIAATVVDISRFKTARQFAAWLGLVPRQNSTGGKTHLGRITKAGNREIRKLLVLGATSMVGRAEGWHSAVGSWLRDILQRRPVRLVTVALANKMARIAWSVMTRNEVYRPQGGVAAKAQAAE

SEQ ID NO: 413755 - protein, 348 aa, unidentified
MTVYCGVDFHARKQTISYLTTEDGEVQQTELHHEQDNIRGFYAKLRSQGPVIVGFETSGYAAWFEEMLEDLGCEIWIGMPAAIRRQARRRQKNDRRDADLILELMLRGDFPRLHRYTPASREVLQQLRYRHRLVKLRTIVVNSLQYLALSRGVSLRTKLLTGRGQQRMKELKLPSHLAKQRDEMCELLQELTAKIETAESWLELKAKQDAQVERLMSHPGIGPLTGLCLVYTLEQVERFANPRKVTAYIGFDPVEDSSGERQRIGSISKQGSRLLRFLLVEAGQVAVRTDPDLKTAYWRVQLRRNHQKAKVAVARRLLVRAFIMLRDEIDYAEFQRRGVAARSTRRTA

SEQ ID NO: 413756 - protein, 364 aa, unidentified
MNKCHLNTELSSLEGTRSEFNRSKAVIKLGIDVHQDFYVVVEQMEGTNPKPAQRFQKQVFLHWAAKLSKSGSKVHAVYEACGFGFGLQRQLTAQGIHCYVVCPQKLDERNKRVKTDGLDAKALCLKLDRFVQGNREALALVRVPTEAEEQKRAIHRQREQLVKARKGLEAQGRSLLVNHGMQPLSNWWKARTFAQLQVPEWMKELLSNSQPILLALEEKIRALTAQLQAAAISKQPRGLGLLSSVVIDREIGSWTRFKNRRQVGSYTGLCPGEYSSGNTRVQSCVTKHGNPRLRAALVETAWRLVRFQPNYKPVLKWRKILAKGALATGAARKKAIVAVARQLAVDLWRIRTGRVAIETLGLIN

SEQ ID NO: 413757 - protein, 433 aa, unidentified
MNTPHSYDLIIGLDRSDKKADLHLITPATGQRRSATIDTDPEALWEWLLDLRQQQPQARVALCLEQPAVHLVAFLEAYDWITLYPINPITLQKYREAFVTSRAKSDAQDAFYLAELLLAHHHQLQPWAPEDSATRAVQQRVFHRRAVVDERTGLTNRLIALLKQYFPQALVLCGEDLWRPLATRFLLKWPSLQAVQQAKSTTVKQFYYLHGSRSAKRLEERLALIQKAVPVTNETAVIESFVLRVQLICRQLQLVQQTITHYEKQIAAAYAAHPDHEIFASLPGAGPVLGPRLLASVGSQRERFATAADLQHYTGVAPVTKRSGGSCYIHRRYLCPKFHRQSFHEYAKESILWSRWAAAYYLQQRTKGSPHQTAVRALAFKWQRVIWRCWQDRTTYREETYEAALRKNGSPLMALFAKVELGKSPFKNPVKKS

SEQ ID NO: 413758 - protein, 344 aa, unidentified
MPTIDYIGFDIHKKTISFCVKARDGTILEEGTIPALRKKLLAWAKARPRPWIGAMEATLFTAWVYDLLKPLAQALQVAHPPMVEAIAAAKKKNDKVDARMIADLLRCNLLPECYMAPVAIRDLRRVLRYRNLVVRQATRMKNRIAGLLMETGTAYNKERLHGKAYFSELLGSLQEVPHSVVELLQLSRGQVEFFATIQRRLLQGLRDHPELSQRVMRLESIPSVGEILALSWALEVGEVGRLPSIGQALSYCGLTSAQHNSAGKEQRGPISKQRNRHLQTILIEAAKLAPRYNPQLAAVHQRELQRGNRNRATLAVARKLVAYLMAVDKSGQPFQMRASGKEAA

SEQ ID NO: 413759 - protein, 412 aa, unidentified
MLKIVCPICCGVDVHKNFIVACIASTNDKGVTTYQTKRFSTYTKNLREFSDWLAANNCKDVCMESTGKYWQPLWNVLELTCRPVLAHPKYLKAIRGKKTDKKDAKWIADVFKHDLVSGSFIPPADIRQLRDLMRYRFKLTNYKTGEKNRAQNCLTTSNIQLDHAFSDVFGKSATAILNYLLEHPDEKNFDVTLFVDGRCKTPIEEIQLSIDGTISHEQAEKLKIIRSHIDSLEICKANLESVILTLAEPFLPQINLVASVPGIKDFSAIAVIAEIGVDMSVFPTAKHLCSWAGLAPQCNESGGKKKSSRVSRAGVYIKPLLIQCSNAVVTSNKHPEIRNRYLSIKKRRGHKKAIVAIARMLLTAIFHILKKNEPYNPDLYRQSDVPPVDPVENAVKMLEKRGFVVSQTDNIQ

SEQ ID NO: 413760 - protein, 427 aa, unidentified
MPEKPVAGIDVSKDFSDMCIITPDNKVFQTVHIFHDATSLRRSLAALEAAAREFREKPVIVMESTAHYHRVIAQFLQSAGYEVMVINPMQSGALKNINIRKVKSDKSDAHRLALLYRLKTLHTTNQPNELLSNIRDYCRQRADIMNSHTAYVNRLTSLLDQAFPGYARVFSRVACKSSLGILKTYPSPAAILAADPEQLAETISKYARRGVTTDYVIKKVAALRRAAENAEEINLKREAYSVLIVTVAELLEGLQRHIETLKKRIIELATEDPSVKFEVNLLQTIPGIGLYSAVLLRAEIGDFSLFQKPKQLVAFFGMDPSTRQSGKFVGTKTKISKRGSPYARAILDICAQSAVHPVKGKEPANPVLANYYAEKVKTKEPKVVKCIIMRKLVNIIFAVLRDKKTFELRTPEEHIELLKHPNISRAA

SEQ ID NO: 413761 - protein, 404 aa, unidentified
MTGRRTTHDVELQDETGRRLAKAKLPEGIAGVTRLHAIIGEHLSEDDDATQVVVGIETDRGPWVQALIAVGYQVYAINPLQVARYRERRSVSGGKSDTADAHTLADMVRADRHQLRPVAGDSDQSEAVKVVTRAHKTLIWEQTRHMLRLRSALREYFPAALAAFADLTAPEALELLAKAPEPASAARVPLTRILAAVKRARRHHAAVKAEAIRDALRADHLGQPPVVTTAYAAMVRAQVAILTTLNTEIKALQEQVRTHFGRHPDADIYVSQPGLSAVLGARVLAEFGDDKTRYASAKARKNYTGTSPITRQSGKRKVVLARHVHNNRLIDAVGLQALTAIRASPGARRYYDQLLARGVGHRAALRQLGNRLVGVLHGCLKNKTIYDEETAWPNLTERPEHAAA

SEQ ID NO: 413762 - protein, 353 aa, unidentified
MTNGSSLNETMGLDLSDKTGVYVVLDHEGEVCREGKVALTRQALSRAFGGGSPCLVAIEVGTHSPWVSRELALLGHEVVIGNPRQVKLISQNKKKSDREDALLLARLARLDRRLLRPVQHRGEQAQADLAMLRARSLLVAGRTSLINSVRGMVKTTGLRLPRCSAESFAARAQPHLPRELVPALEPLLAEIASLTARIKQITHAIEHAAAERYPETQQLRQVPGVGLICSLTYVLTLEEPQRFRHSRAAGAYLGLVPRQRQSGEQQPQMHITKAGDVALRSVLVQSAQYILGRYGPDSDLRRWGLKLAGEGNKARRKKAVIAVTRKLAVLLHHLWSTGQVYEPLRQADLQTVG

SEQ ID NO: 413763 - protein, 340 aa, unidentified
MQNLATIGLDLAKSVFQLHGMDHEGGAVLRKKLRRGQVLKFFATLPPCLVGMEACGSAHYWAREISAQGHQVRLIPPQYVRPFLKTNKHDAADAEAIAEALVRPTMRFAPIKSVDQQAVLMLHRSRELLVKQRTMLINAVRGHCSELGMTASQGASRVNDLLVMIEDPDDARLPMFAREALGVLIAQLHAVKEAIRTLESKLQAWHRSQQASQRLTTIPGVGVITATALVATIGDGSQFKSGRHLSAWLGLVPRQHSSGGKSRLGRISKRGDGYIRRLLVHGSRAVLRWQRATPKRPSPWIGELLARRPTNVVLVAMANKTARTVWAMMRSQQDFNAVLR

SEQ ID NO: 413764 - protein, 315 aa, unidentified
METTNPVPTATYVGLDVAKDRLDYTVDDTRCDHVPNTESGHERLLATLRQVKGVRVICESTGGYERALVAKLLQAKIEVCVVNPGRVRAFAQAEGLLAKTDRLDAHLLRRFGQKVQPRLHAPMDQAAIVLRELLDYRRQVSDQLVAVRNRLDLAGKVLRARLDAQVLFLQKELTETDRLIQEHIDHDDTLRRKAARLRELKGAGPVLTATLLAYVPELGEIESPQLSALIGVAPFARDSGRHQGVRHVRGGRGVVRHVLYMAAVAATQHNPLLRAFYARLVAAGKPKPVALVAVMRKMLHVLNRLIADPNFVLVR

SEQ ID NO: 413765 - protein, 435 aa, unidentified
MTANHASDISIGLDAAIVASHQVAIRGPDVREDFRVAPTLAGLAKLTERLRPYRGALVVAEPTGGSWVALGHAVGDAGCALALVKNRDSARLRKAISAHNKTDVIDAELLAQCEGVLSMEAAPPVAPQVLALRRALTRRHRLTVDAHRAECRLWSVASWAFPDLWRACGGHRVGQPVLSRWPQLGALARAHVTSVAEVVAGHSHDRHPLRRAERIRDAARGWSWFWEGRLDLGTLAWEVAALLDDIKAADARHAAATAKGVELWQAGWPGDVLCSVPGIGEICAAATRAWWGDGQQLRSAKAAAAFVGLNPSNWESGLSVSPSRPLTKEGPPALRLAYYQAANVARRHDPGLAAHYRTLMVERRHNHISANCAVARKLACRAWAVLQSGRPYEVRDLDGNGVGQPTATVLAAELAVPDEVRRRARASVRRGRLSD

SEQ ID NO: 413766 - protein, 369 aa, unidentified
MTESSDYESVQVFIGVDVGKDTHHAVAINRSGKRLFDKALPNDENKLRSLISDLKQHGQILLVVDQPATIGALPVAVARSEGVLVGYFPGLAMRRIADLHVGEAKTDARDAAIIAEAARTLPHALRTLKLADEQIAELSMLCGFDDDLAAQTTQASNRIRGLLNQIHPALERVLGPCLDHPAVLELLQRYPSPEKLASLSEKKLAAQLSKLAPRLGKSLAADITRALTEQTVVVPGTNAAIVVLPRLALQLITLRKQRDEVALEVEQRVLVHPLYPVLTSMPGFGVRTAARLLTEVACRAFASAAHLAAYAGLAPVTRRSGSSIRGEHLSRRGNKTLKGALFLSAFAALRDPISKAYYTRKINQGKRHN

SEQ ID NO: 413767 - protein, 353 aa, unidentified
MEYIAFDAHKYYTLASVARPDGRLVREQRLPHERGALQQFLARCEPGSPVAVETIGNWYWIVDEIEAAGCVPKLVHARKAKLMMGEINKTDKLDVRGLNQLQRNGTLPTVWIPPGELRDQRDLPRTRMVLVRQRTQLKNRIHAALAKYALHDLEVSDLFGVQGRDLLRQRLDLLPPHTAYATQQLLEQVEELGRRVRGFEQRMRTVFTVTPQIQLLMTVPGVGLILAVVIALEVGDVARFATAEKLAAYAGTTPRVHASGGKTRFGRLRPDVNRYLKWAFVEAANSICLMRGRKPHRHVSRLYERIARRKGHPKAIGAVARHLAEATYWILSKQEPYREPKSSAVSSTGDKRG

SEQ ID NO: 413768 - protein, 410 aa, unidentified
MDAFCGIDWAEDHHDVALVDHGGAVLARLRISDDAAGLTRLLGLLADHGDSAENPVPVAIETPRGLLVACLRAGRPVYPVNPMAVARYRDRHSVAGRKSDKGDAAVLANVLRTDIHAHRPLPADSELAQAIAVLARAQQDAVWDRVTAHNKLRSHLREYYPGFLAAFAAAKGGIMRPEARAILAAAPTPATAARLTLAQLRALLRKAGRSRGIDAEAARLREAFRQEQMRQPPLVEEAMGRQSRALLRQLDAACQNASDLEAAAIGSFSQHPDAGIITSFPGIGALTGARVLAEIGDDRSRFADGKGLKAYAGAAPITRASGKSRSVTRRHVKNNRLAAAGYIWAFSALTASPGARAHYDRRRDAGDRHAAAERNLFGRLPGCLHHCLATSQDYDEATAFPSHPAIPAAA

SEQ ID NO: 413769 - protein, 349 aa, unidentified
MPLGAVHPIYAGIDVSLEQSSVCVVDAAGRIVREAKVASEPEALIGWFRGLDLELARVGLEAGPLSQWLYAAMRDAGLAVELLETRHVRDAFKAMPVKTDRKDARGIAQLLRLGWFRSVHCKSLPAQETRALLTARELLRSKSHDAEMSLRGVLRGFGLKVGPTTARNFAGRIRELVAGHPTLTAVAEALLAAREVLGDQLRGLEKRLRDQAREDRRARLLMTAPGVGVIVALTFVAAIDDPARFRSSKAVGAHFGLTPRKYQSGETDVTGRISKIGDAGVRTMLYEAANIILTKPVKGSALKSWAARLAARAGMRKAKVALARKLAVVLHRMLADGTPFAAERAAAAA

SEQ ID NO: 413770 - protein, 371 aa, unidentified
MNSVVYVGMDVHKESYTVCCYTFDADKIQYQQKIASDCRLVLKYLEQVRKHFPIDTEYVCGYEAGCLGYTLYNQLTDHGVKCIILAPTTMAVTNTNRVKTDRKDAGNIARCLAFNTYSEVHVPTDEDNAIKEYIRMRDDQKKMLKSIKQQILAFVLRHGQRFEGGKTYWTIAHVTWLKSLKLKGVFQDALDEYLITYEYLNDKIKRLDLRIEELALDERYDGNVKKLSCLIGVKTHTALSVVVEIGDFARFAKAEKFASFLGLVPSEDSSGDNRNRHGITKAGNSHLRRLLVEAAQGYTRGTIGHKSIALKKRQQGNKPQFIAYADKANERLRRRFYRMTLKKGLNRNIATTAIARELACFMWGMMTDNIA

SEQ ID NO: 413771 - protein, 384 aa, unidentified
MVNNSITFIGLDTHKEFFEVAYIEDNRQAKPVSLGRINGTKQALQKLVRQFESKYPGSTLHFVYEAGPCGYWIYRFLTSLGHCCYVVAPSLIPKKAGERVKTDKRDAIKLALLLRSGDMQPIYVPEPEDEAMRDLSRARETAMKDLKDAKYQLKAMLLRNNIRCEIQDNWSAKHLRWLTELILPHPSQQIVLQEAIQTITERIRRLERLDNELSYHVKNWRYYPVVKAIQAMRGVRLLVAVGVIAELGDLSRFDHPRKLMSYLGLVPSEHTSGGKRKQGGITRTGNTRARRLLVEGAHTYRYAANVSTELQKRQENLSKEIIDIAWQAQLRLCRRYQRLIKRGKNYNLVVTAIAREMIAYIWAISREVVLTPVNPAKRLARVPA

SEQ ID NO: 413772 - protein, 339 aa, unidentified
MQIVTIGLDIAKNVFQLHGVDAAGDVVLRRKLRRSEVRIFFSRLTPCLIGIEACATSHYWARELVSLGHSVRLIPPSYVKPYVRRGKNDAADAAAICEAVARPTMRFVPVKSVDQQAVLVLHRSRDLLVKQRTMLINALRCHLAEFGIVAAQKRTGLAELVACVEEGVDDDFPELLRRGLNPLIHQLKQIQAQILQLEKEIETWHRYNSISCRLATIPGVGPIIASAIAATMLDPAHFRSGREFAAWLGLVPRQNSSGGKERLGRISRQGNRYVRRLLVIGATAVLRHDRRRTSGIGWMRALLERKPARLVTVALANKMARTAWALLARNADYRVPTTE

SEQ ID NO: 413773 - protein, 412 aa, unidentified
MKVVHEICCGIDVHAKMLVACLLMANGEKKIRTFSTMTDELLQLRDWLVAAQCTQVAIESTGVYWKPVFNILEDALTVILINPEHAHALRGRKTDVKDAEWLADLLRHGLLRPSFIPPPVIRELRELTRYRESLVREQGAVANRIQKLLESGNIKLGQVASDALGVSGRAILKALADGETDPRTLAALARGKLKEKSLSLERALHGRLTVNQRFVLRESLRRWEELETVDARVTREIDKYVQADPKLARAREILDSIPGIGLRVAEVIIAEIGIEMTAVFANAAHLASWAGICPGNKATGGKRLSGRTRKGNTYLRSALVQAAWGASMKKNCFLSSQYLRLLKRLGRKKALVAVAHSLLVIIFHVLQRDQTYTELGADYFDRHHVEQQREYYLRRLQMLGLKVTVEELPVAA

SEQ ID NO: 413774 - protein, 480 aa, unidentified
MNVKANQTKKQVNVENQANLLLSKEELRKRMEGVEKELKSYTWRELETNGKFAKNDKLSFITDDMLIVGCDIGSESHYIRAIDIRGRELGKGAFEFSNTAEGFENAKAWMLKHAAQNEKRQIVLGLEPTGHYWFALAAWMISKGISVVQVNPYAVKQSKEIEDNSQLKDDRKDPKLIANLVKDGNYGMPYLPEKTYADMRRLSMFRDQLTEDRIRNINRLHRELKIYFPEYMDAFGKIDGAFALEVLKVSCIPSEIAALGTEGLRNIWHDAKLRGRGYSRAGKIVNHAEKSVGLEDGTSSGREAVRWFSEQIMKLDEQLARIESTLHKKCMEIPYAENILEIKGVGENILAGIVAEMGDISRFDDVKEIQKLSGMGLVACSSGKHRGQTKISHRGRKRLRYWLFQAAKSAVSHAEEFKQLHVYYTTRARNPLKKMQSLIVIACKILRVIYTILKTGATYDPQKMLKDIKRPEAAPAQMAA

SEQ ID NO: 413775 - protein, 348 aa, unidentified
MRFYTKTHKHYCGIDLHARSMYLCILDCDGEILLHQNMKATPEAFLGAVAPYRDNLVVAVECIFTWYWLADLCAEEGIDFVLGHALYMKAIHGGKAKNDKIDAHKIAVLLRGGMLPQAYVYPKRMRATRDLLRRRNHLMRKRADLLAHIQNTASQYNLPPLGTRVDRKGERDSIPTHFPDPVVRRSIELDLSLIAHYDELLKTLEQELALMAKGHDAFSYHLLRSIPGVGRILTLVLLYEIENIDRFPRVNEFLSYARRVKAQKSSAGKIHGHSGKKIGNAHLKWAFSEAAVLFLRKNPDGQRFVERLARKHGKGKALSILAARLGRAVYVMLRRREPFNAQKFLAQT

SEQ ID NO: 413776 - protein, 449 aa, unidentified
MPQAILAVGVDPAKRLHRAVAVLFPDEVVLDVELPNAFDAVANLDHRLCELANQHGADLVYGLEDHRRYGRLFCQVLTERGRDVRVVNPLWTNRQRAFYGQDKDDAIDGRSIAAVVLRRHHQLPLASDFGEVAQAIREAERSLQDLSEARTQLGNRLHLQLNDTYTAAYEEYFGKLRSPLALRFFRRFPLPQDLVGHNVEMLASLLLDLAGGKVGPHKGGNRLIAMRSKAQAILETSGAMRASPRTLALELKAELIRQLCDELLANHDRIIRLERMLREQLLPATKQTITTITGISTILAATIIGETGSITRFRSPAAFAVYNGTAPARNSTGGRDRHKARRDCNHRLKRAFYLAARAAVLHDPLAKAYHQSCKSRGLSYVEALKRVARRMSDLVYALLKSGKAYDRSIIEHAIERRREQAAHATRSHAKQSLVHSRPRNLTRRSRSSK

SEQ ID NO: 413777 - protein, 340 aa, unidentified
MVYVGLDVSLNSISVCLVDEAGAIIQEGTVCSDPSSVLSFVAPWQHRIVRIGLEAGPMSEWLTASLIRLGLPAISLEARQVKAALSAMPVKTDRNDARGIAQVVRTGWYKAVHVKSIGSQQARMLAAARKHLVRSIAAAEQVIRGLLRPFGLRVGIVSKIKFAERVRELIEGNSALAVVMEALLAAREALLREYRRLHKLVLNAVRDDPVCRLLMTMPGIGPVSALTFRSTIDDPNRFTHSRSVGAYLGLTPRRYQSGEVDRTGRITKVGDGETRTALFEAANVVLRPSTRWSPMKAWAVRVAQRQGTKRAKVALARKMAVILHRMWRDGAEFRWTAATA

SEQ ID NO: 413778 - protein, 342 aa, unidentified
MGEITTIGVDLAKNVFQVHGVDEAGTTVIRRQLRRRQVLPFFKKQPRCLVGLEACATSHYWAREIAALGHEVRLMPPRYVKPYVKRNKNDAADAAAICEAVTRPSMRFVAVKGAEQQGVLVLHRTRELLVRQRTMLVNALRAHLAEFGVVARVGLPQVKELLSVIADEADERIPALARTCLAGLARQLLSLEREIVASEKRIHAWHRASEVSRRLETTPGIGPITASALTVSISDPSLFKNGREMAAWIGLVPKQSSTGGKERLGRISKQGDHYLRWLLVAGAMTVIRHAKRRGTADPWLANIIANKPTKVAAVALANKNARIAWALLSHGGTYRKPAMAAA

SEQ ID NO: 413779 - protein, 412 aa, unidentified
MEVYCGIDWAEDHHDIALVDRDGQLLARRRIGDDAAGLAALLELLAGHGDGPDDPVPVAIETPRGLLVACLRATGRPVYPVNPMAVARYRDRHSIAGRKSDHGDAVVLAGVLRTDRHAHRPLPAGSELAQAIAVLARAQQDAVWDRTTAHNKLRSHLREYYPAFLTAFAQARGGILRPEARAILAAAPAPADAARLTLAQLRALLKKAGRSRGIDTEAARLREAFRAPQMRQLPLVEQAMGRQALALLGQLDAACAAAGDLEQAVTQSFNLHPDAGIITSFPRLGALTGARVLAEIGDDRSRFQDAKGLKAYAGAAPITRASGKSRSVTHRRVKNNRLNAAGYIWVFAALTASPGARARYDRRKDAGDRHAAAQRNLFARMLGCLHHCLLTGQHYDEATAFPATDHKLPQAA

SEQ ID NO: 413780 - protein, 346 aa, unidentified
MKIIGCDFHPSFQQIAVFETETGEITEHKLVNGNGEAERFYRSLPVPSLIGIEACGNSHWFIDLLGRLSHEVRVGDAAKIRASYVRKQKTDRRDAGHILTLLLENRFPKLWTPSGQERDQRQLLIHRHKLVQIRTRIKNSLQHLALNQGVQKKQKLWSKAGQKVLIQLPLEGWTAVRRQDCRELLAQLDQRIARLDKAAEQAADAHPQASLLMQQKGVGPITALAFALTIGDVSRFEHSNQVASYLGLIPSEHTSSSKRRLGSITKQGNSFLRMLLVEAAQSVTRLDPQFHKHYVHLCRNKPKAVAKVAAARKLAVRLYWVLRTDQNSQKAVPIESSPRVPLVGAS

SEQ ID NO: 413781 - protein, 425 aa, unidentified
MAAAVDRNGSEPEFAAIVAFDWGNDKHAWAAQDTESGTRERGELEAKPEEVDAWMTTYLARYPGRRVAVALEQKRGALLYMLMKYEQVVLYPIHGATASKFRAALYPSGSKDDPKDAELLLDLLTQHRDHIRRLDPDTEETRQLQLLVEKRRTLVDERTRQSNRLTAELKMYFPQMLGWFTDVQSPLVADFLNRWPTLPEAQRARPETVRRFLHQHNCRKAERIEQQLEELQHAIAVTTDPAVVEPTVIMVRALVEGIASLSKGIKEFEDKIEAVMAVHPEAKLFRSLPAAGAALAPRLVAFFGTDRQRYASGEEVARFTGIAPVRERSGKRDWIHFRYACPKFLRQTFHEWASHTIGQSVWARAYYDQQRANGSGHHAAVRALAFKWIRILFRCWKDRKPYDEQTYLAALRRRGSPLAAALPNA

SEQ ID NO: 413782 - protein, 394 aa, unidentified
MKLVGIDVGKNSHHFCVMDKETGEFNVAPSSFSNNKEGFDFLINSLKPYSKKSILIGMEDTGHYHVALLKFLLSNGYTVALINPKTTDLARKMEGGITKNDKLDTITICDVLDTPERKKQYRITKVDRFDLYEQRQLTRHHHNLKEELNVYCNRLQKSIDLVFPEFNTLFSSKYGIVYMNLLKTFGSAEAIASTDIRTIRKCFEVKGRGGRISLTPEKLKECAKNSIGISSEVETIQIKHLVSQITLIKEQIAEIDKKIEEFSITNNSPILSIPGISHFSGTSILAELGDIGNYSKPSQIIKFAGVAPYHYESSQYNAQHTGITKKGSKYLRKTLYQIILTVINNNPVFKKYYRLKISQGKGHRCAQGHCIRKLLRIIYHLLETGQSFDPALLR

SEQ ID NO: 413783 - protein, 405 aa, unidentified
MEIFCGIDWSEAAHDVAVVDETGRLLARRRIADDAAGFTALTELLAGYAGRPERVDVAIETGRGLLVAALRAAGHRVFAINPKAVDRYRDRHGVAGAKSDPGDARVLADILRTDRDRHRPLPADSDLAAAVGVLARAHQDAVWARVQDANRLRSLLREFFPAALTAFADLTTNTALAVLAAAPTPTAAARLSRANLTDLLRVAGRGTRPTEAARLAEIFTVDQLRQPPVVEAAMGQAVRAIVRTLTAANQSISDLEAALAVAFDQHPDGEILRSLPGLGPILAARVLSEFGDDPTRFPDPASRRAYAGTAPITRASGRSRVVLARHVRNKRLADACYLWAFAALNRSPGARAYYDTRRAAGDRHNAALRRLASKLLGQLHHCLTTSRPYDEALAWPQPDTTPAAA

SEQ ID NO: 413784 - protein, 309 aa, unidentified
MSHTYIGVDVAKDWIDVFDPSTSRHESIPTEKHSLRRFAASVGQAIVVLEASGGYERPILAALSEAERHAVCVNPRHAREFARATGRLAKSDRVDATVLAEMGRALELAPASPRSAERQRLSDLTAHRNDITAMIVAEKNRLRATTDQWIRRSILQHMRALQGSQAKVEAEMEAVIQEHDDLRDQYARLRCVKGIGPVIAATLIAQIPELGQLDPRRIAALAGLAPYANGSGHRRGRRSIWGGRGTLRRCLYLAALTASRFDPRFNAFKERLIATGKARKLVIVACARKLLTVLDAMIRTKTAYQELPS

SEQ ID NO: 413785 - protein, 377 aa, unidentified
MHSENIAAYIGLDVHKETLAVAIAAPERLGEVRYYGTINNEAQAVRRLFQKLQGLYGNILSCYEAGPCGFGLYHQLTAMNIKCQVIAPSRIPKSPTDRIKNDHRDAISLARLLRAGELTPVWIPDLTHEAMRDLIRARAAAKRDSRVARQRILSMLLRTDKRYAGKHWTGKHRTWLANQSFSQPSQQIAFQHYCQSLEQIEDRILQLDQEISRLLPEWSLCNLVYQLQALKGVGQLTAITLVAELGDFSRFSSPKQLMAFLGLVPGEYSSGNSIRPRGITKVGNSELRRLLYEAAWSYRTPAKVGAWLIYYRPDSVTQYSKDIAWKAQQRLCSRYRSLTAKGKKSQVAITAVARELTGFMWDIALAAQSSFSQQKQN

SEQ ID NO: 413786 - protein, 342 aa, unidentified
MTNFVSFVGVDIASAAFMACVGTLPWKVTVKPVKLENDEDVFISFLGWLKEHSLKAESTVVCMEATGVYGEGLAYFLYASGYMVAVEPPLNIQRKFPVNASKTDELDCQYIAEYACRYGDILSVWKPRAEILEQVQVLLTTRQHFSVQLTGHKNALHAVNRKKVSSELAKQVHHNMVEQIAKSIKAIDQEIRRLIESDPTFKQTLLLLLSVPGIGLQLAAHLLIHMQDTLDPKVLAAFIGICPIQHESGSSVFATPTSRHYGPSVLRKLLYLGACSVRTHKKQFHQYFFRKLAEGKHKKLVLNNIQNKILKIACAVVRSQQPFIPNYVSVNPLAFQKTLTAS

SEQ ID NO: 413787 - protein, 346 aa, unidentified
MKKVIKQVLGIDVAQKELVVCLGRMQEGLLIELHARKTFANTAKGFEAMEQWVNKLADNTLPVSYVMEATGVYHEPLAYFLRGCGRNVSIVMPNKISNYMRTLEIKTVTDKTCADAIARFGLERSLEVWDKPSPLYKKIRQLTRERDQLVQERTILKNQLHAEQAEAEPSKTAVKRLNQRIALLDKQEEEITREVATLVKSDEETATLVKLFCTIPGISTLTAAIVLGETSGFDLVRNKKQLTSYAGLDVKEKESGTSVKSKPRISKKGNRFLRKAMHMPALSAIRCDARFKTLYARLVAKHGIKMKAVVAVQRKLLEMMYTVYKTRLVYDKDFLEKQASKTGKAA

SEQ ID NO: 413788 - protein, 343 aa, unidentified
MANVFVGVDVSKAELVCRVLDEKGRELGQEAFRNGSAGFRKFKSFLLALDPEGRFFVGMEATGVYYRNFAKFVFHSNDRFVPGVFNPASVKAFAQSRLSRTKTDGQDALLIARYALELFRDDAFRPWEPERTEVAQLRQLVARREQLVETRTAAQNRLHALKEDEDSLDFVIESVEKELAHLDEQVREIDRRISLHMDRHEGLREDRELLTSIPGIGDTTAASWLAHLGDLSRFDKPSQIVAHIGIAPRERQSGSSVRGKPQICRTGIKELRKALYLPVVVAVTRFNPTLKAFYQRLLARGKQKKVALIACMNKLIRIIWAILKSRKPFDPGRVPPVPETQPV

SEQ ID NO: 413789 - protein, 360 aa, unidentified
MQIIGCDLHARQQTLAMLDTNTGEVVNRTLQHEGNNVREFYSNLAKPVRVGIEATGSMQWFVNLMEELGIECLVGHPAEIRAAEPRKQKHDRRDADLLLSLLVQRRFPAIWLPTKELMDLRALLRHRHQWVRLRVKIQNALQAIALANGLRRGSSLWTQAGQQAIASLPLSPHAAYRRNELQAMYAKFAAEIEKLNQRVEQQARGRSRTRLLMTHPGVGPITALATEVFLGDPARFASSKALASYVGMIPGEYSSGKRQRLGGLTKQGNPLLRFLWSEAAIHAVRRDPELKHFYRRKLIQKGLGKARAAVARKLGIRMWIMLRDGLEYNEFCRRGQMQQKVVMPMRGCQHGVMVRKSPAD

SEQ ID NO: 413790 - protein, 353 aa, unidentified
MRRPKDKLIAGLDLHSNNVMIGVISQDGKRVAHRKLECDLKQVTEFLAPLKPQLQSMAVESTFNWYWLVDGLRGQGYPIDLANPAKIEQYGGMKHADDKDDAFHLADLQRLNILPKAHVYDPQLRPVRDLLRRRTNLVHQHTALLLSFSSLYRRTTGQKLDLGEAKKMEPKQAPKLYEHPANQLIAQVQAEHIQALAKSISRVEKAVLACAREIPLYDRLLTIPGIGRILGMTITMEVGDIARFKTDGDFASYCRLVDAKRLSNGKCKGDNNQKCGNKYLAWAFVEAANFARRYNENCRRWYDRKAAKTHKVLATKALACKLAKAAWHVMVGSCNYDEKRMFPELATKAMKPS

SEQ ID NO: 413791 - protein, 351 aa, unidentified
MIIIGVDYHPSDQYIAFVDTETGEYVERQLNHSDREAEKFYRELAARGVSVRVGMEATGYSRWFERLLAELGIEVWIGDAAEIKTKRVRKQKTDREDARLMLRLMRENTFPRIWVPSPENRDLRQLLWHRHRLVQMRTRIMNQLQALAMNEGRRRKKKLWSEQGRAQLEKLPLATWASRRRKDLLELLDRMNPTIEELTRAIEQEAKKWPEVLRLMTHPGVGPLTALAFVLIIGTPERFKCGKQIGSYVGLIPCEDSSAGHQRLGHITKQGSSLLRFLLGEAAQSAARWDSDWRRRYVHLAMRRQRNIAKVAMARRLAVRMYWMWRNGWEYSEWIKFGSHAGQLGTRHGVN

SEQ ID NO: 413792 - protein, 341 aa, unidentified
MTLYIGVDIHARQQTVSYLDTEDGTTGQVELQHERDDVKGFYRQFQGEVIVGIEACGYTNWFEELIEQLGHKLLVGDAAEIRRLARRRQKNDRRDADLLLDLLVHNEFPALFRYSPESREVLRQLRYRHKLVKLRTMVVNTLHALAINAGLSLRAKLLTKGGRQQLRGLQLSAISQQQRDELLSLADELTKRIHIVEQWLQTQAKSEPRVLRLQTHPGVGLLTSLCLVHTLGDLSRFSSTRKVAAYVGFDPMEDSSAERKAYGGISKAGSRLLRYLLVEAGQTAAKDDEHLRQFYRRLLPRRGKARAKVAVARKLLIRCFIMGRAEIDYAEFLRRGQKEAE

SEQ ID NO: 413793 - protein, 339 aa, unidentified
MKHVIALDVSKGKSTMAIYDRYKQCEFEGELNHTRVDFDWLHQRIEEMTALDGQAPEIVFKATGIYSKPVEKFLAINGHPYCRMNPLEANLQMTKMRRHKTDLSDAHELAKTHFNMDRKSTYQQNDYYEQMRAITRYYDEIDEEMILLRSRMHAILHLSFPELEQLITPSSALFLNVVQLYPHPALLQVHSKTTIKNRLKSNTRKNLSLERAEKKAVILLKVAKNSYPAIEPTDIRCDQVRDYARRIADLIEKKDQLVKQMVAMSEGKKEYKVLRSFPGIGDTTACRLIGELGHIRRFKSAKQLNAYAGIDIMRYQSGNMQYRDRINKRGNKKLRKCFL

SEQ ID NO: 413794 - protein, 410 aa, unidentified
MTLYCGIDWATAHHDVAVVDDNGNVVARGRVSNDAAGFAQLLTLLAQAGDSAEDPIPVGIETDHGLWVAALRATGRVIYPINPLTASRYRARYAVSGAKSDATDAVLLANIMRTDRQAHRPLPADTELAQAIRVLARAQQDAVWARQQIGNQIRDLLKDFYPAALVAFDRLPAGGLARADARTILAAAPTPAQAAALSPARLRRLLISAGRRRHLDRDVDRLRAVFTDTYLHQPPQVETAMGIQLGALLRQLQAACTAADEFAEAAIAHFERHPDAEIITSFPGLGMLAGARVLAEIGDDRARFADARGLKAFAGSAPITRASGKKTVVLHRHIKNRRLAAVGPIWALASLRASPGARRHYDARRATGDWNHQAQRHLFNKFLGQLHHCLHTGNHYDEHLAFPPPLTRAA

SEQ ID NO: 413795 - protein, 331 aa, unidentified
MSVWVGVDIGSRTSVVAVRKDGRPAGQWDIAQTPAGRKAAVKKLLALKPKSIVMEATGIYYLDLALELHAADLPVSVINPKSFHNFAKLMLVNSKTDAIDAQLLSEYGERMTPRLWTPPSLVQLELRALGRHINRLVGHRTRAKNELHALQATATTVSMLIEDQEEAIASLDNRIERFRKAGRELVAQCPTLTRQYKQLLAGPGMGEVSALAALAELTILPQILKSSQVARHAGLDVRQTQSGTSIDKPGRLGKSGNAYLRAAMYMPALTAVRCDPYAKAFYESLVNRGKKKMQAIAAVMRKYLTGIWACMRGNEPFDTAKLFSSEHLRKA

SEQ ID NO: 413796 - protein, 344 aa, unidentified
MGEVSTIGLDIAKSVFQVHGVDGAGAVVMRKRISRAKMLEFFADLPRCLVGMEACPSAHHWSRKLQALGHRVRLMPPSYVKAYLKRSKNDANDAAAICEAVVRPSMRFVPIKTKEQQAGLMLHRTRQLLVRQRTMLSNALRGHLAELGIVSAKGRNGISQLLGIITDVTDNRVAPAVRGLLDVLARQYSAIGAEIRSIDKSILTWHRSCEASRRLEEIPGIGPIVATALVAEVGDWREFRSGRNLAAWIGLVPKQHTTGGKERLGSITKQGNRYLRWLLVTGAMAVIRYAKKHGTERRPWLARLMERRHTKVAAVALANKMARMAWAIMVRSERYEEPKLLLAA

SEQ ID NO: 413797 - protein, 347 aa, unidentified
MSFIGVDLHQNSFTVCRRKTDGAESFETLTLSAADLERFCLSLDADDELAVEATGNSAWFRDCVLPCVGRVVVVNPSQFKVIRKSVKKTDRNDAAALALFLAKDMLPETRARTQGENELASLTQTRDLLVKQRTRLLNKIHALHVRKGLKLRKESLGSKRALASIDLALFSACEVIEIEVLREQALSLTASLARLDREIEGVASTFKGYAGLTSIKGVGPRSAAVLLSTIGNVHDFESADKLAAYFGIVPRVSQSNETDNRGRITKRGNKLARTTLVQCSLIAMRYSSYLKTYYDRIRQRRGTGKAIIATARKLLAIIYDTLKNGWVFDDFTRFSRRDPLIPAGQTS

SEQ ID NO: 413798 - protein, 365 aa, unidentified
MYIVGLDVHAKRSSMCILDENGKLVKHLEVKGAWARMLQVVDEQVPRPFAVCFEASCGYGYLHDQLAKRAERVTVAHPGQLRLIFRSKKKNDRVDADKLAKLLLLKEVPAVHVPGMDVRAWRGLINYRRKLIGRRAAVKTQVRAFLRGLGIAVGVKGGLWTKKGVAWLTGLALTSPADAVRRDVMVDDLTALEEKVRRVERELNRIGRAHPGVTLLQTIPGVGPRTAEAFVAHVDDVSRFARVKQVGSYFGLVPCQDASADRNRLGHITKDGPAGVRWLVAEAAWQGRRRSAKIRAFFDRVMRNDPGRKKIALVATAHHLTRVMTAMLRSGEVWREQEPQQPQTPPPALDQQEATTKKTKTSNKE

SEQ ID NO: 413799 - protein, 338 aa, unidentified
MNITTIGIDLAKTTFSLHGIDERGRAGLRKTVSRKKLLLTLAQLPPCLIGMEACSGAHYWAREIRKLGHDVRIMAPKFVIPYRKGGKNDNNDAAAICEAVARPDMRFVPIKSAEQQAVLSLHRVRQGLIRQRTGLVNQLRGLLTEFGLIIPKGRYQTHGHIPAILEDADNGLPDLARQLIHNVWQRYQDACAQVLETDRALSAMARESSQARRLMTIPGIGEQVSTAIVASIEPQQFDSGRQLAAWIGLTPRQYTTGGHVRLGRITKQGDKYLRMCLIHGARAVIANLRDKQDRISCWLRHLIARRGYKRAIVALAARNARLIWTLMTKKEDYRVAIA

SEQ ID NO: 413800 - protein, 403 aa, unidentified
MTVTIGIDPHKRSHTAAALDEAEELLGVVRVEAGPHQLGQLLAFAAAFAPRRFAVEGADGLGLLLAQQLLAAGETVLDVPPKLAARARLLGNRRSAKNDANDSVSVAAAAMRSPLVRPAAPEDATVVLKLWARRSSDLARDRTRLVNRLHALLAELVPGGAARRLTADRAQALLEGLGPQGTVGAARLVLAGQLLDELRHLDGQLAQAKAQLKAAVAASGSSLTGLYGVGPFVAATVLGEVGDVARFTDRAHFAAYNGTAPVEVSSGDHRRHRLSMRGNRRLNHALHIAAVAQARAKGGPGRAYYDRKRAEGKSHKEALRALKRRLSDAVFVVLQADASRAEVTEVGPGGQAGNGSMASVAGSHPEHRLFGEATPGPVATLEPQPPARPRPSQHRPKETRQAS

SEQ ID NO: 413801 - protein, 412 aa, unidentified
MSDRAALVGVDWGDKKHAFEARGADGSLRKGWIEQRPEAVHEWVAELRAQYPDGTIAVAVEQSRGAFVYSLLRYEFLELLVLHPSQTAAFRAVVKPSGAKSDQLDAGLMCDYVEKHGERVRAWRSVDALTRELLLVVEWRRKLIASKTRCCQQLRDTLKQYFPQALGWVGELDSPMALDFLERWPTLEELQRSRPTTVRNFYTKHGSRSAGLLEKRLAEMAAATPLHSDAALVSALSLMVGTLVPLLRATLEQIHTVDGRIEQLWLTHPDRKIFESLPGAGPALAPRLAVALGTDREQWDARTLQTFSGIAPVTVSSGSSKWIHARWKCPKFLRQTFHEFAAASIQHCPWAAEFYRQQCARGRKHNAAVRALAFRWIRVIVRCWKDRAPYDDARYSKRLAASGSPVAAALFS

SEQ ID NO: 413802 - protein, 366 aa, unidentified
MYIVGLDVHAKRSSLCILDENGKLVKHLEVKGDWQRMLQVVDEQVPKPFAICYEASCGYGYLHDQLAKRAERVTVGHPGQLRLIFRSKKKNDRVDADKLAKLLYLKEVPAVHVPGMDVRAWRGLINYRRKLIGRRAAVKTQIRAHLRGLGIAVGVKGGLWTKKGIAWLSEQAMSSSAADGLRRDVMVDDLTELEAKVRKVERELDRIGRAHPGVTLLRTIPGVGPRTAEAFVAHVDDVSRFARVKQVGSYFGLVPCQDASADRNRLGHITKDGPAPVRWLIAEAAWQGRRRSPKIRAYFDRVMRGDPQRKKIALVATAHHLTRVMAAMLRSGEVWREEEPQQPQTPPPASDQQEAKKTKTKTSNKE

SEQ ID NO: 413803 - protein, 346 aa, unidentified
MDQFVGLDVSQEMTHLCVIGNDGKLVWQGKCLSTPEDIAGNIRSKAPDVVRIGLESGPLSTWHWHALKAMGLPVLCLDSRHAQATMSGQVNKTDKNDAYGLAQIVKAGWYREVGVKSLDSHAVRSMLGARAQLVGMRVEVTNQIRGILKTFGVILSRRTGEPFERLVDEACDNSDPMLNQTVRSMLCVHSCLKEQIRQLDRQLMSRARGSAVCRQLMAIPGVGVLTALAFVTAVDDPSKFAKSRSVGAYFGLTPRCYQSGEIDRKRGISKCGDSLVRTYLFEAAGTLLTRVEKWSGLKAWGLRIAKRSGLKKAKIAVARKLAVVMHRMWVDGVSFRWSAAEAGAVA

SEQ ID NO: 413804 - protein, 390 aa, unidentified
MQALYPRPDEHAAVRTDLKAIFVSLELSRSTWVITSLSPGGGEKMSKHAVPSGDIPALLARLSQLKEKARARTGQVFPIIVIQEAGLDGFWIHRVLQQEGIESHVVDPASIATSRRRRRAKTDKIDGEALVRALLAYKRGEPRVCAMVQAPTPHEEDRRRISREREVLTAERVQHVNRIKGLLFAQGIGDYEPLHRNRRERLEELITGDGRPLPECLKAQISRELDRLELLIEQVKAVEAERDAVLAQAQASSGVPAPAAQLLALRGIGPEAAATLWTEGLFRTFNNRKQVAAYAGLAPTPWQSGAVHRDQGVSKAGNPRLRTIMIQIAWLWLRHQPQSALALWYRARIKRTGGRLGKTMIVALARKLLVALWKYATAGVLIEGAVLKPA

SEQ ID NO: 413805 - protein, 437 aa, unidentified
MSQPSSLTALSAHEKRQLAAHTGAVVGVDAGKFAHTLVVRPAGGADAKPVSFPVTREGFETALTAIHAAAPGVAPRDILVGIEFAGTYGFTFAHYLHDQGFPVVSVLAAHTKHWKEVTHNQALKTDAKDAAVVTDLVAQGKFVGFAFLEQPYAELRYLVSAREHVTTLRNAAITRLIAVLDVVFPEYERLFGDLAKPTALAVLAAFPGPAALLTAPKRRVLAVLRRASRGHVGVARYEALVAAARDTLALPGAQGVLKDEVPLIIERIELCHAQLATLKARMIDILAGLPDAQALLTIPWVAPVTAATFLGCVGNPKAYTSSAQVLKLAGLSLVERSSGVTQGRRRLSKRGKPVLRRHAFMFALRSVRADGLYRADFERLLKNNGGKKLAALAAISRKALKLMFRVARECRPYVPTADWRSSDQHTTRTSTEGRSAA

SEQ ID NO: 413806 - protein, 317 aa, unidentified
MTVYAALDVSMEKTTICVINAEGKTVLEASTSSDAEAIAMCLDPYCAELDQVGLEAGPLAEWIARGLEYHGMRVVLMETRHVRAALSAMIAKTDRNDARGMAQLLRSGWFRPVHVKTVPAREQRALLAARSTLVRRHRDVENSVRGLLKGFGLRIARALRGRWDNAVREAIAGNSVLLSIIDPLLVARQAIRDQLAILDKRVRDVARADNVCRRLMTAPGVGAIVALSFRAAVDQPERFKSSKAIGACFGLTPRKYQSGESDRNGAISKAGDASVRLALFEAAHVILTRVSKWSKLKAWAITYRIFRTFQRWRLLPN

SEQ ID NO: 413807 - protein, 371 aa, unidentified
MTGVKQCNDTLEGWGGAGSDVRIGLDVGDKTCRWAGIDVATGEVREGMLATTPGAIRTSFGAAGHCVVVMEAGSHSPWLARTLNELGHRGVVVEPSILVQGGGRRRRKNDRRDSLGLMEVARDVGRPKVKELWQRPEQYQEDLSLMRMRDATVRARTVLASAARGAVKPYGERLGAHSVESLPKFAREELSERTRTLVEPALALMEEATKAVDVYDQQVTDYLARRPESARLLQVHGVGEVTTGVFMAVIGDPRRFKRSRDVAAYLGLAPGQDQSGADDPQLPISKTGDALARRVLVQCAHFIMSSKGRDSGLRRWALKLAGDGKNKTRKKKAAVALARKLATLLHRLWLNGERYEPMRGLEVEPEGAATC

SEQ ID NO: 413808 - protein, 413 aa, unidentified
MDVLHPRCCGLDVHKSSISACILLREAGRVQKQQRRFGAMTQDLHELAEWLRQFGVTQVAMESSGVYWKPVWNILESRFTVVLANAQHIKNVPGRKTDQKDAEWIAQLLQHGLLRPSYVPCEIIRDLRDLTRMRASLSQEASRISSRIQKVLEDANVKLASVATNALGKSGRAMLEDIIAGEDDPEHLASLALGHLRMKIPQLRLALEGKIRSHHRFLLRRLLDQMQFVEHEIALLEERLEDIGRERPELSQAVARWDTIPGVDRVAAWALLAEVGDNMAQFPTAEQLASWAALCPGNHESAGKRLRGATRQGSPWLRRMACQCAWAAARTKNTYLSSQFRRLAARRGKKRAIIAVAHTLIVIGYHLQKNHSNYADLGGNYFDRIHSDGLKRYLVKRLQQLGHKVTLEPIEAA

SEQ ID NO: 413809 - protein, 357 aa, unidentified
MKMNHKVQEFVVKGKEVFVGLEDSKTTWKLAVRCERMLIHRVSMEAKYPALIRYLRNKFPECVIHLIYEASFKGFNLYDRLTEDGIDCVVIPPHMVTEPKVSKVKTDKRDANRLSLILENHDFKDACHVPDRERREDRQISRTLIAMQKDVIRTRNRIRKLLDFHGVEVSFPDRWGRDEFRALKKLSLSDPLRISLDILLTQLEELWAHQKSLRAALRSLCRKERYAKAFTIARSLPGIGWFTAIRLILELGEDLSHFTTGKKIASFVGLTCSEHSSGETEVKGHITGMGSGFIRATLVENSWAAIKKDPVLLAKFSRVWRASGSKKKAIVAVARVLIVRFRACVLAGTPYAMGVVH

SEQ ID NO: 413810 - protein, 377 aa, unidentified
MIVIGTDTHKCTHTCAAAKSGTGELQGELTARAREPGFRELLDWGRELDSERIWALEDCRHVSGALERFLVGEGERVVRIPPKLMGESRKAERARGKSDPIDALAIARAALKEGPETLPVAQLDDEALELKLLLDHREDLVRARGEDQQRLRWHLHDLWPELEIPAGALDRALWLDRIARRLARAEQTARVRIARDLVRAVRERSRRATELEREIGALARAQAPQLIELPGCGPLTAAKLVAETAGVKRFSSDAKLARLAGVAPIPASSGRRDRHRLDRGGNRQLNCALHRIAVTQGRTHPPARDFLARKQAEGKSRMEALRCLKRHLARAVWQALRAATSPEPSGRPFAPPSAESRSTPPPSLMIHPNCGQPLVWG

SEQ ID NO: 413811 - protein, 442 aa, unidentified
MKHPTPALEALPVINPHAAGIDVGSQKMFVSVAGGPPQVFGCCTADLRQLREWLRQQGVTTAALEATGVYWLCLYAELERAGLEVYVVNGAHVKQVPGRKTDMTDCQWLARLHAHGLLRRSFVPAAPTRQVRDLLRVREDLITMAAAHIQHMHKALERLGLKVHTVLSDLTGFSGLQLVRAIVGGERRAEVLVDKCDAQVRDKKRAALLKALEGNWQAEHLFALKLALEAWDFYQQQIGACDEQLQQLLPEQVVDQPQPDLGSKKELRHNAPKAMPELQRWMAQLFGTDLTRLPALNQYTLLKLYGEIGADLSRWPSEKHFTAWLGLAPAHQQSGRRRRRQWRPMGRGGRIFCLAAQSLANAKQTWLAGVYRRLRSLRGAKAALKAVARILATLFYRAATQGWKYVEQGLVQYQQKYRLQQQRRLERLARDLGMVVVPKPQS

SEQ ID NO: 413812 - protein, 356 aa, unidentified
MKRTLENTNNLFDGQEFNIGLDVHKKNFKVNIRNNGRELKRFSMDPNPDELRRYMDKNYPGGKYNSVYEAGFCGFWIHRELVKAGINNIVINPADVPTMHKERKNKTDKVDSKKLARELENKSLEKIYIPTEEEEALRSISRLRFQIVKDQTRTKNRIISFLDSHGIKLPGNSEEKHWTKKYMQRIKEIRFSEENYNIYLNGLIEELEHQRSRNLEILHLIRKICNENEIIGYISTVPGIGIITAFTLYAELYNMARFKKLDELASIVGLVPSVSESDETKHNLGLTIRFNKYLRTLLVEASWQAIRKDPALTASFNEYCKRMIKQKAIIRIAKKLLNRIRYVWINKKEYVIGVIE

SEQ ID NO: 413813 - protein, 390 aa, unidentified
MIFVGIDVAKDKHDCCILSAEGGKLARFTFTNDRAGFEQLLEAIAAHGEQENTKIRLESTGHYSINIQNYLLQKRLCVRVFNPLQVNLARKAETLRKTKTDRSDSAFLAQLLLSDGKLKSYSQPVLAVSELRMLTRSRFRLVGMRSKYKLSISRLITVLFPELPQAVWSVNQKSTYALLLEFPTAQDIANAHLTRLTNLLSANSHGKYGREKAIEIRELARNSIGLNSRAAGFELQQTIRLVQNLQEEIDLLDKEIRGIMREIKSPVLSIPGIGFVLGAMILSEIGDVENFENPAKLLAFAGLEPSTHQSGNYNANKTPMVKRGSKYLRWALLQAARLVAYRDETFGAYNAKKRAEGKHHFVALNHTAKKLVRVLFHLLKTGQNFQPQLG

SEQ ID NO: 413814 - protein, 322 aa, unidentified
MTQVICGIDVSLITLDARVGREGAAASFPNTQEGIAVLMAFCRTHQVELVAMEATGGYERQAFAQLSEQGLSVAILNPRAVRQFAQSMGRLEKTDKIDPGMIAWYAEVKKSAPLALASPTQQHLRALVTRLRQLTEIRTAQLNQQRLVTDRVVQHCFAKLLAEVARQIRDLEQRVAKLIDQDPLWSELNLAFRTVKGVADRTVARLMADMPEIGTLSNKTISKLAGVAPLARDSGKHQGKRSIRGGRPSVREILFIVASVVGRYEPDFIAFQQRLRQAGKPPKVVRIALAHKLLVRLNAKAREVRMRTFAPPLATMAQEVSR

SEQ ID NO: 413815 - protein, 343 aa, unidentified
MDHFAGLDVSVKETNVCIVDETGKIVREVKVASEPEALLEALTNPAYRFNRIGLEAGPLSQWLFSALAEADLPMICVETRHMRAVLKAQINKTDRNDARGMAQMMRVGLYRPVHVKTLRSQKLRMLLTHRKLLQSKAIAIDNDLRGTLRNFGLKVGRVGTVKFELRIKELVEDLPDLAVLVEPLLVVRRVLREQLGILHRRLLAVVRDDDVCRRLMTVPGVGPVVALTYRATVDVPTRFRKSKSVGAVFGLTCAKYQSGEIDRNGAISRCGDEMMRMMLYEAAQSMLFHSTRWSWLKAWAMQIARHRGIKKAIVALARRLAVIMHRIWVDGTEFRWTREVATA

SEQ ID NO: 413816 - protein, 385 aa, unidentified
MPGNAFIPREYDIFAGLDVDRKSISVTFTSHQGFLRSLRMPYRVDHLVHYVGKHFANQRVVFAYEAGPTGYGVYDGLVAHAYPCLIAAPAMIPRAPGQRVKTNRLDSRALAENLRGGQLRSIHVPSPVYRELRHLTQLRDTVVSQAVATKQRIKSLLLFEGLAFPPAAAGHQWSLQVKAQLRTLPCAPPVRFKLDQLLATLAFAEQQVLQTTREIRRFCRTEPELARCIQYLMTVSGIGWITASQLLARIGDWRELKNIRQLGAFVGVVPTEHSTGEGPQRGAITRTGDARLRAKLIQAAWAAIRHDAELRHFFRAVCQRHPPDRGPRIAIVAVARKLTVRIAVVLRQQRPFVRRDPVPSAPVTQEETVPQGTTRRLAEPGAAAP

SEQ ID NO: 413817 - protein, 417 aa, unidentified
MVNDVQWFVGIDWATQSHCVCLLDAEGRPAGQREFAHGGAGLTELRDWLLEKTKAAPGQIAVAIETPHGPVVEMLLEHGFVVFAINPKQLDRFRDRFTVAGAKDDRRDAHVLGSSLRTDCAAFRQLAADNPVVIELREWSRMAEELQQERTRFANRLRQQLWRYYPQATKLTDDVADDWFLALWQKVPTPDRAAKASEKAIARILGAYRIRRLDAATVLKTLRETPLLVAPGTTEAACVHIRSLAARLHLVNQQIKEAQQSLDRLCAKLEEEESPAGQNSEQCDVTILRSWPGIGRIVLATLLVEATEPLRRRDYHALRALAGVAPVTRQSGKQRFVIRRLACNRRLQSAVHHWSRVALQHDAATRRRYDALRQRGHGHARALRGVGDRLLFALCATLKHRVPYDADHNSAKTPAAG

SEQ ID NO: 413818 - protein, 359 aa, unidentified
MHSECTKVQFIGQHVYVGIDVAKKSWKVSIYLGKAYHKHFAQPPNAEALVDYLRRNFPGATYHSVYEAGYFGFWIHRELTRLGVDSIVINPADVPTTDKERHTKTDRVDAAKLARALANGELTPIYVPERVVQEDRTLIRMRMAFVRKQTRTKNQIKALLQFYGYQVPPDIMNQHWSRAYIRWLESLTFDQETGRAAFQAILKELVTLRTTIADLTRQIRHMAQQERYKVRVELLQSVSGIGLLAAMTFLCEVSTIERFRNLDCLLSYVGLVPGEHSTGDTEQDTGLNPRRNPVLRYMLIECAWIAQREDPALLNAFTTYCRRMPKSMAIVPIARKLVSRMRFVLKHNQPYLTGVLSAR

SEQ ID NO: 413819 - protein, 357 aa, unidentified
MKMYKIKRQISNTGRIADIYVGLDLHQRSWHVSIVQDGVILISISIPAQWDALKKVLSRYEGCRIHAVYEAGYFGYSLYDRLVDYGVDCIVTPPNMIPRESGNRVKTDRIDSQKLAVLLSRGLLKSIAVPSAEERTHQSVLRRRHQLVSDRVRVQLRIKAELRYYDIPFPTIQGKWSKTFVENLHNLHFQNRWLAESFQRLLAGYDHLSVEIEKQTHLVQELAKTDRYRDDVALLRTIPGIGTLTAMEFLVELQSIHRFRNGDALSAYVGLTPSQHSSGEHVRMGRITRSGKGHLRSLLVEASWVLVSKDPAMKEKYQTLKYRAGAKRAIVAIARKLLVRARRVLLDRTAYVLGKAA

SEQ ID NO: 413820 - protein, 369 aa, unidentified
MPHVTSIGLDVHARSVAAAAFNPFTGEVVHRDFGTDAAEIAEWALGFEEPRACYESGPTGFHMARELRALGLDCAVAAVSKMQRPAADARRKNDRRDAEFIARMLATHNIVEVPLPDMAVEAARDLDRALDDATVEYRRARQRLNMFLIRLGYVWDERNADGARKKAWTRAHWRWVSEIRLEGPQRDALEYYVTAARCAESDRRQLERRVVALAGTDRWRATVEALSCIKGVDTLTAFRLAAEAGSFSRFRSAPAFASWCGLIPSEHSSGESERRGGITKAGNALARTALIESAWHYSTCSPRPKAPAPGTDVPPVIRSRADDCTARLHRRREALAAAGKSACKANAAVARELACWVWEIGCRSEGTVL

SEQ ID NO: 413821 - protein, 458 aa, unidentified
MEEPQEVPADEEHERVWERVAAIDIAKASGVVCTRVPDEDRPGRRKTHVWTVQATSKAVIELGDYLRARQIQVITLESTSDYWRIWFVILEAAGLKVQLVNARAVKNAPGRAKTDKKDAVWLAKLTEKGLLQPSFIPPYEIRRLRELTRLRASLVHDKTRYWARLEKLLERAQIKISAVLSTLDTDTARAMIEALIAGQRNPRVLADLAIGKARAKRAELALALEGRWEEHHSIQARILLDNIDALNRQTEQLTGTISELISQIPAAWGVDADGTTGPHAGTAPDAPVLPAIAQLDAITGCGIIAAQAIIAEVGLDMAVFGTPGRLVSWAKRCPQTRQSGKKTSGGKAGKGNPWLNGILGEIAASAARTDTFLGERYRRIARRRGKRKAMVAVSRSILVIIFCLLSDRSARFRDLGPDFYDTQINRDRKIRNHIRQLHALGVDPDDLAALLTKNPPAA

SEQ ID NO: 413822 - protein, 338 aa, unidentified
MNTLRQNVGIDIAKDSFVATVTVLLSGQVIQHLKTKQFPNKQEGFNAFINWVYNIVDSSIEVSFTMEATGVYYEGLAYFLWDIDAIIHVLLPCKAKKFSQSLNVKSKTDKIDSQVLGHMGAERTLEKWVLHSGIYRHLRTLTRERQQLVKERTRCKNQLHAETHTACPIKTTVTRYKRHIAYLDKLILAVEKEIKSLISEDEYVSSKVKKIMTIPGISNVTTASVIAETSGFANIKNIRQLTSYAGYDVVQKESGKWRGKSKISKKGNSKIRQALFMASLSSIVHSKTHNEFYNRLKEQKQNGMMSLAAVQRKLLGLMYTLWKNDQEYIENYEKIRTA

SEQ ID NO: 413823 - protein, 461 aa, unidentified
MTLNDDVLIAVDPHKASNTAAVLDPVTKTVIEAARFANTVGGYAELIAFAARWAQRRWAVEGCHGAGRSLAQRLVADGELVLDVPAKLAARVRVYSRGHGRKTDKDDAVSVGLAALDGTGVTLVACDDATVSLRLLCDRREELTAQRTQAACRLHRLLAELTPGGMRRELSANKAQALLARIRPAGDVATVRVHIARDHLADIRALDARIKYLGGQIAALVTASGTGLTGLFGIGPVIAGRLLAEVGDVARFATKDTFASYNGTAPIDVSSGEQVRHRLSRAGNRRINHALHMMAVTQIRYPATPGRLYYERKRREGKTPKEALRCLSGGCLTRSTISSSPTGGAQSERADHLRPRRRRGLHPPHQRPAHTRPHHPPGPYTARHHRVHRAGLERRPPRRHRDPRRQHPPPPRPPRPGRNRQLKRQPLDREEPIWSVFGIGGTRSAGVTRCRCGAIQPVQHA

SEQ ID NO: 413824 - protein, 312 aa, unidentified
MDNEIIIDKGCGLDVHKETVVACVMGSGIKKEIRTFSTKTNDLLRLKTWLSSLEITHVAMESTGPYWKPVFNVLEDGFTLILANARHIKNVPGRKTDVKDSEWICRLLRSGLLSASFVPPQAIRELRDLTRYRRKLTQALSAEKNRIQKVLEDANVKISSVLSDTFGASGSQMIEAIMEGKLNEAEIADLAKGKLKSKKEELREALVGYFQDHHRFMIKASLEHIKYLEKLISDLDQETKKKLAQYQKEYELLQTIPGVKEQGATAIIAEIGANMDIFPSEGHLATWAGMSPGNNESAGKKKAERQPTAIRI

SEQ ID NO: 413825 - protein, 346 aa, unidentified
MSYSTTVGVDLAKNVIQISVVSSRGKELSNRSLTRKKFAEFLGKQKPSRVAFESCASAHYWARAAQRHGHEARIIPAKAVAPFRQGHKTDSNDALAVAEAARRPNIKEAPMKTVEQQGLQAIHRSRELLIQESTALSNHLRGLLMEFGIVIPKGFASLLKAVPEILEDGENELPDLYRPTLHRMYTRLLELREDIAVMTREVERLVKAHPTCSRLMALEGIGPIGALLLYATMGSGSAFSGSREFAAYLGLAPKQYSSGGKTNIVGLNKKIGNSRLRSVLILGARAYTYKLKEPKSLKDKWLKANIERNGECRAAIALANKNVRTAWAMVTQGTEYQRRVQLEMAA

SEQ ID NO: 413826 - protein, 337 aa, unidentified
MEYFAGLDVSMDETHICVVDRNGGIVLETRATTSPEAIAAGLAKAPGCQRIVFETGRMAPTLYHGLDALGLPVTCIESRQAYQALKSLGTHKTDRNDARGLAHLARTGFFKPVHVKSLPAHAVRALIIARKKLVGQRVTLENQIRGLAVVFGVRLPRGLSPAFAEHAISGSEGIAGLSGAMRGLLAARNAVLKAIAAINGDLKSLARSSEACRRLMTIPGVGQLTALAFVAAIDEPERFRRSRDVGAYLGLVPRRYQSGEIDYTGSISKCGDRRVRTLLYEAANVMLTRYKPPLKLKDWALAIAKRSTMRKARIALARRLAIIMHAMLRHGTEFKTA

SEQ ID NO: 413827 - protein, 307 aa, unidentified
MKFYGVDVSKATLDIACEGNVTCIENNKKAIRSLVKTMPADACVAMEATDTYHLTMADVCHAAGMRVYVVNPRVTRHYREVMSLRGHTDKMDAKALARFAEKEHEGLRAYTPKSADTRRLQTLIRRRSKLVEVKTQLSQSLGQIKELKSEVRAVIEKIEWLIAKIELLIDRQLEGNSGRERIATIKGVGPIVSAALVADLDAGDFQRADSIVAFYGMDPKPNDSGASKGRRKLSKQGHRLGRALLYTAAMSAVKSKAWKPIYERYIERGLSKVQALTIIARKIARAAWSIYTHKTEFDPARIQAGRT

SEQ ID NO: 413828 - protein, 324 aa, unidentified
MELFPLGIDISKAKFDVALLPDSGKLRHKVFPNSPAGFQQLSAWLSKHSALPIHACMEATGTYSEALAVYLREAGHLVSVVNPAIIKAFASTEMSRTKTDKADASLIARYCQKHQPPAWTPPPPEISELQALVRRLEALLEMLQQERNRLAGGISSASVKESVEQHIDYLNGQITHTQSLIRDHIDLHPTLKQQHDLLTSIPGIGDTTAAKFLAEIVEINHYQSARQVAAFAGLVPKHRESGSSVRGKPRLCKVGTARLRKSLYFPAIVATQHNPIIKVLSERLKEWGKCPMVIIGAAMRKLIHIAYGVLKSGKPFDPHYGKTA

SEQ ID NO: 413829 - protein, 375 aa, unidentified
MSAIPANHRSSSRQREPDVQGTLGVSKQTRKRRKETPVEQQREYVGIDLHRRRSVIVRIAESGEVLETVRVDNDPLSFVRAVMHDDPNPEVALEATYGWYWAADMLQAEGATVHLVHPLGLHWDSRRVKNDERDATELAKRLLRGDLPEAWIAPPELRELRELVRYRAKLTALRTSAKAQIHAVMAKEGVLPAYGRMFGPAGQRLLDEMPVEGVYRDRVESLRDLLEIYERELVLVQSHLSRRLKHHEGYSAIQAIHGVGPIMASIFVAEIGDASRFPSARHLCSWAGITPSHRESDVKVRRGHITRQGSNLVRWAAIEAVARYHGGAAIEPTFQRVAKRRGIMIARVAAARKLLSLVYYGLRDGEIRCLAREAS

SEQ ID NO: 413830 - protein, 346 aa, unidentified
MKKHSAKGEVKVLGIDLAKQSFQLHGVDESDQTVLGKKLSRNKVSAFVAQLPPCLIGLEACGGAHHWVRVFKEFGHTVRMMAPQFVKPYVKSNKNDSVDAEAICEAVQRPSMRFVPEKSIEQQDMQSLHRIRSQLVARRTAQSNQIRGLLLEYGIVIPQGISHVRKQLPLILEAADNGLSDLFRELLHELYEELVHLNKRVDGLEQKLLRLSAQNEDCQRLLTIPGVGLLSATALVAAVGDVSTFKNGRELAAWLGLVPRQHSTGGKPTLMGISKRGDCYLRTLLIHGGRTVVRVAHQHQDRRSRWVSELEQRRGKNISAVAVANKNARIAWALLSKKTTYQVAAA

SEQ ID NO: 413831 - protein, 411 aa, unidentified
MDVFCGIDWAEDHHDIALVDRDGKLLARRRIGDDAAGLARLLELLAEHGDSAGDLIPVAIETPRGLLVACLRAAGRKIYPINPMAVARYRDRHSVAGKKSDHGDSVVLANVLRTDIGMHRPLPDDSELAQAIAVLARAQQDAVWDRTTAHNKLRSHLREYFPGFLAAFADARGGIARPEARAVLAAAPTPAAAAALTLTQLRALLKKAGRSRGIDTEATRLRDAFRVPQMRQPRLVEDAMGRQAIALLRQLDAACASATDLERAVTESFNQHPDAGIITSFPGLGPLTGARVLAEIGDDRSRFQDARGLKAYAGAAPITRASGKTKSVTHRRVKNNRLNAAGYTWAFSALTASPGARAHYDRRKDAGDRHAAAQRNLFGRLLGCLHRCLATGQHYDEATAFPASTKLPAAA

SEQ ID NO: 413832 - protein, 307 aa, unidentified
MESYVGLDVSLKRTSICVVDRTGKVLCEGTVNSTPEAIVEFVKSKAAGAVRIGLETGPTSTWLWTEIKALGLPVICIDARHAKAVLKMQINKSDRNDAFGIARIMQCGWYKEVRAKGLDSHAMRALLESRALLVKMKRDLENQIRGLLKNLGLIIATARGQAFHARVQELVAGKPFLAVAVLPLLETRNGIVRQIADLDREVLILARNDDQVRLFMTVPGIGPITALCYRATIDEPSRFKRSRSVGAYVGLTTRRYASGEVDWTGRISKCGDAMLRSYLFEAAGVLLTRVQKWCPLFDIEEPAAAHW

SEQ ID NO: 413833 - protein, 413 aa, unidentified
MLLFIGDDWAEDHHDIEIEDETGRRLAKARVPEGLEGITTVHGLIAEHAPVAWADLPSEEVAARVFVGIETDRGPWVTALRAAGYQVFAINPLSSARYRERYSTSGAKSDAGDAHVLAEIVRLDRDHHRQIAGDTDLVDAVKLLARAHQTAIWERTRQVLRLRSTLREYFPAAIEVFEDLAAKDSLLLLARAPSPQRAAKLTRSQVVSALRAARRHHAEAKADALLAVLRAPGLRQPATVDAAYAAVVIGQVGIITALNEQIAQLQEVVAEHFGRHPDADIYLSQPGFGVVLAARALGEFGDDKKRFGDSRARKNYSGQSPITRASGKKTVVLARYATNRRLGDALHRQAFSALVGSPGARAYYDALRARKIGHHAALRQLANRLVGILHGCLKTRTKYDETTAWQHQIVTAA

SEQ ID NO: 413834 - protein, 370 aa, unidentified
MKKRITFVGLDTHKNSIEVALADEGANSEVRLYGSIGGDLDSLDKMIRKLRIPGAELRFVYEAGPCGYEIYRHLRAQGLHCDVVAPSMVPRRSGDRIKNDRRDACNLARLYRAGELTAVYVPHEDDEAMRDLVRGRQDAINAQRKARQQLGGFLLRHGFRYPGKCLWSLAHGRWLAGIKMPHPAQQIMMQEYIHTVEECTQRVIRLNEQIQQLLPDWRMHPLVTALQALRGVAPVVATTVVVEIGPMGRFKNPRQLMAYLGLVPSERSSGGSVRRGAITKTGNGHARRALIEAAHSYRHPARISRTILKRQETLTEPVRQIAWKAQLRLCARFRRLIARGKSRNRVVAAVARELSGFMWAIAKQVPVPQG

SEQ ID NO: 413835 - protein, 343 aa, unidentified
MKLHVLGIDLGKTVFHLVGLDSTGKVVIRKKCSRTQLLAFTANLQVQLIGMESCSGSHFLGRALREQGHEVRLMPAQYVKPYVQTNKSDFLDAEAIAEAVQRPRMRFVPIKTEEQLDLQALHRVRERWVMRRTAVVNQIRSLLLERGLTLPKGRSYVDRQLPRILEDGELRLSGSFRVLLAQLKLELEQLTARMEEMDRVIQKTAKENEDCQRLTEIPGIGPVTATALIAAVGNASAFQKGRNLAAWMGIVPGEYSTGGKQKLLGISQRGNKYLRTLFIQGARSVLQQRHKQAPGLSHWLAQLLGRTHQNVVIVALANKLVRMAWAVLCKNERYRAPVLAVTT

SEQ ID NO: 413836 - protein, 367 aa, unidentified
MMGWMAPLRHLSAKLLSDRNSSEWEPSMGEVTTIGLDLAKHVFQVHGVDAEGATVLRKQLRRAQVLAFFSRLPPCLVGLEACATAHYWARELRALGHEARLMPAQYVKAYIKRNKHDAADAEAICEAIGRPTMRFVPVKTADQQAAVLLHRGRERLVRQRTGLVNALRGHLAEFGVIAPQGLRNVGKLIAIIRDEGDARLPDLARQVLQVLAAQIEQLEAAVAAIEKQLMAWHKSNPVSQRLASVPGIGPIIATALAATVVEPSGFRSGREFAAWLGLVPRQNSTGGKHRLGGISKRGNQYLRRLLINGASANLLRSKATKADPWVIGLRRRRPPLVVAVALANKTARIAWAVMHRHENYQRVAAAA

SEQ ID NO: 413837 - protein, 384 aa, unidentified
MNKHSILFIGLDTHKEFNEVAYIEDHRGAQPVHFGRAPSSKIAVKKLVRHFESKYPDATLHFVYEAGPCGYWIYRLITSLGHCCYVVAPSLIPKKPGERVKTDKRDAMKLAKLLKTEDLTPIYVPEPEDEAVRDLSRAREVAMKDLKDAKYQLKALLLRNNINYAGTANWSLKHLRWLTELVLSHPAQQLVLQEFIQTISERMARLERLDNELTHHVHQWRYYPVVKAIQAMRGVRLLVAAGVIAELGDLSRFDHPRKLMSYLGLVPSEHSSGGKRHISAITKCGNGRARRLLIEGAHTYRYAANISTDMQKRQEGLPKQIIDIAWKAQLRLCKRYKKLISKGKHYNLVVTAIAREMIAYIWAIAKEVVLTPVDPKLRLARVPA

SEQ ID NO: 413838 - protein, 457 aa, unidentified
MPRKPKNPRIGGASSVHTIDPNAAGIDIGATEIYIAVPVDRDPHPVRCFSTFTEDLMAAADWLQRCRVATVAMESTGVYWIPLFQILEARGLKVCLVNARHVKNVPGRKSDVCDCQWLQHLHSAGLLRPSFRPSSQVCAVRSLVRYRDSLVQLSAVHLQHMQKALDQMNLQLHHVISDLGGKTGMAIIEAILAGERDPHQLAKLRDPRTHASEETIAKSLVGDYRREHLFTLRQSLTGFRQNSQLIADCDGEIESLLKEFSSGAGPGAGAVSEPQTELKRKPRRNELNFDLRAQLHRIFAVDLTEIPGIHTLTAHVLFTEVGRDLSAFRNVAAFTSWMGLCPDNRVSGGKILRAQTRRVNNRVARALRMAAQSLSRSYGWLGQYYRRMRAKLGGPKAVTATAHKLARIVYHLLTTGQAYDETVFAQQETQNKQRNENRLRHQARKLGFELTQIPMEL

SEQ ID NO: 413839 - protein, 344 aa, unidentified
MSEVIIIGLDIAKHVFHAHGADERGRAIFSKRISRGKLLDFFAAQASCTVALEACCGAHHWARQLTRLGHEVRLIPPAYVKPFVKRQKNDAIDAEAICEAAQRPSMRFVAVKSEQQQAAGLLFRTRDLLVRQRTQLINAIRGHLTEYGWIAPKGPSHVATLADLIEEEAMASSLPEAAHTMFRLMLDLFASLNGKIADLDKEIARRAREDEVSRRLMTVPGIGPISATAIAALAPPAETFAKGRDFAAWLGLTPLQRSTGGKQKLGATSKMGERTLRRLLIIGSSAVVQQASKRGAPRGSWLEQMLARKPRMLVTVALANKIARIVWALLVKQENYRAPVAAKA

SEQ ID NO: 413840 - protein, 387 aa, unidentified
MDVLMECCCGLDVHRDMVEACIIKGMLETPQIIREQFKTTRQELIRLTKWLVENECYHIAMESTGVYWRPVYESIEEHSEKYYCMMVVNAHHMRNLPGRKSDIKDAEWIATLMRHGMLEPSFVPDRLIRDMREFSRLRRNIVKEKCRHSNHLEKFLQTHGFKLSSVLSDILCVSGRNLLNTLAQNGTLTTDDVFTAVRGKTKFSKEEIAIAVCGSVNPAEQKLLQLLLKRIDEDNANLKEVEQAMEELFAPYAKEVDMVDSIPGIDKITAMTVLSEISVTPKNSFPTAGHMTKWAGLVPRNDESAQSMKSRKILPGNQYIKTILCQAAWSAVRVRNSSFAKWFWSHQGHKGQKKAIIAVARKLLEMVYILLEREQYYDPLYPTRIQR

SEQ ID NO: 413841 - protein, 317 aa, unidentified
MVDKVTEAAVVGGVDTHKDLHVAAVVDQNNKVLGTQYFSTTRQGYRQMLAWMTSFGTLKRIGVECTGTYGSGLLRYFQNAGLEVLEVTAPDRMERRKRGKSDTIDAECAAHAAFSGIGTVTPKTRDGMIESLRVLKTCRKTAISARRVALQIIHSNIISAPDELREQLRNMTRMQLIRTLGSWRPDASEYRNVTNVYRISLKSLARRYLELHDEIADLDVMIAAIVDELAPELIKRNAIGYESASQLLITAGDNPQRLRSESGFAALCGVSPVPVSSGKTNRYRLNRGGDRAANSALHIIAIGRLRTDAKTKEYVAR

SEQ ID NO: 413842 - protein, 417 aa, unidentified
MQSARNTLPEEPPGDVTCGIDWARDDHAVSVVNARGREIHRCSVEHSAAGLRELIAVLARNSAREAAIERPDGPVVDALLTAGITVVVISPNQIKNLRGRYGSAGNKDDRFDAYVLADTLRTDRARLAPLTPDSPATVSLRRACRARKDLVSHRVAVANQLRAHLRNAFPGGAGLFAEIDSPISLKFLARFSTQDRAAWLSPRRLAAWLASAGYCGRTDPAVLHARLAAAPHGATGDDGIAQAHVTAALLAVLTTLVEQIKALSEQIGEQLALHADAHIFTSLPRSGTVRAARLLAEIGDCRARFPTPEALACLAGAAPSTRQSGKIRAVSFRWSCDKQLRDAVTDFAGDSRRASPWAADLYQRARARGHDHPHAVRILARAWLFIIWHCWQDGAAYHPARHRALQTLLNQDQQAAA

SEQ ID NO: 413843 - protein, 338 aa, unidentified
MKAYAGIDLHSSNNYLGIIDDKDKRLYGKRLPNELNRVLMALEPFRDRLEGVVVESTYNWYWLVDGLMEHGYKLHLANPSAIKQYEGLKHTDDKWDSFWLAHMFRLDILPEGYIYPKKHRPIRDLLRRRLLFVRHRTAHILSLQSMITRNLGFKMSNNEIKKLKEKDAEDLFDSPNLVFMAKNSLSAIDFLKQIIRSIEKEVTFQVKLRKEFVMLLTIPGIGPILALTIMLEVGDIHRFAKVGHYSSYCRCVKSQRLSDGKKKGENNKKNGNKFLAWAYVEAANFIVRYNAKAHSFYQSKKAKTNGIVAIKALSNKISRASYYVIRDQVPFDEGMLFK

SEQ ID NO: 413844 - protein, 365 aa, unidentified
MKKSSTAARPRNKDFCQKLTIGLDLGDRSSWYCVLNEAGEVVGERKVATTPKALKEVFAAMPRSRIALETGMHSPWVSRLLSELGHEVIVAHARNVRLIGESRRKDDRLDARTLARLARIDPQLLSPVKHRSAQAQADLTVIRARASLVRARTALVNTARGLTKSYGERLRGCNPRNMDTEKAQTLSPELQAALGPLLQALESLSERIAEYNQQIEAIAQQSYPQTALLKQIKGVGTLIALTYMLTLEDPHRFRKSRDVGCYAGLQPGRRNSGQSEPQMHISKEGNPYLRTLLVQGAHHILGPFGADSDLRRWGLKLAERGGKAGKKRAIVATARKLAVLLHRLWVSGEVYEPLRNTKRTMSAAA

SEQ ID NO: 413845 - protein, 438 aa, unidentified
MRSIGLDVHKHFAEVAIVQPGQGIVSRQRLPVTPAHLRQFAAGLGPDDQVVLEASFNTWAVADLLREHAGRVIVSNPKKTRAIASAKVKTDQVDAGVLAHLLAADYIPAVWVPDDATRTLRRRVSEHRGLVVQRSQFRNRIHAILNRNLVECPYTDAFGRAGRQWLTALPLPGPERSEVNRLLRLMAALEREIAQLEMELAQARLQDAGLRHLITVPGIGLITALALLAVIGDVKRFARPNRLVGYLGLDPRVRQSGDRPAYTGHISRQGQAHARGLLLEAAHAAIRVPGPLHAFYERVRARRGAQIALVAVARKLATLAWHLLTKDREYQWVRPSLKAQKWRLVELRAGLPKGAIRGIWTRPNREQEDEILRQAEAAYRSLVAARPPQTDAAAPMRKRLEGQRPDARRRSHPHPPLFSQGSTASAASIVLQLPEKRE

SEQ ID NO: 413846 - protein, 337 aa, unidentified
MEREYVGIDLHRRRSVIIRKNAAGELISKVHIDNSAEALVAAVAAAGPGPEVVIEATFGWYWAVDLLQEMGAHVHLADPLGNNWGNRRVKNDERDAADLVDLLRLGRLAESWIAPPEVRELRELVRYRHKLVRLRAGLKAQVHAVMGKHGVLPTRVDMFGPGGTAQLDALELPDGYARRLASLRALIKTYDKDIAELDRTIATCLVNHRGYHVIQSLNGVGPIVAAVLVTEIGDIGRFPSPDRLCSWAGMTPRHRESDTKVKRGSITKQGSRLIRWAAVEAVSKNHGDDIIKAAYRRIAERRGANIAKIAAARRLLTLVYYGLRDGEIRCLAGPTRG

SEQ ID NO: 413847 - protein, 351 aa, unidentified
MRTSQNSLETIGTIGIDVGKNTFHLVGLDKRGAIVLQRKVTRQKLGRLLTNIPRCLIGMEACSGTHFIARQLTVLGHDVRLIPAQYVKPFLKGHKNDYRDAEAIAEAVQRPTMSFVSIKTPEQMDLLALHRVRSRLVRQRTGLVNQIRGFLLERGITVRQGLMPLRRALPEILSSNSDALSPRMISLIGELIQDWRRLDERIASASTDIEALAKQNESCQRLMSVPGVGPIVSSAVVAAIGNGAGFKQGRDFAAWLGLIPKQESTGDRTILGKISKRGNKYVRTLFVQAAHVVLERRPRSAKQGLWPWIAQASKRLHRNMLAIALANKLARIAWAVLARGHAYQPRITANA

SEQ ID NO: 413848 - protein, 419 aa, unidentified
MSFKIFKFNCCGLDVHKTWIYACIGITDSFKRTEYKQARFSSFTKGLQELCLWLAKYNCIDVCMESTGKYWIPVFNVLEKNNIFVTLSHPKYTKPQKGNKTDRKDAKWICDLYMCGMVKPSFIPPADIRQLRDLVRYRFKLTCMITGEKNRAHNCLTVSNLKLDDVFSDIFGKSSRSITEQILQHPGEVFDVAPFVDSRCKTPIEEIQAAVDGAISHEQAVKLRQCLKHIDELEMHKAEIEREIFRLSQKYESVLDLIRTIPGFDKNPLTAIQVLSEIGADMSVFPTAKNLVSWAGCCPRNDQSSRKIKSTRISRAGSYFKPVLVQVANALIKSKKHPEFTTRYRRIKARRGHKKAIIAICRMILTAIWHILTDLKPYTPEGFLESRPVNKEKVLTISQALNLIKQRGYIIKDDVGPVT

SEQ ID NO: 413849 - protein, 350 aa, unidentified
MQTIYIGVDFHARQQTICYLTTDSGELLFHHLKHEDKALVRAFYAQFRGHVIVGLEASGYSPWFERLLEELGCEVWLGHATEIRRRARWRHKNDRRDAELILDLMVHNEFPRLYLPPLQSREVLRMLRYRQKLIKMRTIGKNSLQALALQSGLAKGPHLFTKTGLQELRSATMSPAMQWQREQWLQLLEPLNERLLETMRWLQQQSQADQRISRLRTHPGVGLLTALCLVHSLEPVRRFANTRKVTAYAGLDPVERSSAERQRFLGISKGGSRVLRFLLVEAAHTALRKDADLKRFYQRLAQRHGRPKAKVAVSRKLLIRAYIMLRDEIDYAEFQRRAVAARSVLPAHGL

SEQ ID NO: 413850 - protein, 378 aa, unidentified
MEQSSTLYVGLDVHKDSIDIAVADAPRDAEVRHLGSVAGGVTAVSKSMRRLVSAGHRLHIVYEAGPCGFVLQRHFTALGWRCDVVAPSSIPHPCGERIKTDRRDAMKLARLARSNDLAVVRVPDGADEAIRDLVRARDDAVREQRNGRHRLKALLLRNGTPYAGKCSWTAAHLRWLATVKLEHAAQQISFQEYLHSITESGARIGRLEQAMRDALPEWSLRPLVQALQALRGVQLIAAMTLVAELQDFLRFDNARKLMAYVGLVPGEHSSGPKRRQGSITKAGNSAARRMLVEIAWHYQHGPRVSATIATRHDQLPKAVTDIAWAAQLRLSAKFKRLLARRVLKNKAVVAVARELVGFVWAIAREVQTSGWQGIKTAA

SEQ ID NO: 413851 - protein, 329 aa, unidentified
MKVQHIIGADLSKKSIDLVCHLLKSHVQIQNTVTGFKDLIQWMRQQKINPSKIMIVMEHTGLYSYCFEHFLHEHQIPFCKVNALAIKRSMGLVRGKTDKLDAVRIAAYGYEKKDKLAVDVPTSDALKRLKMLHSTRDRLVKQRASLACAIKEYRHIGITEKDVIMQTQLQLIKNFDRQIEKLMTEIEIIINAQEPLKQSFYLLQSIKGVGKILALTAIIKTSNFARFANARKFACYCGTAPFEHSSGTSIRKKSRVSHLADKQMKTLLDLSAKSAIQYDKELREYYLKRTEGGKSKMSTINIVRNKILYRMFAVVKRQTPFLENYLQAA

SEQ ID NO: 413852 - protein, 402 aa, unidentified
MQYLGIDIGKRAHEAALLDQDGNHLGKTVRFSNSHKGAEKLLDLMNEHECLPDNTLIGMEATGHYWLSIHTFLKKLGFDIIVFNPIQSDSFRNFYIRKTKTDKVDAVLIAQVIRMDVPNTSYIASEDTIKLKQLTRFRVSMVDQTSDIKRQIISCLDQVFPEYERLFSDMFGKTSRKLLLESPLPEDLLNIESTHLTKLLKEASKGRFTEEKSMLKVDEIKNLASDSFGIQIASDVFKMQIQLLIQQIELLESQIKDVESKINELLEKDDHHLTTISGIGSITAATIIGEIGDIKRFERPNQLLAFAGLDASIHQSGDFTGTNNRISKRGSPYLRRAIWQAAFVASNKDPALSEYYQSLRARGKHHGTAIGAVCRKLVNIIFAVWTNDKPYEVRHHSNKEQE

SEQ ID NO: 413853 - protein, 417 aa, unidentified
MDVLHDRCAGLDISKRDVKACLRTPGTRRNQRRSEVRTFATTTNDLLALRDWLVAEQVSLVVMEGTGDYWRAPYYLLEDALNVELVNARQVKAMPGRKTDVADAVWLAQLAECGLLRASFVPPEPIRQLRDLTRYRTVMTEERTREAQRLEKELEDAGIKLSSFATDILGISGRAMLEALIRGERDAQVLAEMARGRMRSKIPDLAQAMIGRFGDHHAFLCRMHLDRIDAISRDIATLSTRIERVMAPFRDQLTRLDGIPGISLRVAEVIIAETGGDMSRFPTAGHLASWAGVSPGNHESGGKRKSGKTTKGNRWLRDALGTAAMAAARSKNTYLGAQYTRLVRRLGSKPKALVALEHSILTSVWHMLTDGTGYQDLGADHFLRRDPERERRRAIAALNKLGYTVTLNPIEPTTKAA

SEQ ID NO: 413854 - protein, 392 aa, unidentified
MQLEVQMTKSNDMNMSLVPFKQDTCVVAVVELSRSNWLVAAAVPGIERQPLKKLEPDEQALLRLLHRWRDQSVGKGHKISRIAVAYEAGRDGFWLARWLLRHGIDVQVIHPTSIAVSREHRRAKTDRLDTALLMRAFLGWLRGETGHCRMAAVPTLAEEDAKRPSREHETLAGECTRTINRLKSALVRLGIRDFNPKLRGAQGGLEALLTPEGEPIPPNTLREMNNELARLAFIRAQMKATERARLERIKEAPNAGTNSMVQSLTKVVGIGIETADMLVHEVLARDLRDRRAVARIAGLTGSPDESGARRREKGLSKAGNARVRRGMIELAWRFLQHQKESALAAWFRSRVEAPGVRKKTMIVALARKLLIALWRLVQTGEVPRGVVLRQTA

SEQ ID NO: 413855 - protein, 367 aa, unidentified
MKKVSTRAAAQSRDISQQKLTIGLDLGDRNSWYCVVDEAGQIQLEQRVRTNAKALQEVFAAMPRSRIALEIGTHSPWISRLLHELGHEVIVANARKVRLIGESRKKDDRLDAQTLARLARIDPELLYPVKHRSAQAQADLMMIRARAGLVRVRTGLVNTARGLAKSYGERLRGCNVRNMNPEKAEGLSPELQAALEPLLNAIESLSERIVEYNERIEELAQQSYPQVALLKQIKGVGTLIALTFVLTLEDPHRFRKSRDVGCYLGLQPGRRNSGQSEPQMHISKEGDPYLRTLLVQGAQHILGPFGIDCDLRRWGLKLAERGGRNGKKRAIVATARKLAVLLHHLWVSGEVYEPLHNSRPTTVAAAA

SEQ ID NO: 413856 - protein, 315 aa, unidentified
MKEESVKFIGVDVAKDHLELFSPGLKLPAQLNNRPQTIAAWLRRLRVSSPAIHVVCESTGGCENALLRACWQAKVPVSQLNPARVRAFARSQGLLAKTDAIDARVLADYGRIFTPPPTPEPSASQVRLGELVARREDLKTQRTAESNRLSYLEDATLRRMIKEHLRCLDRHLAQIEKLMEKTISEDPVLRHKRQILVATRGVGNLIAATLLADLPELGSLPRQAAAALAGVAPFNRDSGTLRGKRSIRGGRANARKALYMAALVASRHNPILRDFYQRLLSKGKKPKVALTALMRKLVVHLNSQLKLHPPQPSPC

SEQ ID NO: 413857 - protein, 342 aa, unidentified
MVTTIGIDPHKATHTAVAIDETEQVVGELTVPADRYQTNRLVEWASHLDGDGRLWAVEAAGGLGYLLSQQLITHGEQVVDVPAVLASRVRVLGSGKSDKNDPNDARSVAIAALRQPSLTRVRREDHAQVLRMLSKRHHELTSLRTQAVCRLHAVLMQLRPGGIPKRLSTIKASRMLQGIRTLDPVGEQRRLMARTHLADIRRLDREIKANKTLIRQAVAASATTVTDVYGVGPIVAAFLIGYTGDPTRFASPDHYAAYNGTAPIEVSSGGKTRHRLSLRGNRKLNHAIHMAAVTQIRFDTPGRVYYDKKLAEGKTKKEALRALKRRISDAVYQRLQADQQTR

SEQ ID NO: 413858 - protein, 436 aa, unidentified
MEEVTDEPLYRDRVCGIDIGKAGMAATIRVPSDKDPARRAAETRSFGTTRREVLALADWLRSWQVPAVVMEATGDYWKGPFYRLEAEGFECVLADAKQVKNLPGRPKHDPGDSRWLAACLERGAVTSCFVATPEFRIIRLHTRYRRDLTDERTREKQRAEKLLESAAVKLSSVVTDLHGVTGRDIMDHLIAGERNPKVLAQLARARARRKISELEAALEGAEFFTPAHAALLAAMLARIDRVNAEIDRLSEVIEQLLAPYEEQLQQAGSMPGWGRRAAQDALAETGADMSRFRTGAHLASWAGRTPLDNSSGKRKGKAKSKKGNRYLGGLLGETAIAAGKTQTREGARYRRLARRRGKAKAQVALGNTQLKVYHKLLSSPGTRYEDLGPDYYERQASTRRQIAHHVSKLGALGFEVTLARIPTPDPDPAGTSNQAA

SEQ ID NO: 413859 - protein, 468 aa, unidentified
MTPRRQKNLCQPPSPEPLRVTHAHAAGIDVHADVHWVAVPPGAAPPPWPDHPPNVPAHVRSFGACTADLQRLVDWLAQCGVTTVAMESTGIYWIPLFELLEARGFEVFLVDPRQSRHVPGRPKSDVLDCQWLQRLHSYGLLTASFRPAEQVVVLRSYLRQRQMLIRYAGQHAQHMQKALEEMNVKLTEVVSDVTGVTGMAIIQAILRGERDPVELAKLRNEKCKRTQAEIARALYGNWRAEHLFALQQAVALYEFYRQQLRACDLQLQSHLGTFADQREGRPRPQRQRRRRERRANDPAFDVGSALYRMAGVDLMVLEGIDANTALVLLSEIGPDVSRFPTVKQFTSWLGLCPQHQGSAGKIRSRRVRRGMNRAGRALRLAVQGCYNAKHVLGAFYRRIRARAGGPKAIVATARKLAERVYWLLKYGADYVCQKIEAYEAAYQARVVKGLARKAAELGYRLEPAPAGS

SEQ ID NO: 413860 - protein, 351 aa, unidentified
MPAASQTAIAVVGIDIGKNSFHVVGLDKRGAIVLRQKWSRGQVEARFANMSPCLVGMEACVGAHHLSRKLKTFGHDARLMPAKYVRPYSKGQKNDFRDAEAIAEAVQRPTMKFVATKTTDQLDLQALHRVRERLVSQRTGIINQIRAFLLERGVAVRQGLRFLRAELPRILAMPPDVLSPRMVGVIEGLAEDWRRLDQRIGHLSDEITALARQDAGCERLVSVPGIGPIISSAMVAAIGTGEAFSKGRDFAAWLGLVPKQISTGDRTILGKISKRGNRYLRVLFVQAAWVVLIKPQSWQRHGLKPWIEAAKRRLHRNVLAIALANKLARIAWSVLARGRAFEARSAMTPAA

SEQ ID NO: 413861 - protein, 372 aa, unidentified
MQQESAAFVGLDTSKMTISVALAEEGRQGEVRFLGDIDHTPEAVRRLVTKLAGKYGRLLFCYEAGPTGYGLQRQICALGHDCAVIAPSLIPKRPGERVKTNRRDAITLARLHRAGELTRIWVPDPGHEAVRELVRAREAAMADLRTKRQHLQSFLLRHGRIYAGSRPWTQVHARWLSNLSFEHPAQYLVLREYRQAIDDAETRLERLTQHVAEVVSSWSMAPVVEAYQALRGVAFLTAVTFVAEIGDVRRFETPRQLMAYPGLTPSEHSTGDRVRRGGITKAGNPRARRVLIEGAWTYRYPARLSRTLQVRQESLPTVVRAIAWKAQLRLCARYRRLMAAGKRQTVVTTAIAREMAAFLWAIGHAVEPRPAA

SEQ ID NO: 413862 - protein, 386 aa, unidentified
MWVMRAVCGLDVHKDSVYLCILCETGEIFENVYGVLTHQLKDMCRAMKARGVTEVTMESTAVYWIPIWRVLEPHFRLKLVNPYFIKQLPGRKSDVKDAQWISECTLKDLVRGSFVPPERIQQLRQYDRRIFDLDVEIVRKLSKLDAVLQRCNIRLSNYVSNTDTKSYKDVVDELCKGVTDPEELIRKVHGRIVNKHGRETILASLTGVVSEAEKDAMRQLRTEINLAEEHKQECQDKMLSICKTYYPKELKRLMTIPGIKERAATSLIAEIGVDMTKFQTAAHLASWSGLKPRNDVSNGKYKSRRITHGNVFLRKTIIECAWAASRTKDCFFSRFSYRLTQVCKKNKLKVLVAVARKLLIAVWHVLHDEKDYVDFNPDCKAPATNG

SEQ ID NO: 413863 - protein, 477 aa, unidentified
MELIEFKFDVDWRTNPFFCGLDVHKHELAVTICSAEYRDAKIVSRSIFPVNSEGLERFWNYVKKYQPAGFAMEATGIFHHLIHKFLMQKLTTVIWRAEVIVTNPSDANSLPGRPKDDKIDSESLAKYLAKGMLRNGKPIIEVQEDLKAVFRLILHIEKDRTALKNRIIKTHDRAGIRPKSLDLNKNWICRFIYYFTQFQGTLGAFLDEILTDGHPLESQRNIIKKNIGRFQPFSPISLTNVQRTLIRQDLIELDFKTGRKDTLTIEIGQIIEQYPVLRHHASNLASIPGLSKVKAVWILAEIGNIKQYPTPRKFAAYCGCCPRIVSSAGKVYSAHIMRHSNKYLRTIFYNAAIVVCNLLKQDSELKRYAIRTIQRKGRVAFKLAVCNVATKLTKIAYAILRDGKPFDPEYLQGHLCPSKKEKEQVFTLVDKKIIRHARNVLKRVSQMEKAQELGILGDDINIVAAHLDSLLEGKKIK

SEQ ID NO: 413864 - protein, 337 aa, unidentified
MKFCGIDLHSNNSVVVITDEADRILLSRRCPNDLAKIVLLLEPHRTELEGVVVESTYNWYWLVDGLKDAGFDVKLANTVAMKRYDALKHSDDQDDAAFLAHLLRLGILPTGYVHPPQERALRDLARKRIQLVRSRTQHVLAVENIMARQQGSRLSSAAVKRLSSTTIDNLGLPDDVALAISANVAVIETLNIQIDCLEQRLLGGVRLRPEYALLKSMPGVGEVLATVIMLETGSIERFADVGKFASYARCVNSAHYSNGKKKGEGNTKNGNAYLVWAFVEAANFARRFNEEAKRFFDKKKAKTNNVVATKALAHKLARASYHILKEKQPFDVSRCFA

SEQ ID NO: 413865 - protein, 412 aa, unidentified
MKVVHEICCGIDVHAKMLVACLILANGEKEIRTFSTMTDDLLRLRDWLVAAHCSHVAIESTGVYWKPVFNILEDGLTVILINPEHAHALRGRKTDVKDAEWLADLLRHGLLKASFIPPPEIRELRELTRYRESLVRERSAVANRVQKVIESGNIKLGQVASDALGASGRAMLRALAHGETDPDKLASMAQRQLKEKIPQLRRALQGRLTVNQRFVLGELLQRWEELERADRRVTREIDKYLQARPKLARAREIVDSLPGIGPRVAEVVVAEIGVEMEAVFGSDAHLASWAGICPGNKATGGKRLSGRTRKGNTYLRSALVQAAWGATMKKNCYLSSQYFRLVKRLGRKKALVAVAHSLLVIIYHVLQSDQTYTELGGDYFDRHHAEQQRDYYLRRLQMLGLKVTVEELSKAA

SEQ ID NO: 413866 - protein, 472 aa, unidentified
MAIPYPSRLTRKQRRELTRRLRSADPGLDVIHPNAAGIDVGNSAHYVAVRPDRDPDPVRRFECFTADLHQLADWLQHCGVTTVALQSTGVYWLPLYDILDARGLEVYLVNARHTKNLPGRKSDVQESQWLLKLHTYGLLRNSFYPSAEIRVVRTYWRQRADHVRAVSTCIQRMQKVLTQMNIQLANVISDLSGWTGQRIVRAILAGERDPQALAALSHPGIHASRDTVAKSLEGTWRPDLVFVLQQEVTMYDAYLQRIEECDQALAQHLKSLVDKAANTTDTTGAPSAAPRPARPRMKRRRKAGSHMPQFDLGRELHRISGVDLTRLEGIDVSVAQTVISEVGLDMSRWEDEHHFASWLGLCPDNRITGGRVIRRGTRHVINRAATALRLAATTLLRSQSYLGAQFRRFRGKLGAPKAITAMAHKLAVLVYRMLRWGQEYVDKGMQYYEDRHREQQIHLLKKRAAKLGLIVV

SEQ ID NO: 413867 - protein, 362 aa, unidentified
MFRPHTLYIRIQIVRKVHEPVFAMRDQDVSDVIKTKNRTAMQYIGIDVSKATFVVAYSSDKGGEIRTFNNTTAGIKQFIGTLPKDGNIHCVMEATGNYSALLLYMLNVAGITVSMENPLKVKNFARAMLSTVKTDKIDARLIALYGEKMNPQPFKVQGEAILRLRQKRTVIRQLTKQITAMSNLRGSLACLPVPDKGATHTVDETIKFLEKRRDRLQSELTDLVEVEFSRQLALLTTIKGIGITLATALIITTGGFTYFQNAKQVSRYLGICPTYEQSGTSVNIRGHINRNGDAYTRGLLYIAAWPASRFNAQCKETYTRLRQNGKPGKLAMIAVANKLVRQAFAVVAHDKEYIDGFVSNRP

SEQ ID NO: 413868 - protein, 435 aa, unidentified
MEDVRDEPLYRSRVCGIDVGKAELYATIRVPSDGNPARRASETRRFATTKRGVLELADWLRCWQVPAMVMEATGDYWKGPFYRLEAEGLECVLADARQVKNLPGRPKRDRSDSAWLAACFERGAVTACFVAAPEFRLIRLHTRYRRDLTEERTREKNRAEKLLESAAIKLSSVLTDLHGVTGRDIMGHLIAGERDPKVLAQLARGRARAKISELAAALEGAEFFTAEHAALLAAMLDRIDRIDAEITRLSQTIERLLAPWEEQLQQAESMPGWRRRSAQDALAETGPDMTRFPTGAHLASWAGRTPLDNSSGKRQGKARSKKGNRYLAAVTGETSVAAGKTATREGARYRRLARRRGKAKAQVALGNTQMKVYHTLLSGPGTRYRDLGPDYYERQRDTRRQIAHHAGKLGALGFEVTLARIPGPEPDGEAGTRTA

SEQ ID NO: 413869 - protein, 354 aa, unidentified
MRGYYIGLDTHSTFTKLAAMTETGKIVQQTGGATTIPVLVELLRAIPRPRYVAIEEGPLAGWLYRHLREEVDKLVVCEPRRNRLIAAEGDKDDPIDAVKLADLLRGGYIKSVHQADTLDRAVFKQHVSLYHGRVQHRVREALQTISLFRRHGVVLREKAFVNPADRKALLERLPMQRTLRDDVRLLWSGYDQASKQEERVRRRLIELAKQEEVIVRFEQLPGIGWVRGATLFVMLDTPWRFASKTALWKYLGIGLERRGSGNGPEQVRVPLRTNRLLKGTILGAAKSAVAQGDNPFADQYRRWLEQGLSARLARRNVARSQSATLWGLWKNGTAYHPDWVGVAAAALAASPVST

SEQ ID NO: 413870 - protein, 328 aa, unidentified
MDSTAIDTHKESVVVHRIDENTNPVLRERYLTTQEGLEKLLVGVRGSVCVLEACTTSYPIYDFLTGRGVEVKVAHPLLLKSISGLKKTDKVDAERMALMLKAGIIPLAHIPSQAVRLNRDLVRQHISLTQQRTAEKNRVQALLLRYRVKVGKNLFRKKRGWLNEEVPVEVKPVLEQCLEHIDYLNRLLYRADKQIKQKASENPGAVLLTTIPGVAHFSALLLVSFIDGVERFHSAEQLVSYAGLAPTIYQSGEKKILGHISKRGTKEMRWALTQCAWLAVRHSKKFRRFYLKKKRKIGKKKTIIAVARKMLTAVYFMLKRGEEFRDAC

SEQ ID NO: 413871 - protein, 391 aa, unidentified
MSMYFIGIDISKYKHDCCIISATDQKVISKFSIKNDKVGFEELITTFNSLSSPEDIRIGFESTAHYALNLELFLENAHHSFMEVNPVLIKEYKKSTTLRRTKTDSVDCESIARWLMTVEYKPHSKGFYHAYSLKSLTRLRDRLIRQRSFYLVKITNVLDHTFPEFKPFFNERLSKTALYLLENYGSAEKMARMNSVSYEKLRSISRGKFSPQQFIALKELAANTVGVNNSIFDVELNSLLTLYKTLVTEINTLEKEINLLIEEVHPHYLSVPGIGSISAAIIYSEYGDISNFDNPGQMLAFAGIEPGINESGTESHGGRMVKRGSSQLRYALINCCLPLIRFDMTFATYYAKKRAEGKPHRVAITHVAKKLIRVIYALERQNTDFCVQKLR

SEQ ID NO: 413872 - protein, 366 aa, unidentified
MEALPSRVVGIDLAKRSYVAHIIDPNSEKAQIWEGKTDTGGIDRLCAKLQPHDRLGMECCAFAFRLAKILQERVHCKVLVLNPGELAIIYKSVKKTDLADAGKIAWLLNRHPDEELPTVTLPTEQEEHRRALVSELRSKKKARTALINRLHSLFVRQGLVVLTKEDLRTARNRDENIRALSDFTLGEAKRIQEELSMMESHIETIEQEIKDDLKAEPVVAQLLSIPGVGPATAMAYLAHVGDGSRFSRARQVSHFVGMTPRVDSSGETTRLGSITKRGCTAIRSLIVQSAWAAVHTHRNHKLKEKYQELVHRIGKGRAIVAVARRLLELMWIISRRKEFYHQTSMDELRFKMARSGLKMHFVGSGT

SEQ ID NO: 413873 - protein, 356 aa, unidentified
MATHYIGLDVHCEFTEMAVVSSSGKLVQRHRCKTDIPHLLMALELVRGPRRLTFEEGPMAGWLHRNLASHVDKLVVCNPRRNHLIAKDSDKDDPIDAEKLAQLFRGGYLKEVHQSDNQARAFFKQHVALYHDHVRQRVREANVIMAQFRRHGVFVRESAFLDSTDRPALRERLPKGSMLWDDLELLFEGYDLAWRHQLTMLDRLEKLARKEEPVRRFGEVPGFGWIRAATFYAYVDTPWRFKSKSALWRYLGIGLEREHSGNGRTIVRVSQGSNRVLRGIMIGAAKTVIRTAKPSDPFSQQCKHRMEDGLSARNARRNVARSLAATLWGMWKNGNAYRPDWVARGARKDERLVSSK

SEQ ID NO: 413874 - protein, 416 aa, unidentified
MKIVRPICCGMDVHKNIIVATIGITNKKTRITEYIQETFSTLNPDLLNLKQWLINHKCFDACMESTGKYWIPIFNILEDEINIYLTHPKYVKAIKGKKTDKKDSKWICDLFKHDLIKFSFIPPKEIRALREISRYRYKLVGMRSSERNRYQNCMTVSNIGIGSVFSDPFGKSAQAIMKEVLESDIIEDEKILKCIHRSCKNKDKILDSIKHCNIETDQRFKMNESMTHMEELQVHIDNCEIEMMKRAAPMFDQFMHITQLPGISTLSAILIISEIGVDMKQFESDKQLTCWAGLAPANNESANKKKSVRISKAGQYLKPLLVQCALGAIKDKEGYFGIKYSRIKKRRGHKKAIIAIARMMLVSIYHMILTGETFNPSDYESFRNPKPPIKQQDLTEESAIEFLKKSGFDVSKLTKP

SEQ ID NO: 413875 - protein, 308 aa, unidentified
MTTIYAGLDIAKLNLQLHFAGRVHDLPNTAAGHRRLLKLLAAQPGVHVVCEATGGYERDIVAALHEATVPVSVLNPARVRHFARATGQRAKTDHIDAAVLTAYGQALQPKPTTARTELEQQLAELVRRRVQVLEILVAQRQQIERLTLPALRRQAQSLVRRLERDVKQIEAQLKTLRTQASDLGARVQKLEAITGVGTITALGVLAELPELGTLNRRQAAALAGLAPHPRESGQWHGRRSISGGRAPVRRALYMAALVAAHSNRQLKEFYQRLRAAGKPAKVALTAVMRKLIVLINHILKNPTFELQN

SEQ ID NO: 413876 - protein, 326 aa, unidentified
MIRPKDKLMAGIDLHGNNIVIGIINQDGKRISHVKLPCKLDVVDKFLRPHKEQLESLAVESTFNWYWLVDGLRGLHYPIHLANPAKIQQYDGIKHADDEHDAFHLAELQRLKILPKGYIYDPQLRPVRDLLRRRTSLVQQRTSLILSFKSLHARTKGQALQLADLKRMTVEEGQKLYEHPADKLITRIQLGEIARLGKDIKEIESMVMGFALKMPILARLMTLPGVGKVLGMTIAMEVGEIGRFEAEGNFASYCRAVDSRRLSNGKVKGENNAKCGNKYLSWAFVEAAQFAKRGDPACRRWYDRKKARTSTMVATKALACKLAKAA

SEQ ID NO: 413877 - protein, 339 aa, unidentified
MNRIVVGVDIAKRVFQLHWVEPETGEIVALQLKREKFLEHFANRSSCLIGMEACGGSQHWARSLQKLGHEVRLLSGRMVKPFVGGNKNDAADARGIWTAVQQPGIKAVAVKSEEQQAVLALHRMREQLVKFRTAQINGLRGLLTEYGEVMPQGRAGIKRDIPGALGRLSDRLPAMVIETLREQYARLSALDEQISQIERRLRQWQREDSATQRIAAIPGVGLLSATAAVATMGDAKAFKSGREFAAWLGLVPRQTGTGGRVRLLGISKRGDKYLRTLLIHGARAVLTHSKSPPEWVTELVKRRPKNVAVVAMANKMARTIWALMAHERAYQSGYVSRPA

SEQ ID NO: 413878 - protein, 350 aa, unidentified
MSRVTMAVDLAKNVFEVAVAGATGTVCERRRLTRAQFLQFWGQRTPCRVVMEACATAHFWGRFLGARGFEVVLLPPHYVKPYRRRNKTDRADCDAILEASRSHGIHPVAVKSEDQQAILALHRVRAQWLASRTARINHMRGLLREFGVVAPAGAQRFMRDFLELLEQKRVQLPARVRRILLTLWEETRALEPRIEAVDQELESVATQEPVVQALCRIPGIGVLTATALFATVGNVHAFPSGRRLASWLGLTPREFSSGSRRRLGRISKQGDAYVRMLLIHGARAALNGARRLAKAGKPLTHLQAWALRRAEHAHSNKAVVALANKTARIAWAVWHHERVFDGDHALRVAA

SEQ ID NO: 413879 - protein, 288 aa, unidentified
MASEVAADTVDGDVFGGVDSHADTVHVAVISDNGGHLADAEFSTTTAGYAAALAFLTAHGRVVTIGVEGTSSYGAGFTRAARSCGHQVVEVNRPDRAERRRTGKSDPIDAYAAARAALSGRASSSPKDDTVAGIRALHNAARSAVKARTAALNQIGNVLITAPEAIRAKYGQLKGPDRTEALARLRPVGDALHIAVLTALKSLARRVKELTAEHDTLTRALDTEATTHNPALRAAYGVGPDTAAQLLITAGGNPERMRTEASFAALCGAAPVPASSGRTNRHRLSPGR

SEQ ID NO: 413880 - protein, 341 aa, unidentified
MERFKHFVGIDVGEAQHTCTIFSHPGAPLVATEDFANRPDGFEVFEQVLLKYGVDKQQAVICMEATGVYGEALCYWLVSKNYRVAVDPPLRIKRAFYPKGHKNDRVDSKQIAEYAYRFEDQLYFWQPKGHLVEQIATLLGAREQLVEQKTASMNALTALQKKIVKNEVAQRIYQENIITLESHIEQLEQEIMKLINQDQQYKILVAWLDTVPGVGMLLAANLLVLTDGFTKHLKYPTLAAMIGICPYQFRSGSSVWKPDKSAGFGPARVRKLLHLAARSVKTHKAPFIKYYARKEAEGKPTKLILNNIANKLLRIMCAMIRDQKPYIKNYVSVNPRLLKNP

SEQ ID NO: 413881 - protein, 349 aa, unidentified
MTIVENPTITVTGGIDTHLDFHVAAAIDSNGGVLGVETFDTTTHGYRELVAWLAGFGTISLVGVEGSGSYGAGVTRHLVGKGIAVVEVDRPNRQARHRAGKSDSVDAIAAARAALTGTATGVPKSRTGKIEAIRVLTVARRSAGDEWISIINQMRHLVFCAPDEIRARFLDLSPIKLARTCATLRPRRNSDDVVRFTTLSTLRELGRRALFVREQKERLNTEMRPLINEFAPALIEMKGVGYDTAAKLLIAAGDNPHRIRSEAAWAHLCGVAPIPASSGKTQRHRLNRGGNRQANSAIYRIMLTRMANDERTRNYIARRSSEGKTMGEIARMLKRYIAREVYKTLPTTN

SEQ ID NO: 413882 - protein, 324 aa, unidentified
MTPAPPPSADSVAGIDVGKYGLDVFVDPSQLERRFANTPDGRRTLCDWLRELGARRVAVEPTGRYHRELHQCLCDDGVKVVLANPQRMRNFARSLGEQAKSDRIDAAMLARYARLDGIEGTAPKPEAQRALADLLALRRKLVEQRDGLRKHAAETGDAAASLLADLLEAFDAKVQTADDAIEAGIQADPAMRRRSEIIRSVPGCGPLTAASLCAELPELGSATPAEAAALAGLAPYVCDSGRQHGRRRIRGGRQHPRKLLYMAATSAIRWNPALRTVYTRLTARGKPHKVALVAVMRKLLVLLGALLRDDRLWLPAGPPARLPA

SEQ ID NO: 413883 - protein, 315 aa, unidentified
MDVTHSEPRFVGIDVGKAHIDVHVRPSGEAFRLTRDPAGLAELVARLNPLTPALIVLEATGGFERVVTAALCGVGLPVAVVNPRQIRDFARATGRLAKTDRVDPKVIAHFADAVRPDQRPQPDAAARELADLITRRRQVVAMISSETMRSHQARLPAVRRRLAAHLDWMNQELRQLDADLDTAVRANPAWQERATLLVSVPGVGDATTRTLLAELPELGTLGRRQIAALAGLAPVAHDSGQHRGTRHIRGGRGTVRAALYMAAWIGSRWNPTLKDIYQRLRAAGKPRKVALVACMRRLLTILNAMIRDKTPWRAA

SEQ ID NO: 413884 - protein, 315 aa, unidentified
MGAEVWVGIDVSKARLDVALGAAGELLWVANDARGIASLVARMVELGPELVVLEASGGLQTALVAELGAAGLPVVVVNPRQVRDFARATGQLAKTDALDARMLALFAERIRPKVRPLPSAQELELKALVARRRELVEMITAERNRLGSAPQLLRKEISAHIRWLESRLKERDRDLGRMLRSLPLWREREDLLRAVPGVGPVLCATLLADLPELGALSRHQIAKLVGVAPLNCDSGTMRGRRTVWGGRAQVRAALYMATLAAVRCNPALKTFYLRLRSAGKPAKLALTAAMRKLLTILNAMLKHRTPWSPQCHHVA

SEQ ID NO: 413885 - protein, 408 aa, unidentified
MISPILKRCCGLDVHKDSITATLLKEGSQGKITKKVKEFGTYKEDVLKMKQWLIKEKCEAVCIESTGIFWSPIYDILHEELKVSIVNARNVKNVPGRKTDVLDSEWLAELLRCGLLKPSFIPSKQLRNLRMKVRYRVSVLKQYQAEKNRVTKVLESAGIKLSTIASDAFGASGLLILKDLLEGSKNVLEIAQTSGKRLKADTVRIAQAIDGDLDNDKKFLLNEMKKHLEWLARKMMKLNDEILSSIEPYKNEWQLIQTIPAIDAISASAVIAEIGCNMEQFDNDSAHLSSWAGVCPSNNESAGKRKSSRLRKGSKQLRRALCEIANSASKSKGTQFEHFYKSLLIRRGHKRALMALAHKILRIIFSVLKNKKPYYEPKVNHEMLTTKRNAPRWIRTLKKYGYLAQEEN

SEQ ID NO: 413886 - protein, 400 aa, unidentified
MIDTGDIDVFLGLDVGKGERHATAVTPAGKKAFDKRLPNTEPKLRELFAKLQAKHGTLLVVVDQPASIGALPLAVARDMGCPVAYLPGLTMRRIADLYPGEAKTDARDAFIIADAARAMPHTLRAIDGEDETIAELEMIAGFDDDLAGEATRVANRLHGLLTQIHPSLERVLGPRLQHPAVLTLLERFGSPAQIRKAGRRRLVALLRPKAPRMAERLVEEIFAALDEQTVVVPGTEAAALIVPSLAGSLATVLDQRKLLAGRIEELLEAHPLSKVLTSMPGIGVRTGARILIEVGDGSTFPTAGHLAAYAGLAPATRSSGSSIRGEQPPRRGNKQLKRAFSLSALAALGDPASRAYYDKKIAQGKHHTQALLCLARRRADVLFAMLRDGTFYEPEPAAAR

SEQ ID NO: 413887 - protein, 421 aa, unidentified
MAQQVFDRLLERVAGLDVHKAQVTAAIRVPDGEGGRLQDVAEFSTTVRGLMALRDWLEAHQVTDLAMEATGVYWRPVWAILEDRFACILVNARDVKQVPGRKTDVGDAAWIAQLLEAGLLRASLVPPKPIRTLRNLTRYRKTQIEERQREANRLHKILEDTGIKLDCVASNILGTSGRAMLDALVAGTTDPVVLADLAKGRLRAKLPALTEALEGRFDSEHALIVSAILAHLDFLDEQIDRLSDAIGAQLGPFATAVELLCTIPGVQRRTAEVIIAETGGDMTVFPTARHLASWAGACPGNDQSAGKRRSGRTRKGSRWLGIALTEAALASTRTKDTYLAAQYRRLRPRRGHKRALGAVKHSILVAAWHMLSTGELYREPGGDYFERRRDPDREVKRLLAQLQRLGHTVTLATTTSRPAPA

SEQ ID NO: 413888 - protein, 428 aa, unidentified
MEVVEEEPLFAERAAGIDIAKAGVEAAVRVPGPGGRRMQEVRSFKVTRRGLEELAGWLEGHGVTRVGMESTSDYWKPVFFFLERAGFECLLYNSRAVKAQPGRPKTDKADAAWLAKITENGWVRSSFVPPAQIRVLREYTRYRRRVIQARTAQMNRTEKLLESGHVKLSSVISKLHGVSGRAMMNALAAGERDPKVLAQLARGTMRRKITELEEALDCTFFTPALARLLARMLKLTDELTAEIEGPGTEIAELCAPFEPEIARLDEVDGIARRTAEDVIAEIGTDMTVFPTAGHLVSWARLCPQVRESAGRRKGRNATGDGNAYLSAAISEAVIGSLGTNCFTAARYKKLIRRMPKKKALVAAGNSVLTIIWHLLADPEATYADLGGDYYELRDPARQKRSYIRGLERLGYHVTINTINPDTGELTAA

SEQ ID NO: 413889 - protein, 406 aa, unidentified
MNIHNLAHLQVAVDIGSHEHYVAIGLSEGGILDEFSITHTPAGFQYFFSRIKLQEHLYNLPVDVAMEGYNGWARPLDSQIQSHGYQLYNVNNLKLARFKEIFPAPAKSDLVDTHKMLELFQLQDHLPLAKGVLQAVLPVPDANRRLKRLTRRRRQLTNEKVALQNRIQPDLQATCPTLLEITGSIDNLWFLHFLTCRDDLTKLMRLQTKSLLAIQGVGRKYLNLILDWQKQAEFSNEIEEVGPMIQEDARRLLALMASIKTMDAKIDSQIQKSAYAQHIDSIPGFGLVCSAELAGEIGTLDRFPKQSSFSIYIGMAPLDKQSGGYQGTKSPKHVNTRARKAMMTAVCRHMAYVPESRAYYDKKRSEGKTHNNAVRALGRHISRVIWSMLRHDRDYIELASINEKTA

SEQ ID NO: 413890 - protein, 330 aa, unidentified
MKSWNVILGVDVSKLTLDICCAERNLYLKIENQTKGFNLFKKWCKVNEINLKETLVVMEHTGGYEYRFIQFCESQSIPYCRIPGLEIKQSQGMTRGKSDQVDAFRIGQYGEEKAKRLVPSKPLDKNILTLKQLLSFRKRLVRERAGLESTIKERKHMYLAKKTDSVTHIARAKMNEDKKYIKQIEQEIMDVIKSNEAFMQTYRIITSIKGIGNVNAWMTIAYTENFTSFTEGRKYAVYAGVVPFEHTSGTSIKGRKRVSHLANKELKQELNQAAKTAITHDPELRAYAERKLKNKCYPLVLNNVKFKLILRMFALVKRGEAFVENYKKAA

SEQ ID NO: 413891 - protein, 336 aa, unidentified
MREITTLAIDLAKRVFQLHGVDARGVCVLRKQLQRAQLLSFLAQLPVCLVAMEACGGAHHWGRRIAALGHRVKLIAPQYVKPFVRGDKTDRNDAQGICEAALRPGMPEVAVKSEQQQAMLTVHRLRELIDKQRKQLANQLRSLLAEFGEVMACGIPTLRRELPQRLERVPELMRGVLQEGYERLVELQRQSQQHTRRIEQLAQDDPLCQRLMRERGIGPICASAYVASIGDPSRYRNGRQVSASLGIVPRKQGTGGKAVLLGISKRGDRYLRTLLIHGARAVIRHIAGKTDPLSCWLQRLIARSSVNCAAVALANKTARRLWAIWRAEQSPSLASV

SEQ ID NO: 413892 - protein, 340 aa, unidentified
MKTYAGIDLHSSNNYLGIINARDKRLFSRRLPNCIETIIKALEPFKKTLAGIAVESTYNWYWLVDGLQGAGYKLHLANPSAIQQYEGLKHTDDKWDSFWLAHMLRLGILPQGYIYPKRQRPVRDLMRKRLFFVQKRTSHIQSFQNMYTCHLGGKISSNDIRKLKSKHVDQIFHSPYVAMAANNHIDTISFLTTKIKAMEKMILSKTKMQKPFQVLTSTPGIGTVLGLTIMLEIGDIKRFDAPGNYASYCRCVKSDKWSNNKKKGQGNRKNGNKYLAWAYVEAAHSMRGFCAEANRFYQRKKAKTNGAVATKSLANKLARAHFFMLRDQIRFNKQKLFAGG

SEQ ID NO: 413893 - protein, 482 aa, unidentified
MTVKQEGAGGVGKGRKSKKGGKKRKITKLDSLKQLNLNAGGLDIGAAEIYAAVPEGRDEVSVRQFDTFTADLKVLADWLEACGVDTVAMESTSVYWIPIYEILEERGFDLYLVNARQVKNVTGRKTDVLDCQWLQQLHTYGLLRGSFRPRQEICELRTLLRHRGNLIRWRAAHIQHMQKALNLMNLHLTNVISDITGVTGMKIVRAIVVGERDPKVLAQYRDPNCKNSEEVIAKSLEGNYSSEHLFVLQQALELYDIYTDKIRTCDVEVEKLYSTFEPQVDLVEEPLKQSKKNRRKNKNVPEYDLRTYLYQMTGVDLTAIDGLDVLTVQTIISEVGTDMSKWKSVKHFTSWLGLAPENDISGGKVLRRGTKKVKSRANLAFRQGAMGASRGQSVLGAFYRRIRAKHGPGVANVATVHKIARIFYAMLKEQREYISPDTADYKAKQKERAIKHLRRRATRLGLQVVPAAKGNLKLRLNEDARL

SEQ ID NO: 413894 - protein, 343 aa, unidentified
MQIVRVGLDLAKYVFVVHGVDARGNVVLRKTLRRSAVSNFFANLPPCLIGMEASNGAHYWARVLSELGHEVRLISPQFVTPYVKSNKNDRNDAEAICEAVGRPTMRFVPRKSVDQLGVQAIHRIRSRLVGSRTRLVNQIRGVLSEHGIVIARNIAKLRQGLADMVGSNERNVSDLVRALMGELQVELAEFDRRIAAWDRRIRELYRGSELCQRLGKIEGVGPLSATALMAAVGDRRCFKNGRQFAAWLGLVPKQRSSGGRERLFGISKRGDRYLRTLLIHGARAVLCRAGTKQDPRSRWLGKLRERRHPNVAAVALANKNARIAWALLSGNEPYDPTLTVGTA

SEQ ID NO: 413895 - protein, 366 aa, unidentified
MKKIAYVGIDYHLNSLSIAVVLENSKKVHETIRLKNDDKMIAKYMKKLSKTFNIHACYEASCNGYAFQRKMISWGYHCDVIAPSLIPKKRGERRKNDRRDARNLAKLYANAMLTVVHPPGEEQESVRSLIRCRIVFKDSEKRVKQQINSLLLAQDLHWSLSKWTKSHRDWLCELDLHNKYLQQVLDEYLGHLEYLDTRIRYLDKQIDEIAKSELYAPSVKKLKAFKGIGTFTAMLLIAEITDFKRFPNPRALMAFLGLIPSENSSGDQQKGGSITKNGNHRCRKQLIESVQHYVKKPYMTVQMKDNIVQVDRRSATIATTCMKRLHKRYWALTMKGKIRPVALTAIAREFVGFIWAMMMQPEPATV

SEQ ID NO: 413896 - protein, 461 aa, unidentified
MQNSNRKDAPGSKKQIEGLPVVRRNVAGLDLGSEQHWVCAPAADGEGREIAAFGATTPELIRLAQWLKERHVESVAMESTGVYWIAPHEVLEAAGLEILLVDTRQLARVPGRDKKSDPSDCEWIQRLHSCGLLRGSFRPREQVCMLRTLVRDKANLVAVAGDWLRRMQKSLDQMNVRVHRAVSDLDGATGMAILRAIVAGERDAAQLAKLRDRRCRKSEQEIAEQLSGHWREDHLFSLGQSLEMYDAIQQRIAAYEGEILRQLAAMERDEVRERPAPPVKNPQKTKTIQRRGEEAMRQALYRMGGVDMTSIDALGVETVQVVLSEYGPDLSRFPSEKEFVSQVTLAPRRPTSGGKPVRKKRRNTASTRVAAALRMAAVTLRNSATALGAYYRKVARRLDGKTAVFATARKLATLIYRLLRWGQPYVDEGAEAYERRYQEDRLRALNAKAKELGYQLVPNAQ

SEQ ID NO: 413897 - protein, 422 aa, unidentified
MKLTYPVCCGVDVHKTFLVATIIKTDGLVQKYYKKRFSTFSRDLLAFRQWLLDNDCKDVCMESTGKYWVPVWNILEDAIRVVIANPKWVSAVKGNKDDTKDSRWIGDLFRMGLVPGSFVPSRKIRVLREFTRYRYKLISMRSSERNRFQNAFTVCNSTLDAVLSDMFGKSAAAIQNYLLDTDVVNPAYCASLLQRAAKKKSADVMAAVEGFKMSAEQKERVRIIQEHFSDINARVARLDAEINKLVSEYESQIALLCTIPGVDRNLAITIISEIGTDMSEFGSSKRLCRWAGLTPGNNESAGKKKSVKITRAGVYLKPALVQAAHAAVKSTKSVYFKSKYEHISKRRGKKRAIIAIARMILTAVFAMLKTGEVFHPCDLQKYDMPEQLRRRQVVSSAKNAVKLLVSLGVLQEDSVSLAALAG

SEQ ID NO: 413898 - protein, 314 aa, unidentified
MSQNPSIIYVGLDVAKDSFVVDWLGRRHTFSNDARGHSRLLRLLAKASGPVHVILEATGGYEAAIVAALHQAQILCSVVLPGRVRAYAKAIGLHAKTDPIDAALLSAYGRAVQPLPTPPRSAQEQTFLETVRQREQLVNMRTALQNQAAHLQGAQAQKRHRLVLRTLSAQIANCERQLAQLQAADPHLQQRSKRLQQVTGVGPIIAATLLAEMPELGSLQETEAAALAGVAPYNCESGPRKGTRRIAGGRAPVRRALYLAAMTARRYDGILKRSYDNLVARGKPKLVALTALMRKLIILLNRLLQKPSFQLQPH

SEQ ID NO: 413899 - protein, 387 aa, unidentified
MPQLNDLSRSLVALDQDSTIIAVVELSQSSWLVAGVLPGIERQPRKKLEPSAERLLGLLHRWRDEAVRAGRNITRIAVAFEAGRDGFWLARWLNARGVEAYVIHPSSVAVSREHRRAKTDRLDTELLKRAFLGWLRGERGHCSMARVPTIAEEDAKRPNRERECLVGERTRIVNRMKGTLARLGIRNFKPTLRKAADRLATLHTPEGMPLPPNVLAELQRAMARLGFVVSQIREIEQARQKRLEQQPETGPHAMVRQLSRVVGVGIETADMLVHEVLSRPMRDRKAVARYAGLTGSPDESGTKRREQGLARAGNARVRRGMIQLAWRFLLFQKDSALALWYRARTADSRVGTRKTMIVALARKLMIALWRFVTTGETLEGVVLRPAG

SEQ ID NO: 413900 - protein, 362 aa, unidentified
MEEGKRRYVGIDLGKREYTTAIIGMDGKMKIHTGKTSIQGRQALYSLLKKNDKIALEAGNLAFIFAREIMERIGSEVRVLNSAKLPFIWDAPTKTDKEDAMKLAHLVEERRDEKLPIVPLPSEKEMERRKILADHGREMKNRTRYLNTLHAIFVHQGHTTIKKKDIATVERREEAVKILTGIERKEAEWLLKYLDLHEQRIKELKETIQKEAKEDEDMKLLQTIPGVGAVVSYAFISHVGAGSRFSKGAQVSNYIGFVPRLDYSGTIQRQGHITKRGNGYLRGLIVQAAWSMVRVKKGGALNTRYKYYVLQGASKKKTIVSIARKMTELMYSVLRNKTAFEPRPWSGPKNGIPILKGKELSA

SEQ ID NO: 413901 - protein, 343 aa, unidentified
MEYYVGLDVSLKQTSICVVDQSGSAVREGVVDSDPEAISVYVRSKAPGAVRIGLETGPTSTWLWTELKRLGLPVICIDARHAKAVLKMQINKSDRNDAIGIARIMQTGWFKEVHVKDIDSHTVRALLASRALLVKIKRDLENHVRGLLKNLGLVIGRAKFNVFAVRAEELIEGRPELIAAIRPLLEARNAVEQQVSELDRKVMKLARHDAQVRRFMTVPGVGPITGLAFKATIDDPARFARSRSVGAYVGLTCRRHASGEVDWSGRISKCGDAMLRSYLFEAAGVLLTRVPKWSAVKAWGVKLVKRNGLRKAKVAVARKLAVILHRMWIDGTEFNWSKKEIAA

SEQ ID NO: 413902 - protein, 369 aa, unidentified
MWFIGLDVHTKTSSICILNHDGKKVKAQTIKGDWKKLVAELARLPENFRIVYEASLGYGTLYEALAKIPRCKDITVAHPGHLRLIFRSKKKNDAQDAKKLATLLLLDQVHAVHVPKLDVRQWRRLIELRRTNVQKRTRAKNSLRAVLRTYAVAVPRDIGGLWSKKGRAWLTAVDLPGMAGDERDLLMDELAHLEGAVKKLTGRLDVRAQQEPGVGLLQTIPGIGPRTAEAFVAYVDDPARFERIKNIGSFFGVVPCQDSSAATHRLGHITKQGPASVRQLVTEASWIGLRKSPTIRAYYDRIVGDKADRKKKALVATGHYLLRVMLSMLKTGEEWREQEGTPSYGCETPVAGPTPEPCLREEEEDLAAA

SEQ ID NO: 413903 - protein, 316 aa, unidentified
MANQSKSKLGINVGVDVGKSKLDFCIHEHQLHWQEDNNPEGIKRALKRLAYYRVERLVVEATGRYELELAEAASSKEFPVVIAKPLSIRRFAGAVEQLAKTDKLDAKIIAQFAAVIKPAPSKLVGKKLRAIKDLLTRRRQLMEMRTQELNRLQMMKSLKNSVERMIRYLDQEVERIEQKLGKAVEVHDEWSERKAILETTPGVGNTLCYTLLADLPELGTLNNKEIAALAGVAPMNRDSGKMRGKRKIQGGRANVRTILYMATLSATMCNPVIKPFYQSLVKQGKHKKVAIVACMRKLLCILNAMVRDGKCWAFES

SEQ ID NO: 413904 - protein, 409 aa, unidentified
MEILHRACAGIDIGKRSVTVCVITSGPSDEPLKATRTFGTLTRDLLALADWLEGAGVTAVAMEATGSYWKPIYNLLEDRFELLLANAAHLKAVPGRKTDVRDAEWIAELFRHGLLRASFIPPRPERELRELVRYRTSLIRERASELNRIAKVLEGANIKLSSVSTNIGGVSGRAILAALVADTTDPEVLAELARGRLRNKHDALVAALTGRVGTHQRFLLAAQLRHLADLDELIEGLDAEIMERLTPAEPVIELLATIPGVGRRNAEVLLAEIGQDMGRFGSSRQLASWAGMCPGNHESAGTHHGGKTRRGSPWLRSALVSSARSASRTRTYLGAQYRSLAARRGAKRAFVAVGHTILGIAYAVLTRGEPFHDLGATYFDRRDADHVKRRLTRRLEQVGYTVTLQPQVV

SEQ ID NO: 413905 - protein, 316 aa, unidentified
MESQRPFVGIDVSAQRLDVAVLPHGAHFTVPYTDDGVASLVQRLQELAPQIVLLEATGGYEIPVAYAMSEASLPVVIMNPKILRHFAKSTGKLAKTDKLDAQVLAHYAQAIQPPVRPLKDPEQHELATLMSRRRQLQGMIVMEQNRRRTSTPKVRHNIDQLLAYLRQLLKDLDREIHDFIRRTPLWHEKQEILRSTVGIGPKVSASLIADLPELGILPGPQVTALAGLAPMNRDSGQYRGKRMIQGGRPAVRQALYMAALVASRHNPVIREFYQRLRQAGKPAKVALTACMRKLLVILNAMLKNHTHWEDRLPVAA

SEQ ID NO: 413906 - protein, 414 aa, unidentified
MQSYPKEDRSMKEFTPELIEVKNDSTLNLIFNHKNLEDYCAYIGLDVHKETIAIAVATRGRGKVSYRNEIPNRPKNIKKIVDKLIKEFDGELLLFSYEAGPCGYDVYHQLIALGVDCEVVAPSLIPKKAGDRVKTDKRDAIGLARLSRSGELTAVWVPEPEQEAMRDLTRAREDIKAVELKAKQQLGAFLLRHGKLYEKEKTRWTKGHFNWLETVKFNSSVQQIVLQEYINSVKDSVKRVAGIRSEMDNALKTWSLRPVVEALISLRGIDIVTAMTVMAELGDISRFDKPRQLMAFLGLVPSEYSSGGKRRLGSITKTGNGHVRRVLVESSWSYRFPARKTKHLRQKEAKASKRVQAIAWAAQKRLCGRYQQLLESGKVKQLACTAIARELSGFIWAIVCEVMNKPHASRCITI

SEQ ID NO: 413907 - protein, 351 aa, unidentified
MDLIAFDSHKRYTLACIESEDGRTRREARIDHAPGMIRRFLERCPKGSPVAVETIGNCYWIVDEVEAAGMTPRLVNARKAKLMMGQTNKTDRLDARGLNRLQRTGTLPTVWIPPMELRDLRELLRTRMDLVVQRTQLKNRIHAALARYCLSLEEASDAFTIEGRKEMAQLFEKLPPQTRFANTLLLEEVDAVQNQIDRLEERMEEVLEDTPTVQLLRTLPGVGKILSAVIALEVGDIGRFPSAGQLASYAGTTPRVSSSGGKTHFGKLRNDANRFLKWAYIEAANVVARFHRKHPETHLSRMYAKLRKEKGHAKAVGAVARQLAEATYWMLTRNEGYKEPARTGTGSSTEA

SEQ ID NO: 413908 - protein, 347 aa, unidentified
MKLYVGIDVSSRDLATCIMDHEGNTCARFKVDNHLLGATFLRDQILLWANKRKPTEILIGMEATSVYSWHPAMFFHQQEALQAWNVKVFTINPKLIRKFKEAYVDLEKTDDIDAWIIADRLRFGRLKMTAVLKEQFLALQRLTRMRYHLVHQLTREKQYFLQHLFYKCNSFTQEVDSSIFGHAILELLLESWSLDDICQMDVKQLADFLRQKGRNRFADPECIAKSIQKAARSSYRLSKCVEDSIDLLLGLSIQSIRSLQSQLKELDKAITRHLEGIPNTLQTIPGIGPVYTAGILAEIGQIERFHNQAALAKYAGLTWSKHQSGRFQAEDTSLIRSGNRYLRYYLV

SEQ ID NO: 413909 - protein, 312 aa, unidentified
MTEHCYCGIDVAKDRLDAQVLPHRQRFSVDNNATGWAELVERLHALPIAAVGIEPSGGYERGIIRILLAAGLSVRRINPSKLRQFARARGILAKNDRLDAQLIAEYVSIIPTRVVQRVATAERLAEVVTMRRQLCDQHVTIENQAAHVEDAILRRLNKRRLARLKADIHLLDKRLAEIVAADVILAQRYELLTSMRGVGPTLAFTLIALLPELGQISRKQIAALVGLAPYDFDSGKLKGHRCIYGGRMPVRNILYMAALSAARYNPALKVFHNRLAAINKKPKVIIVAVMRKMITTLNAMVRDNAAWQPRAA

SEQ ID NO: 413910 - protein, 349 aa, unidentified
MNRTTYGVDIAKSVMQLHWIDGETGEIGRKKLARAKLREYFAQLQPVRVVMEACGSAHHWARVLGALGHWVELLPARQVRPFVRSNKDDAADARAIWVAAQQSDIRRVPQKTLDQQAVMALHRTRSHWVSVRTATVNALRGTLYEFGVILPGGKNVGLKALGAQRAEIDAQLPAAVQRLIDGQLATLKDIERRIDEIEAAIAAQQKQLPQAKTLRRVPGIGLLGATALAATLGDGRAWKSGREFSASLGIVPAHSGTGGKARVGHLSKRGDPYLRTLLIHGARSVITHAKHKPKWLEQLLARRPLNVAVVALANKMARTAWALVAHGRDYEREWKSTPPKGCSAQAVAA

SEQ ID NO: 413911 - protein, 387 aa, unidentified
MPQVNDLSRSLAAFDPISTLVVVVEMSKTSWLVSGVVPGVERQPLKKLEPDATALLRLIERWRIEAVRAGRPIRRIALAYEAGRDGFWLARWLIARGIEAHVIHSASVAVSRERRRAKTDRLDAAMLMRVFLGWLRGERGHCGMVAIPTMEEEDARRPNRERESLVNERSRIVNRMKSALARLGIRGFKPHLRKAPERLAGLRTAEGTGLPANIIEEFRRDMARLALVREQISSIEKTRAERLERAPDTGPHAMVRLLARVIGIGIETADMLVREILSRNLRDRRALARYAGLTGSPDESGLKSREKGLAKAGNARVRRGLIQLAWRFLMFQKDSALARWYRTRTEGPSGARKTTMIVALARKLLIALWRLVTTGEVPDGVELRPAA

SEQ ID NO: 413912 - protein, 389 aa, unidentified
MKIIKQSVSADIAKDKFDACFSVLTSEHRVVVKATRKFANTSKGFAEFGRWVSKWENLQVELAVVMEATGVYYENLAWSLYQAGRKVVVVLPNRAKQYTQSLGHKSKNDKLDARALAHMGAERQLEPWQPMSRQLFLLRKLTREHEQVQQMRTEANNRLHAESHSMLESKSTVKRLRKTLQLYEAQLQVIQQEIRATIESDALLKAKVGKVTTIKGVGLLTAATVIAETNGFALFTSQKQLTSYAGYDVVENQSGKRSGKTKISKQGNSHIRRILHMPAFNAVSRNVPVCRALYERLTGKGKKKMVAYVAVQKKLLALIYTLWKRDEAWQEDRYQQQTEEGIQSLEAGASLSGVSAADRSTVAPAVARATQDKHPVPVGPGALFQVRER

SEQ ID NO: 413913 - protein, 418 aa, unidentified
MEQLIERVGGLDVHKPTVAACVRMPGVKGTREQHVRTFGTTAAELLALRDWLEALGVTQVAMESTGVYRKPIYYVREERVTCLLVNPAPMKQVPGRKTNVQDCAWIAQLLEHGLLRGSFVPPAPIRELRDLTRYRKVLIQDRTREATRLHKFLEDAGIKLASVATDVLGASGRAMLEALVHGTTDPDVLAELARGKLRAKLPALRQALAGRFRPHHAFLVSQLLAHVDYLDETIATVSERIEVTMAPFAEELARLDTIHGVARRTAEVLIAELGVDMRQFPSERHVASWVGLCPGNNDSAGKHKSGKTRRGNRWLRAALTEAALAAIRTSNSAFAARYRRVMRHRGHNKAVTAVAHAMLVTAYHLLARQPTYQELGADYFDPRHAERLTRRAVQALERQGYRVTLARADMNARPPGIF

SEQ ID NO: 413914 - protein, 377 aa, unidentified
MCGLDVHKDSVFVCILNEEGVVFQEKFGVLTPELERMVGVMLEHGVTEVGMESTSVYWMPVWRVIDPYVEQKLVNPYFIRQLPGKKSDVKDAEWIATCILKGLVRGSYVPEERIQQLRQYDRRIFDLNGDIVYKLTKLDAALQRCNIRLSNYVSTTDCRSYSDVVEAIADGETSPDTLLECIHGRIVNKHGEDVIRSALTGVITPVDADVIGQLREEIELARLHRDECQKKMDELCKEWFPKQYANLQTIPGVKARAATAIIAELGTDMSSFEDAAHLVSWAGLRPRNDESAGRIKARGITHGNKYLRQTIIECAWGASRTRDCFYAKFSYHQTVVRRKSRMKVLVAIARKMLTAIWFILHDGVAYRDFEMDVTTAA

SEQ ID NO: 413915 - protein, 346 aa, unidentified
MAYYVGLDVSVKETSICIMDDKGGVIARTDVSTDPDLIAGFIFKYAPDVERVVHESGILAIWLTRELEKRGVPIICIDARLAHKALSGRINKSDQGDAEGLAQLARTGWFTQVHIRSEASERVRVLIGARERLIRMRKDLEGHVRGVLKVFGVCMTSVGTGKLRRGFRDQLAAAADTDPAIAMLSETFIPLHKTLCIARDALDEEVRMMARKSDLARRLMTVPGVGPIVALAYIATVDDEKRFRKSIDVGAFLGLTPKRHQSGEVDWSGKISKCGDCDMRRLLYSAASTLISCTRKPSRLKEWATKLAERKGHKKAAVATSRKIAVILHCLWRNETVFEPGMEGAS

SEQ ID NO: 413916 - protein, 351 aa, unidentified
MKYYISTTEFNCGIDLHARQMYVCVMDRLGNKLVHTNIVGNDFAFFLKKIAPYRHSLTVVCESTFNYYWLADACFEANISFVLGHALYLKHIHGGKNKNDRIDSEKLAHLLRTNLIPPAYVYPSERRPIRALLRQRMNYVWQRAALMTHVSINQTAEGLTPAVKSGTNRDVWVDRILKQYEHPLHRLAVSCEMDMIRTYDKQIDTLEAEVVRQAKQHEGRDYQLLNTVPGIGRILAITILFEIDSIERFPTVKDFLSYSRLVKGSVASAGKVKGLTGGKMGNAHLRWAFGEAAVLCKHNHPFLTPYADRLIAKRGKFKGNAILAAKLARAVYFMLQKGTAFDAEKLVATAL

SEQ ID NO: 413917 - protein, 400 aa, unidentified
MRAVFGIDVSKASSEVAILVNGEKVHGYTMSNDALGFARLLGDLKTVHKPEIIFEATGVYSRRLQAFLDEHGYAYTRLNPLEAKKQLDSLRVRKTDQIDAEKLAQSQFVLNRKPTYVQEEVYQELRDLSRFYQNLTEDIVRAKNRLHKVLQVTFPEIETVLSKPTGEQYWNLVTAFPYKDFVLDLSKDELLESIRQSTSKRISDKRVAYLAEKLIALANQSYCAVKKTSPMLEEVRYYGKELLRLSEQRQTVLDQMVELAQPLPEYDILLSIPGIAETTATSIIGELGDIRRFQSANQINAFIGIDLRHYESGNFLAKEHITKRGNPYARKILFKCIHNIASASHTKPCHIADFYEKRKRQSQTTSTKPHTIASIHRLIRTMYYLITHNKLYDYRSTQNQ

SEQ ID NO: 413918 - protein, 357 aa, unidentified
MTQVKQLDFTGTTIFCGVDVHKKNWRVNIQDVEFELEDFSQDANVVLLHKHLNRKYPGATMKVCYEAGFSGFSAQRWLSQHGVDCQIVNAADVATTDKEKRQKSDKIDARKLCEHLQSKKMKGIYVPTSQWEHGRSLVRARARIVSNQTRCKNRIWQLLYFSGLSFPQDYEAGHYWSRNFIKKLQAIDCGTEELKITLGLYIKDFLQTRRLLLEAMRAIHKLCKQPEYEKQITLLRSIPGIGKINAAVILFELQDINRFKRFDNLCSYVGLVPNTHDTGETKKSKGITNRSNQYLRMALVESSWSVVRKDPALLMKYKKYCRTMEKNKAIIRIAKHLLSRINYVLKNKKEYVSGVVA

SEQ ID NO: 413919 - protein, 352 aa, unidentified
MTETHKDRAITFVGIDLAKRSFHLHAADERGERVLSKKLTRARLPGFIAQLPACTIAMEACGSAHHWARRFREQGHEVRLIAPQFVKPFVKSNKNDAADAEAICEAVQRPNMRFVAIKSVEQQDIQAIHRMRSLVVGQRTALINQTRGLLLEFGLEVAQGRAALQRRLPEILEDAENGLSERFRAELRRLYEELQQLNGRVLHYDTQIDQIAKDNAQAQALIQLPGVGAKGATALLAAVGEDPSLFKNGRGMAAWLGLVPRQHSTGGRDRLLGISKRGDAYLRQLFIHGARAVLRCADRKDDPLSRWATALKARRHANVATVALANKLVRIAYAILTKGEAYDPKHALSQAV

SEQ ID NO: 413920 - protein, 450 aa, unidentified
MLEPREIEDRPDELAVTRVAAVDVAKASGVVCTRVPREGEPGRFVTRVHTVEATTNAILELAGHLTGLQIEKVVLESTSDYWRPFYYLLEAAGLTVELVNARDVKNAPGRPKTDKLDAVWLAKLAGWGMLRPSFVPPAEIRVLRDYTRLRSDLTRERTRHWQRLEKLLEDALIKVTVVASRIDTMSVREMIEAMIAGQRDPRTLASLARGRMKAKHAALVEALTGRFDDHHAELAAILLAQIDGLTVQIDTLTTRIEQLITAIPAAQGVDPDGTTGPHAGRGPDAPVLPVIERLAEIPGISRHAAQVIVAEIGLDMTRFPTAGHLVSWAKLCPRTLQSGATSRPGRTAKGNPYLKGVLGDAAAAAGKTKTFLGERYRRLARRRGKLKALVAIARTILVIIWHLLADRAARYDDLGDDYYITTIKTDRKLRSHIRQIQALGYDVAVTPAAA

SEQ ID NO: 413921 - protein, 397 aa, unidentified
MSAVVGIDVGAYKHAAAVCRPGEREAERGVFRLSADRTGFDELDRWLKRQGPVERVVLESSGHYYWPLASHLYRRGYRVAVVNPLQAKYFAKSRLQRSQSDPADARTLAALGMSEEPRVKDPLLGAEAKEAARFWGGLVKEQAQIRNKLLRLVEIGFPELKECFEDPLCETALAVLREAPTARAASHKRVSTLAETSRPGGRRRLGAGKASRLHELAKQTIAPPELDAQMSFEVGMLIQQFDLLDKQIEIAEQRVAEVLDSELARRLQTIPGVGPALAATFIGEIGDIWRFEDFDQLASYAGVHPKELSSGTKGQNPETSWHMAKTGNAYLRSAAYKMAVVGTQHNTVIRAHYLRKRAQGKSAMNAIGHCMSKALAIVWGVWRSGLEFDPTLGGPRG

SEQ ID NO: 413922 - protein, 327 aa, unidentified
MSIATLGIDISKDKLDVALYQDNAYRLATFANERDGYRRLAKWLKKQKAKRCNVCIEATGRYGEAVAMFMHDRGYPVSVVNPARIKAYGASQLKRNKTDKEDAKVIAHFCATQEPGLWTPPAPEIQELQALTRRLEVLKAERTRELNRQKSGIQSKTVLADIKAHIRFLNKQIAAIEQRIHDLIDRHSDLRKQHDLLTSIPGIGDTTAANFIAEVPDVTRFHSANQLAAYAGLTPRKHESGSSIHRRGRLVKTGNKRFRTALFMPALVALRFNPIVQALAQRMEANGKNRMTIVGAAMRKLVHLAYGVLKTGRPFDPDYLVNVQITC

SEQ ID NO: 413923 - protein, 320 aa, unidentified
MMAQNDLVVVGIDVAKDKVDACIRRFTLRQTFPNTAQGHRKLVAWLRKYQVGKAVMEASGGYEREWRDVLHNAGIEVRIVDPRRVRSFALSAGRLAKNDPIDAEMIAWFAETFSQAPGQIPDAAREELAALAKARKALVDVKIRLQAQNEHAAPEPARKAYARVLKRLAAEIDKLEAAISAKVKATPEFAERAEIIASVPGLAQATSAILIAGMPELGQVSDEVAAALIGVAPYDDDSGKRRGERYIKGGRRWVRNAIYMPCLGAATQHNPVLKAFYQRLLTRRKEPKVALVACMRKLIIILNTMLARQQKWDPNRYAVS

SEQ ID NO: 413924 - protein, 440 aa, unidentified
MSVRCIELNAAGIDVGATEIYVAVPPDRDPRPVRSFQTFTGDLRAMAAWLVQCRITTVAMESTGVYWIPPYEILEEAGIRVCLVNSRHVKHVPGRKSDVQDCQWLQYLHSVGLLDPSFRPHGEICAIRSLSRHRASLVETASMHVQHMHKALTQMNLQIHHVLSDITGQSGMAIVDAILAGQRDPAQLASLCHSRVHANPQTVIKSLVGNYRPEHLFTLKQSLASYRHYQQLMAECDREIERLMRQIDGKIDPQQKPPASGPGVQKRSKNQFSFRMEPELERIFGVDLTKIPGISTLTAHTLLAEIGPDLSRFHNVGAFASWLGLCPNNKKSGGKVLSSRTRRTTSRASHALCVAAQTLARSRCHLGNFYRQLRARLGAPQAITATAHKLARIVYHLLTTGQAYNETIFQKEEQKQAQRYENRIRKQAKTLGFKLIPIAA

SEQ ID NO: 413925 - protein, 343 aa, unidentified
MQIRSVGIDLGKTTFHLVALGDNGKVLLRKKFSQKQLIAFTANMQTCLIGMEACSGSHFLGRALREQGHDVKLIPAQFVKPFVKSNKNDFIDAEAIAEAVDRENMRFVPIKTDDQLDLQALHRVRDRLMARRTSLINQIRAFLLERGIVFAKSPIRLKEALPEVLENANENLTPRMRNLVAMLWSEWKDLELQIVQMNDEVERIASSDAACRRLRQIPGIGPLVATAIVASIGNGAAFRKGREFAAWMGLLPKQHSTGGKARLYGISKRGNSYLRKILIHGARAVVLRSKRDRIAMGAWMTSLETRAPRNVLIVATAHKLARIAWAVLSTGQDYRAVPEALTV

SEQ ID NO: 413926 - protein, 322 aa, unidentified
MQYIGIDVSKATFVVAYSSDKGGEIRTFNNTTAGIKQFIGTLPKDGSIHCVMEATGNYSALLLYMLNVAGITVSMENPLKVKNFARAMLSTVKTDKIDARLIALYGEKMNPQPFKIQGEAILRLRQKRTVIRQLTKQITAMSNLRGSLACLPVPDKGATHTVDETIEFLEKRRDRLQSELTDLVEVEFSRQLALLTTIKGIGITLATALIITTGGFTYFQNAKQVSRYLGICPTYEQSGTSVNIRGHINRNGDAYTRGLLYVAAWTASRFNTKCGETYTRLRQNGKPGKLAMIAVANKLVRQAFAVVTHDKEYVDGFVSNRP

SEQ ID NO: 413927 - protein, 339 aa, unidentified
MKKRNSSSKNQTRAAKTKRTLERVTIGMDLGDKTSRYCMLNNEGEILREGQVATTKAGMVEAFGSLGQTRIAIEVGTHSPWVSRLLQKLGHEVVVANPKQVKLITESSRKDDRLDAQTLARLARIDPQLLRPIQHRSEKAQGALMVIRVRAALLAVRTSLVNTARGLAKSMGERLPKCDADQMGVLQAVSLPPKLRQVLEPLLKEVESLTEKIKNSDREIEQIARKDYPETALLQQVGGVGPLIALTFILTVEDKGRFQKSRDIGCYVGLRPRRSDSGQSQPQLRITKEGDPYLRTLLVQGAHYIISRRGPDTDPKRWGHRSPEVAVTAIGVPALLSYR

SEQ ID NO: 413928 - protein, 408 aa, unidentified
MQVLYTRCAGLDVHKDTIVACVRCVSPPMHQEVRSFGTTTTQLLELADWLGEHGCTHVAMEATGVYWKPVWHVLEDEFELVLANAAHIRNVPGRKTDVNDAMWIADLLAHGLIRSSFVPPHAIQQLRDLTRTRKQLVREVSQHSLRIQKVLEDANLKLGSVLSDVLGKSGRAMLDAIVAGETDPARLAALAQGTARNKTAELREALRGRITEHHRTMLRLHLQVIDALHRTLGELDTAVGKALAPIQQRTRLLTSMPGVSDLTASVMVAEIGVDMSRFPNAGHLISWAGLCPRSDESAGKRRSTRVRKSGTWIKTTLITAAWAAVRVKTSYLRAQFLPIKARRGAKKAILAVAASMLTAAFHMLRDGTEYNDLGSEHLDRQDRSKTIRRLLKRLQDLRCEVPQMAHET

SEQ ID NO: 413929 - protein, 350 aa, unidentified
MCSLPVFVGLDYHDASVRVCVLDTDGSELANADRRNDWKAIAEFADRFGRPVQAAIESCCGAADLAEELISCAGWSVDLAHPGYVQRMKQNPDKTDCQDAQLVADLERVGYLPRVWLAPHYIRELRQVVRYRLQLTEQRRATKLRVRALLREQRRHAPKGLNAWTKAWEHWLRHEAELSEQGHWLVKQHLAELGRLGMQIRQVEKRLERLTANDVEVQRLQEQRGIGPVTAWTIRAEIGHFDRFRTGKQLARFCGLSPRNASSGQRQADAGLIRAANPALRAVLIEAAHRLMNYDRYWQQFAQRLRAAGKPGSVVAAAVANRWIRRLYHEMKTPSGELAVAVGPAPSEDS

SEQ ID NO: 413930 - protein, 395 aa, unidentified
MSNRGVQPDRVIIAIDPHKASWTAAAVGVSLQPLATIRVSVSPQGYRDLRRFATRWPGAEWAIEGAAGLGAPLAMRLFADGIAVVDVPAKLATRVRMLSTGHGRKNDAADAVSVAVAALTAAGLRAVAVDEAITALRALIEHRDDVVKIRTQTVNRLHALITQLLPGGAPRQLSAETAAQLLRTVRPRTPGPRTLRRLAAELIAEIRHLDRRIAAATGDITAAVAASNTTLTELCGIGELTAGKILARVGDVTRFPSAAAFASYTGTAPIEVSSGDVVRHRLSRAGDRQLNYCLHIMAITQIRRDTPGRAYYQRKRAAGKSHKEALRCLKRRLSDTVYRHLQHEANTPTATGPGGHTGATTESSATGSTPTTGSSDKSQPGPAGTEPTTHQPRST

SEQ ID NO: 413931 - protein, 354 aa, unidentified
MSETAKTTVAVIGIDIGKNSFHVVGLDRRGAIALRQRWSRGQVEARLANMPPCLIGMEACVGAHHLSRRLKALGHDARLMPAKYVRPYSKGQKNDFRDAEAIAEAVQRPTMKFVATKTVEQLDLQALHRVRERLVGQRTGIVNQIRAFLLERGVAVRQGPRFLRTELPRILAMPSDVVSPRMVHIIEELAGDWRRLDERIEGLSIEIETIAHQDVGCERLMSVPGIGPITSSAMVAAIGAGDTFSKGRDFAAWLGLVPRQISTGDRTILGKISKRGNRYLRVLFVQAAWVVLIRPKSWERHGLKAWLETARKRLHRNVLAIALANKLARIAWSVLARGRAFEARRIDEATVQPA

SEQ ID NO: 413932 - protein, 319 aa, unidentified
MNGTNTIKVDYVGIDVSKSRLDIALGEDGEVWHVRNDGEGFETLVKKLEEIEPKMIVIESTGGYERPAMYAMGNAGLPVAQVNPRRVREFAKAIGLLAKTDKIDARLLARFGRDAKPNLTNLPTEEEQYLSELLSRRRQILDMITAENNRLPTASPAMQKQIEEHIVWLEKSLKDLDKDIDNFNRQDQTRDEKGKLIQSIKGVGRITAATIIADLPEIGKVKDKKISALVGVAPFNNDSGRMRGRRRVKGGRPEVRKVLYMSAVSAVQWNPYIKGYYNALLSRGKLKKVALVACMHKILIILNAMVRDGTPYHMPSMSH

SEQ ID NO: 413933 - protein, 334 aa, unidentified
MENIALIGIDLGKNSFHIHCQDRRGKAVYRKKFTRPKLIEFLATCPATTIAMEACGGSHFMARKLEGLGHSPKLISPQFVRPFVKSNKNDFVDAEAICEAASRPSMRFVQPRTESQQAMRALHRVRESLVQDKVKTTNQMHAFLLEFGISVPRGAAVISRLSTLLEDNSLPLYLSQLLLKLQQHYHYLVEQIKDLESQLKRKLDEDEVGQRLLSIPCVGTLTASTISTEIGDGKQYASSRDFAAATGLVPRQYSTGGRTTLLGISKRGNKKIRTLLVQCARVFIQKLEHQSGKLADWVRDLLCRKSNFVVTCALANKLARIAWALTARQQTYVA

SEQ ID NO: 413934 - protein, 331 aa, unidentified
MEKKWKAVVGVDVSKETLAATVLMEKREVSFDSKNEGKCFEKELRKAVDISNPSEFLVVMENTGVYHLKLACYLKEKGYGVGVENPFVIKKFSEMKMKRAKTDGVDSKIIAEYGSKEEVRLFNPNDKVRADIELKLKAIDDFYKNINILQNQLSALEHRPECSKEIKKFYEKNIKTFRRDIKKLEKEILNLVKTYYSEDYNLLKSIPGAGDRLCCAVISMLRSFEPFEKSKQVTSFLGICPSPYQSGTSVKGSGRILKKGNSYIRKLLYICSLSALRANKSCRELFNRLVQKGKSKRLALIAVANKLIRQAFAVLKTRSLYKEDFLIPKGT

SEQ ID NO: 413935 - protein, 344 aa, unidentified
MLELYAGLDISDKQTHLCLVDDAGSEVWRGRCATDPEVIARTLARRARVLSASLRRAVLETGPLSAFLFHGLRARGLPAVCICARHAKGVLSTRVNKTDPNDAEGLAQLARTGWFKAVHVKAPESHLDRAHLRVREQLVKSHRDMANQLRGLLKLFGLRLGPVTTPAKRRERVALLLGRMPALRPALAPLLEALAALEGELAKLDKSLKARAARDPVARRLMTVPGVGPLTALVYKSAIEDPGRFARATDVGAYAGLTPRRHQSGELDLAGRISKGGDGLLRHTLYEAANSLLARLKRDCALRTWGLRLQERKGAKRARVAVARKLAVLLHRLWLGACDFRWAA

SEQ ID NO: 413936 - protein, 339 aa, unidentified
MENVALIGIDLGKHSFHIHCQDKSGKALLRKKFTRTKLMQFLATCPSAVVVMEACAGAHFMARRISDIGHEAKLISPQFVRPFVKSNKNDFVDAEAICEAASRPSMRFVQPRTETQQAMRALHRVRESLIRDKVKTTNQIHGFLLEFGISLPIGDAVIRRLSLVLAEHELPEYLSHLLVKLHTHYLYLIEQIAMLESELNQSIKADDATQRIMTIPGVGPITASLLSSQLGDGKQFSCSRDFAASTGLVPRQYSTGGKSTLLGISKRGDKNLRRLLVQCARSFMMRLEHQQGRLAEWVRKQLSNRHSNIVACALANKLARIAWAITTNRNEYQACHMQA

SEQ ID NO: 413937 - protein, 343 aa, unidentified
MGDAITIGVDLAKNVFQVHGVDAEGGVVFRRQLRRGQVLSFFRKQVPCLVGMEACATAHHWAREIAALGHEVRLMPPRYVKPYVKRNKNDAADAAAICEAVTRPTMRFVAIKSPEQQSVLMLHRTRELMVRQRTMLVNAIRAHMAEFGIAVRVGLPQVQALLAIIDDEEDDRLPPLARACLSGLAAQFMSLQVEIVAAEKRIHAWHRSNEVSRRLESIPGIGPLGATALAASITDPTLFKSGRELAAWIGLVPRQNSTGGKERLGRISKQGDQYLRWLLVAGAMAVIRQAKRRGTADPWLAQLIANKPTKVAAVALANKIARIAWVLMQHGGTYRKPDSAMAA

SEQ ID NO: 413938 - protein, 323 aa, unidentified
MQGKVSFERDAMPVVYAGVDVSKEWLDVHLHPLGESRRFCNDKTGIRQLKRLLARHRLASIVMEATGKFHRPAHRSLWLDGFAVAVVDPLRARMFARACGYLAKTDRLDARFLALLAESLRPPADTPPSPHIEALQELVNARSAAKCDITALQNRSKTATTALLRGELNRLVRRLEQHVERLDKEIERCVGEDPQLCRKAEILTSIPGIGRVTALALMAGMDELGSCSGKQAAMLAGLAPIANDSGARTGRRSIRAGRPAPRRALYMAALSARRYNPALARFADTLKAAGKPAKVILVAIMRKLLVLANCLLAHDRIWTPNPP

SEQ ID NO: 413939 - protein, 339 aa, unidentified
MNTHLKLVLGIDVSKAKVDVALRIPASDEVSAVKLHTANFTNDQPGFARLTRWLRRWTQEPVHACLEATGRYGDAIAEYLDGCGHAVSLVNPNRIHAYGRSKLRRSKTDKADACLIADFCATQQPPLWQPATLHQQELQELTRQLEELKTSQQRVRNRLASGIRSTTVKQLLQEQLDLLEHQIRHLEAEIDQHIQADEQSQHSFALLLSIPGIGPTTAAKFLAEVPDIRRFENADQLAAYAGLVPRHHLSGSSVKGHATLAKLGNSYLRTAFYMPALSAERFNPVIADLAQRLRASTIPKSKMTIVVAIMHKLLVLAYGVLKSQRPFDPHFARNQQLAT

SEQ ID NO: 413940 - protein, 347 aa, unidentified
MLHAGLDLSRKKLDVCLIKDSGEHVDQLVSPPDRDALRTLARRIEETHREPVAAVIESMTGARFVHDTLEAEGWDVEIADAQKVKGLAPLACKTDKIDSQVLATLSQRDLVPAIWLPDPRVREERELARFRLHLVKHRSALKNRIHSALISFGKPCPVSDLFGKEGRLLLERLEIPEPWRSNITASLALIDDLERQIDATNRRLREGHADHPYIPLLMSAPGIGWVLAFTIASEIGEIERFQSPQKLAGYTGLCPRVNQSGDKDRRGPITKHGPTYLRWALLEATMHASRHPAYSERYQRNKRRLGKQRGAKVAQIDIARRLTHAVWHMLTRNENFAPRGATFRLAT

SEQ ID NO: 413941 - protein, 402 aa, unidentified
MNCVGIDVSKGKSTIAVMRPFGEVVVSPFEVCHTASELSELARLLKSLDGETRVVMESTGNYHAPVAWLLHGAGLYVSVVNAMLVHDYGNNSLRRGKTDKKDAVKLANYGLDHWLTLPRYVPEEDTRLMLKTCYRQYQQYSKVQTMLKNNLISLLDTAFPDANRLFTSPPRADGSEKWVDFVAAFWHCECVCGLSKKAFTTKYQKWCRKHSYNFSEDKALDIYVSACGRFGVMPKTKTAKLLVEQAISQLQATSAALAALKQEMQSLAASLPEYPVVMGMFGVGPTLGPQLIAEIGDVRRFHSKKALVAFAGIDAPPYQSGQIDVRSRSISKRGSASLRRTLFLVMGVLLQCAPMDEPVYQFMNKKRSEGKPYRVYMMASANKFLRIYYASVKAYLDSLEHN

SEQ ID NO: 413942 - protein, 444 aa, unidentified
MKKRAKQGTGKSKGFSVLNHKVAGIDVGASCHYVCVGSLAEDSVRRFGTFTVDLEALADWLVALGVESVAMESTGIYWVNLYDVLEARGLKICLANARYVRNVPGRKSDVSDSVWIQQLHSFGLLSGSFIAEGKIRELRAYVRQRETLEKQKGTQVSLMGKSLQLLNVKLHQVASGLELQVSMNIIRSIVAGERDVKKLSAFRHPQMKASKEDMERSLQGNWRKEHLFSLQQALVFYDFIKEQMMLCEREIEETLQAINGTDDEGSKIKKTAVRQNEYAFDVKSYLLEAVGTDLTAIKGLDEKTILTILAETGTDLGRWFSAGHFCSWLGLAPKQKISGEKILGHFKQSVANRANQAFRLAAWSLHSSKCYLGEFYRKLVFRKGSNIAIKATARKLAVIFWNMVTKKTSFVPHSKKEYEDKFRERRIRKLHKEATKMGFIIQYA

SEQ ID NO: 413943 - protein, 368 aa, unidentified
MTTNTLKAAPAASAKELKNEKPAKAKRMLVGVDTHLRGYQAARKIDSGVIGVVENFRSEEELELYVAKQTTSAEQVVVVYEAGPLGYTLYRKLTSAGVLCYVCAPDSGEQRKKRRKNNKIDARSLTSKLFNYLNGDQNALQLARVPTEAQEQLRMASRQHDQLVEERKRLGAKGNAMLLSQGFGSWSNWWRPKAWADLSSKLPPWLLERLKVWVDVLKVLDEKISQAKAAFARSCNGPRPKGVGALSQMQLQSEVLDWSLYSNRRKIACLAGMVPSEWSTGDKERRGSITKVGVPALRRIIVEMVWRIIFFQPQYKPVQKWLEVLRGPNPAMKKKAVIAIGRQLMVDLWRLQTGRVTAQELNLIMVTD

SEQ ID NO: 413944 - protein, 334 aa, unidentified
MENVALIGIDLGKHSFHIHCQDKSGKALLRKKFTRTKLMQFLATCPSSVVVMEACAGAHFMARRISDIGHEAKLISPQFVRPFVKSNKNDFVDAEAICEAESRPSMRFVQPRTEGQQAMRALHRVRESLIRDKVKTTNQMHGFLLEFGISLPVGDAVIKRLSLVLAEHEIPEYLSRLLMKLHAHYLYLIEQIAELESELNQSIKADDTAQRIMTIPGIGPITASLLSSQLGDGKQFSYSRDFAASTGLVPRQYSTGGKSALLGISKRGDKNLRRLLVQCARSFMMRLEHQQGRLAEWVRGQLSNRHSNVVACALANKLARIAWAITANQNEYQA

SEQ ID NO: 413945 - protein, 358 aa, unidentified
MKYVGIDVHKKMCQAAILDDEGELLDETRFMNTPEGIEEFARSLTATRGEVKAVLESTGNLWIQVHDRLEEHGIPVALSSPSNSRLIKDSRLKTDRTDARALARLHRAGVLSTCYVPGALERDQRELLRHRLRLVKMQNMVKNRIQSLLDKHGVRIPYKTRFSKKAVEWMKDLSLGFIDDAILRSDLALLEVLDGQVSSVEEKLAALAVDDPGVRLLMTMTGVGYFSAMMILAEVVTVDRFRGDKQFCSWMGVTPRVWQSGEKTWVGGIGGPGNRRMRWLLVQCAHTARRYDPRMVRLYGRIERRKGGKCAVAAVAHEMARVMYHMLKNDEPYRGVKVELWERKLKRMEKNALIGLRN

SEQ ID NO: 413946 - protein, 333 aa, unidentified
MVEGTEGSHHKEGSTKMSKDITVCAGIDIGKHKLDIAIDGSAERLQVDNNSEGRRSLSSWLRQRRVERIGLEASGGYEQAVVVSLRADGFVVIVFQPAQVRAYAKFVLQHAKNDAIDAVLIARCTAAATDIREPPDARLAFLAQHLTMIEQLTEDVGQLKTRREASREQRIREFWKREINRLKVLLNSELKQLVAVIREHRDLAHRLDLIASVDGVGLRTAVAILVRMPEIGRVTREQAGAIAGLAPYDDDSGLRRGSRHIKGGRQRLRQSLYAAALPAVFYWNPQLKVFYKRLIAAGKSHRLALVACARKLLIFVNTVVARGTPWTPSAATT

SEQ ID NO: 413947 - protein, 355 aa, unidentified
MNVYTGVHTYYCGIDLHARTMYVCVLDKDGKKVYHKNIPCRPDRFLQAIEPFRGDLVVGVECIFCWYWLADLCEEEGIDFVLGHALYMKAIHGVKTKNDRIDSLKIARLIRGGNFPVAYVYPPEMRATRDLMRRRNHFVRKRAELLAHIQNTTMQYNLEPLGTLSRPHHRRDKDIVGHFPDPVVQLIVETDLQLIDHYDPIIKNLDKQILRLAKGHDPTSLHLLKSIHGVGDVLALTMLYEIHTIDRFPSRGEFCSYARLVKGQKSSAGKNYGTTGGRIGNGHLRWAFSEAAVLFLRKNKEAERYYNRLINRHGKSKALSIVAKRLGIAVYYMLRRGNPFNINMFLQSHMVSEKT

SEQ ID NO: 413948 - protein, 326 aa, unidentified
MPQSRTLSIGMDVHKDAIAVASVGQEHHAEVIYLGALGTRQCAIDQLVRKLQSKSQQLVFVYEAGPCGYWLYRYLTKKGHACWVVAPSLIPKKAGDRGKTNRRDAIQLARLMRSGDLTPVYVPQVADEAIRDLSRAREDALRDRKTAKHRLKAFLLRHDIRSTGQATWGPAHLRWLSEVVCPTPAQHIVFQAYVRAVTAQSERLGRLAQDLQDGVQTWRLRPVIDALQALRGVQFTVAVTIVAELGDLTRCDKPSQLMSYLGLTPSEYSTGDHRHQGAITKTGNAHARRALIEGAWAYRYPAQVSRHLQWRLEKAPKAVQDRSWKA

SEQ ID NO: 413949 - protein, 408 aa, unidentified
MPRYYLGVDWADKSHQLYVCDESARKIKEQEVQHTVGELVELGRWLDESRQNGIELWGAIEKPHGRIVDFLLDHGVMTYPINPKALDRARDRFRMSPSKSDAFDARVLAEFLRTDHAHLRALEPDSIAAQELKMLTRDHQRLGRQKIRLINQIKITLKEYYPRALEVFGDLETQIALDFLNNYPTPQALSKLTQRSWMRFATREHHLGEARAKELWDKLNPIQLPVPEHVVRAKTKLLLALVVQVQASIKAVDSYNEEIQSFFAAMPPAQLAKTQPGAKGGTTIASIWAELGDAQDRWNSFRHLQAEAGVVPVTKSSGKSRVVQFRFACNHHLRQAMYWFSFNSLNRCEWAKKYFRDQRAKGHNKHQALRALSAKWLKIIFVMWKDHKPYDENYHLANIARQRMRQAA

SEQ ID NO: 413950 - protein, 347 aa, unidentified
MEKKLSVLGIDIAKQMFHLVGMNAHGTILLRKRLARAPVMTFIAQLSPTLIGMEACAGAHYWARRLREHGHEVRLMAPQFVTPSRKANKNDLRDAETIAEAVTRPTMRFVPVKSVAQQDRQALHRGRERLMKARTALINETRGLLHEYGIIVPQGASTFRKHVLEKLAREATKLTPSSLRLFQQLLEELAALDARVATYDVQLVQVAQQPPVCQRLMTIPGLGELTATALVAAVSEATQCNKGRQFAAWLGLVPRQHSTGGKPRLLGISKHGESYLRKLLVHGARSCLRWVGRQCDRRSQWVRSLLERRGWNRAAVALANKNARVAWVVMGTAQVYRPAEASAVQQE

SEQ ID NO: 413951 - protein, 381 aa, unidentified
MTTAATHDEQSNATEATLFVAFELSEKTWKLGFTTGHGQKPRERTVTARQQERVLDEIAQAKRRLGLPDSAPVVSCYEAGREGFWLHRFLQAHGITSHVVDSSAIEVNRRQRRAKSDGLDVRKLLSMLMRYHSGEYQVWQVVKVPTVEAEDQRHLHRDLETLKQERASTTTRIQGLLSSQGLRVTSLTKLPEQLEALRLWDGSPIPPGLRRRVLRVYAHHTFLSEQIAAVEVERRTQLQASTDTSIDKVRQLMQLKGIGINGAWLLVMEFFGWRAFKNRREVGGLAGFTPTPYQSGESAREQGISKSGNRHVRWMTTELAWSWLRFQPDSALSVWFRARFGGGGKRLRRIGIVAVARKLLIALWRFLETGVIPAGAVLKEA

SEQ ID NO: 413952 - protein, 412 aa, unidentified
MPDDQSLPNLSNLSWEVYVAFKIFRKNCCGLDVHKTWIYACMGITDTNGRTEYKQARFSSFTKGLQELADWLAKYDCNDVCMESTGKFWIPVFNILEKTCWVTLAYPKYTKPQKGNKTDHKDAKWICDLYMCDMVNPSFIPPPDIRQLRDLMRYRSKLTNIMTSEKNRALNCLTVSNLKLDDVFSDVFGKSSRSVIRYILEHPGETFQVAPFIDRRCKHPVEEIQAVIDGTISHQQAVKLRECLQHLDELEVHKTNVEKEILCLVQQYPYQLELLQTVPGFSGNIMTAIALISEIGADMSVFPSAKHLVSWAGCCPRNDQSSKKVKSTRISRAGVYLKPLLVQVAIQPFTANADKLSAAGALEIRCQICDGRFLSMWAALFIFLGCPLSPCPKNLHVHNGRIVILASVAWIF

SEQ ID NO: 413953 - protein, 423 aa, unidentified
MPQLWAGIDAGKTEHHCVVIDANGTKLLSQRFKNRETAILTLMGDVASLPGGTDVAWATDLNHGGTGLLQTLLHSHAQPLFYISGRVVHHASGAYRGEAKTDAKDAVIIADQARTRRDVTLMRQADEVTAELRLLSARREDLVHDRTRAVNRLRAILVHYFPSLEGAFNYATTRGPLVLLTRYATPGAIRRMGESRLAAWLKGQGCWKSAAVAKTAVEAAREQTSVVVGEGAAARLVSRSARDLLRIRDEVAELDGEIEAALQDSRSADLLVSIPGFGRRLAADFLAATGTDLAAFETPDRLASFAGLAPVPRDSGKISGNHHRPRRYDRRLLNACFQAAFIASRNCPVSRSFYDRKRQEGKSHKQALIALARRRMNVIWAIFRDQTTFNPTPPRPNDPVTPLLQQGPESPSRSRPTIALAAA

SEQ ID NO: 413954 - protein, 402 aa, unidentified
MYTSFVGIDIGKWNHQAAFLEVSGKETARSLAFQNTSEGFQSLLDSLAPFDKGQTVIGLEATGHYWLALFSFLVDNGWTVKVINPMQSDALRNMNIRKAKTDRKDCVVIADVLRFGRYTETVLPDEDLLQLRELSRCRVAHVELLGDLKRRALGILDRIFPEFASCFSTVFGAAPTELLQECTDPEELADYDVDKLIKLLEKESRGRHSREKAEELKAKASRSVGTRFGRDALKFELKMLLEQLDFIKGQVKELDKFLKKLMKNHELIYTIPGISVTLGSAILGEIGDVKRFGTPQQLQAFAGMDPSVTQSGNFQGTQGKMSKRGSPYLRRAVYLAANAARRFDPVFKEFYDRMIARGKHPKQALAAVGTKLLRVIHAVMTSQKPYNPQKLLPPAAISQLNP

SEQ ID NO: 413955 - protein, 424 aa, unidentified
MRLVDAVIGVDAHKRSHTLVAVNPLGRKLAQLTVATTTEGHSEALRWARARFGRDLVWGVEDCRTLTARLERDLLAAGQQVIRVPPHLMSRSRASSRELGKSDPIDALAAARAVLREPDLPVACHDAHSMELRLLVDRREDLVQHRVALISRMLERIHQLDPAWAEPRNWEYRKPREELRTWLATQHGLLAELARDEFDEIVALIDTAQALERRIDGRVHEAAPALLGIHGCGNLTAAKIVAEVAGIDRFKSEAAFARHVGVAPIPHWSGETTRPLRPIRHGNRQLNVALHRIAMVQITHPGPGRDYFQRRIDEGDSRQRALRSLKRRLARVVYARMKADSRNGGRNGRFPTLPRVMMLPLANLTSATQPPTAGACVGRPRALDAYQATLACRLRNYGEKPTSIAAQLGVSVSTIKRALNQGNR

SEQ ID NO: 413956 - protein, 340 aa, unidentified
MEPTTVAIDLVKHVFQVHFVEPDTGTIHSKALRRAQLLPFFTNHPPSRIVMESCGSAHYWARKLSGLGHEVRLIAAQFVRPFVKSNKNDTADAAAIWEAAQRPGMRFVAVKTEEQQAMLALHRMRQQLVRFRVMQVNQLRGLLYEFGVVLPQGRRTSIAAAKIALADLADQLPAMLTDSLQDQLSRLLALDEQIQRIEQRIMAWRRSDEACSRISEIPGVGLLTATAAVAVIGNVHTFKSGREFAAFLGLVPRQNGSGGKVKLGGISKRGDVYLRTLLIHGARAVISKARHLPDHVKSMLARRPTNVVAVALANKMARIIWALLAYGRAYQAPVAPPLPA

SEQ ID NO: 413957 - protein, 315 aa, unidentified
MSKLSEEIWVGIDVAKMRLDVGVGETGETWSAGNDESGIGKTVARLGQLQPRLVVVESTGGLERRLVGELYLAKVPVALVNPSRVREFAKSAGLLAKTDKLDAHLLARFGQAVRPAATCLPSEAEQLLSALITRRRQLIDMRTAEMNRLVSVHPSMRTSLEQMLTYLQEQIEHLDQQIEQFIQGRPEFNRKNEILQSIPGIGPVTSAILIADLPELGHLDRKKIASLVGVAPYNDDSGYRRGKRRIKGGRPQVRTVLYMAAISASRYNPTIKAFYERLLKLGKLKKVALVACMRKLLVIMNSMLRDQKTWHPSFS

SEQ ID NO: 413958 - protein, 397 aa, unidentified
MKGFCISLDVSKGSSFYQGFKGFDEPITKPKKIEHNLEGFKELLKLKDSIKKEYDSDCIVIFESTGVYHKALQTYLDEHDFKYTIISPLLSAKVRKSDIRGTKTDAKDCSSIAKVFYLKELRIYSKMDEIYSDLKEKCRYYDFLVGEMKRWKIEFRRLLDIIYPGFDKIFENLYIDYVQALLLEYPHPEIIRKKRLDTIAKFIEKHTCHKESFSLKQAQALKDYAENCASGCSYKSYLVSQFDTVIHTLNSQIKHLETTLDEIIEIAKKLPNYEIIRSIPGIADNLASRILAEIGDIDRFDNASQLVAYAGIDPQIYQSGQISGLHLKISKKGNKKLRCLLYLAITCMIRTNRDTKIVEFYKRKKADGLASPAALVASMNKLLRIIHSLCKNGCLFK

SEQ ID NO: 413959 - protein, 436 aa, unidentified
MRGCRCSMIMGFTKPIEHFNLQRKKVITMNTLYVGIDVSSKSNVVYLMLPNGDKHSNFSVANSHEGSTQLVKRILSALTSHSLDTVLIGLEATSVYGDNLVYFLREDATLAPFNRKIHVLNPKQVKKFHDAYNDLPKNDYVDSFVIADCLRFARINKEVYMGDYRYKALQNLTRARFFAVQNLVKEKQRFMNVLFKKYSTMTQEKVFSDTFSTTALAVYDEFESAEALANMDLHELTDFIIEKGKNRFPDPDAVAKAIQKAARNSYRLPKTVNDSVNQVLSISITSMKALESQIKEFDKAIKAQMELLPNVLISIPGIGPVYSAGIMAEIGDINRFNSQAALAKYAGLAWKQHQSGGFESEVTRLIPSGNRFLKYYLCEAAFSLVRCDKEYSDFYHLKYKEVNRCQHKRALALTARKFVRLVFRLLKDNRLYCPAK

SEQ ID NO: 413960 - protein, 438 aa, unidentified
MSTNASASREEPTVHLNALSSHDNAVANICVDVGSEKLNLICRELTRPGALAEWEIENRTVPITRMLTEIREVALSLGIKDLRVVVEPTGIYHRLLLRIAAKLGFQTALVDAGHVTKMRVVVFGDDGKTDQRDPYAIEAVAARGRLIADRRLPEVYQLLRQWGKLYADAEAELIDAKSRVHRALTLLFPDFAFSTDFLYSSSGRAIFRCYRFKPQVIAAHSAGRLYDRLRKHSRIVRSSVKRLLDQARQTASVLTDARVSELLAHELELAWHDLELAEQRRKNARRELEQLYDEARAGDPQLPNTAGGVISKGALARFLGEAGPLSDYQSWRQLLRMGGVTLRERKSGKYIGQTKITQTGRPLYRAVINQMALPLVKRDRLFGSYYHHKIKVQKMPGSKAMTAVARKIVKMIWGWYRSGRVFESTRVFTCEGEHRQVA

SEQ ID NO: 413961 - protein, 431 aa, unidentified
MLHDHGFTKPIEHFNLLRKKVITMNTLYVGIDVSSKSNVIYLMLPNGDKHSNFSVANSHEGSTQLVKRIHSALTSHSLDTVLIGLEATSVYGDNLVYFLREDATLAPFNRKIHVLNPKQVKKFHDAYNDLPKNDYVDSFVIADCLRFGRINKEVYMGDYRYKALQNLTRARFFAVQNLVKEKQRFMNVLFKKYSTMTQEKVFSDTFSTTALAVYDEFESAEALANMDLHELTDFIIEKGKNRFPDPDAVAKAIQKAARSSYRLPKTVNDSVNQVLSISITSMKALESQIKEFDKAIKAQMELLPNVLISIPGIGPVYSAGIMAEIGDINRFNSQAALAKYAGLAWKQHQSGGFESEVTRLIPSGNRFLKYYLCEAAFSLVRCDKEYSDFYYLKYKEVNRCQHKRALALTARKFVRLVFRLLKDNRLYCPAK

SEQ ID NO: 413962 - protein, 405 aa, unidentified
MSDTEDVGVFLGLDVGKSAHHGHGLTPAGKKVFDKPLPNSEPKLRAVFDKLTAKFGTVLVIVDQPASIGALPLTVARDAGCQVAYLPGLAMRRIADLYPGEAKTDAKDAAVIADAARTMPHTLRSLELTDEITAELTVLVGFDQDLAAEATRTSNRIRGLLTQFHPSLERALGPRLDHQAVTWLLERYGSPSALRKAGRRRLVELIRPKAPRMAQRLIDDVFDALDEQTVVVPGTGTLDIVIPSLTASLAAVHTQRRATEAQINTLLEAHPLSPVLTSMPGVGVRTAAVLLVTVGDGTSFPTAAHLASYAGLAPTTKSSGTSVHGEHAPRGGNRQLKRAMFLSAFACMNADPASRAYYDKQRARGKTHTQALLRLARQRISVLFAMLRDGTFYQSRTPRDVELAA

SEQ ID NO: 413963 - protein, 367 aa, unidentified
MSSVASQAGLIHLGMDTSKNTIMVATLLPGEESPVTDRIANEEAAVRRLAGRFADRSVLRCWYEAGPGGYELYRLLASMGVACQVVAPSLIPKGGSDKVKTDRRDARRLARLGRAGELTPVRVPSAAEEAVRDLARARDAMLADRKRAQQRLTAVLMRHGRVWRGASYWTRAHRDWIAAQRYAEPALAAAISCYRATLAVREAELAAIEAELIPWAQREPLAGPVARLGCYRGIAELGALTLAAEVADWRRFPAARAFMSYTGLVPAEYSSGERTRRGHITKAGSEPVRTALTEAAWSYRHAPAIGAGLRRRQAGATPETLARSWTAQRRLHARYVHLVHDGGKAAPEAAVAVARELAGFAWAEMTA

SEQ ID NO: 413964 - protein, 350 aa, unidentified
MKIKTTSSLKAKQIKLGIDVHADSYRVVRQVDNATPQPAQKFTPQGFLLWAQKQLEQAETVCSCYEAGPFGYGLHRALAAMGVQNHVIRPQNWDELGRGIKTDKTDALALVLRLDRLLAGNTKALAVIRVPTEAEEQARSASRQREQLRQHRQRLEAQGRSLLLYYGCRIRGRWWSPQNWPVVKNRLAAPLQALLTTLRELIETVNEKLTTATEQLEAQASPQPMGFGALSSELLRREVGDWGRFKNRREVASLTGMCPRVRASGNQQQQGSITKHGNPRLRRVLIELAWRVVRYQPDYPPVRRWQAVLLGPSAGARKKAIVAIGRKLAIDQWRLATGRGTAESLHLKMN

SEQ ID NO: 413965 - protein, 348 aa, unidentified
MRFYNGSHAFYAGIDLHARTMFTHVLDHGGATVFARDLPARPDAFLHAVAPFRHGLVVGCECMFAWYWLADLCEDQSLPFTLGHALYMKAIHGGKAKNDRIDAAKIAGLLRGGMFPMAYVYPRQKRATRDLLRRRCCFVKERSQLIAHIVNTNSQYNHPPLTAKLCYARNRTEGIAERFADPATQLSIRADLNLIDHFDEQIDEIERVVLRTAKVDDPLTLGFLRTIPGIGKILSLVMLYEIDQVARFPEVGNFLSYSRLVRPEHESAGKKRGSGAKKIGNGHLKWAFSEAACLMLRAWPDAKKWLARQERKRGKRKALSVLEAKIGRTVYHLCRKQQPFDPKRFFCQ

SEQ ID NO: 413966 - protein, 319 aa, unidentified
MNTTTYANNRNNERNIGIDIGKDTLDITIYELDKHWQASNTLTDIKKLISQLNRYQLTRVLVEATGGYERNLVEACAEKGLLVIVVQPIQVRQFAKAQGIMAKTDKIDSKLIAQFGVVLQPEPRALPSKKVRLVRDLLARKRQLNETRTQELNRLHKAPKVLAASHRRLLKLLNKDIAWVNVQLEKEVSAISEWQRVYEIVSSAPGVGDGIAYTLLGELPELGQLSHRQIAALTGLAPFNRDSGYMKGRRRIKGGRAPIRTVLYMRMMSAIQHNPIMKEFYNRLVAQGKHKKVALTACMRKMITILNAMVRDDREWNMS

SEQ ID NO: 413967 - protein, 403 aa, unidentified
MNAVGIDVSKGKSMVTILRTFGEIVSSPFEIKHTSSDIHSLIKLIHSIEGESRVVMEHTGRYYEALAHQLSAADLFVSAVNPKLVKDFNNDSLRKIKSDKADSVKIARYALDKWQSLEPYSITDELRAQLKVMNRQFHFYVKQKTAMKNNLIGLIDQTYPNANTYFNSPTRSDGSQKWVDFVSTYWHVDCIRKMSLNAFVEHYHNWCKRKKYAFDKSKAEEIYTKTKELVPVFPKNEITKHIIRQAIDQLNSTSVTVETIRTLMNETASKLPEYSIVMQFKGIGPSLGPQIMAEIGDVTRFTHKGALTAFAGVDPGVNESGSYAQKSVPTSKRGSSNLRKTLFQVMDVLIKTMPQDDPVYQFMDRKRTQGKPYYVYMTAGANKFLRIYYGRVKEYLSVLPDPS

SEQ ID NO: 413968 - protein, 387 aa, unidentified
MYYIGIDISKFKHDCAVIDGDGVTVTPSWSFYCDREGFDQLKHLLNSLEGEKRIGFEATGHYGETLKLYLESNGFTFMEFNPLLVKRFVAGKSLRKTKSDPIDALYIAQYLMSVEYKPYPASFYHIKALKSLTRFRSSLIKQRSRQLVAMTTVLDVMFPEFKPFFDGKFSATALFILDNYTTPQRIANMNAKSFDILRRKSRGHFTADKFARLKELAKKTIGHSSEYLESELNIALDIYIQMDAKVEQIEEEIEKLVSDMKPMSLSVPGIGTMTIAEIIGECGDFKKFESPSKILAFAGMEPGYHQSGTVEHSCKMVKHGSPYLRNALMCCMMPVIHNNLVFAEYYDKKIKEGKSHNAALSHCAKKLLRVIYTLETKQIPFDASKLR

SEQ ID NO: 413969 - protein, 340 aa, unidentified
MESFAGADLHKRVTQLAVLRDGQPPSQFRFPNDPKTVDGVLKKLPRGTKIAVEATGSWWWFIEKARELGHEVCLSHPKQTKAIAHARLKSDKVDAVMLARLLKADFLPTVWIPGERERYVRELLAHRARLGRTRTAVINELHAVYAKRNIEVPGMIWHRIRPPAWRAEELSGYAPRIVSENAELLKLINQQIQNLDKELAKAGQEDPQAKRLMSIPGVGVATAVAVSCWIGDIRRFPNAKKLVSYFGIAPKVRQSANREIHGHISKEGSGMVRWLILQAALVGIRMSKGPGRGQYLGVSRRRGKKIARIAVARKLLGTIYHMMREEIDYEEFVRRGSNAQ

SEQ ID NO: 413970 - protein, 376 aa, unidentified
MITCFIGIDAHTTNYTLSTAIDAEDKPFNTCKYAPKLTYILKYANALCKKYNLKKEDILLGYEAGCLGFKLQRDLNENGFNCVVMVPSTIPGTAINRRKKTKNDIRDAEAIAKALRNDDYSSVATPDEEDEAIREFIRAREDVRMELKRCKQHIMAFCNRHGQHYEETGWTQKHMKWLNNLAFSQPVLKETLNSLLLEYEYLTEELEEKDRRIEEFAQMDKYRESVHKLTCFKGIKTLTALAVIVEIGDFARFMKAKNFVAYLGLSVGEQSSGNDHNQTGITKQGNRFIRKLLTEAAQCFSRATSKKSKELKKRQEGNVEEVIAYADKANERLRKRYHHLVIHNMKSPNKAKCAITRELACFIWGMMTDNIHTVLV

SEQ ID NO: 413971 - protein, 437 aa, unidentified
MGNYAGVDWASEKHDVVVQDEAGEELLAASFAHDEKGLRSLCRTLVRLNVELVAIERPDGLLVERLLDAGLRLLPLHPNQVKAARPRFRVAGGKSDRFDAFVLCELARTDHHRFRVLEPDSDQTKALRAMTRAREELVQSRVALANQLRSELERFWPGPIGLFSDLDNLISLAFLKRYPSPADARGLGEQRFQAFLARERYSGHKPPAELLAKLRRAPEGRTGALEGQARRQAVLSLVAALEPIVAAIHQLERQIAAAVREHPDGEIFLSLFRSPRSVITAATMLAEMGDCRGRYPTRDALAGDAGQGAVALESGKRKVATFRWACNKRLRGAFDTLADSTRHWHPWAADHYARAIARGHDHPRATRTLGRAWCRIVWTCWQHRTPYDPNRHRALQQHVLVTVPTPSGPVPDTAATQRMLGVAVTRRADRKVRAQRA

SEQ ID NO: 413972 - protein, 404 aa, unidentified
MQDATARFGSVDWATRGHAACVVDAAGQIVDQFTVEHTALGLATLVRHFQQQQVRRVAIERPDGPVVEALLAADLEVVVVSSRAVKALRTRYGLAGNKADRSDAYVLADCLRTDGHRWPALQTDTLQTLALRAAVRARKDLVATRVATANQLRAHLQVVFPAAVGVFAEIDSAIALRFLERFPSQDKATWLSDRRLAAWLQANAYCGRRPATELLQRLRTAAPGVRGAAADALAVVTLSLVRVLRTLVAEIAELETHIREQLALHPDGPIFQSLPRAGTVRAAALLAEIGDCRARFPSSETLAALAGAVPSTRASGQHHVVTFRWACDKKLREALVDFAQDTVRASPWAEQLYRRHRQQRKTHPHAARILTRAWISVLWRCWQDRQPYDPARHRALQRVIAPGG

SEQ ID NO: 413973 - protein, 374 aa, unidentified
MAAVSVCFWIGPLLKEDTMAMSDGARVVGGVDCHSRVHHAVALDETGRRLGDRAFPATGVGYAELLGWLRGFGTIAVVGVESTGSYGAALTRFLLKAGVRVVEVNQPHAHLRRRRGKTDAVDAEAAARKVLSGEATAIPKDMDGPVEAIRQIRLARRSAVSARTTALCQLGDLIVTAPAELRARLSRKTLRGQANICTRLRPNRRALTDPVQAAKLALSTLARRIAALDVEIAQWDKHLEPLVRAVAPRTIALLGIGPQHAGQLLVTAGQNITRLHSEAAFAHLCGVDPIPASSGKTTRYRLNPGGDRDANSALYMIAVVRLRYCERTQAYAARRTAEGHSKREILRCLKRYIAREVYRTLRADLADLAAAVAA

SEQ ID NO: 413974 - protein, 397 aa, unidentified
MDPTYAVFCGIDVGKGEHHAVGLDPAGTRLFDKALPNDEAKLRAVFDRLAEHGPVLVIVDQPNTIGALPVTVARACGHAVAYLPGLTMRRVADLYPGQAKTDARDAFIIADTARTMPHTLRRIDVGDEALAELGVLVGIDDDLAGEATRISNRIRGLLTGIHPALERVLGPRIAHPAVLEILSRCGGPVGIRKAGKRRLTTLATKHAPRMGARLAEEILTALDAQSVTVPGSNAAEIVLPKLADSLKEVLQQRKSIAEDVERMLDDHPLSQVLMSMPGVGVRTAARILLEVGDGSAFASAAHLAAYAGIAPVTHRSGSSIRGEHPARSGNRKLKRVLFLSAFAALHDPTSRAYYDRKRAEGKKHNAALICLARRRCDVLYAMLKNKTFYRTPAAAPA

SEQ ID NO: 413975 - protein, 461 aa, unidentified
MKSDRKKGGKKNGVLPTTIPAIQPKVAGIDVGSMQHWVCGPAREDGKPNVKVFTTTTDQLNQLADWLIEQGVESAAMESTYVYWIPIYELLELRGIRVLLVNPRQLQNVPGRKTDVSDCQWLQLLHSCGLLRGSFRPVGSIARLRALQRQLANLVEERTRCVQWMQKALDQMNVQVHRALADITGVTGMAIVRDIVKGERDPAKLAMHRHPRCHKPVEEIAKYLTGTWREEHLFNLASAVRLFDAIEAEIVSYDARLMKELEVLQPAERQQQQTPSHPNPAKEKAIKNRGEQASRTALWRFSGVDLTRIDGISAGAAQVILTEVGFDLNAFPSEHHFISWLRLCPRTPVSGGKPLKKRRNGQGANRIAGVLRMAATALQRSKSALGASFRRIARYKGGAVAVFATARQLARLVFRTLRFGHAYVDIGESAYEQQFHLRRLAALTENAKQLGFSLVSNVAKT

SEQ ID NO: 413976 - protein, 383 aa, unidentified
MRAVCGLDVHKDTVYLCILCSDGEIIERVFGVLTFQLRDMRRLMQSHGVTEVTMESTAMYWIPIWRVLEPHFRLKLVNPYFIKQLPGRKSDVKDAQWIAECTMKDLVRGSFVPPERIQQLRQYDRRIFDLDAEIVRKLSKLDGIMQRCNIRLSNYVSNTDTKSYKEVVDMLCEGVTDPEELVKKVHGRIVNKHGRETILAALTGVVSDAEKDTMRQLREEITLAETHKRECLDKMLQICETYCPNELTRLMTIPGIRERAATSLIAEIGVDMTKFQTAAHLASWSGLKPRNDVSNGKFKSRSITHGNVYLRKTIIECAWAASRTKDCFFSRFSYHQTVVRKKNKMKVLVAVARKLLIAVWHVLHDETDYVDFNPDCKSPANNG

SEQ ID NO: 413977 - protein, 345 aa, unidentified
MKIIGCDFHPGFQQIAICDLETGELQERKLSHGDGQAERFYRELGEPALIGIEATGNSQWFLDLVQRLGHEIRVGDAAKIRASYVRKQSTDKRDAGHLLRLLLEKRFPQLWTPSAMVRDQRQLLRHRDKLVEIRTKVKNSLQHLALNRGMQKKSRLWTRPGMEQFQQLAMPGWAGARRQDLLHLLKQLNQQIEQLDQAVKQAAWQHPQAQLLMTQPGVGPVTALAFVLTIGDVARFAGSKQLTSYLGLVPSEHSSGSKRRLGAITKQGNRFLRKLLVEAAQTAVRKDEGFRKEYQHRCHHRPKAVAKVAAARKLAVRLYWMLRSNIGYPEIARVESNPRVPLGEV

SEQ ID NO: 413978 - protein, 339 aa, unidentified
MQVTTVGLDLAKNIFQVHGVTENGEVAFNQALRRAQLFAFFEKLPPCLVGMEACGSSHYWARQLSKLGHDVRLIPAMYVKPYVKRGKSDAVDAAAICEAVTRPTMRFVGIKSEEQQAVLFLHRARDLIVRQRTQLSNMLRGLLGEFGIVIAQGIGSAIKFAKNVLDGDKPGIPEVAVDVLSNLSNQLVALHLRVRWYEMRMRLQARQDPRVMLLRTIPGVGPVTASAIVATAGDASQFRNGREFSAWLGLTPLNRSSGGKEKLGRISKMGDRYIRRLLVTGMTSRLRQMKTHPERVDPWARALLERKPTRLATVAMANKTARIIWAVLTKNEHYRPHSA

SEQ ID NO: 413979 - protein, 309 aa, unidentified
MEHLVGIDVSKDRLDVHLRPSGESFAVARDGDGLAALVERLQALAPALVVMEATGGYETIVASALGAAHLPLTVVNPRQIRAFARATGRLAKTDRLDAAAIAHFAEAIRPPARPIAEPEAQALGELVARRRQVIEMMVAERNRRRTATQRRVLRAIDRHLELLQAELSELEGDIDGAIRNSPAWQADADLLTSVPGIGKATLRTLIAELPELGRLTRRKIAALVGLAPINRDSGTMRGRRTIAGGRSAVRAALFMPAMVASKKNPLIAPYYKKLRAAGKTAKQALTACMRKLLVILNAILRDRKPWQPA

SEQ ID NO: 413980 - protein, 403 aa, unidentified
MNAVGIDVSKGKSMVTILRPFGEIVSSPFEIKHTSSDIHSLIKLIHSIEGESRVVMEHTGRYYEALAHQLSAADLFVSAVNPKLVKDFNNDSLRKIKSDKADSVKIARYALDKWQSLEPYSSTDELRAQLKVMNRQFHFYVKQKTAMKNNLIGLIDQTYPNANTYFNSPTRSDGSQKWVDFVSTYWHVDCIRKMSLNAFVEHYQNWCKRKKYAFNKSKAEEIYTKTKELVPVFPKNEITKHIIRQAVDQLNSTSVTVETIRTLMNETASKLPEYSIVMQFKGIGPSLGPQLMAEIGDVTRFTHKGALTAFAGVDPGVNESGSYAQKSVPTSKRGSSNLRKTLFQVMDVLIKTMPQDDPVYQFMDRKRTQGKPYYVYMTAGANKFLRIYYGRVKEYLSVLPDPS

SEQ ID NO: 413981 - protein, 315 aa, unidentified
MSDVPCFIGIDVAKAQLDIALRPSGERWAVPNDASGVAMLVERLQTLHPTLIVLEATGGLERAATSALAAAGLPVVVVNPRQARDFARATGQLAKTDALDARALAHFADVIRPTPRPLPDAQTQELRALLGRRQQLIGMRTAEQNRLAGASERLTKDITAHMTWLNVAIATLDDDLETMLRASPLWRANDDLLQSAKGIGPVSAHTFLLELPELGTLTRQQIAALVGVAPLNCDSGTLRGKRTIWGGRAHVRTVLYMSTLVATRFNPQIKVFYERLLAAGKVKKVALTACMHKFLTILNAMLKHRTPWQPQEVQS

SEQ ID NO: 413982 - protein, 445 aa, unidentified
MTRARGRPEGLPIIHARAAGIDIGSRFHVVAVAPNLAAEPVQTFQAFTGDVQRMADWLIAIGIETVAMESTGVYWVPVYEVLESRGLDVILANAREARTVPGRKSDVNDAQWLQRLHACGLLRASFRPERDIAALRAYLRLRERHLDYAAAHIQHMQKALTFMNLQLHHVVSDITGETGMNIIRAIVSGQRDPKVLSTMRDPRCKASAETICASLVGNYQPEHVFALTQALALYDFYQARVTECDAQIEVVLAALTAEKSSPSVPLPKARHRTRQPNAVSFDARPLLYQLTGIDATQIHGIGAYLALRLVAECGTDLSRWPSAKHFTSWLTLAPGCKISGGKVLSAHTRKTSNRVAAHLRLAAVTVGRTNTALGAFYRRLAARIGKAKAVTATARKIAILFYNAMRFGMNYVDPGADHYEQQYRERVIKQLHRRAAEFGFTLQAA

SEQ ID NO: 413983 - protein, 358 aa, unidentified
MQRNKKTFKGQNIYIGIDVHKKNWQVAVITESGYTERLSTAADAKALFKFLKSHYPDGNYRAVYESGFSGFATHYALSDLGVSCVVAHAADIPSSQYELTMKSDRIDAEKLARALRASLVRGIYVRPKDNLDDRGVLRIRKTIQIQVGGYKTRIKHLLHSNGVELPERFSRSGTHWSRAFIAWLREDVRLLSDTRRSLELLLLQVETLRANLLEATRRVRALSMTDRYREDCALLMGIPGIGLTVAMTILTEVCDIGRFGNERQFASYLGLVPTSHSSGERVSHGEMTFRGNKHIGPLLVEASWVLIVRDRELGRMYTEYRWRMAGQKAIIKIARKLSNIIFAVLKTRKAYEPYRRDA

SEQ ID NO: 413984 - protein, 408 aa, unidentified
MYMQSVIAFDVSMGKSYMVIYNAARSCIFEGEILHNRPHFEQLNKRIIDLVQKDGQVPAIVFEATGVYSRPLERFMNDHGFPYCLLNPLESKIQTATMRIHKTDKSDAHRLAQTHFTTERRIKKPQDHYFDQMRALSRYYHELDEELAMLRSRMHTLLQLTFPEMESLFTQKSELFLNILQLFPHPDYVKNLSKTVVRNRLLANTDKKLAPKTAEKKAIQLIGAAQDSYPAVDQDDIRCEQLKDYAKRSLAILRKREELIQQMVVLSEERNEYQILISIPGIGKNTAVRLIGEIGDMTRFENHKQLNAYAGIDIRRFQSGTLFYKDKINKRGNSHLRKILYFTIQNMIRQRRFGHNHFVEYYDKLKTQPYNKCHKVASIACVNKLLKCLFHLITHNLTYNYEIASVSS

SEQ ID NO: 413985 - protein, 343 aa, unidentified
MGEVSTIGLDIAKSVFQVHGVDGTGAVVMRKRVGRAKVLEFFAGLSPCLVGIEACPSAHYWSRELQALGHTVKLMPPSYVKAYLKRSKNDANDAAAICEAVTRPSMRFVPIKTQEQQTGLMLHRTRQLLVRQRTMLSNAIRGHMAELGIISAKGRNGTAELLQIIGDAANDLIPPVARFCLDLLARQYLNLSAEVASVDKRIQAWHRSCEESRRLEEIPGIGPIVATALVAEIGDWGAFRSGRSLAAWIGLVPKQHSTGGKERLGSITKQGNRYLRWLLVTGAMAVIRYARAHGTKRPWLTRIMDRRPAKVAAVALANKIARMAWAIMVRAERYKEPKLLLAA

SEQ ID NO: 413986 - protein, 426 aa, unidentified
MTSRTPRSDVLKESAMDVVYERCCGLDVHKKTVVACVLVTVGKGEPKREVRTYGTMTEDLQRLSAWLREARVTHVAMESTGVYWEPIWNVLEGRFELLLVNAQHIKAVPGRKTDVKDAEWIAGLLRHGLLKGSFVPEREQRELREVVRYRTTLIHERIDAVNRLQKTLEGANIKLGSVVADVQGKSAREMLAALVGGETDAAKLAELAKRRLRQKLPELKQALTGQFRPHHRFLVAQHLAHLDDLEASIAALDAEIEDRMRPFTAAIERLDAIPGVGQRTAEVILAEVGTDLTRFPTNGHLASWAGLCPGNNESAGKRLSGKTRKGNRYLRAALVEAAHGAAHTKETYLAAQYRRLAGRRGKKRALVAVAHTILIIAAQLLRSPDGAYRDLGHQYFDQRDREAVQRRLVRRLESLGLQVTVGPAVA

SEQ ID NO: 413987 - protein, 386 aa, unidentified
MERNDLSRSLVAFDQNSTLVAVVELSLKSWLVAGLVPGLTRQPLKKQGADADALLGLLHRWRAEAIKLGGKIERIVVAFEAGRDGFWLARWLRARGVESHVIHSTSIPVSREHRRAKSDRLDTGLLMRALLGWLRREAKHCSMVAVPTLAQEDARRPNREHEHLVGERTRILNRLKATMIRHGIRSFNVKLRKAAERLADLRTPEGVALPANTLAELGRDMGRLRLIREQIKAIEQERLERLRTAPQEGTHPMVLMLAKVLGIGVETADALVHEVLTRELRDDRAVGRYAGLTGAPDESGSKRREKGLARAGNARVRRSMIQLAWRWLIFQKDSALAQWFQARTAGAGHIVRKKMIVALARKLLIALWRYVTTGEVPAGAKLRSAI

SEQ ID NO: 413988 - protein, 316 aa, unidentified
MTDNSMICAGIDVGKSHLDIAIHPDDARLRVTYDTAGLKALDAFLQEHDVSRIGFEASGGYEWRLMVHLRAGKRLAARLQPAQLRFFAKSRLRRAKNDRLDAALIALFTASLEQLPALPDARFDRLAAELTYVEQIEQQIALVKTFAETALSEAVKRRHAREIARLETCCKARLLRLEKTVRDDCDLARRLDLLISIKGIGLRSALCLIIRLPELGHAGRAEIAALAGVAPYDDDSGKHHGRRRIQGGRERLRKSLFMCAFTATRHNPDLASFYARLRSNGKEHLCAVIAVARKLIILANAILIRNTEWTPQYQQN

SEQ ID NO: 413989 - protein, 342 aa, unidentified
MTAIGVDTHKATLAACAIDELGRVVGEATFGNDPAGHLAFIAWARSIEPEATIGIEGSSSFGAPLARAIHAAGLCVREVPPHLSRFERRRTRRPGKSDPGDALAIARVTAREPNLPPIRLPDRTNEIRLVLEAREDLIGETTRARNRLHAHLRVLLPGYGGNVANLVAARHRTMVRRLLRGNATVQGELARSLLDRLLRFERESDVLTRRIEALVDGHPLLGLSGAGPITVARLIAEAGDMRRFRTPDAFAALAGVAPIPASSGQVQRMRLNRGGNRQLNRAMHVIAVTQARFYPPAKAYVTRRIEADGKTRREAIRALKRQLVRPVFRLLVEGSEVSLEAA

SEQ ID NO: 413990 - protein, 387 aa, unidentified
MIYNIGIDISKYKHDFCIISNTGEIIVENSSFENNKKGFQSLLDQLKPYNKPDVHIAFEATGHYSKNLELFLIDQGYSFMKMNPLVIHQFLKARSLRRTKTDKADSLTIANYLMSVPYKPNSNLLYNIFSLKSLCRSREQLIKERSKYYVLLTNQLDITFPELKIFFNNTISATLLFILEKYVNTEHVSLMRDYDSIKNISHGKFSYAKFAKLKELAKNSVGRHDENTDLLISTYVSIIKTFNDKINPIEKKISTIIKELNPRMLTIPGLGEISAATILSEYGDISNFSSPNKMLAFAGLEPSIIQSGTINNNGKMVKHGSGHLRYSIMNSAMIIIRYSPIFYDYYLKKRSEGKCHRVALSHVCKKLLRVIYTLEKNNIDFNPSLLK

SEQ ID NO: 413991 - protein, 317 aa, unidentified
MQQGKTSTKVVGVDVGKHWLDVAEHGASDAMRVANTPAGISELIGWMSARGVVRVGMEASGGYERDIRQACDEAGLEVVVHQPLEVRLFARLKRLRAKNDRIDAVLIAAATAQIDTVRAAADPRLRDLAERLTVYERITDQLAQARGFMEHVTAKDLIADLKAQLVSLARLKAKLARTILDRIKACPDLAHRLKLLLSLPGVGPIVAASLIVRMPELGRMTRGQPAALLGTAPYDHDSGQMKGMRFIAGGRSRPRRMVYLAALSAKRYDPGFKAFAEALANRGKPAKVILVAIMRKLVEAANLILGRGQPWVKHNPA

SEQ ID NO: 413992 - protein, 400 aa, unidentified
MKQACCGLDVHKDSIYAAIYKNQKAGEVRVFSTLTADLIQLSKWLKEEGIQSIAMESTGIYWVPIWNILEREDFKLLLVNPYFIKQVPGRKSDIKDAQWIAELLYKDLLKSSLVPSHQIRTMRHYSRAYVKRTQAITRVVLSIERILESANIHITSMVSCVDSKTVMKVIKSIVGGETNPNNLIKFVHGRVKNRMGEKVILSLEGYIKEEHRFLLRQRIEEYELLNRHADELEKMMIEIGEAYYKKELELLKTMPGVNTQSALQLIAETGGDMSAFQTSNKLTKWAGLSPRNDETAGKVKSTATTKGNTYLRRIIVQIAWASSRTKGSHFQSQFRHLAIRKGNKKALIAVARKQLAVTWNILSSMKAYDTSKQPVISQDQLKARKQYYEKELNKINRIIS

SEQ ID NO: 413993 - protein, 349 aa, unidentified
MVTLGIDAHKRTHTVVAVDDVGRQLGQKTTVSTTTEAHLELVRWADRFDGERVWAVEDCRHLSRRLESDLLAAGERIVRVPPKLMAHARDAARTYGKSDPIDALAVAQAALRHPDLPGAQLDGPARELRLLVDHREDLVKDRTGHINRLRWHLHELDPMWDPAPRSLVAYKNLDATADRLATLDGMVARIAADLVRRIRELTVTIRDLEREIAERVHVLAPTLLLVVGVGVLGAAKLVAETADVRRFKSKDAYARHNGTAPLPVWSGNRERHRLSRTGNRQINCAIHRIAITQKRCHPAAQTYLDHRAQLGDTTTEALRALKRRLSDIVYRALLEDARTGITTCVAHAA

SEQ ID NO: 413994 - protein, 346 aa, unidentified
MEHYAGLDVSLKEISICVVDEDGAIVARGACPADPEGVAGWFRNRDLEPRRIAHESGMLSIWLQRGMARLGLPATCIDARKAHKSLSARLNKSDAADAEGLAQLARTGWFTPVHIRSEDADRLRCLVGARERLIRLRKDLEGHIRGVLKTFGIRMTGIGQGRQRQAFRDQLAAAGESDTVLRAISDGFIAAHATLCQAADDLDKVVKGRAEAHPVARRLMTIPGVGPVNALSFIALIDDPNRFSRASDVGAFLGLTPKRHQSGEIDWSGRVSKCGDGAMRGLLFEAASCLIRQVKRFSPLKSWSVRLAGRRGFRKAAVATARKIAVLMLTLWKNETDYQWTKEATA

SEQ ID NO: 413995 - protein, 343 aa, unidentified
MSEQKIIGIDLAKTNFYLFSINAHGKPAGKIKLSRNQLLNWLAQQPKMTVAMEACGASHYWAREIRKLDHDVILLPAQHVKAYQRRQKNDYNDAQAIAEACQHGTIRPVPIKTLEQQDVQTFLKMRRLVSMERTQLINHVRGLLAEYGIVFSKGATELRQKLPALLEDAENELTDTMRTLLHRQYIRLITLDNELEWYDSEQKKYVRQDPVCKRLLAIPGFGPLVSQAIKSWMGDGKQFRRGRDASAALGLVPRQFSTGGKQVLLGITKCGDQYIRSMLIHGARAVLFRASEKTDSLSVWVNRIREKRGFNRAVVALANKLLRIAWVIIARNEMYLPATKQNQ

SEQ ID NO: 413996 - protein, 355 aa, unidentified
MDSKKYIGMDVHKESISIAVMNGAGKIVMECVIETKASMILQCIDGLRGDLHVTFEEGTSAAWLYDLLKPHVTKLVVCDPRKNASMREGNQNDKIDARRLAELLRLNHLNPVYHGEHGLRSLKELVRSYLTITKDVGRIMTRVKAIYRSWAIPCTGKQVYALRHRAEWLGKITEPGVRRRAEFYYQQLDALRTVRQEVRRELLAEGKKHQAWKRLCQIPSIGPIRAAVLLGILQTPHRFRTKRQLWTYSGFGIETQSSADHRSVDGQLERAKKQISIRGLNRNCNHDLKNLFKGAAIVASSKPGPFQEFYTALLARGIRPEMARLTLARKIATIVLIVWKRGACFDAQHLKPQAA

SEQ ID NO: 413997 - protein, 411 aa, unidentified
MISVGIDVSKGKSTVCILKPYGEIVSKPFNITHTHKDLSELSSMLFRLNDEVKIVMEATGIYHLPVLTYLQEKGFFVSVINPYLMKSYRNESLRKAKTDKIDSRIIANYGIDHWFKMKEFQTSGEIYEELKLLGQQYRHYMKLHLLSLAELTHLLDLTMPGIKNLLASWNETNRKDKRSDFMERFWHYDVITSMSEQEFTEEYILWAKEKKYVPSQEKAKVIYTLAQESIPTLPSETSSVKMLVTEAVRVLKEVDATLGLILSRMQEIAKTLPEYSVVREMGGVGNTLAPKLIAEIGDVRRFRNGKALVAFAGIDPPPYESGQFVGCNRKISKRGSASLRKVGYETMRSLKMRSRPEDPVYRYVVKKESEGKSKKSAKIAGLNKFLRIYYARVTELYKNCLLYTSPSPRDA

SEQ ID NO: 413998 - protein, 320 aa, unidentified
MVAQNEVVVVGIDVAKDKVDACIRAFKLRQTWLSTARGHRKLVVWLRKHQVNKAVMEASGGYERDWARVLREAGIEVRIVDPKRVRSFALSAGRLAKNDAIDAEMIAWFAETFSEAPGQPHDAAREELQALVKARLDLIDFRMRLVSRSEHAAPGLVQKAHAHILKSLASEIAKLEAAISAKIKSTPDFAERAEIIESVPGFAQTSSANLVAGMPELGQVSDEIAAALIGVAPYDDDSGKRRGERHIKGGRRWVRNAIYMPCVGAATQNNPVLKAYYQRLLAKGKEPKVAIIACMRKLIVILNTMIARRQKWDPSRYVLS

SEQ ID NO: 413999 - protein, 344 aa, unidentified
MEHYAGIDVSLECSSVCVVDTSGKIVREVKVASEPTALIGWFCSLGFELARIGLEAGPLSQWLYAAMKQAGLAVELLETRHVSDAFKAMPVKSDRNDARKIAQLMRLGWFRPVHCKSMSAQEIRAMLTARKLVQSKLQDVENSLRGILRGFGLKVGKTTKRSFASRISELVVDQPALETIAAAMLAVHMALLREFNGLEKRVRTMSHRHERARLLMSTPAVGPIVSLTFACAVDDPSRFTSSKQAGPHFGLTPKKYQSGETDYTGRISKHGDASVREALYEAAHIMLTKPIKGCAQLKGWAMRIARRAGINKAKVALARKLAVIMLRMLKDSVPFNPAAKAAMA

SEQ ID NO: 414000 - protein, 339 aa, unidentified
MVLYGGMDLHGDNVYCAVMDRDYRPVYERRLPNDLATVLAALEPYRERLAGVAVESTYNWYWLVDGLQANQYSTRLANPARMQENIGLKSANDKTDARFLAKQMVMGVLPEGYIYPKEERPVRDLLRRRMCLVHMRTGEWLRLEGHVARHSGKDLGIQALQNLEAGELNELLGNDTLTLAAAQISYRHIAFLDQEIRQIEKAVEGHVKLADGYERLIGVPGIGRILAMTIMLETGPIGRFPGPGNYASYCRAVKTEHTSNERKKGEGNGKSGNRYLAWAYVEAANFAVRYSPELRAWYQRKAARTKRVVALKALANKLAKACYFILRDGVEFDVKKLVG

SEQ ID NO: 414001 - protein, 393 aa, unidentified
MKVTRIGLDIAKQIFELHGVDQRERVVLRKTLKRDRVLEYFAQLEPCTVALEACGGAHYWYREISKLGHTVRLLPTNKVKPYLDGNKNNANDAAAICEASGRPSMRFVEPKTGVQQDLQALHRVRQVNVRHCTLLANQIRGLLLEYGITIARGLAALNRALPELLEYEEQRLSPLLKQLIAAQWRMLKLHRRQIEVYDRRIAGIAKSDASCRALLKIEGIGPITATALVAVTGKGQQFKNGRHLSAYLGLVPSHSNTGNKTVMLPITKRGNRYLRTLLIHGARSALYAARNKDDSRSLWLQRLQSRRGNNIAAVALANKNARVAWAVLRFGQTYRPDIGHPRQSSATPPQRLQRQPQGRLTLKPHGASSRVQNRHFPSPPPSGEGRAGKNALR

SEQ ID NO: 414002 - protein, 311 aa, unidentified
MKNDTIGVDVSKDHLDAHRLADGATRRFANDKGGHKALIKWLAETPLNRVVFEPTGPYHRAVERALGASGVPFVKVNPRQARRFAEATGKLAKTDRLDAAILARMGALLELEARPARSEVLFELKELYVAREALVKDRTAARNRGKALTLSLLKRQNAQRLEQIDRQIATVEAAILQLVEADESLADRFAILISIPGVSNITAFALLIAMPELGSLEPGQAANLAGLAPIARQSGWTGRSFIRGGGADVRQALYMPALVAARFNPDMKAKYAHLIETGKPAKVALTAIMRKLVVLANALLKANRTWTPRTA

SEQ ID NO: 414003 - protein, 335 aa, unidentified
MEFNFFIGTDVSKNELDFAIMQNKTFLFHKKVSNTPAAITTLLNELVKLPGFKLSMAVFCMEHTGIYSNHLLGVLFKKQCSVCLEAALHIRNSLGNIRGKSDKIDAIRIAEYAYKNREQLRLWQPKREVVIRLAQLSATRSRLIEAQKVLTTPIKESREFIPKGLVKENTTICQSTLIAIKKDLTKVDKAIQEIIASDLELRRLFALITSVDGIGKATATQIIISTNEFKTINNPTKFACYAGVVPFSKESGLFKGRARVSHLANKKMKTLLHLAALSAIRYNNDMEAYYGRKVTQENKNKMSTLNAVRNKLIHRIFACVNNNRPYEKNYQRLVA

SEQ ID NO: 414004 - protein, 412 aa, unidentified
MEVLHPHCAGLDVHKASVVACVRHMMGGAVKREVRSFQTTTKGLIALSQWLSAEDCTHIVMEATGVYWKPVWHILSDGAFALVLANAAHVKNVPGRKTDVNDATWLAELLAHGLVRGSFVPDEPTQEMRNLLRTRKQLVRERSRHIQRLQKTLEDANIKLDSVISDILGLSGRRMIEALIAGETDPNALAALAHRRIKASPAELEAALRGRVTRHHRFLLGLHLQQIDAIDAAIDQIDPEVDALVEPFRTAVQLLTTIPGIDALSACVILAEIGRDMSRFTTAGHLISWAGLCPKNDESAGKRRSTRMRKGAPWLKTTLVQCASAAARKKASYLQAQFHRLRARRGAKKAIGAVAASILTAAYHMLKNGTLYEDLGPAHFDKRAQAKQVHRLIDRLRNLGFAVQITPMEAAA

SEQ ID NO: 414005 - protein, 316 aa, unidentified
MDHKQTVYGVDVSKATLAIAQYEGETVVEIANTPEAIAAWLASVPADSAVAMEATGVYHRMLAQLAHAAGLVVYVLNPQVLKHYARAIGQRGKTDGCDARMIARYLVHERSKLRPWQPPVAAADTLSRLLVRRRALVGARQILAQSLTGMPMLKAPRQTLLASFKRTIATLDLLIRRELARVPEMAALHRRLKSIVGIGEVVAAQLVAALSTLCFTRAAAFIAYTGLDPRPDESGQHRGRRRLSKRGPALLRCLLYNAAMSAAKSKVFKPVYMRLRERGLQSTEAIVILARKLARIAFALYKSGETFDVQKHLKTT

SEQ ID NO: 414006 - protein, 376 aa, unidentified
MKQFNDIYVGLDVHKATIAVAIVRGTRSAPQYFGEIANTPEAVKKLVSQLSPDGEVMNFCYEAGPCGYELYRQLSSMGHVCAVVAPSLIPQKSGVRIKTDRRDALNLAKLHADNSLTPVWVPGKEQEGMRDLSRAREDFKQMETKARQRLGAFLLRNGKIYAGKSKWTQAYWRWLETLTFETPMQLIVMQEYVEAVRDAQRRVVGMEGQIRVAVRGWSLEPVLKALMALRGISMTTAVTILAELGDLSRFDNPKQLMAYLGLVPSEYSSGGKRRQGGLTKTGNGHVRRVLVESAWNYRFAARKTRDIQKRAEQTSEAVQAIAWEGQKRLCARYQRLLGAGKVKQQVTAAVARELCGFVWAIACEVSGKAHVSRATS

SEQ ID NO: 414007 - protein, 465 aa, unidentified
MYRELHHLRQALAEGVRATLPTLSEVDPDKLLATYLDRLTLYVGLDVADKTFSVRAIDAGGNSLGSLEDCPNRQEGFDHLQHWVDGLLAKHDLRLVAVAAETTGVYYWALWDYLAHSTPFARVLFNPRTTSHMAAVLSVKVRDEQVDALLIAQQLRLGSTPEVQLCEDADLLSARLCSRAARDLACQINRKKNQLRSLLRAYSPAVNFTFPGAKLHHPAVAALLKQLLFADEFIAAGEDTLTKLLANSCRSAFGREDARTLIAYSQHVIARPIQRHALHLRVHFLLDDIQNIKRQQKQMLTAGFDLIKHRPETRLIYRRVPGAGISNTLALVSELADVSRFPDGEHLASFLGLTTSKHISGTSVYHTKRITKQGSPNARYAAVNMAGFLRRKVPRYQNMYQSICARKPPRKGHYVAQVAVARDFITNVLHDMFVNHRPFFLEVEDYRNYRQQLSTRSSSNALPDN

SEQ ID NO: 414008 - protein, 368 aa, unidentified
MAKSISRSQLNATRMSSSVWQKVVAIGIDLGDRFSRWCALDGEGEVVTEERVPTTRPAMTKLFSLMDRKRIALETGTHSPWVSRLLESFGHEVLVANSRKLQLISKNRQKDDRNDARTLARLARFDTELLYPVRHRSQTAQSHLELVRARDVLVTVRTRVANHLRGAVKPFGMRLPSCSPGALVKKAPAAIPPELQTAMHPLLDLIKTLSIQISQYDRQIERLAENEYATSQALRQIKGVGALTALAFMLTLSDASRFRRSRSVGAWLGLTPARHDSSDTQTQKRISKEGDHYVRRLLVGSAQYILGPFGDDCDLRRHGLAIAARGGKNAKRRATVAVARKLGVLLHRLWVTQAIYVPLRQLGAKSAA

SEQ ID NO: 414009 - protein, 344 aa, unidentified
MEAPRHIGIDLHRNRFTCCVRLDNGREYLSTWALEQLPRFVKKLRPTDQVGVEVTGNTRLFHDAVAPHVARVVVVDTNQFRVISRSVKKTDPNDARLLALYLSKGLLPEVRMKDKEHGQLASLTQTRDTLVKLRTSLKNKVNNLLSARGINLAREALSSEKKLEEVLALPFDELVRFELRVIVDQIRSLNGSIAELEKRIAEEGRKLPGHKNLTSIKGIGPITGAILLSVIGDVNDFPEEGRLASYFGIVPRVSNSNETEHSGRIHKRGSKLARTALVQSALIAANYSPYLRGFYQRVKARRGAGKAIIALARKFLGIVYRTLKNNWVFEDFPNFVLAEAAEGA

SEQ ID NO: 414010 - protein, 393 aa, unidentified
MFLLGIDIDIAKLNYIASCIDSSTNEVVFSNFKFKNDFKGFSALLNKIKSFDAKNLIIGLESTSHYGENLINFLFIHDFKVALINPLQTSHLRKANIRDAKNDNLDSLNIAKSLVFTKLNFVSKKNIECFSLKKLTRFRSNLIKQRSKAKIQLTSLLDLLFPELQYLFKSKIHSKAIYSLLKKHPSAEEIAALKDDEISNLLYASSKGHFKKEKSIELKSLAKTTVGIKDTSISLHLIQLIELIELYTKQIKDIEIKITDIVNNLDTTLLSVPGISVIACAIILGETNNFENFSSSKKLLSFAGLDPKIRQSGNFNASSCRMSKKGSPYLRYALIFTAWNIVRHSEKFNKYYSLKRSQGKSHYNVLGHVAHKLVRILFTLVKKNISYQEEKLE

SEQ ID NO: 414011 - protein, 466 aa, unidentified
MENNYILYVGMDSSKGKADAAILKVSDRRSVKPKFLRKKLSFKFVKSEVTSFLETVRSYSDDNCTSICFALEVTGIYSTNVYNFIKDNLNDNESIKFLNTDFVNQWRNAHNIAKSDPLDAQTISTIIGTDSDVQYVNDNVFKNKNGYQDLKALVHRHYQIKKIYSQEINRLIAQCDCLFPELQYLFEPKSAAFIAVLSSYPTTHDIINASRLEVFNVVYEATKHRCSMDKIDKLFDLCHDTLVPDNISSYGRSIILDLVENIKNIKGQLKMIERYIRDVASLNPAYKLLLTITGCGPLTAATVIAETGDIKRFKNADCFVSYSGTSPRNKRSGTSVETMGKISKRGSRYLRHAIYMIAEFARRHNPVLKQQFERIKNGNKKRHKLANIAIANKIARYIYSIMKNESGFVIFHEHIMRLPEETQNTFFNSISLDFPKNTRKQIYQYSDINGELHRFVYIKTDEMIPA

SEQ ID NO: 414012 - protein, 332 aa, unidentified
MYLGIDIHKQYAQVAVMDENGEIDREVRVENANLDEIAQEYAGSEAAIEATGNYYHIHDTLSEYLDVVVANPSELNLIANADTKTDRVDAKELARLVRLGSVPESYVPSEEIRECRALVRGRHKLVENRKDYANKIHSLLTEHGITQKVKPLSVSGREFLEELTLPAPWDTLLETYLEMIGTFTDQIERLEVAIEDRAASREETQLLMTIPGVSYYSALLIHAEVGEIDRFDEDKQVVSYAGLNPVIRESGDSRFEGGISKKGSEKLRWILVQCSRVAVHRSEDEYLSRFYQRLKNRKSGKEAIVATARKLLVSIFHMLDRKEVYDPPGVSA

SEQ ID NO: 414013 - protein, 380 aa, unidentified
MRSTKSLPCDEHSAQRDDLFMSLELGDKRWKLSVGDGQHRASRYEVPAGDVEAVAKYIETTRARLKTPHDASVHSCYEAGRDGWWLHRRLTQVGVDNIVVDASSIEVNRRARRAKTDRLDAEKLRTMLVRHHRGEHVWSVLREPTEQDEDARRVHRELQRLMHERTSHVNRIRALLVLHNLRPEVIIAGRDWQAWWHEYSGQVAPKLREEVEREIVRLKLVKDQVRAIELARRRDLAQGQHPMVAQLARLGAIGPKGAWVLVHEVFGWRRFANRRELAGCLGLAPTPYASGDSETEQGISKVGNKRVRALLVELAWGWLRRQPDSALTLWFNRRFAHAGGRMRRVGIVALARRLAIAMWRFLQNGEIPLGAHLKTVLQTS

SEQ ID NO: 414014 - protein, 414 aa, unidentified
MADFEQRYVALDLHKAYVLVGGVNRQLEVVLQPCRVLTSKLDGWVTKHLRPTDLVVIEAGTNTWYVYDLIAPHVQRVIVANAHAIKLIGSSLVKTDKRDVLALAHLLAAGLIPEVWVPPQHVRELRTLILHRQYVTKRGTATKNRLHNLLMTHHIAPPEGDPFAAKNRNWWDALSISRAERLRLTHDLQIVEAGSAMIRQIEAELATLSVSAEWADQAAFLIQLPGIGLVNAMTILAAIGEIERFPSAKHLVGYSGMGARVRASGTTHRSGGITKQGRGELRAAMVEAAWKAVETNAHWKAQFERLAGRIGRRKAIVAIARKLLVVVWNVLSRRAPDRQAQIDAVSRSLMNWGTHHRVATTLGLSRAAFVRRELDRLGLAQEVVAIEHNGRRYQLPPSGSVPLDPRRNAVTAAV

SEQ ID NO: 414015 - protein, 417 aa, unidentified
MSNPLIVGVDVHSQTNRTCLLDREGEPQGKRLSTDNNRPGTQVLIARIAQAVHTGDFDSVRIAAEATNWYWFPLFQTLRQDPVLARWPLDLYLLNPRVTAKYKDSFSDKDKTDDSDAHIIADRLRTYSRQDLPAPFASDLAHLGLRFLTRYRYHLVQDLVREKNYCLAILYLKANAYREGHPFSDVFSATSRALIEEFASFEEVAAMPLEGLATWLDTQGKGRFPDPDKVARELQQVARDSYPLDPQLQPPVNYVLIWSFQLVNGLERQVQRVNSAIAAAMQGIPQTLDTIPGIGPVFSAGIIAEIGDLTRFNHDEAKVAQFAGLHWRKNESGQSKAEETHLTKRGNAYLRYYFCEAANAVRIRDAEYAAYYQRKHDEVRTHQHKRAIALTARKLVRLVVRLLTTNQSYQPRRQPGG

SEQ ID NO: 414016 - protein, 336 aa, unidentified
MKKYIGLDAHSSTCSFCVMDTKGEIVDTVTLATNGRLLVGYLRSISGKKKLTFEECELSGWLHEILRKEVDELIVCNPVENKAYKKAKTDKLDARKLADLLRGNYLKEVYHDGSDRERFRDLMSGYQDIVDDAVRIKNRYKSLFRKEGKRITTTALYNDENFLKGLERKDFKFIGEHIYRQLSVMEESRSMYVKEIKKYNRRFKEIKLLKTLPGIADIQAAKIVAQVIDPVRFRDKYKFFSYCGLVRHRQISGDRIYGDKRIWGNRVLKCVYKMAAKSALTGNSGLRKYYDYLRSKGTGHKNAKNAVSRKIAAMSLALWKNGEKYRDDMITNGLIK

SEQ ID NO: 414017 - protein, 321 aa, unidentified
MTYVGIDVSKATFVVAYSSAKSSKTKTFKNTTKGVHEFIQTLSADDYHCVLEATGNYSSLLVYLLSQAGITVSLENPLKIKNFARVMLSVTKTDETDARLIALYGEKMHPAPYKLRSDAILILKQKRTVIRQPKKQLIATRNLKGSMEALPFFDSKCKKTIEKTIAFLERQVKDLEEELANLAQGEYRKQMGLLTSVKGIGVTLAAALIMATGGFAYFDNAKQLTRYLGLSPTYQQSGTSVNVKGHINRNGDSSLRSLLYVAAMASLRCNAECKECFNRLRSNGKPGKVAVVAVANKLVRQVFAVVTQEKPYIDGFKSAKP

SEQ ID NO: 414018 - protein, 407 aa, unidentified
MLFLGDDWAEAHHDIELEDDQGRLLVRRRLPEGVAGLAALHGLVRDHLDEGAEPEQVLVGIETDRGPWVQALIAAGYIVYPINPLQAARYRERHGVAGAKSDPGDAHVLAEIVRLDRAHHRPAAGDSMIAEGVRVAARAHQSTIWMRQRAANTLRSLLRECYPAALAAFADDLAGRDALAVLTAAPGPSAGRRLTTARVSALLRKAGRQRNADVRAEQIVTALRSEQLPVRAELETVHAASVSALVAVLTTMVAQTGVLEEQVRLGFGQHPDAEIYLSQPGLGTILAARVLAEMGDDPTRYTDARARKNYAGMAPVTRASGTKRVVLARYARNRRLADALYQQAFSALNSSTGARACYDRHRARGATHHQALRTLANRLVGILHGYLRHHARYDETTAWPREHQLAA

SEQ ID NO: 414019 - protein, 401 aa, unidentified
MEPHLCVGIDVGCKAHRVGIARPDGSILEEFDISHNDVGFQEFFRRVEAHRQRMDLPVAVAMEGFNGYARPLDRLVLDSHYRLYNVNNMKLAQFKKIFPGPAKTDAIDARKILELFILKEHLPMAKDALQEVTAAPAVNDKLKRLSRRRRHLVNERVRVINCMQADLQAVCPELLAITHSVSNVWFLRLLTFRSDLRQLARLRYSTIHQIPGVGEKYVGIIREWQGKARFSGEVEYVGPMIIENAERILELRKQIRALDEAMAELVGDSEIAQRLSTIDGFGKTSIAELAGEIGTQRRFAGEASLALYLGMSPLTRQSGQMSGTRSPRQDNRRAKAAMMTAVAHHIRCVPQSRAYYDRKRAEGKAHNQAVRALGRHLVRVIWAMLRDERDYEVREDIHPMP

SEQ ID NO: 414020 - protein, 346 aa, unidentified
MTIVETTRPITGGVDTHADVHVAAAVDVNGGVLGVESFATTPAGYVQLSSWLSGFGVVDRVGVEGTGAYGAGLARHLRSRGLVVIEVDRPNRQERRRNGKSDELDAIEAARAALSGRASGIAKSADGDVEAIRALLVVRRSGRNVRVKYLNQIRHLGFTAPDELRERLRDVHRDRLARTAAALRPTAGSDTVMYATKLAIVTLGRRVLALEADAERLDRELETLVRRCAPSLLEVYCVGVNTAAILLVAAGDNPHRLKSEAAFAHLCGVAPLLASSGKIDRHRLNPGGNRQANHALWRIVFTRMSSDERTRKYVARRVAEGKTIREIMRVLKRYVARELYPHLVRD

SEQ ID NO: 414021 - protein, 355 aa, unidentified
MSQEKYIGMDVHQATISVAVMDVHGKLLMECLLETQASTVVEFIRGLQGTLSLTFEEGTSAAWLHDLLKPHVSRLVVCDPRKNALLQDGSKSDRVDARKLAELLRTNQVKPVYHGEHGIRTLKELGRSYLTLTKDVTRVMNRIKALYRSWAIPCSGSSVYAPRHRAEWLAKIVEPGVRLRAEHLYQQLDSLQPLRLEARHQLLRESHKHAAVKLLRQVPAIGPIRAALLVALLQTPHRFRTKRQLWAYSGFAVETHDSGEYRRVRGKLQRNRERITVRGLNDNHNQDLKNLFKGAAISASTRPGPLHDFYVARVEKGMRPTMARLTLARKIAAISLTLWKKGVKFDPKQLHRQAA

SEQ ID NO: 414022 - protein, 356 aa, unidentified
MDKVISDGAVRVGVDLAKRIIQVHAVDARGRVLTSRALPRDRFVQWCVRLPAGCVVAMEASSSAHHWARKLLALGLQPRIMSAQLVQPYRSQGATGKNDANDAAAVCEAASRPTMRFIPVKSIEQQSMLCVHRLREGIKEDRTACINRIRGLLAEFGLIFPQGVRELQTVLGDVLEDAGNELGTLARLTLQRAQSQWNELDEHLAWCDERIAAHSQANAAVKTAATLLGIGPVTASAVVATVADFKQFRNGAQFGAWIGLTPRQRSSGGKNNLGGITKRGDTYLRTLLIQGAKSAVMTAHRRQDKISQWAAALRERSGWQKAVVALANKNARILWAVMTRGEAFDANHLSVKPASA

SEQ ID NO: 414023 - protein, 343 aa, unidentified
MHTTKQDALYGGADLHGRNVLISLCDVEGKTVYSRRVKADIDSVCEALQPYQERIERLGVESTFNWYWFVDGLSEAGYVVDLGNPAKMEQYSGIKETNDLSDAAWLAEQERLGIFPACYIYPREIRPVRDMLRRRQLLVRQRTQSLLSLKSLLERYGIPSPNAQTIKKWAGGDIEKTGLDICVQEQLRSLLNSLKANDREALRLEEIALGFAKPTRDFERVQMVPGIAEVLGLLIMLESGEFSRFPSAGDYASYCRAVKSRRISNEKKKGSNNRRNGNKYLAWAFMEAATYAHRFYPRIHAWYERKRQRKNVAVAKKALACKLSKAVWHVMNGKDYDEKMLFG

SEQ ID NO: 414024 - protein, 399 aa, unidentified
MRKVAGIDVHKDFLEVAYRLPSGRIETKQVEYTLEGISRLIRLLRRHGITDVYMESTGDYYLPLYYALKGAGIRPHVMNAYKIHRPEPNKTDKKDAIWLLEIGESELFSDSYVPDEDIQALRFLIRKRMKLVDRISDIKREINSILWRLGLQAAHYAKKLRSKKKRMLLLALLEGRLRPDSISDSDVRHLYDILSRPEFRAYVFVLRSRLADLAHLESQLEEFDREIVALARKFEDAIRILMSVPGISFILAVGILAEIGDISRFPSPAHLASYAGLVPTARNSGGKRRSGRPSKKSNKYLRRYMFLAGMAAVRSNSRVVREFFMRLLGRGKHYKVAVVAVARKLLCVIWYLPRRGEFWCEDGYFKRPRRLPRGRRVRISVREAIAILVRAGYEVRRKV

SEQ ID NO: 414025 - protein, 339 aa, unidentified
MSKVFKNFVGVDISKTWFDAALIRSADPSKIIHQQFSQTPDGYRKMLAWLHDHDVSLHDDTLFCMEYTGIYNTGLVTYLVTQHAQLWVEMPLRIKRAGGLERGSDDRSAACKIAWYALRYHDGAKLWKPADSSLEKIKHLITQRERIITSIKHLTVPAEELKQCGCLQDAKMMEKLQQPVIKALQKTKQGIEALITKTIKLDEALYNKVQLMQSVNGIGTVTATALLVYTKGFTAFRNAKELACYCGVVPFNKTSGSSVKYKPSVSPFANMKLKKLLHLCAMSAIQNDKKMKAYFERKTGEGKNKMSVINAVRNKLIHRVFAVVRDERMFEDNYVRQCA

SEQ ID NO: 414026 - protein, 346 aa, unidentified
MEHYAAIDVSLEWSSVCIVDTSGRIVREAKVRSEREAVVDFFQASGLTFARIGLEAGPLSQWLHAGLVEAGLPAICIETRHVKAALKAMTVKTDKNDARGMAQLMRLGWFRPVHVKTLVAQEIRALLTARRLLLTKLCDIETSLRGILRGFGLKVGPVSKLRFESRIRALVTGQTTLERVVEPMLRVHAALRGEYAILHRALLATVRDDEVCRRLMTVPGVGAVVAMSFKSAIDQPERFQHSKAVGAHLGLTPRKYQSGEVDRTGRISKVGDAAVRTALFEAANIMLTRAARWSSLKAWALRVGNRQGMKKAKVALARKLAVVLHRMWLDGTVFRRGSQAAPGAAA

SEQ ID NO: 414027 - protein, 311 aa, unidentified
MEHTICVGIDVAKDHLDVHVRPIDESFRVPHDEAGMVTLLARLRTVAPTIVVLEASGGYEVALTAALASAGLPVAVVNPRQIRDYARAVGQLAKTDRLDAQIIARFAEAVRPEPRPVPDAQAQALGELIARRRQLVDMLTAEQNRRRLLRDRRLQHHVDAHIKGLEEALRRLDHDLTTLVRSTPAWREADDLLRSAKGIGPVTSCTLIADLPELGCLDRRRIAALVGVAPFARDSGVFRGRRMIAGGRPHIRRVLYMATLAAIKHNPVIRAFHHRLVAAGRPSKVAITAAMRKLLTILNAMLRDRRPWQPA

SEQ ID NO: 414028 - protein, 312 aa, unidentified
MESYNNFIGIDIGKFNFVVAQHGFKSVKEYDNTPIGINKFLKEFKKILPQAMCILEPTGGYEMKLLLTLCEKDYFVHRAHTRNVKNFIRSYGNEAKTDKLDALSLSQYGFERSKSLSKFISPSKEMLKLYELVQRRRDLKQFLVAEKNRFKSPRTETVKNSINTMIELLTGEVELITGEINKLIEAEPGLREKKKILKTIPGIGDILANELLILLPELGKISRREIASLAGLAPISKDSGRMKGYRRTNHGREGIKPSLFLAAMSARNSHSHLKDFYEGLIKRGKSKMVALTALMRKIIVIANAKLKMHATT

SEQ ID NO: 414029 - protein, 392 aa, unidentified
MRFAGIDIASEKHVVAVVDERSEVVVKPKAFSEDADGYRKLVELLGAPGELLVAMEATGHYWKNLFAALVAGGYTVSLVNPLRTHRFAGEDLQRTKTDAIDALGIARFAAQKRPVATKLPDSATEELRELVRLRDRLVQDFGDRVRQLHRLVDLGFPELTRYVRRLDSELATSILKDYPTAEAFVGVRPRALSNLKYDRVHFVGLELATQLIEAAKTSVGRHHGYAYRIQVKFYCEDLDILRRRLKELDRDIETKLGEHEVGTLLTTIDGIGTQTAAKLVAVLGNPADFRNERALAAYIGAVPGLKLSGKATSMRASLTPIGNAALRKALYMPTLTAVKRSPWLRAFYQRLISTGKPPKVALLASMRKLITAIYSVAKNRKPFVSRPVEGTA

SEQ ID NO: 414030 - protein, 318 aa, unidentified
MTAVMIGVDPAKRSHAMAVLDGQEEQLAALQVVNDSAGYRDMLRLAKRWPQRTWAIEGAGGVGVQLAQHLVADGETVIDVPPKLSTRARIFDVGHGRKNDPTDARTVAVVALRTKNLRRVVVDDEMIAIRLMGDRRSDQVQSRTVTVNQLHQLLMELIPAGAERNLTAPKAKALLARVRPRDVARRTRRQLAADLIGYVATLDRKLKDLDKRLHAAVEATGTTITEIKGVGVAAAAMILGEVGDVRRFPSRNHFATYTGTAPRDVSSAGVDKQRLSRADNRKRNHALHVIALSISGTTNAERRTTPRSSRLVKARAQD

SEQ ID NO: 414031 - protein, 399 aa, unidentified
MEHVIIGVDPHKLSATIEVVDEHEKLLGSGRFTTDQAGYTAMRTYAKTWRERVWAVEGANGAGRPLAQRLLEDGERVVDVPAKLAARVRLFDTGHNRKTDALDAHSIAIVAVRTEGLRVLKADGELEALRILTDRREALTRRRVQTVNRLQALLAELLPGQAKKDITPLQAKTMLASVRPRDIAGKTRRRVAAEELAELIAVDAKIKKATAELKAMVVARGSQLMDLHGVGPVVAARILADVGDVSRFIDRNRFASWTGTAPLDASSGEQNRHRLSRAGNRRVNHMIHIAAVTQLRHDPTGQAYYRRKRSENKKPMEAMRCLKRRISDAIYRQLVADAQRGADAGPGGHCGASQESSAVDLPPHIDTSDQPLPGPAKPTLQPSRTVRKSFSRKAPQTTG

SEQ ID NO: 414032 - protein, 462 aa, unidentified
MKLYLGGDVSKGYADWVILSEMKQIVLENFQLDDTYAGHCKLYSMLEAYVEKHPGSEIYAAVESTGGYENNWLNTLESYQKVFNLKVARINPSGVTFNRKAGMKRNVTDAISALSIAEFMIDHPKNITYNQDDKWRSLCRHWNFVEMQKQQRVQTINQLETILYSANPTLMRYKKGDLPNWLLELIIQCPTADKLAKAKPEKLAKIPYLSLARATELVAEADQNIASATDRNAEILVSQIAIQIKSFDQNIKSQMQLIERDLTCPEIELLKSFKGISTTSAIGLLLEIETIERFPTVKGFSCYFGLHPKFKQSGDKVIGVRMSKQGSKNMRKILFNIAKGAITYNPLIMSVYEKKLSHGMKKMAAIGVCMHKILRIIYGMLKHKQEYNPLIDKLNCEKSKDKKQEKQQQENVNIEKSRRYQEFDVKAPISRKQTKKRREHDLSQCEITSHSTGSTCSSQTKL

SEQ ID NO: 414033 - protein, 406 aa, unidentified
MPQTPCLLLSQTGASNQHWRPWSPPCVFGIWEKWSATDRGYPIGGGGRDPVPPQVSKPRWSWGPAVILMNPNSCMGQAPEPARMGNKMDRQAVVVGIDVAKNWLDVAVLEGGECFRLGNDRAGWAQLIGRLRRFKVMAVGLEPSGGYERGGYERGLASALHKAGLTVCNVNPHKLRSYARARGVLGKTDRLDATMIARYTAELPTHPLRVDSLTRQLADLVLVRRQLSEDKVRLGNQLEHIRDSLLRRMLLARLRRLALDILLIDKHLAQLVQGDPDLARKDKLIQSLCGAGPVLSHTLVALAPELGEASRRQIAALAGLAPYPRDSGLWHGHRSIWGGRSQVRRVLYMAALSASRANPALKAFAQRLAAAGKAPKVVLIAVARKILTILNAMLRTNQPWSQQSPT

SEQ ID NO: 414034 - protein, 423 aa, unidentified
MRSSKQAQQRSRAQLAAAVVGVDAGKFKHCLVVRTRGGADSKPFTFHTTRDGFDLAAEKILALSGGAQPSQIPVGIEFAGVYGFTFAYYLQQQGFQVVSVLASHSKRWKEVMHSQAIKTDEKDAGTITDLVAIGQFVSFPFLKKEYAELRYLVSARDNVSIQRTAALTRLKSVLQVVWPEFEQVFPKFHYITPLKLLARYPGPADLLKAPKRQVFKLLKEISRNHLGEKTYQQLVAAAERTVGLPIAQGALKGEIPLLIEQIDVFARQMELIETRMEEVLGTLPEAEFLLSIPGVAPVSAAVFLGLIGDPQAYESSKQILKLAGLSLVERSSGTTKGQPHISKRGKPLLRKQLFMLALRAVRSDGMFRDRFVRHVARTGGKKLPVVVAVAREMLCLMFNIARERRCFTVEPPKRQNRRTEVAA

SEQ ID NO: 414035 - protein, 416 aa, unidentified
MTDERRWYAGVDWASQSHHVFLTDRDGRKLGEKVFRHGGEGLADMATWLMAASGADDPGLIHVAIEVPHGPVVETLIERRFGVHAINPKQMDRFRDRFTLAGAKDDSRDAETMASALRTDPRCFRRLAAGDPIVIELREWSRITEDLGAERIRLTNRMREQLRRYFPARLGLDSDLGAPWLLDLWEAAPTPGKAARIRETTVARILKRHRIRRFDAAHVLSVLREPAVTVADGTTRAAQAHIITLLARIRLLNRQIDDAHRQLDRLTAQLAQSGETEPGQLKQHDATILASLPGVGRIVLATLLAEAWDALQRRDHAALRSLTGVAPITKRSGKSRIVIRRQACHPRLANAMYHWARVAVQRDAVSRAKYTALRTRGKTHGRALRPVADRLLNVACAMLKAGASFHPSQAVGKTPC

SEQ ID NO: 414036 - protein, 321 aa, unidentified
MGRRAKMPQPIFVGIDVSKAKLDLAVSPTGEQSCFANDAEGIEELVTEVLSLKPTVVVIEATSGLEVALAGALAAADVAVAVVNPRHTHAFGRARGIVAKTDKVDAVGLAEFAAAVRPEVRPLPDGQAQELKALATRRRQLRQMITAEKNRLKIAPQILKPSIEVNIRWLEEQLDDIDRQMRKAIKDSPIWRAKDELLKSVPGVGDKTSAVLISNLWELGTLNSKQIAALVGVAPFNRDSGSFRGKRTCWGGRAQVRTALYMATLSAARRCPQIARFYQRLQADGKPKKVALTACMRKLIIMLNAILRDQRPWTSDHQPQT

SEQ ID NO: 414037 - protein, 416 aa, unidentified
MQCAPVFLPPEPANGMTCGIDWARDDHAVSVVNRSGSEVQRWTVPHTGEGLGGLVRRLTRVGVAEVAIERPDGPVVDALLAAELTVVVISPNQLKHLRGRYGSAGNKDDRFDAYVLADTLRTDRARLRPLTPDSPATVALRRACRARKDLVSHRVAVANQLRAHLQTAFPGAVGLFADLDSPISLKFLTRFDCQDKADWLSPKRLAAWLASVGYCGRTDPAVLHARLHAAPHGATGADGAAHAHVTRALLAALTTLVEQIRLLAEQITEQLALHADAQVFTSLPRSGTVRAARLLAEIGDCRARFPTPESLACLAGVAPSTRQSGKHRAVGFRWAADKQLRDAVCDFAGDSRHANPWAADLYRRAISRGHDHPHAVRVLARAWLYVIWHCWQDGVPYDPAKHRALQALQQDLGAAA

SEQ ID NO: 414038 - protein, 416 aa, unidentified
MNAVGIDVSSRKSTVAVLRPLGEVVCLPFDVTHDIAGLASLAEKLKALDGETRVVMEHTGRYYEAVAKALHEAGLFVCAVNPLLIKEYGANSLRRVKTDKADAIKIARYALDNWADLRDFTPMDAIRYDLKTLNRQFQLASKQRTASANNLIALLEQSFPGIRKCFDSPVRSDGTQKWVDFAHSFWHVDCVRKQPFPAFCERYRKWCKRHAYLFKQSNAEEVYALAKRAVVLTPKSKVVKVLVQEAANQLISISRSVEVYRAEMDRLAAMLPEYPVVMAMYGVGKSYGPQLMAEIGDVRRFERKQALVAFAGIDPMPNQSGDKNVRSNKSSKRGSPYLRKTLFNVIRTYLQCAPQDEPVFQFLNRKRAEGKPFYVYMLAAANKFLRRYYAKLRDYFASLDTLQPVAPIPTILKATL

SEQ ID NO: 414039 - protein, 412 aa, unidentified
MSYKIAGIDVHKKVLMVVVLDASTPEEKPERRRFPTMPSDLRRLSTWLREQGVEEAVMESTAQYWRSVWLELEPYMRLQLAQAFSNRAPRGRKHDFKDAERLVRRLIANELILSFVPGGEQRIWRNLTRMKLQLTRDRVRLQNQMECLLEEMRIKLSIVVSNLLGASGLRILRALAEGETDPKKLAELGDQRLQCSEEQLVDALTGRPQPTHREMLALQLERLQLIDTQMAKLNGMIAQVMKPHQEAVIRLAEVPGLGVDSAQQVIAEVGVTAATFPSAADFTSWVGTCPGKDESAEENYSSRSAKGNKYLRRVLNQAAHAAVKKNGSHFQAVFRRLLPRLGYQSAIWAIAHRLCRVVWKILHEGVRFIEQGHELDPKAKKQRTRMLTRALRKLGYEVAIRPINPATAENAI

SEQ ID NO: 414040 - protein, 343 aa, unidentified
MEQYAGIDVSLESASICVVDSAGRIVREAKVACEPEALIAWFSKLGVSMTRIGLEAGPLSQWLYARMREAGLSVELLETRHVRDAFKAMPVKTDRTDARGIAQLMRLGWFRSVHCKSLPAQELRAILTARKLVQSKRHDLEMSLRGILRGFGLKVGQTTPRNFEARVRELVDGHPTLLVVADAMLLARAVLVEQLGKLQKRLVSLARQDMRARLLMSTPGVGVLVALTYAAAIDDPARFRSSKAVGAHFGLTPKKYQSGATDVTGRISKIGDASVRTALYEAANVILTRPVRGSSLKSWAMRVAKRAGMRKAKVALARKLAVVLHRMLANGSVFVAGKAAAKA

SEQ ID NO: 414041 - protein, 412 aa, unidentified
MEVAHPRCCGLDVHKKTVAACVAIHQQGRQHKYRKRFGTTWRELQRLAEWLKEHAVTHVAMESTGVYWKPVWNVLEGQFELVLANAQLVKALEGEKTDTKDSAWIADLLQHGLLRGSFVPGEQQRDCRDLTRLRQELVQDSNRVANRIQEVLEDANIKLSSVASDTLGRSGRDMLQAMIEGETGAEKLADLARGVLRKKLQQLQAALEGRIREHHRVMLKHLLEQWEFLEGRIGEVEEEIRTQMLPFQEAIAHLDSIPGVNETVAWTLVAELGVDMRRFGSAARAAAWAGLCPGNHESAGKRLSGRTRRGNRYLRRVLVQSAWTANRGQGTYLQAQFRRFIARLGKKRTAVAVAHTILTIAYNILDRNEDYRELGGDYFERQDPQRTTRRLVRRLERLGHHVILQPATEAVH

SEQ ID NO: 414042 - protein, 381 aa, unidentified
MDEGITYVGMDVHKASISVAMLAGGNGKAVVQWELRNEAGEVRKLVRKLRREGGGEVVCAYEAGPCGYGLQRELRRQGLACQVVAPSLIPRRAGDRIKTDRRDARKLAELLRAGLLTEVHPPSEAEEAVRDLCRCRDDARGDLLRARHRLSKMLLRRDLRYAGRAWTEAHRRWLWTLHLEHAAARAVLEDYLLALDQIGARLSELEARLLAVSQEDPYRERVGRLRCFRGIDTVTAMTLLAELHGFERFAKPRQLMAYLGLVPREHSSGGSVHRGGITKSGNRHIRRLLVEAAHHYRHRPGVGAALRRRRAGQPAAVIALADRAQQRLHRRYSRMVMGRGQPVAKAVVACARELSGYLWAVLAEVPLRPAPQPTATTVKKK

SEQ ID NO: 414043 - protein, 400 aa, unidentified
MLSIGIDVSKGKSTVCGMKPGGEIVYAPFEVQHTREEMLELVSLLRSSGEEVRAVLESTGSYHCPVVAALLENGIFVSVVNSLRMKRFCSQSIRKVKTDRIDAMQIALYGLAYWQELQPTKLPEDTYRELQLLARQYYQMTSLLIKAKVDFNALCDQVLPGMQELMSDHAGRHKLSDFVLRYHHTTHILEMGETRFRKDYCKWAEKKGYRNCERMAALIFATAQNGIPVLPNAPSTQIVITEAIRVLHTVEASRDAILTQMQALAKTLPEYSLVREMPCIGDTLAPRLIAEIGDVRRFHSKRALIAYAGIDAPPYQSGKFCANNRHISKRGNRYLRKTGYEVMQSYVMHKPANDPIFTFIEKKRGEGKSGKLAMVAGLNKFLRVYYGKVTELYRSLPAIE

SEQ ID NO: 414044 - protein, 373 aa, unidentified
MPRYSTAFGMDVHLRSTTVCALDAETGETVTRRFRGNPWGEVAEWMSGFPGPSLAAYESGYLGFAPQRELSGLGVDCVVAAVSRVPRSAADLSSKNDRNDAARMAKAILSHDISPVWVPSPEIEGLRDLAGAHDAATARLAAAKQRLLAFLARRGYAYGGTTPAGNPRRYWTYDFLRWLDKVRPADDGGIRALAALRSEVEAASETRDDLLAEYRAAVAAGPLSAEVEALQSIKGCGFALAAAFASEVGDFSRFRSGRQVTAYFGLAPKQRSSADSVRLGGISGAGNALVRRLAVEGSWSYVQASHQPKLMPKGSGVPLEVRMHGRKGSERLLRRREEMLARGMPQAKANAATAAELVRWLWALGAMCREATE

SEQ ID NO: 414045 - protein, 349 aa, unidentified
MADKLIVGIDVSKDWLDLCASNGAGVERIANTREAVAAWLERVAPGLIACEPTGGYERTLIAAARERGIAYLRVHPNDVIAFRKSRGIKAKTDAIDARLILAFVCDRLARAELRTSLIGDDRLQALAARRRQLVDALQAERCRLDAAALPTVRTSLEAVIAVLRHSLETLEAELADAIAAHPQTAELAKLLQTIFGIGPVAAITLIADLPELGRLSAKQIAALVGLAPHTKRSGKTRYRETTGHGRPGVRRVLFNAARAAVRHPSPFKDFYSRLVTDNRRPGKVALTAVMRKILITANAVARDREPWHGCVAVGTPGRPHAEQTAHRAGRVKAAAAPRAVARSASLDAA

SEQ ID NO: 414046 - protein, 342 aa, unidentified
MESTTIAVDVAKEVLEVAVSIRPGQVSQQKRLSRTAFMKFCTDQPPATVLLEACGSAHYWARRLQTLGHRVVLLPPHATRPYVFRNKTDRTDTRGLLEAYRNEDIHPVPVKSVSQQALTALHRLRSTWLAARTARLNTVRGLLREFGCIIPVGAHHVLPRVWDLLADPDSGLPDALRPALAEACTEIRQLEDRVRLVEHQLEALADQTPAVARLRSIPGVGLITATALVAFVGDVQRFPSGRHFASYLGLTPREHSSGLIRRLGSISKRGDVYLRMLLTHGARAILWKAKSRPNPDRLRAWALQVQRLRGHNKAAIALANKLARIVWAVWKHDVDFREVTAA

SEQ ID NO: 414047 - protein, 416 aa, unidentified
MEVIHSRCAGLDVHKKTVVACAITPSPQGGWHKETQTFTTMTGELLKLSDWLLARECTHVAMESTGEYWKPVFNILEASFEVMLVNAQHIKAVPGRKTDVKDSQWIGELLQHGLVRPSFIPPIAQRDLRDLTRHRTNFVRERVNLVNRIQKVLEGANIKLAAVVSDVMGVSGRAILEAIVLGQTNPAIMAELAKGRLRSKREELIQALEGRVRPHQRFILAELLCQLDSLDETIARFDQEIQRYCDPFEPIIELLDTIPGVGRTTAEMIVSEIGVDMSRFPSASHLAAWAGLAPGNYESAGKRLSGKTRKGNQTLRSGLMQSAHVASRSRTYLAAQYRRLATRRGKKRATMAVAHSILVIAYHIIQRHEPYRELGVNYFDQQRPETMTKRLVKRLEQLGHRVTLESQPTTQVVSCG

SEQ ID NO: 414048 - protein, 342 aa, unidentified
MEQSIRCGIDIAKLVFQIHGVNAKSGETVMVKKLARHDMLRFFANKPPMLIGIEACGGAHYWARELTKLGHTVKLMSPQYVAPYRRGGKNDANDAEAICEAVARPNMRFVAVKSESQQAVLVMHRMRDQLVHERTALMNQIRSYLHEFGIVIAQGRAPLAKIFPIIAEDMQLPLLLRQSIAELADRLADLERRIQTLDQRISAWSKQDNAAKALLTLCGVGPVTASAAVATAGNVSVFKNGREFAAWLGLVPKQNSSGGKSKLGAITKRGDRYLRTLLVQGARVVMIAAQKAKLTQKDNPMFDWIYKLLERRPSNVVAVAIAAKQARMLWAIMKKQQNMVMA

SEQ ID NO: 414049 - protein, 399 aa, unidentified
MHDGYGVYLGLDVGKGDHHAVGLASDGRRLHDAALPNTETRLRQLFDKLARHGRVLVVVDQPASIGALPVAVARACGHQVAYLPGLAMRRIADLHPGSAKTDARDAYVIADAARTLPHTLRRVDVGDETLAELEVLVGFDDDLAGEATRVSNRIRGLLTQIHPALERVLGPKVQHKAVLELLSRCGGPVGLRKAGRRKLLSIATVHAPRMGDRLIAQIMTALDEQTVTVPGTVAAETILPRLADSLRDVLRQRDQTAAEVERMLDAHPLAPVLTSMPGIGVRTAARILLEVGDGTAFPTPGHLAAYAGLAPVTRRSGSSIRGEHPPRGGNKNLKRAFFLSAFAALADPVSRAYYDRKRAEGKRHNAALICLARRRCDVLFAMLRDKIPYQPRPATPIAA

SEQ ID NO: 414050 - protein, 428 aa, unidentified
MKYNTQNAKIKSITEETLIVGIDVGSETHFARAFDWRNYEYSKKPLEFSNTEAGFMTFKAWMEDIADKHGKDVVIPGMEPTGHYWFNLGAYLQDNGMKPVHVNPHHVKKSKELDDNNPNKNDRKDPKTIAALVNEGRFSYPYIPTGIYAEIRNLSNLRLQTQEEITRIKNRIARWFRIYFPEIKDVYKNPDSVSGLMVLKVAPLPQDIVKLGVDGINKIWRDAKLRAAGPKRAKTLLTAAEHSIGSQEAPDSARIELKYLLNDYEIYRKREEDLMGMIEQKLLEIPYIDKLLEIKGIGMKTVSGFVAEVGDITRFDDPKQLQKLAGYAIVECSSGKHKGESHISYRGRKRLRYVLYEAAISLIARNEEFKEVHRYYRTRKENPLKKMQSVIAVACKALRIFYMILTKGVSYDGAKMLQDIKRPQMLAA

SEQ ID NO: 414051 - protein, 408 aa, unidentified
MTVVGIDVSKGKSMVAAMKPGGKLVAAPYEVRHSDIELSHLALDVLCMEPDTRVVMEATGRYHEPVAAQLHSAGIFVSILNPLLIKQSGAGSLRKVKSDPKDALKIAKYGLDNWSTLREYTPMEAIRQQLKLCARQCDLYNKSIVMLTNNLISLSDKTFPGVNELFSSPEKADGHLKWVDFYRTFWHCDCINRMSPDTFGERYQKWCKRKGYHFSADAADALYAASCGLYTTLPRDNNARLLVTVAADQLIALRENQSKLEAEMLNFCKQLPEYETVMAMYGVGKSTGPHLMAELGDVRRFLHRSSIVAFAGVDPGVVGSGKMQLSSVATSKRGSPQLRKALFQVVSTYVKCKPENEAVYQFYTKKRDEGKPFFVCTTAAANKFLRIYYARVKECLNAAESATQVEEG

SEQ ID NO: 414052 - protein, 349 aa, unidentified
MTEQRISYAGEQVYVGIDVHKETYTVTCVCHKQIVKTATVPAEPASLAASLLRWFPGATLTSAYEAGFSAFVLHRTLTQVGIPNIVVNPASIAVAANDKVKTDRRDSKRLARDLADGRLRGIYVPTEAEELARLLPRTRAQIVKHRATIARQIKAKLHQFGLIAPSHRRLISSRYLREIATWPLPRELDVSLTLLAEQWRFATRQLIEMRRLLRDQAKAQEGIEKVYRSVPGIGEVVARTFATELGDMTRFANERALFSYTGLTPSEYSSGTSVRRGHMSRQGSSRVRHLLVETAWRALPRDAVLKEIFDRIAATRGKKRAIVAIARRLTSRIRAWFRQGTTYAVGTYA

SEQ ID NO: 414053 - protein, 370 aa, unidentified
MKKNSTRTQSPKRAAARNTGPITIGLDLGDKTSRYSVVGDHGELVSEGSVATTRKAMAQRFGGLKRCRIAMEVGTHSPWLSRMLTGLGFEVIVANARQVQLISASSRKNDRMDAHLLARLARVDPELLRPIRHRSERAQANLMTIRVRAELVEARTRLVNAARGFTKALGERLPACDTDSLGMEKLEALPPALREGLQPLLEQIEALTAQIKKLEGKIEQIARIEYPETQLLTQVHGVGTLIALTFVLTVEDRERFQKSRDVGCYLGLRPKQSESGQSQPQLRITKEGDRYLRTLLVQGAHLIVNRRGPDTDLKRWGVKLAERGGKNAKKRAIVAVARKLAVLLHRLWVCGEVYEPLRNSRPAATSNKAA

SEQ ID NO: 414054 - protein, 351 aa, unidentified
MERYLGADVHAASVTFSVLDASGKQIRRDVVETNGKALVGYLQQLAGNLHVCLEEGEWSQWLYEILSPHVTELVVYRGEWKPGLKSDAIDAHGLAEKLRTGRIDRPVFKDARLFTALRDRARAYTMLTRDVARVKSRLKSFFRARGLPCAGEALFKPAERAQRAAALPVATREAVDLVGRELEQLSALKAEAEASMLRESHRHRISRVLETAPGLGPVRVAQLLPIVITPYRFRTKRQFWTYCGFAVVTRSSSDWVLEQGRWVKTRVAQTRGLNFNHNRMLKAIFKGAATTVIAHCGPNPLRQGYDRQLANGTRPNLAKLTVARQIAAIVLAMWKRQEVYDPGRGCELARR

SEQ ID NO: 414055 - protein, 411 aa, unidentified
MEAIIECACGLDVHQSSVVACVITGAAGRRASRETRTFGAMKRDLASLREWLLHMGVTHVGMEATGVYWQPVHAALEDRFTVIVGNASHMRNVPGRKTDVKDAEWIADLVRHGLVRASFVPPPPIRVLRELVRHRKALVGNQAAERNRTLQLLESANVKLAGVMSDVFGVSGMLMLQALAAGQAAPAAMADLAKRRLRRKVDQLVLALDGHLAEHQRLLLSLHIRRLAEIDRDLAETEAAISIAMRPFAAQQAVLTTIPGVDALTAATIIGEIGVDMSIFGTPQRLAAWAGVCPANHVSAGKQKRRGTRKGDTFLKAALVTAAVSASQTKGTYLRDKFHRLKARMGTKKAAVAVAHKILVAIFHMLQRGIAFVDLGGDYLDGLNKHRTAKRLVQRLDRLGYDVILRPKAAA

SEQ ID NO: 414056 - protein, 412 aa, unidentified
MEALYSRCCGLDVHKSSITACVLLEQSQKRGKHIRRFGCTTRELRELVTWLRELSVEHVAMESTGVYWKPVWNALEANFHVVLANAQHIKAVPGRKTDTKDCQWIAELLQHGLLRSSYIPSVIIRDLRDLTRARTTLSQEHSRIASRIQKVLEDANIKLASVASNTLGKSGRAILQAIIEGEQSAERLADLALGHLRIKIPQLQAALEGQVRDHHRFLLQSLLRQLHFIEAEIALLDTRLDQQEKEHVELGEALSRWITVPGVDRVAAWSFIAEMGTDMTQFPTAAHLASWAGVCPGNNESAGKRISSKVRKGSPWLRRMACQSAWAAARTKNTYLSSQFKRLAARRGRKCAIIAVAHSMLVIGYYLQRRRCTYTDLGSNYFDRLHAEGLKRYLVKRLESLGHSVILEPRTA

SEQ ID NO: 414057 - protein, 312 aa, unidentified
MEEYNAFIGLDVHKDSISVAIADAGRDGELRMYGTIVNSPDAVSRLMRKLVQRHGKIEVTYEAGPCGYGIYRQLTEMGICCRIVAPSHTPKRPGERVKNDTRDALMLARLLRAGELTYVWVPDATHEAMRDLVRARQVASQDVRAARALIRMFLLKHGLHCKSKAWCLRYRKWLTSLKFDHTAQKFALQSYINRLEQAEARKAEIEDQMADLIPGWALAPVVHALQVFKGIGMVIATTLAAEIGDFSRFASPRKLMAYLGLVPSEYSSGSKQRPGGITKAGNKIARVMLVEAAWLTNGPQGRCRSHAETARL

SEQ ID NO: 414058 - protein, 342 aa, unidentified
MKIIGCDFHPSFQQIAMVDTETGEHEEKRLTPSEAVLFYSQLQGPVVIGMEASGNTLWFERLLADLKHQVRLGDASKIRAMEVRKQKTDRRDAELLLKLLLEGRFPEVWIPSLEMRDARQLLLHRHKLVGMRRQVKNQLQHLALNQGVQKKRKLWTTAGRQLLEELPLIGWTARRRSDLLRWLDELNQAIAELDRAVEQEANQHAAARLLQTHPGVGPVTSLAFVLTLGKIERFQHSRQVVSYLGLNPAENSSGGRQRLGAISKQGNPMLRSLLVEAGQSASRRDKELKRAYQRLKQRKHSAIAKVMVARKLAVRLYWMWRTQQPYSATRMQGSPCHLVVAV

SEQ ID NO: 414059 - protein, 369 aa, unidentified
MAFFIGVDLHKTQFTVHVRTEEKVESLDQIKQYPTTTAGYAEFLSRIETYKATGAAVKIGVESTGNTRFFKNQVEKAGAEVTVINTLKFKVINESTKKTDKHDASTISEFLSKDMLPESYLCGKETENIRRLLKSRERLVRSTVGQKNEIHALLVSLGLSDELRSLQSKKGRQKILDTLESDNDYVLEAQSVKLMFEIIERIEESVKIIEKQISELTKDDEMVNRLMTIRGCGKITAWTVRAYTEDISRFATAKKYAAFCGLVPWVQDSNETIHHGKITKRGPQELRTCFVQLVMGIRRCKDTSEWRMMQRYEYMKKNKGSGKSIVAAARKMAEIVWAMLNDKQDFDSAKMIGKYKPMILADEALTAMN

SEQ ID NO: 414060 - protein, 412 aa, unidentified
MDVVYTHCCGLDIHKKLVVACLLTPGAHGQPQKEIRSFGTMTADLLELADWLQAAGCTHVAMEATGVYWQPLYNLLEEHFTLLLVNARHIKAVPGRKTDVRDCEWIADLLRHGLLRASFVPDRAQRELRALTRYRSALVRERTAEVNRLQQTLEGANVKLAAVATDVLGQSGRAMLEALVGGATDAAALAELARGKLRAKRPQLVQALTGRFGPHHRFLVAEQLGHIDELDERIARVSAEIAERMRPFAATLAQLDAIPGVGQYTAEVLVAELSTDLSRFPSAAHLASWAGMCPGNHESAGKRQSGKTRKGNPYVRAALIEAAQAAGRKKGCYLAAQYRRLAHRRGKKKAAVAVGHSILVIAYHLLTRGTPYEELGGNYFDERERQAVKRRLVQRLEDLGYEVTIQPATPAA

SEQ ID NO: 414061 - protein, 366 aa, unidentified
MDKEYIGVDLHSTQVTVHRIIIGEKGEVERRKSQYPIEQMETHFIGSLHPGCAVCVEAGSGSHTLARMIVAAGARAFVVNPLSMPQIFMTAKKTDSIDAKKLADCLKQHLENNDPNDGFPEVTVADEDTQRLRMLISQYQRVNADMTALKNNLYALFRQWLVQVDKGFLVERLERYLEHPRLPPEVGIIARQEKHRYEELDAFKAQLRSMIESIGVIRYSEQVGLLIGVSGISVFGAVCIMADIITIDRFRTSKNLVSYLRAAPRVDASNNTIHIGRLNKAGRKMAFEILLQSVAHLVDGNPNLLRYTKHAVGKSKNKIRAAVVGRTIRQIFYILKNKEPNWFLQEGTFSIKKRKFERILFSQNIA

SEQ ID NO: 414062 - protein, 376 aa, unidentified
MTKLRFLGLDVHAETIAVAVAEPGGEVRSIGTIPNRVESIRKMIGKLGPVKELRACYEAGPTGYVLYWQLTALGVECQVVAPTLVPVKAGDRVKTDRRDAEKLARCHRAGDLTAVWVPDAAHEALRDLVRAREAGKKDQLRARHRLSKFLLRHGCRHPKGMTAWTKKHLEWVKSHVHFDQPALEAALQDYFHEVEHAAARIERLEKSLDEAISKAPEQIRAVIEALQALRGVAQITAATIVSEIGSFSRFEPRKLMGYSGLVASEHSSGNRLKRGAITKTGNAHLRRVVVEAAWSYQRRPWIGGYLLRRQRSLNLSDEVKEIAWKAQYRLHKRYTKLTAGGKNKNQTVTAVGRELLGFIWDIAVKTERAWEQTKAA

SEQ ID NO: 414063 - protein, 395 aa, unidentified
MFIVGIDIAKRSHEAIIIAEDGQVVRKAFSFRNNCTGYNLLLEQVRRLTLVKSQIVFAMESTAHYWLALYARLLKDGYAVMVLNPIQSHSLRELYIRKAKTDARDSLIIADLVRFGRCKASNVPQDKILALRELCRSRAYLVDMAADLKRKLIALLDRIFPEYESLFDSVFSKASIAVLSKYSTPPKVKNANLRKLTDILMESSNGHFGEWKAHQLKEAACSSFGIDDSGGVYSTLLGMFLEQILSLTAQADSLEKQISVFFQEFNNPLTSIPGVGTVLAATILSEIGDITRFSSADKLLAYAGLDPSVKQSGEFKSNQNRMSKRGSPYLRRAIWLASTVAVHRDPMFQTYYEKKISKGLHYMNVIGHVSRKMTAVIFAVLRDGQPYQPILHSAG

SEQ ID NO: 414064 - protein, 341 aa, unidentified
MDHYAGIDVSMEYSSVCVVDGTGKIVREGKVASEVGALIGWFGSLGLNLVRIGLEAGPLSQWLFAGMRDAGLAVELLETRHVRNAFKTMPVKTDRKDARGIAELMRLGWFRPVHCKSMEAQETRAILTARKQMQSKLHDVEMSLRGILRGFGLKVGKTTPKTFEGRIRELVAGHPTLETVAGGMLSARAALLLAFNGFEKRVRVMARQDARARLLMSIPSVGPIIALTFAAAIDDPARFKSSKSVGAHFGMTPKKYQSGETDYSGRISKAGDASVRTSLYEAAHVMLTRPVKGSALKSWAMRLARRAGMQKAKVALARRLAVIMHRMLVEGKPFNLAAAAA

SEQ ID NO: 414065 - protein, 421 aa, unidentified
MKPQPSEAFAAFVGLDWADAKHDICLQTSSSAHREFLRLDHRPEAIDAWVQSLRTRFNGQPIAVCLELNKGPIVSALRQYEFLVLFPVNPLTVAKYREAFTPSRAKDDPTDAELQVELLLKHRDKLTPLVPPSPTMRALAQLVEHRRRLVGDKVRLTNRLTSALKNYFPHVLPWFQEKDTAIFCDFLSRWPTLKAVQLARRATLESFFRAHHVRTADVITTRIEAIKNAVALTTDEGVIAPHTLLVQALVAQLRVTLQAIADFDTAIAQRAQAHPDFPLFDALPGAGAVFAPRLLVAFGEQRERFPSAEELQKYAGIAPVTERSGKKSWVHWRWQCPTFLRQTFVEWAAESLRHSFWAQVYYQQQRDKGKSHQAAVRALAFKWIRILFRCWQDRTPYDESTYLQALHRRGSSLIQNLAKSS

SEQ ID NO: 414066 - protein, 408 aa, unidentified
MQVLYPRCAGLDVHKDTVVACVRCVSEPEHHETRSFATTTRELLALGEWLVEHGCSHVAMEATGIYWRPVWHVLEGQAELVLANAQHIKNVPGRKTDVNDAMWIADLLAHGLIRSSFVPPQPIQELRDLTRTRKQLVREISQHSLRIQKVLEDANIKLGSVLSEVLGVSGRAMLGAIIEGESDPHRLADLAQGTARRKHDELVEALHGRIRPHHRTLLRLHLNLIVALEHTVGEVDAAVGKSLEPIHQRARLLTTMPGISEVSAEVIVAEIGIDMTRFASPGHLISWAGLCPRNDESAGKRRSTRLRKGGTWLKTALVTAAWAAVRTKASYLRAQFQRIKARRGARKAIIAVAASMLTSAYFILRDGVPYRDLGPTHFDRQHRDKTVRRLLRRLHDLGYSLPHQLTPA

SEQ ID NO: 414067 - protein, 344 aa, unidentified
MPSIVGGFDIHRKQLTFDYLDTVAGEVRRGQITPADRGHLRSWLAQLENPQDAAFAAEACTGWRYVTEELARAGVQAHLAEPADTAAARGRKKRAKTDRADARLLRDLLAEGRLPECWIPPEHIVECRALLECYHDLRAEHTAWVQRIHATLFHQGAPPFQGLRQADGPGQLTALAREHLSPAGQAQIAVCLRVLAALEAELTAMRHRLLAAAAHLRGVKALTGAIYGVGPITGLALTCWLGGAGRFSSARKAVRFAGLDITVYSSDGKRSPGHLSRQGPPVLRWCAYEAGKVSAHATAPDHPYYAAVKDRAGGKRAALAEARKIIRRACHILTELGDDAFTTG

SEQ ID NO: 414068 - protein, 376 aa, unidentified
MNNHSEAFVAFDTSKLRNAVAIADGDRQGEVRFLGEIDASPAATAKLVKKLSTKYPRLMFCYEAGPTGYELYRQIKNLGHECIVAAPSKIPKKPGDRVKTNRRDAMSLAKSLRSNELTAVWVPDRHHEAMRDLVRAREAAMLDLRSKRQQVSAFLLRHGQHYPVDKKTWTKAHMSWLASQKLEYLEQRIAFEEMMLAVRQAQERLDRLEQAIRAAVPDWSLAALVTTLMAMRGIDLIAATTFLAEVGDLSRFQNPRGLMDYLGLVPSEASTGDKIKRGPITKAGNRRARRMLVECSWSYQHPPRVGREKQQKVDAAPAAVREIAWKAQCRLNRRYRALIRRGKLKTVAITAVAREFAGFIWAIGREITITTRGAAR

SEQ ID NO: 414069 - protein, 327 aa, unidentified
MTQTTDVVGIDVSKARLDTYALASQQARPFGNDATGHGELVAWLKRLSVGVAVLEASGGYERAAAQALRKAGLIVHIVDPKRVRDYARATGQRAKTDRIDARMIAEFGALVLLAKPAALAGADDPARQGLADLVGARQALVDHRATLRQQADVLPAGLAKREMLAMLKPLDHRIAVLDRHIAAAIAKHQPFAALARRLDTVPGLGPVSIAALIAWLPELGQLDRRQLAALVGVAPFADDSGQRIGQRHIQGGRMKLRNLLYMATLAAATRHNPVLKACYRRLIENGKKPKVALVACLRKLLTILNAMVAHQQDWNPTARPTPQPTAP

SEQ ID NO: 414070 - protein, 375 aa, unidentified
MSKIRFVGLDVHADSIAVAVAEPNGEVRSFGIITNRSEAIRKLLHKLGPAEQLRVCYEAGPTGYVLYWQLTALGVRCEVIAPTLVPVKAGDRVKTDRRDAMKLARSYRAGDLTPVWVPDAAHEALRDLVRAREAAKRDQLRARHRLGKFLLRSGWQRPEHLKTAWSKPHLEWIKTKVHFAQPAQEVALADYVHEVEHVAMRLERLDRAIQEAARLAPPRMRAVIAALQALRGVAEIAAVTIVAELGEISRFRTPRQLMAYSGLVPSEYSSGTTRRQGSITKTGNAHLRRVIVEAAWAYQFRAWLGGYLLKRQVGLSPEIKDIAWKAQNRLHLRYRKFLARGKNKPQIVTAVGRELLGFIWAIGVKVEAEQQRIAA

SEQ ID NO: 414071 - protein, 403 aa, unidentified
MVAVMIGVDPHKGSHTAVAISPAEEPLGELRVRACAGQAERLLAWAAAWPQRTWAIEGASGLGHLLAQQVLAAGEQVVDIQPKLGARVRLLATGAVNKNDPNDARSVAVAALRSPARRQVQPEDHAAVLKVWAKRHRDLGRARTQVVCRLHAVLCELVPGGVSKRISAPQAGRLLEGIRPAGAVGAARCELAAEFLADLRRIDAQMRDAKKKLTIAVRASGTTLTSVFGVGPIFAATVIGDVRHVSRFADRDHFAAYNGTAPIEVSSGRRKIYRLSRRGNRRLNHVIHMAAVTQVSHRHSDGRAYYERKLAEGKTPKEALRSLKRRVSDAVFAQLQADARRAAAGPALREPGRATGERLHRPRGRLTPPGTGSSAKPLPGPATTLRPQPSCRSGRNEKLRRTT

SEQ ID NO: 414072 - protein, 444 aa, unidentified
MSAESPGPQSGSQSPSPTPSQQFSQLTHFCGFDWARRADHACVVVDKSGKVVLELSFADDAEGWDSFGKKLSQVAEIASAGVAIETSCGPEVERLLEMGLAVYPMNPKAASRYRDRKSVSGAKSDLADAFSFADGLRTDGHGWRRLRPLDPLTQELRILCRDEVALIEQRTALVNQLRTTLREYYPAALEAFEQWTQAPAWRLVIAFPTPRELAKAGKGKWNRFLHANKIYRPETAQKRLEIFARADTFASPNSAVTAAKSMLAVSLCEQLMTLERQLDKYRQRIQELFDDHPDHDLFGSLPGAGPKLAPRLMSELGCDRSVFGSAESLQCFAGTAPVTKQSGRTRIVQFRRACSMSLRAAVHQWCDCSRLKCAWAQAYYQKKREQRMNHAQALRCLGQRWLKILFKMWREKKPYDEARHTLDQVKHGSWVVKLLPESPAAQPA

SEQ ID NO: 414073 - protein, 421 aa, unidentified
MRKADTGKVKVVKDDTLIVAIDVGMEMNRGYCTTPDGRSTKPFKFDNTREGFDTLWGMIMTSKDRFKCNEVIVGYESTGPYGEPMVHYLMKKPVRVVQVNPMHTKRVKEINDNSPLKTDDKDPRVIADIIKLGRSLSIVIPEGDAAYLRRLNNSRERHVRERTALVNQLQQLVFLLFPEFKKVIKDIKCRTPLYLLKKYPTPEAISVLETHVLGEEMRKKSRGKFREHHADMLINLARNTIGIREGVSGLSMDIRHILVQLEMLKDLIAEIESEMEIALGRIPYSSKLLSIKGLGVVSVAGIIGEIGDFKKFGTQPEIMKLAGLDLYEISSGKMKGQRRISKRGRSLLRKILYYAAIQTIRKNGILHDYYTRLTDRGMKRMMALVAVARKLLGIIYAIVRDDSEYSVNFESMKRQVIKKAA

SEQ ID NO: 414074 - protein, 408 aa, unidentified
MRVMNCAGAGLDVHQKTVVACTLVGEANIQPHLEKRTFGTTTTALLELSDWLKQQGVTHVAMESTGTFWKPIWAILEGDFDLTLCNAAHIKQVPGRKTDQKDAEWIADLLRHGLLPKSFVPALPQQDLRELTRYRAQVTADRSAVSNRIRKLLEGANIKLGSVASDVLGVSGRRMLEALIGGETDPEKLADLAVGSLRDKRPQLVEALRGRVRPHHREMLRLLLAQWRFLDTLIGDIEKDIEEALGPFAAAVELCETIPGVSTTAARALVAEIGARMEQFPTSAHLASWAGVCPGNNESAGKQFSGRTRKGNRWLKRTLCQAAWAASHTRRTYLASQFRRLAAKRGNKRAILAVAHSILVVAHTLLTRNCAYQDLGADYFDKIQAEGLKRFCIRKLEALGHRVTLEAA

SEQ ID NO: 414075 - protein, 405 aa, unidentified
MRRTDHRSAHPRTAAQGHDTSLFVALELSRSSWLIGSSTPGSDSIGKYQVAAGDTTALLGLLNRLKARAERYCHGTVRVVSIYEAGLEAFWVHRLLDANGVESHVVDPASIAVDRRSRRAKTDRIDVEKLLDTLMDWARGARRVCSMVRPPSPAEEDGRRLIREREALVIERTRHVNRIKGLLATQGIFGFEPMHRDRRKQVEQLRGWDGQPLPPRLKAELARELNRLELVISQVAAVEDERDRALQAKQHLVAVHASEGTTANPASADHAGPLLLRLKGIGPEFASVLSLEGFYRNFANRREVAGYAGLAPSPWKSGGIDVEQGISKAGNARLRKTMIQLAWLWLRHQPGSALSQWFRERVGERRGKIRRITIVAVARKLLIALWRYVTLGLIPEGAELKALKV

SEQ ID NO: 414076 - protein, 338 aa, unidentified
MSILYVGIDLAKNVFAVHGVNEAGAAELRQPKVTRGKLHALIASLPPCVIGMEACSGAHHWARLFQAHGHTVRLMAPKFVAPYRMSGKQGKNDAADAMAICEAVQRPNMRFVPIKTEEQQSRLLVHRARQGFVAARTATINRIRGLMSEFGIVLPLKADVVRAEARNHLEDLPGYANTVIGDLLSEVAHLDERIKQYDAHIHTMARDCALAQRLMQLTGVGETTSTALVAMIGNACDFDNGRQLAAWLGLVPGQYSSGGKTRPGRITKAGDAYIRSLLVLGARAVLNAAANKTDSLSRWAMQLRQRPGYWKAVIAIAAKNARMAWAVLTKGEAFKLPA

SEQ ID NO: 414077 - protein, 516 aa, unidentified
MSRLASRRPRVSEATQPAPSQPTSPPPESASPIPALDSPALLGLDVSQAEVVACLFLPDGKIAARWSEPNNQPGAQALAERLVSLGRQHGFRRVRIGLEATNLYWWHLACFLKGTPSLSTLSPEVYLLNPRLVSGLKKAYSDRGKTDRIDAWFIAERLRIGRLPAPFEADLLYAPLQRLTRFRFHLAKTLAREKNYFLTFLFLKFSAFSQVDPFGDSFGATSSALLEEFTTEELVATPLEELARFLDAKGRGHFADPTELAETLQRAARDSYRLDKLLDEPLSLILGTTMATIKTLQRQIQEVDKTIARELAALPLERRIIRSIPGLGPVWTAGLVAEIGNVHDLDNEASIAKLAGLVWHPSQSGTFQAEDTNLAKSGNAYLRYYLVEGANSVRQHCPEYREYYEAKYAQSPKHAHKRALVLTARKLVRLIDTLLRAGMAYQDPETRQDWKEASAGALARTGRFLLPRDHVSSRPNSLKLPLDFSPQVLRTHLAEIARLSTPLTVVCLALGRSPMG

SEQ ID NO: 414078 - protein, 361 aa, unidentified
MNTIAKKREKKKLVQVDFTGKACWVGVDVHKLTYAVAILGEDGQRLEFTTAAGPKKLLLQLLKMGMAIKALTYESGPCGYGLAWACQEMNIPVLVVAPSRVPRPVSKTGKTGRLDSMKLVEFLAREMLKGIAIPSREEFALREIERVRQRFVKQRRQIRQSIRAFLLRNGLEEPSGLDKWGITPLQALREMPLSLNLRFSLDSYLEEHTTILASLAKITKQLEKTTIELGHGERIKNLRTIPGVGPTIAHTFTSEIFRPERFKRAEDICAYVGLAPMTSHSGSGKEKAWLRQVGQNYLRSILVESAWRLVAVEETYRDFYNRIRSKTGLAQKGIAAVARKLLVLIWRISIEMRPYRPATVL

SEQ ID NO: 414079 - protein, 357 aa, unidentified
MDVHKDSIAVAYVAHAHGAEVTSLGTIGTRQCDIDNLLRKMPSKAKYLVFVYEAGPCGYWLYRYLTKKGHVCWVVAPSLIPKKAGDRVKTDRRDAVQLARLMRSGDLTPVYVPTVEDEAIRDLSRAREDALRDLKSAKFRLKAFLLRHDIRYTGRATWGPAHLRWLSEVVCATPAPQIVFQEYVRAVNEHTERLQRLEQELQDHVKTWRLQPVVEALQALRGVQFTVAVTLVAELGDLTRFENPRQLMKYLGLIPSEYSRGSGDVRGRLPKLATPMPVAPWSKAPGPTGIPPKSVATYNSGWSSSPSRSKISVGRRKYGCANAFDACWPAANMSIRWSLPLPGNWRAFCGLLPNRCR

SEQ ID NO: 414080 - protein, 354 aa, unidentified
MIIIGCDYHPSFQQIAFVDTDTGEFQERRLQHREEAEKFYRDLAAQGMKVRVGMEASGHARWFERLVSELQLELWIGDASEIARKRERKQKTDRQDAQHILQLLMENRFPKIWVPSWENRDLRQLLWHRHRMVQARTRMLNQLQAVALNEGLCCKKKLWREAGREQLESFRLAPWASQRRHDLLELLDRMNPTIAKLTQAIDREVEKCPGARRLQTHPGVGPLTALAFVLIIGRADRFQCGKQIAAYLGLVPLEDSSGERRRLGHITKQGNSLLRFLLVEAAQVTSRSLPEWRSKYVHLTMRRGRKIAKVAMARKLAVRLYWMLRKEWDYGQLTKFGSHAGKPGSGDGVKSNTE

SEQ ID NO: 414081 - protein, 404 aa, unidentified
MYNAVGIDVSKGKSTVAVLQPGGTVIRKPFDVSHTSPNLNELADYLSSLDGTTKIVMECTGRYHEPMVKALSEAGLFISIVNPHLIKNFGNNSLRKVKSDPADAHKIARYTLDNWTELRQYSSMDSTRTQLKTLNSQFSFFMKQKVAAKANLIALLDNTYPGVNKLFDSPTREDGSEKWVDYAYSFWHADCVRKIGLKAFTERYMSFCKKHHYIFQQDKPEKLFNASKELVAVFPKEKTYKLLIQQSIQQLNLASEHVERLRREMNELASTLPEYSTVMSIYGVGKTYGPQLIAEIGDVSRFTHREALTAFAGVDPGVDESGQHKSKSNRASKVGSARLRKTLFQIMTTLLQNAPEADPVYRFLDKKRSQGKPYYVYMTAGANKFLRIYYGKVKECLRNLEQTE

SEQ ID NO: 414082 - protein, 361 aa, unidentified
MLTITIGVDLAKSVFAICELDEYGRVRLRRELRRDAFAAWLAQLPAGTVVAMEACSGAHHWGRRCLAFGLQPKLIAAQFVKPFRKSQKTKNDRNDAEAIATAARQGNMRFVPIKTIDQQTRLSWHRAREGYKTEALAIGNRMRGLLAEFGVVVAKSDAALRTLLADLSAHALPEPLVEMLGDLNTHWQMVRERVTAYGKRIEQHARTDVRCKRASAITGVGALTTDALVAMVGSAQEFRNGRQMAAWIGITPSQHSSGSRKLLGKISCRGDGYLRTLLIQGARSSLQRAKAVTREKATPEQIWIMSLAARLPFGKVLVAIANKHARQLWAILARGEDYDPNAWIKHPMVQRAASKRAANAI

SEQ ID NO: 414083 - protein, 347 aa, unidentified
MRYLSQTAASYVGVDLHARTLFVCVLDQAGQIKLSRNMPARPEPFLTAVEPFVPDLLVGCECVHSWYWLADTCRERNIPFALGHAFGIKAVHASKTKSDAHDAEVLARLLRGGNFPLAYAYPHERRGLRDLLRTRLRLVRQRAELYGHIHTVRRQLNLDPVGSDVKYKSKREGVAEDITDPHTRRGVETRLNLLGPLDTEIRRLERDIEVAAEEHYPTELAALQTIPGVGRIISMTVLLEIDTVTRFDSRQQFCSYARLIAPKQESGGKVVGVGNRKAGNAWLKWAFSEAAVLSAQKDDRMKKCLAKLQSKHGSGKGLSIFAHKLGRVVYHLLRTKQVFDVDRFVRG

SEQ ID NO: 414084 - protein, 477 aa, unidentified
MVMTREPEEILDEPHEQIMERVCAIDVAKDSGKVCVRLPAESGSGRRVSKVWDVPARTKAVIELGDHLACQGIQKVTLESTSDYWRIWFYLLEARGLDVQLVNARDVKNVPGRPKTDKLDSVWLAKLTEKGLLRPSFVPPKQIRVLRDYTRLRVDLTAERTRYWQRLEKLLEDALIKITAVASRIDTLSVRDMVEALIAGQRSPRILAGLARGRMKLKHADLVEALTGQFDDHHAELARMILDQIDTLTARIDTLTARIDTELATMPGAADPGPDPDPDDPGPRPNGQAEPAPVTSVGHDTASTTVGQWTVPRSALDLVDILDEIPGVGRHNAQAIIAEIGLDMSRFPTAGHLVSWAKLCPRTIQSGAKSSAGKTGKGNRYLRAVLGDAAAGAAKTQTFLGDRYRRIIKRRGKLKALVAVARSILVIIWNLLAHPGLPYHDLGVDYHDKRIDTERRTHNHVRQLEALGYTVTLTAAA

SEQ ID NO: 414085 - protein, 422 aa, unidentified
MNEQESVVYSVYVGIDWADKKHDVCIFSRDSDTREFDVIRHCAEAIDTWVEELHRRFGGRIAIAIELSKGPIVSALQKYDFIDLFPINPSTLAKYREAFQPSKAKDDPTDAELAVDMLLRHSEHFKVLKPQSVEMRALATMVEQRRRLVSERGRITNRLRSALKQYYPQVLEWFEHIDTPLFCAFVKRWSTLAQARRARVNTLKRFFHAHHMYRAGVVESRRQAINAASPLTLDEAVIVPYRMQALVLVEQLELMFKAIDQFDDEIAKLASQHPDYALFEPLPGAGPSLTPRLMVAFGEQRERFSSAADVQKLSGVAPVTERSGQKHWVHWRLQCPTFMRQTFVEWAAQTINKSYWAGAYYRQQRDKGSTYQAAVRSLAFKWIRILYRCWQTGVAYDESRYLKALERRGSPLVKRREMLESA

SEQ ID NO: 414086 - protein, 368 aa, unidentified
MTSIHDPEAVHLGLDVHKDTISVGLLEPGCQIPVVDKIFHDEASVRRLIAQFPDRARLRVCYEAGPTGYELARLLASMGVACEVIAPSLIPTAPGDRVKTDKRDCRRLARLHRAGELVAIRIPTVAEEAVRDLCRARADLVDDRDRARKRLLALLLRHARVYRAGSYWTHKHDQWLAAQRFDEPALDATFGHYRAVLAARDAAVAAAEADLKVWFDRDPFADCVHRLGAYRGIAHLGALTLAAEVCDWRRFPRATTFMGFTGLVPSEYSRGGSTRRGHLTKTGNAHVRTQLVESAWAYQHRPAVGAALRRRQDGVSPETVARAWKAQTRLCGRFRRMAAVKDTKSVVAAAIARELAGFVWAEMTSDVN

SEQ ID NO: 414087 - protein, 534 aa, unidentified
MSLWSLNRRPCRGWRADISSGVIHGLAERSGPAKRSEVVNNSAGRQNSCGKRRASVRSRSGGQNAQSVKRRIPAEPEASAPTSNRTMPQEGRHISAMDCRAKGRSSTTVTKAMSNTEESLDRWQQHRYFGALDWATQKHMVVIVDARGKIVEVFSIEHSALGWKKFRERLAPYGSIPFAIETSQGAAVEQLLEAQMLVYPVNPKSAQRYRERKAPSGVKDDELDAWSLADALRVDGHGWKILRPEAALIKELRLLCRDEVSLIEQRTALIQQLQQALAEYFPTMLDAFEDWTSVSSWLCLQRFPTPQALQQAGKRQWEKFLHARRLWRQDSGPRRLELFAKATNFCGTEPTIKAKSMLALSLVKMLLCLEPQLQEYRRRIQELFARHPDHDLFGSLPGAGPKIAPRLLSEIGEDRERFDGDAQNLQCFAGTAPVTRKSGKRILGRHKRRACNKHLRHAIHLLSEQSLKRCVWAQIYYQHHLAKEKSHANALRSLGQRWLKIIHKMWFDRKPYDAELHHRNQLKHGSWVFQLRPC

SEQ ID NO: 414088 - protein, 344 aa, unidentified
MTEIKRIAIDTSKAVFTLHCINQADQPVLRVNLRRAQMLPFFKKHLPAEVAMEACASSHHWARKLTALGHNVRLIPPQYVKPFVKRAKNDRNDAEAICEAAGRPGMRFVLTKSAEQQAQGMVLKVRETLVGQRTQLANTLRGHAAEFGVIAAKGMSRIASLLEAIEVEATIPLEAREMLALLGQEIEHLDTRIKEIETKLTLMHKANAVSQLLATIPGIGPIIALTLALEVDPAAFQSGRHLAAWIGLTPKEHSTGGKQRMGGISRAGHERLRHLLVTGATSVIKLATRPGHRQATEWLLKLLQHKPRKLVAVALANKMARIAWAMMTSGEAYRRQATAGALSA

SEQ ID NO: 414089 - protein, 384 aa, unidentified
MNKYNMIFIGLDTHKVSTEVAHIEDQRGAKTVHQGKIKTNKAAITKLARQYQSKYPQATLHFVYEAGPCGYWIYRLLTSLGHCCYVVAPSLIPKKPGDKVKTDKRDAMKLAKLLKDEELTPIYVPEPEDEAIRDLSRARETAMKDLKDAKFQLKGLFLRNNITCKVNDNWSNQHLRWLTELVLPHPSQQIVLQEMIQTITERIKRVERLVNELAHQAKLWRYYPVVQALQAMRGIRFLVAVGTIAELGDLRRFDHPRKLMAYLGLVPKENSSGDNRKQGGITKCGNGRARRLLIEGAQTYKHNANVSTELQKRQEGLPKAVTDIAWKAQLRLCRRYKRLMQRGKHRNIVVAAIAREMLAYIWAISREVILVPVDPMTRTSRVPA

SEQ ID NO: 414090 - protein, 356 aa, unidentified
MTSNIKYIGLDVHKESISIAVMNSAGKVVMESVIETKASMILQFIDGLRGDLRIVFEEGTSSAWLYDLLKPRVTKLVVCDPRKNKSMREGNQNDKIDARRLAELLRLDHLNPVYHGEHGLRTLKELVRSYLTITKDLARVKSRVKAIYRSWAIPCTGKEVYARCHREEWLGKITEPGVRRRAEFYFQQLDALRGLRRDARRELLAESKKHKAWKRLCGIPSIGPIRAAVLLGILQTPHRFRSKRPLWNYSGLAIEMHSSADHRSVDGQLQRSRKNVLVRGLNRNCNHDLKNLFKGAAAVASSKPGPFQEFYTALVAKGMRPEMARLTWARKIATIVLIVWKKGVSFDANHLKPQTV

SEQ ID NO: 414091 - protein, 323 aa, unidentified
MEVTTIGLDIAKNVFQVHGVDDGGSVVIRRQLRRSRVMPFFEKLPPCLVGIEACATAHHWAREIAALGHEVKLMPAKYVKAYVKRNKNDAADAEAICEAVGRPTMRFVPIKTPEQQALLMLHRTRKLLVRQRIRLVNAMRAHLAEFGIVAGVGRNGVDRLIKLVEAGDARIPAPARDCLLVLRDQLALARQQISAADRRILAHHRESELSRRLEEIPGVGPLIATALVASVPDPHAFKSARDLPAWIGLVPKQSSTGGKERLGHISKAGNRYLRSLLMIGAFSLIKRAKLGKGKHRPWLIELMARRPIKVAAIALANKIARIA

SEQ ID NO: 414092 - protein, 352 aa, unidentified
MQLGVDTHKRTHVVVALDEHGHQLGARTVPNTPEGWATALTWAREQQQQQQRRWGVENSGSLGKGFAQFLLAQGEAAVHEVSPQRTAQYRRRGRTQDKTDQADALAIARLLLAEGAYLPQVQQDDVGTELRLLSDHRDNLLVDRTRLINQLHGQMLQIDPGYQARSGALTRRRGLLYCRDLTLPEPDGVAQTRLLIVRQLVGQILRLEEEIATVTAALGERVRASATPVLALCGVGEVIAARLIGELGTVPRVHSAAALAALAGVAPVAVSSGGRGGYRLNRGGNRQLNRVIHLMALSQRRCDPRAQAYYAKKRAEGKTSRAAMRCLKRRLVDVLYRCFKQGTVAHPVAVAA

SEQ ID NO: 414093 - protein, 395 aa, unidentified
MRYAGIDIASQTHVLAVVDEAEEVLVRPTPFGEDAAGYATLFERLGAAQDVIVAMEATGHYWRNLAVDLLARGFAVALINPLRTRRFAGEDLQRTKTDAIDALGIARFARQKRPAPTRLPDSATEELKELVRLRDRIVQDFGDRVRQLHRLVDLGFPEFTRFVKTLDSELATAVLHEHPTAQSFVGVSVKRLSKLCYDGRHKVGRELAQDLVRAAESSVGRHHAEVYRTQVRFACEDLDVLRRRLRALSDEIEATLERHEVGKLLTSIEGVGPQTAARLVAELGDIAQFRDAGAIASYIGIVPGLKLSGLKTGTRAPIVGVGNVRLRTALWMPVLTAVRKNAWLRAFHERLRAKGKPPKVALVAAMRKLLVAVHWIARNRRPFQGVTPQPAEAFA

SEQ ID NO: 414094 - protein, 395 aa, unidentified
MDVMHPICCGIDVHQKSIVCCILDGPLTSNEPKKYQTSFGTTTKELNAALDWLLEHQVTHVFFESTGQYWIPLFNIFSDSGLELILANPQHIKNVPGRKTDVKDAEWIAQLGRCGLINQSYIPSQEVLQLRYLTRYRLSVKQRLTQIKNHIHVILQRGNIKITSYLADIFCKTGQALLTLFINGEVINEDNVESCIHGRIKASTRQLIEAMEGKLSTVDRFLIKECMEEYKLQKKISDELNKEINEYILDHFPEEYQLLLTIPGISDNCCATILAEIGPNVDAFKTDKKLASWSGMCPGSNESAGVKRSSHTTQGNKYLKQALVMSVLSVQRAKEETFSLFYQRISSRGSKMKAIIACGHKMLRIIYKILQSHQPYNSQKALGLRQQTNALSLTI

SEQ ID NO: 414095 - protein, 355 aa, unidentified
MINQQPDREVFAGVDTHTDTHHAAVVDPLGRPLADREFPTTTQGYRALLMWLITFGHVQAVGVECTGSYGAGLTTVLSAADLTVVEVNAPDRGTRHTRGKSDSIDAYAAARAAASGRATAIPKSHTGTVEALRQLRVARASAIKARTQAINQLIGLRVTAPEPLRASLTGLTRTTLVNRCLRLRPGADLTCPTEAARYALRQLARRIRMLTEEIGEVTERLTMLTTSAGPELVALFGVGTETAGQLLVTAGDNPERLRTEAAFAALCGAAPVPASSGRTDRHRLSRGGDRQANRALHMIAVVRMRYCPRTRAYVARRTQQGLTKKDIIRCLKRFIAREVYHALTRTHNGRTTSSS

SEQ ID NO: 414096 - protein, 339 aa, unidentified
MKLYSGIDLHSTNSYLAIINGRGKRIFNEKLPNDLSTIVQRLELFSGDLQGVVVESTYNWYWLVDGLMAEGFAVHLANPSAIQKYTGLKHTDDKHDAFWLAEMLRLDILPEGYIYPKEERPIRDLLRKRRHLVSLRTSMLISLQNIITRNCGITLRSRDITRVREDHVSPLLADNEDLALAGQVSKESIDFLTRQIRSIETFIERKLELHDGYKELLTVPGIGKILGLTIMLETGPVERFKNVGNYASYCRLVSSRWTSNDKTKGKGNKKNGNKYLSWAFSEAAEFARRYDEKARAYYNCKMRKTNFMVAHTALAHKLARAAYHIMRDHVPFSSEKIFT

SEQ ID NO: 414097 - protein, 443 aa, unidentified
MTRRCFGLDVHRDFAQVAIWQDGLVRQAGQIAMTAEALRVFADSLAPTDEVALEATGNTNAIVRALRGRVARIVVGNPQKTRAIAEAEVKTDKVDAAILAQLLAADYLPAVWVADEATQARRRQVARRAHIVRQRTRLKNQVQPVLHRNLIARCPAADLFGHKGRAWLAEQPQPADERQAVSALLRQLDFHGEELRLIDRELARVALGCQDTKRLMTIPGVDVTVAMSITAAVGDFQRFCSPNKLVSYLGLNPRVKQSGGQPASHGRITKQGRAHARGMLVEAAWVAVKTPGPLRAFYERVRARRGMQIAVVATARKLTVLCWHMIARGEDYAFARPSLTAKKLRALELQAGMPARRGQKGHAAGYSLKDVRARERQMAEHAERAYRQLVADWQAKAPQPRVGVAAANGARLSRPSDGATAARQASAPEPALRSGVDHARRRG

SEQ ID NO: 414098 - protein, 395 aa, unidentified
MKYGVGIDISKGKSTIAILSIEGEVIKEPFEFDHNQKDLDNLNLLLNNYSKEDLKIIMEETGTYHLPVLSYLIDKGYCVIAENAFRIKKYLDRGLRKAKTDKKDSLKLAEYACDNWYKLKMPIIEDKNYKDLRFLSRQYFAFNSIKIQQKVNFSNLTDMLFPGYYQLLDENNYILGLKVFQKYSIDIIKKKKLETFINEVDKIAQKIGHKRAGITFAKKVYELAKESVPSCPSSEYTQLIIDNCVVALIQSIETTKEIISKMQEIANTLPEYETVKSMPGAGPRLAPLLIAEIGDIRKFKDSSSLIAYAGIDAPPYQSGQFEATNRHISKRGNKYLRKTGYEVMKAIKSFYSTGNEFYDYMVKKESEGKKKKVAKIAALNKFLRQYYAKLIKLYN

SEQ ID NO: 414099 - protein, 336 aa, unidentified
METIHFLGIDISKKYFNFCLINDQACILVQNQVENRKKDISAMFSALKKTFGISSKNVIVCMEHTGIYCNLLLDYLHQHEINTCVESALQIKQSMGMTRGKNDKVDAERIAKYALKNRLDLKFWKPEPEVIQKIKYLLTIRERLIKTRVQLQVPLLEQECFVEKRFKDQLGANCEASLKGINRDLAKVEKEIREIIKLNRQVSNMMEFAKSVPGIGMITAINMIITSGEFKRIQYPKRFACYSGVAPFEHRSGTSFRGKTRVSKMGNKTMKRLLHLAAMAAIKSTSDIKEYYHRKLKQGKNKMSAINAVRNKLITRVYSCVQNERMYQKIYLNQLA

SEQ ID NO: 414100 - protein, 392 aa, unidentified
MYIVGIDIGKNHHEASIVSPEGKQIGHSLRFATTHKGADSLMSFIFNNIGNSSCIFGMEATGHYWYPIYSFLKARGYTIYVINPIQSDSLRKMYIRQTKNDSIDSFLIAEVIRFGQFTTTSMADENILAMRQLCRYRDSVISSRTEIKLRISTIMEQIFPEYEKQFSSLWLSTSMGILEKYLTPENIETAPIDELFEIIKDKSHNKLTMKKAISIREAAADTFGIKIAQDAFSFQLKQLIDRMNFLDKQIEALDCQILEYYEKFDCYLHTIPGIGMIAAATILAEIGDINRFKSSSALVAFAGIDPTVRQSGEFSNTHNHMSKRGSPYLRHAIFLAATTCSFHNSPLNAYYKKKREQGKHHLTATGAVARKLTTVIYAVLRDGKPYEPKSFC

SEQ ID NO: 414101 - protein, 407 aa, unidentified
MEEKDVIEFEQVVERGCGMDVHKDLIVATILGKGIKMQTKSFNAFTSSLIKLKEWLLKNGITHVVMESTGVYWKPVFNIMGDDFTVLLVNARHVKNVPGHKTDKKDSRWLAKLLLSGLLKGSFIPERPIRELRDLTRYKTKLTNQITAEKNRFQKILEDANIKLSSVLNDIFGATGTKIINHILGHESYRPEDILQYVHGKVKSSREDIKEALTGYITPHHRFMLKTIMRNIAKIESTIAEVDTQIEVCIGPYRVERELLESIPGVGKEGSTCIIAEVGIDMGQFPDQNHLASWAGVCPGSNETAGKNKSGRITYGNKYLRSLLVECGWAASRTKNTYMSAKYKSLVGRRGKKKAIIAVGHKILIATYFILRDKIEFKELGPDHLSNFKRDRLIAYYRQQLEKLIAA

SEQ ID NO: 414102 - protein, 343 aa, unidentified
MGIDPHKQSHTAVAIDGATGQVRGERTVRARSGGYEQLVAWARGLDEDRVFAVEDCRHVSGGLERHLIARGERTVRVAPKLMATHRRSDRTFGKSDPIDAKAVAVAALRHPHLPEARLAGPEREIGLLTAHREDLVGERTRACNRLRWLVHDIDPDLVPAKGVLDRDVALARLRSALEGLGPSVELSICLDLIETIGRINTRERELARQIEVRVRRVAPALLEIPGCAALTAAKLVGEIANVERFATEARFAMHAGVAPLPASSGASHRHRLSRRGNRQLNAALHRIAITQLRVHEPARAFVARKRAEGMSTREALRCLKRQLARRVFTTMRTSVTIVAEAAA

SEQ ID NO: 414103 - protein, 344 aa, unidentified
MDYYVGLDVSLRTVAICVIDAEGRTVLQRSVACEIEDIRHCLANFPASDLRIGFEAGAMSQHLFFGLQASGFNVVCMEARQVNAALSAMRNKTDKNDARGIANVLRSGWFNPVHMKSREAHAVRALLSSRKAVQRKCIDLANEIRGLFRIFGLRLPSRIDQASFDEQVRPIIEADPDLSHALLPLLDARAVLFSTYRELDRRVKRVANRDETCLRFMAIPGVGPIAALTFKAAVDDPKRFTSSRTVAAHFGLTPRRYQSGEMDNPGRISKAGDADVRSALYAAANAMMMRSVASSEIKSWGLRLMRRKGRRRTVVAVARKLAVVMHRMWVDNTEFRQRPLEGAV

SEQ ID NO: 414104 - protein, 428 aa, unidentified
MERQNESNIDPRFFAGVDLGSGEHAVHVVDESGKRLDGFTGEHGGAGQAALADRLRRICGGRPELMGIALETPRAALVELLLEQGFAVFAINPKQLDRFRDRHSPSGAKDDARDARVLAGSLRTDRASFRRLNPESALTIELRDLSRLDEGLKRDFRRGCNQLREQLHRYYPQLLGLCPAADEPWFWALLKRAPLPAAGAKLTPANIRQVLALHGIRRLSGDDIAAALRTPPLQVSPGTAAAASRHALMLVPRLDLLFRQIGETLAAMESTLGSMASDSEHQGHRDAAILLSLPGIGPVTGAAMLGEAAEPLRNRDYHALRSLAGSAPVTRQSGKRLVVGMRHGCHPRLRNALHGAVSCHVRWDPRAREQYQRLKAAGHNHARAVRGVGDRLLRLVVTLLKNGELYDPQRRLLPETKTVAATGQPVIC

SEQ ID NO: 414105 - protein, 325 aa, unidentified
MDRMGHVLTKQKLTRSQLKQFISTTPPCRVAFEACPGSQYWGRLFQQAGFEPKIIPAQFVKPYLKSNKNDFNDATAIAEAGSRGTMRCVPLKSHEQLALQATHRVRQRFIVERTATVNQMRALLLEYGLTVPVGRKVFERSLPTILEDAENGLPDFIRALVLRLRERWQQLDIQIDDMSLMLGQASSTSSLCQKISTVPGIGSIVSTALIAAIGNGSQFKKARDLSAWLGLVPRQYSTGGKSSLGGISKRGNSYLRQMVIQGAKALKIHMKRDKSSLGEWVARLEVGHHHHVVLIALANKIMRICWKVLTSGRDYQPYPNTSSAV

SEQ ID NO: 414106 - protein, 492 aa, unidentified
MDQINSIYSKQHPKIRQIFNSAPSLQKVLCVAMDYSKASHEVLFCNGYGDILKKSFVVKNSPDGIAKLLEQIKKTCEHRSIKKRHVFLGGEDTPLYVLNFHAALKKEGYLVAYVNAWTASKQKENHQASTDRIDVLAIAKALLHNASYCHHSQDSIYRALRETSRTRSYFVEQFTAAKLQIHHYVSLLFPGFLNENSSGLPPFSKASQELMSLNFSSTQIAQRQLSTLEKLLDKHGCENAQATALKLKALARVVLPPPADMCPIWQRSLAQYVEHYRHLEKSTKTLEKELAHILIKTPAASLTSIKGVGILIASGIVSEMGDPLHWKGLRHISSYAGIVPRVEQTGGPEKASHTGSVKKRCNRRAKHWVVLAGSKMGECGPEELQREHQRLKSNDQHADFIMARRLLRIGKDIVRRATVYRPKELLNEDTDRQTLLLYYHSLWGQLVEKWRSLLSLDELCNPQYPLGQWRQMVQEMYKISLAIPKQRTAEAN

SEQ ID NO: 414107 - protein, 417 aa, unidentified
MQVVRPICCGADIHKDIIVATIATSNQNGIAEYIQRKFCTQNYDLINLKSWLKEHNCFEFAMESTGKYWIPIFNVLEDEIKVYVVHPKYTKSIKGKKTDKKDSKWISELFRHGILTFSFIPPREIRELREISRYRIKLVAMRTSERNRYQNAMTVSNIGLASILSDPFGKSSKAIMEEVLKSSSLSEGKIRSLLNKSAKKKAKEVFASLEGSRIEPDQRLKMTVSSEHMNQIDSHIDTLELDLVQRCLPYANLINLLIDIPGISYISAIAVIAEIGIDMSVFKSSKQLTCWAGLAPANNESANKKKSVRISRAGTYLKPLLIQCALSAIKSTSNPYYRIKYNTIKKRRGHKKAIVAIARMILVNIYAILSTGEVYNPCDFKEVTSPKPAKKEMTIENALSFLQAQGIDTSALVLNVS

SEQ ID NO: 414108 - protein, 392 aa, unidentified
MCLQDAEGRVLAARRLPEGVAGITRLHELIASHLDGDDPGQVLLAIETDRGPWVRALVAAGYRVFGVNPKQAARHRETVAVSGKKDDTFDAAALSDMVRTRRHQLREVAADSDEAGAVKVAARAHQKLVWERTRHALRLRSALREYFPAALAAYAPLTLTGATLELLARAPGPASAGRLTVPQITAALKRARRHDVAGKARQIQAALREPQLGQSEIVTEAYAASVTAAAAVITVLNEQIKKMEATVESLFRRHPDAGLYLSQPGIGVITGARMLGEFGDAPGRHADAKARRSYAGTSPLTIASGKRKTVHARYIHNDNLVSALHDQAFAAISASPGARAYYDDLKAREIDHTDALRRVANRMAGILHGCLKTGTAYDEDTAWGHRSQPAAA

SEQ ID NO: 414109 - protein, 360 aa, unidentified
MRKQSNTLNFEGQNIYVGIDVHLKSWTVSILSGHLHHKTFVQPPSPEALSSYLHAHFPNGNYLSAYEAGFSGFWAHYKLVEMGIQNIVVNPADVSTSQKERLQKTDAVDSRKIARSLRNNELTAIHVPCRETLEVRTLLRSRDALVRDLARMKQRVKAFLYYYGIDYPKEFQHSGTHWSRAFMNWLRNGIRMDTEEGGAGLSLLLDSVESQRRLLLEATRKLRALSRSDGYATDYELLRSVPGIGMITALSLLAELEDIRRFANSDRLAGYIGLVPTSHSTGEKDNKGEMTFRGQMQLRSKLIECAWFAARIDPALNMAFSKLTRRMEPNKAIVRIARKLLNRIFYVLKYKRRYKNETVE

SEQ ID NO: 414110 - protein, 431 aa, unidentified
MEEVRDEPLYRDRVCGIDIGKAGLVATIRVPSDANPARRAAETRAFGTTRREVLALADWLRSWQVPAVVMEATGDYWKGPFYRLEAEGFDCVLADAKQVKHLPGRPKHDPGDSRWLAACFERGAVASCFVATPEFRVIRLHTRYRRDLTEERTREKQRAEKLLESAAVKLSSVITDLHGVTGRDIMDHLIAGERNPRALAQLARARARRKISELEAALEGAEFFTTEHAALLAAMLGRIDRVNQDITRLSEVIERLLAPYEEQLAQAESMPGWGRRSAQDALAETGPDMSRFPAPAHLASWAGRTPLDNQSGNRKGSSKSKKGNRYLAAITGETAVAAGKTQTREGARYRRLARRRGKAKAQVALGNTQLKVYHALLSRPGTCYQDLGPDYYERQRDIRRQIARHVGQLGALGFEVTLCRIPGPEPGGQAA

SEQ ID NO: 414111 - protein, 409 aa, unidentified
MDVMFERVAGLDIGKKSVTVCVRTPGAGRRRRQETRTFRTMTRSLEVMRDWLIAEDVTLAAMESTSTYWKPVFYALEDHMDCWLLNAAHMKAVPGRKTDVKDAEWIAQLTEHGLVRPSFVPAPPIRRLRLLTRYRAALTGDRTRDVGRLEQMLEDASIKISSVASSVSTKSARAMLAALIAGEADPQVLADLAKGKMRAKIPDLVEALTGHFDADHAHLSAAMLGRLDRVEAALATLDAVIDNACRPWAHQIELLQTIPGVGLVTAQVIIAETGGDMSQFPTAEHLSAWAGVAPSMHESAGYRKPSGTRHGNKWLTSMLVEAAGSAGRSKGTYLAAQQSRIAARRGAKRAQVAAAHSILVSAYYMLKRDQPYQDLGPDWLRQRHDQAHTRRLIAQLERLGHTVVIDPVA

SEQ ID NO: 414112 - protein, 411 aa, unidentified
MQVIHERCAALDVHKKTVVTTMMLTQADGSVQEYTRTFLTMTADLLALDDWLDSHEIKVIAMESTGVFWRPVFNVLEEGRQVILVNAQHMKAVPGRKTDVKDSQWLADLLRHGLLKASFIPPKPVRELRDLMRYRKTIVQERADEVNRLQKVLETANIKLASVATDVLGKSGRSMLDAMLGGQDDAEVLAELARGRLRAKLADLRKALDGRVQPHHRVLLTRILAHIDFLEESLAQLQAEMEQYLHPFEEAMQLAQSMVGIDETAAASILAEIGTDMTRFASDKHLASWAGVCPGNKQSGGKRLSGKTTKGNPYLRAILFEVAWAIAHTKDNYWSAFYHRMARRHGKKKAIMALAHKVLVILYHILRTKKPYTDLGADYFDQRDRERIERHHIHRLEQLGYTVTLAPKEAA

SEQ ID NO: 414113 - protein, 389 aa, unidentified
MSNIEVVGIDVAARTLAVCAETLELEREWENTPTGHAALAKRLAAAGRPVRVVVEATGIYFLDLARALSSAGISVMVVNPKASHHFAEALLERRKDDPVDAAVLREYGRRMSWADWRPPEPTVFQLREIGRQIRAFGKDVAAAKNRLHALTATEFGSAAVREAVARQIAATEALIATLIAEAERLLAAAPALRRRVELIDSAPGFARKAAIVVAGELAPLPATMSARQWVAQAGLDVREERSGSSVKRAARLSKRGNRRLREALFHPALTMVRCCPEAAVFHRRLVAAGKTPLEAICAVMRKLLHGIHAMWRSDKPFAAAKLFASAAAPTSVPMFDRDTTVPPSRPRVPPATRAAALKARRRRPPQAVRSSLERREHDAELAPLGSDPA

SEQ ID NO: 414114 - protein, 351 aa, unidentified
MTEYKRIAIDTSKAVFTLHGIDQTERPVLRVNLGRAQMISFFKKLPPTEIAIEACGGSHHWGRALSTLGHRVLLIPPQYVKPFVKRSKNDRNDAAAICEAAGRPGMHFVPVKSADQQAQGMVLKVREALVDQRTALVNTLRGHAAEFGVTAGKGVSNVIPLLEKIAAEITIPLEARTTMALLGEEIDRLDARLKQLATKLNQAHKANPVSVRLATIPGVGPIIALALATEIDPTAFESGRHLAAWAGLTPREHSTGGKQHMGEISRAGNERLRALLVLGATSVPRDEGPRAWIKVAERPGNKLATEWLLKLLRRRPRKVAAVALANKMARIAWAIMMSGETYRRAPAAGVS

SEQ ID NO: 414115 - protein, 466 aa, unidentified
MSKPEQDGSGPKVAGRKGTRPVESRVCQPDAAGCDIGAREIFLAVPADRDVHPVRKCGTFTGELREMAQWLVRCRIKTVAMESTGVYWIPVYDVFEKHGIEVRLVNPRNMKNVPGKRTDYHECQWIQYLHAMGLLQGAFRPDAEVRAVRTLMRHRSDLVEMASQHVQHIQKALTQMNVQFQHVISDITGLTGLAILDAIVAGERDPAILAKLRDPHVKASEETLRQSLEGNWDPSQIVVLKQRLSLYRSHGQQIDECDKEIEKLLVAFVPQVDPEQKPMPEDRKQKQRKRKKKTGSPGFDMRQEAYKLFGVDLTQIPGLMSLVFLLFSEVGRDMSRWPTAAHFVSWLGLCPDNDISGGKVLWRGNRRVKNRAGTLFRLAAHSLHRDKTPMGDYLRRMKAKLGPAAATTATAHKIAIIFYTIVRKQIEYDATLWAQRDLMREKRMEANLQRQAAQRGYKLVPLEAAA

SEQ ID NO: 414116 - protein, 343 aa, unidentified
MDHFAGLDVSVKETNVCILDDAGKIVKEVKVASEPQTLLKVLGNPTYRFKRIGLEAGPLSQWLFSALAEAELPVICVETRHMQAVLKAQINKTDRNDARGIAQMMRVGMYRPVHVKTLRSQKLRMLLTHRKLLQSKAIAIENDLRGTLRNFGLKVGVVGTVRFEARIQELVETIPDLAVLVGPLLVVRRALREQIVVLHRRLLAIVRDDEVCRRLMTTPGVGPVVALTYRATVDVPARFRKSKSVGAVFGLTCSRYQSGEIDWSGRISRCGDEMMRVMLYEAAQSMLRSKKWSWLKAWAMQIARRRGMKKAIVALARRLAVILHRIWVDGTEFRWTREAVPAA

SEQ ID NO: 414117 - protein, 336 aa, unidentified
MKKIFVGIDVSKKWIDVCVTLGGKTISHCRFDNNTMGFKTMIKWIKEFSKQQDEWLLCMEHTGIYALPLWHFLSEKKISYCVVAGSLITSGLEIRRGKNDKIDASDIAKFTMRYADELKPHRLPTQVLQRLKMLFAYRERLVKAKVLIAVPANEAKQFATQESKEVRMDSSSLAQIIEARIEKVEKLILKIINSDEQTAKCYKLIVSVPGFGLVTACYLLIITQCFTVLTKSRELSNFGGMAPHPHESGKSIKGKTRVSPIADKKLKALLSRGASSLIQYNKDTQFYAARLMARGKHKNLVSNNIKNKMLHTVCAVVKRGTPYIENYVSPYQQNVA

SEQ ID NO: 414118 - protein, 420 aa, unidentified
MTSPNVIPADAVLVAIDIAKVRNEVLIEASGHKRRRRLPVLNTPAEHDRLIEILQAYGQPVVCGFEATGNYHRPIAWRLAEAGFEVRLVSSLALARTREALHNSWDKNDPKDAQVILHMLRIQATQRYHDSLRAGINDVQELSKTHEAIARAKTEIQHRILTHYLPLYFPEIDRFRGNSRSDWFFALLDAFPTPASITALTKEEFVAAAWDVVGRKVSKTQILIDIYETARTSIGLPLPLDAPAIRMFRMVIAEARSLIRQRSEIEAQADELLRHSQDYQLLRQIPGIGPINALTIIAEAGDLRRFHHHRQFLKFCGLDLSTQQSGQYRGQTRLSKFGNARLRRTLWIAGQVAIRQRENGFRHKFERYIARDRDNPDLRRKAMTAITAKMARVVHAVVKGGSDYRPFVEGRVPGGRTSVS

SEQ ID NO: 414119 - protein, 441 aa, unidentified
MTEFFLGIDISKGYADFVLIDSQKNIVEKNFQLDDTFQGHNLLFSFLESFFLNNPQSNIIAAVESTGGYENNWVSFITKLKDDFPICIARLNPFGVSHSSKADLKRVITDKISALTIAEYVINHRAKISFVQEDYFAPLRKQWIFIKLLVKQKVQLYNQLEALLYTANPELITFCKHGMPNWVLVLLKQYPSAKSLAKTSPSVISRIPYITVQKAEAIINNAKVSVASQTDPVTGALLKSVVEQIIFLDKTIKTQGKKLTDSCTFPEVKLLQSFTGIGAYSAVGLLLEIRAIERFSSAKKLAAFFGLHPIYKASGDGMGCMRMSKKGRREPRLILFNIARTAINCNPLIKEVYKNNLQKGKSGLAAIGVVMHKILRIVYGMLKTNTAFNPDIDRRNTENVALKKPKVVVLKSRRFQQFDSLAPVSKKQNKKREEQKASQKE

SEQ ID NO: 414120 - protein, 346 aa, unidentified
MTIVEDACVITGGVDTHADTHVAVAPDPLGGLLGVREFPATAAGYAGLLSWLGGFGTVAMVGVEGAGSYGAGLARHLAAAGIRVVEVDRADRQDRRRAGKSDPLDAVSAARAVQSGRASGAPKGRDGAVEAIRSLMVARRSARNERTQVINQARSLILTGPDELRARFAGHCAAALAEGIAALRPRPGDAAGHAVRVALRELGRRAEFLDGQLERLDELIVPLVTARAPGLLSLYGVGPDTAALLLVAAGDHPERLRSEAAWAHLCGTAPIPASSGKVRRHRLNPGGNREANHALWRIVITRMSAHPATRAYVDRRTKEGLSKKEIIRCLKRYVAREVYHHLRGGG

SEQ ID NO: 414121 - protein, 405 aa, unidentified
MISVGIDVSKGKSTVCVLKSYGEIVLSPKDYRHTTTELDVLAPKLATYDEEIHVIMEVTGSYHLSIAAHLKKAGYLVYIINPLEMKRYRCQRIRNPKTDRIDAFTIAQYGIDFWYRVPVDRSIDKSRSELKFLGTQYLNFMKSRQDRCLALCNIMDRTLPGIYGKIETFNRNTGRDKLCDFVYDYYHRDCIMKYSEQKFCERYQAWTKKKGYRYRENEARQLYRIAKDSIPTLTATENTKMMVREIVTVLRAVNISIYRILSQMQVLAKQMPEYETVMAMKGAGDSIGPRLIAAIGDPRRFHSEKALIAYAGIDAPPYQSGKFTGTERHMSKRESKIMRKLGFELMDSINKHQANYQEDAVCQYFLKKRAEGKAYRVAMFAAYNKFLRIYHSKVSAVLKEYEAMN

SEQ ID NO: 414122 - protein, 438 aa, unidentified
MPMTFARLLDPSFEDDDDPFRHYDARGEPLEDRLYLPCGIDPHKKVCHAAFVHPLPHRQEILSQRSIPNRDLPSALWLVQEGERLASQFDATPIYVFETSGPYWRPYRLFLHQLGLPTATVSGRQTKRARGTGTRKTHNDLKAAFLIAKVFKQGESHASRIPPEPIASLREYTRLHLFFVEYSVAIQNRMFDIRYRTHPGFDDLLSKPTIPTALALAKEELVHPARLLQAADDQLVQVIRRASRGKLGDQLATALHHSALTAFYTPYAADAFSFNLRLLAEAYDHIHRHILPPLRARIQDGLNQLPFEQYLPEIPYYGPVVTGTFLGELGLPSWFKTVDSVVAWFGFDPSLSESADHPTGTSHLTKRGSKYGRRIEWLVARNWSRFVPQGRRMFKKEFYVNQLSYDGAICVIAAKLVRIAFAMVRDGTHFDMTKAFPG

SEQ ID NO: 414123 - protein, 451 aa, unidentified
MSETKKVRRKRDISPTHPHAAAIDIGATLHVAAVGPDQDPEPVRSFGTFTGDLHRLADWFEQCGVRTVAMESTGVYWIPAFEILDQRGFEVILVNARDAKHVPGRKTDISDAQWLQRLHEYGLLRASFRLKGEVAVLRGYLRQRERLLDYAGSHIQHMQKALTQMNLQLHHVVTDITGTTGMAIIRAIVAGERDPAVLAAHRDPRCHASTETIRQALVGNDREEHIFALTQALELYDVYQAKVALCDVRIEAALKRLRKASSSPAGKPPPVRTPKKQANAMAFDVRAALHGLLGCDVTQIHGLGPYLALKLVGECGTNLSAWPNAKHFTSWLCLSPSNKISGGKVLSSRTRRSGSRAAALLRLAAVAVGRTETALGAFYRRLSARVGKAKAVTATARKIAVLFYNTLRHGMEYSDPGASHYEERYRRRVLTNLERRAKSLGYVLQEAPAPA

SEQ ID NO: 414124 - protein, 341 aa, unidentified
MRKTLYCGVDLHSNNAMYVITDEGDQQLFKRRLPNQLPVVLESLEPFRPRLKVVVVESTYNWYWLVDGLLDRKYPVVLANPGAIDQYDGIKEADDLTDAAFLARLARLGILPTGYIYPKEDRPVRDLLRRRSLVVRQRTSMILSLQNMALRQTGQNFGWRALRRLSDQERAEALGDHDCLAFVTTEQLELIELLSETIKRFEAKVLEHAHLRPAYECLLTLPGVGVILALTIMLETGDIGRFKTVGDYTSYCRCVRATHTSNGKSKGKNNSKNGNAYLAWAFVEAVHHALRTCPPARSFYDTKCAKRNGALATKALAAKWSKAAYYMIKRQEPFDLARVFG

SEQ ID NO: 414125 - protein, 332 aa, unidentified
MRYIGLDIHKKHTQACIRNEDGKILSGERFKTEADDIASFFAKQEAHGPLSVTMEATGFYFWIHDFIVARGHPVIVVHPARIKPLMKAKAKNDRNDASMLAELLRTGCLEGIYVPPPEIREMRDLTRHRESLVRKKGDLKREIISSLDQHGVMKPLDYRISFTKKYIKWLRSLNDFVINEKLDLLEATVSKIENVERLIEERWGEDEDVQIIRSVPGIGLVTATVIKAELGDVARFPSAENLAAYIGVSPTTFQSGEKEWGGPVRHGNSRVKHVLIEAALVHTRSCPDSKISRYHIRKRESIGGAKAAVATGRKLAEAIYFMLVRRQPFHAH

SEQ ID NO: 414126 - protein, 344 aa, unidentified
MSTVNQATVFVGLDYHAASVQVCALSPDGKVLMNRSCANDWRAVMGAVRKQCPGGVNVQAAIESCCGAAGLADELIGHAQWSVNLAHPGYVARMKQSPDKTDFSDARMLADLQRVGYLPKVWLAPEEVRELRRLVHYRQRLARERRNLKLQMGATLREARQKAPDTVNPWTKAWLAWLDSSAQLSHNARYIIDCCLRRLVSLAKELAQIDRRLEKQTKDDPLVQKLLTIKGIGLITAVTLRAEIGRFDRFRTGKQLARFCGLSPRNASSGEKQADAGLIKAGNKELKALLIEAAHRLIRCEERWTALAARLSSRGKKGCVVVAAVANRWLRWLFHQVQPSCLRA

SEQ ID NO: 414127 - protein, 315 aa, unidentified
MVDVPCLIGIEVAKAQGDMALRPAGERWAVPNDARGIAPLVDRLQALHPTLRVREATGGLERAAPAAWAAAGRPVVVVNPRHARDVARATGPWAKTAAVDARALAHCADVIRPTPRPLPDAQTQERRALLGRRQHLIGMRTAAQHRLVGTNARLAQDIEAPMAWRKAGIATLDDALETMLRASPLWRENDDVVQRAKGIGPVCAHTWRLELPALGTLTRQQIAAVVGVAPLHGDRGTLRGRRTMWGGRAPVRTVLDMGPLVATRDNPQSKVFSERLLAAGKVKKVALTACMHKLLTILNAMLKHRTPWQPQEVQN

SEQ ID NO: 414128 - protein, 321 aa, unidentified
MENARTYVGIDVAKEKLDIAVHSSDQRWTFANTDAGIGRVLSCLQKLNPVLIVLEATGGIEVPLVAALAVAGLPVVVVNPRQVRDFAKATGQLAKTDTLDARTLAHFAAVIRPPLRPLPDAQTREMTAILTRRRQLVEMLTAERNRLSAARSKPVRDRISAHITWLEKELANVDDDLASGIRESPVWREKDNLLQSVPGVGPVLSTTLLAHLPELGNLNRRQIAALVGVAPFNRDSGNLRGKRTVWGGRSAVRAALYMATLVATRHNPVIRAFYHRLCADGKPKKVALTASMRKLLTILNAMLKHRTPWHYTDTQTLGPCS

SEQ ID NO: 414129 - protein, 403 aa, unidentified
MNNVAGIDVSKGKSMVSVLRPFGEVVTKPFSIGHTGSELKELADYLKSLDGETRVVMEHTGRYYEPVARFLHEEGVFVSAVNPKLIKDYGNNTLRKVKTDKADARKIARYGLDNWAELRQHTPMDTIRMQLKTLNRQQSLYAKTKTMMKNNLIALLDQTYPGVNALFDSPVREDGSQKWVDFATAFWHVDCVRNMSLTAFAERYRKWCKRHGYNFSQSKAVEVHTGAQDLIAMLPKDALTKTMVRQAIDALNAVSASLERLKAEMQALAAQLPEYPVVMAMHGVGDSLGPQLMAELGDVARFTHRNAITAFAGVDPGADQSGTHEAKSTRVSKSGPPELRRALFLVMDCLLKTQPQDDPVYRFMDKKRAEGKPYLVYMTAGANKFLRIYYGRVKEYLASLEEN

SEQ ID NO: 414130 - protein, 411 aa, unidentified
MEGLTPLHKVVAGIDVHRMLHVITVLVENEDGTLTKHQQSFGGFKRDMRAMVLWLLELGVELVVMESTGIYWKSAYSHLERAGIFAMVVNAHFIKHVPGRKTDMRDSEWLAVLARFGLVRGSFIPPENLRELRLVSRYRRKLKAMLASETNRLHKTLDDAGIKLGGVVSNIKGVSAREMVAGLIAGKTIDDLVNMARGSLKNKRDDLAASLEGDLSSRHLFILAELHEHIALLEQKLAKIDAYLIEAMQPYQWAFNLLQTIPGIDAIASAMILIEIGDDMSQFGDADRLASWAALCPGNNESAGKRKSGKTRKGNAIVRYILCECANAARNTKSSLAAKYRSLMARKSHKKTIVAIAHKLIRIIYFMLSRCEPYRDPGVDYEAISAQKNAPRWIKALKKIGKLPITKPALA

SEQ ID NO: 414131 - protein, 426 aa, unidentified
MTEDVSRYKQFCQFRSTIRSATDTLIVGIDIAKDRHHAFFGTPLGKTLWRRLIFDNNKAGYDKFITQVNSLCAQHSLSKIVFGLEPTGNYHKPLASWLIQKEFMVVFVSGKAVSDNRDLLNGRWDKNDTKDSANVADLVGRGKCQFYDNPGPEIMALRNLLSLRKRLKREEHSIRMRIRNSLLSKFFPEMDCHWGSALEENLAIIKWYLDPKKIAATDFDTFVRHVTKTDRGIRQTRRLSAIYDAAKISVGMPVTTSDRFEAKMLVEKLRQVRTMMSETMEQIEKISSSMQENKPLQSIPGFGPYIAALVQSVIGNPFRFNNRKQVIRLSGFDLNASRSGKTSNSAVPVISKRGNKDLRYALYQAALIASYHNEHFRRIYHRMLKGREAERGIRTKMRVKLAAKMLIIAWTLMKKNEVFDPAYLSS

SEQ ID NO: 414132 - protein, 359 aa, unidentified
MTENAPDRRITIGVDTHLDVHVAVALDERGVRLREIHVPTTLKGYRQLERWALELGPVEVFGIEGTGSYGAGLSRFLGRRGHRVVEVNRPDRATRHRLGKSDPIDAEMAARAALSGVATGTPKAGDGRVEMIRMLKLTRDSAVKARTQSLNQIRALLVTAPIELRESLAGLTVGQLLDRCAAFRPAALDTPTAVARHSLRRLARRNLALRTEAQELGAELRRQVASGAPELLDAFGVGPDSAAAFLVTAGDNPGRLRSEAAFAALCGASPIPASSGKTTRHRLNRGGDRQANAALHRVVVVRLRWHPPTQAYLARRLAEGKTKAEIMRCLKRYVAREIHGLLCPHGSAVHVVEPRIQAA

SEQ ID NO: 414133 - protein, 341 aa, unidentified
MDKELYFGVDVSKKTLDLAYYDGETIDWKNAHIKVSNDAAGFKKIGSWVAKVGKDFDTFLFCMEYTGLYNQNFRLWLESKEYIYGMVEPRKMHRFEPDLDDDQRSLDRIKTDELDAFRIAIYCEQNHKKILRNPSKLPSPVYFKLKRLLAERKQNTKQSVLYKQQLHDICAYDTDLSVERKKLLLKNMQENQKAIDKEIDSYMNEDTSIRKNYNLLTSIPGIGRIIALETIVLTENFTAINNPRKYACYIGIAPFKKESGTSVRKKTGVSKKGFSEAKADLSIAVLSAIKNNPSIRDYWIHKRKDKCGGIVLNAIKFKLVLRMFAVIKRGTPYVETDAYKN

SEQ ID NO: 414134 - protein, 349 aa, unidentified
MTPFEGASVAEASTIGLDIAKHVFQAHGADSSGRVVFRKKITRAKLMQFFASQPRCLVALEACGGAHYWGREIGKLGHTVRLIPPAYVKPFVKRQKNDAADAEAICEAAQRPSMRFVPVKDEAQQANSVVFRARDLLVRQRTQCINALRGHLTEYGHVVPQGTAHVDTLVALVEDATSSVPESARTILTVLIGTFRALQTQITQLDAEIARHAKADPVARRLMTIPGIGPIAATAITALVPAPEGFRTGRDFAAWLGLTPLQKSTGGKQKLGAISKMGERTIRRLLILGASAVVRWATQRGAAEGSWLARMLGRKPRMLVTVALANKMARIVWALLVKGGTYRVPAAAA

SEQ ID NO: 414135 - protein, 371 aa, unidentified
MKEFSKYVGLDVHKETIAVSMAEAGGGEVRYFGEVANTPEALAKLARLLAKGNARLSFCYEAGACGYGVYRQLRELKHNCVVVAPSLIPRKAGDRVKTDRRDSLSLARLHRAHELTPVWVPDGAQEALRDLTRAREDMKHVQRQIKQRLLAFLLRHGKRYSGKSNWTQAHYRWLEEVKFGQPVQQIVFQEYVDTVKAMTNRVEALDKQIESASRESVFWPVIEALMALRGVSLLSATTVVAEIGDLRRFASAPQLMAYLGVVPSEHSSGGKRSRGGITKTGNGHVRRVLVEAAWTYRHPARKSVVLQRRAQCTSEAVQTIAWKAQTRLCQRYRRLEGKGKLKVQVCTAIARELAGFIWAIGQASPRHAAQA

SEQ ID NO: 414136 - protein, 319 aa, unidentified
MAQNDLVVAGIDVAKDKVDVCIRSLSLKRTFASTEEGRRELTSWLRRRKVGKAVMEASGGYERDWAKVLRNAEIEVRIVDPKRVRSFAQSAGRLAKNDTIDAEMIAWFAETFDEARGQAYDETREQLHQMVNARQALKGMQAKLESQGEHALPAAVQRMHARILKTITVELVKFEAAIAAMIQATPRFTELAEIIESVPGIGRTTSAALIAAMPELGQANNKIVAALLGVAPYDDDSGRRRGERHIKGGRRRTRNVFYMACLGAATQHNPVLKAFYDRLVAKGKEKKVALIACMRKLISILNIMIERRQKWDASRYAVS

SEQ ID NO: 414137 - protein, 365 aa, unidentified
MVHETVVGLDVHADSLTAAILPSQSDTPEVVKLSGDLMQVRRLFRRLSAEGPVRSCYEASGAGFVLQRLLAYDGFPCEVIAPSLIPRKPGEHRKTDRLDAIMLARLYRSGHLTAVHVPDEDHEALRRLLRLRETYHAYCTATMHRISGILRNHGHIFKQGKSAWTKKHRRWLGELRQSLQGPLQTALAAELQHLEYLETEQAALDAELERYAASSHFRKAVEALSCLRGVKTLTALTLLVEIGDVRRFRSPRALMAYFGLVPSEHSSGNREYRGSITKAGNVHVRRLLVEAAWNNRHNAGAALVLKRRRQGQPPEIVAIAMKAQLRLVNKFLRLDKRKHRHVAITAVARELCGFVWAILMAVPEH

SEQ ID NO: 414138 - protein, 409 aa, unidentified
MKLFAGIDVSSKDLKVCIMDHEGSTLKSLTVENNLHGSDFLRTQIIDLADEHSCQDIQIGMESTSVYSWHPAMFLHEDEALRKRQAKVYTINAKLVRKFKDAYTDLDKTDNIDAWIIADRLRFGRLPLTMIMQEQYVALQRLTRMRYHLTHNLVREKQYFLNNLFFKCSAFTSEVDSSVFGNAFMELFLEQFSIEEIGSMDVTVLADYLRDKGRNRFPDPEHVAKSIQKAARSSYRLSKCIEDSIDILLAASIETIRSLKAQIKQLDKAIEKLLDGIPNTLKTIPGIGPVFSAGLLAEIGDINRFKDQASLAKYAGLTWLRHQSGNFEADETKRIRSGNQYLRYYLVEAANSVKNYEPEFNNFYQKKYREVTKHQHKRALVLTARKLVRLIDALLRNDQVYTPQRKVNR

SEQ ID NO: 414139 - protein, 343 aa, unidentified
MTTFVGMDLHRAQITYNALNTDSGEVRTGRICPANRGTVRAFLAALPAGETVVAVEAMTGWRFVAEECVRVGVDVRLAEPAETRQRQERKRRAKTDKLDARLLRELLVEGRLPESWIPPEHILDLRAKVRLRKTLVSQRTQWLQRVHAVLFHHGVPVQPGRLARLEARSVHEQLADLQLPEVAEQQITVALRMVEHLNDEVHALDLELERFARRQPGCRALMGHYGIGPLVATAIVAELGDARRFSSSKQAVRCAGLDITVHESDVRRRGGHLSRQGSPLLRWAVFEAAQCAARPASPDHAYYLQVKERLGANRAALTIARKLLRRAHHTLRELGDDAMAPAT

SEQ ID NO: 414140 - protein, 406 aa, unidentified
MNYLGIDVSKSTSRYVLLDNDGEKAAKPFTLDNNSQSFTQLLERLKELNLQSDNILIGIEATGIWWENIYCFMTEQKFKVIVLNPHQTNKFREALRLKAKTDDIDAYVIAGLLRSGEYAASYIPEETIQILREIVKLRHQLVTNRQSFERQAQALLGLLFPEYEKTAIKNPFSVASLAILKAYPTAKHLAETKPKNIEKIVRHIKGNNFNIKEIQTLIETAQNSIYSGRAKDARGMNLNILLTHVETLHHSIAQLDKRIDDILSPQSPDDALSFPGANLLSIPGVGPKTLAAILSIVGSDGSAYPDGKNFIGYIGFFPQIYESGETRRDNIISKRGPSYIRRALYIAAVACLKHNAEFKSLYDRKVSQGKTAKQALIYVAKKLAHLCLSMLKSGEFYNPSCVFMPA

SEQ ID NO: 414141 - protein, 330 aa, unidentified
MGFRYFLGIDVAKAKLDCVLLDSVEERRRSKVVANTPEGFQALVKWLAKQGVGCADVQAILEPTGVYHERALFALAQAGIAVSLVNPAQLRRFAQGLGIQTKTDACDSAVLARFGEMAKPARWQPAPLKARELRALLARRDAVAQDLQRERNRAEQLVLGDTPQRVRQSLADAISFLEEELQALQQAIDKHVDDDPDLKRIWDLLQSIPGVGQRVADHFTALLSGRDFKSAEQLAAYLGLVPIEWQSGSSIKGRARMSKAGSASLRQLLYMPAVVAIRHNPHVKALYERLLAKGKTKMSALGAAMHKLAQLCFGVVHTGQPYRTDWPVRA

SEQ ID NO: 414142 - protein, 402 aa, unidentified
MYNAVGIDVSKGKSTVAVLQPAGVIIRKPFNVNHTSSELDELAKYIGSLEGETRVVLECTGRYHEPVVKTLSEAGLFVSAVNPHLIKNFGNNSIRKVKSDPADAKKIARYTLDNWIELRQYSSMDNTRTQLKTLNSQFSFFMKQKVAAKANLIALLDNTYPGVNKLFDSPVRDDGSEKWVDYAYSFWHVDCVRKIGLKTFTERYQAFCKKHHYNFQPAKPAELFLASKDLIAVFPKEASYKLLIQQSIQQLNLASSHVEELRSKMNELASTLPEYATVMGMYGVGKTFGPQLIAEIGDISNFSHREALTAFAGVDPGVDQSGTHNSKSNKASKCGSNRLRKTLFQIMSTLLQTAPENDKVYQFLAKKRAEGKPYYVYMTAGANKFLRIYYGKVKECIRNLEQ

SEQ ID NO: 414143 - protein, 309 aa, unidentified
MKEQLVYLGVDIAKSYLDAAVGNEKRRFSNDAIGHRELIKWVKQLKAPVQVICESSGGYERALVQGLARARVKISLVQANRVRQFARAAGILAKTDRIDAEVLCEFGKVMRPQTVTAARLEQEHLRELESQRRHLTRLLVMEQNRGARVSDASVQRLNRSLINQIKKQIEQLDLLIKGHIDQSHELSAKAAKLTSISGVGARTAALLLAQLPELGQLNPREVAALVGVAPFNRDSGRMRGKRAIYGGRKPVRHGLYMAALVAAHHNPILRNFYLRLRAAGKPGKLALTATMRKLLIVLNSALKTDLSYA

SEQ ID NO: 414144 - protein, 355 aa, unidentified
MTTPYDYHIGVDYHKSDSHLVVQDSAGKTLRSGRVKNDHQSLGLFLERYRENSHAVVEATRNWMVMYDWLEDICDDVVLAHPLKVKAIADARIKTDKIDATVLAHLLRADLVPEAWAPGEKARELRIALRERMFYVRLRTMTKNRIVTVFDRYPEQTTQLKKLGDLFGKAGRQQLATIKVSDIDRIQIDRGLDFIGDIDGRIKQSEMTIKAMTKTNGNVKLLKTIPGIGEFFARLIDAEIDDIGRFRNPKKLAAYAGLVPSTYSSGGKTYHGKIIKQGNKWLRWAFVEAVAPAVATDPQLRAQYEHLKFKGTNKARVAVARKLLTIAFQILRDQRPYERRANGEEGALSTISRLS

SEQ ID NO: 414145 - protein, 339 aa, unidentified
MTEIKRIGVDTSKSVFTLHGVNLQDLPVLRRDLRRAAFIAFMAKHPPTEVVLEACGGSHHWARVLTELGHRVKLIPPQYVKPFVKRGKNDRNDAEAICEAGGRPNMSFVPVKSAARQAELMVLRSRELLVGQRTQLINALRGHAAEFGVIAAKGTSHVAALLEQLAADAQIPPPARQTLAMLGEQIARLDAQLADITASLLKACKANPLAQALGKIPGVGPITALTLVTEIDPSHFKSGRHLAAWIGLTPKERSTGGKQRMGGISRAGHEGLRSLLVLGATTVIRHAKPGARCASAWLLKLLERRPRKVAAVALANKIARIAWAMMSTGEAYRGITREA

SEQ ID NO: 414146 - protein, 339 aa, unidentified
MQLYAGLDLHSRNTYIGIMDKEFKRVFGKREANKLPVILKTLAPFQDRLKGIVVESTYNWYWLVDGLMDAGYRNLHLANPSAIKQYEGIKYTDDQHDAFFLAQLLILNILPEGYIYPKENRPVRDLARKRLFLVRHKTSHILSLQSLITRCCAQRVSASEIRNFTSNNLQQLLKEEYIVLSAQANLNTIGFLTQQIRQIEKAIKKKVKLKKAFHQLQTVPGIGIILAMTIMLEVGDIGRFPQVGNFASYCRCVSSDRLSNGKSKGHGNRKNGNRYLSWAFTEAAHLSRRYNERFRSYYNRKVAQANTSLATKALSNKLARICYYIMRDQVPFRENLLSQ

SEQ ID NO: 414147 - protein, 349 aa, unidentified
MTMVGGFDVHRKQITFDYVDDDGVVHWGEIRPATRKMLRGWLGKHCLSGDAEFALEGCTGWRYVVEELAMAGVVAHLGDPAEIAGLRGPKKRAKTDRADARLLRTLLVEGRFPELWIPPAQVVEVRTLGRLYCALMEERRAWQQRIHAQLLHQGCPPVTALLSAAGRDALAGAELSGVGRQYVDTALRRTDELGAEIVPLRAQLVNFARHQRGCQALQARHYGIGWLCAAIIWAEIGDARRFSSSDQLVRFAGMDVTVYSSDTKRSPGHLSRQGSPELRWATFEAAKCAAWPGSPDYGYYHQLATKHDGHNGKNPTLAVERKILRRCSHTLRELGDGALSPPQPVREAA

SEQ ID NO: 414148 - protein, 322 aa, unidentified
MAVTIVEEARPITGGVDTHAGTHVAAALDSVGGLLGVREFPATAAGYAGLLGWLGGFGTVALVGIEGTGSYGAGLARHVAAAGIRVVEVDRSDRQDRRRQGKSDPLDAVSAARAAQSGRARGAPKGRDGAVEAIRALMVARRSAAGERTRTINQARALILTGPDDLRTRFTRHAPAALVAGLASLRPRPGDVAGYAVRVALRELGRRAQFLDGQLARLDDLIVPLVTARAPGLLALYGIGPRTAALLLIAAGDHPGRLRSEAAWAHLCGAAPIPASSGKVTRHRLNPGGDRQANHALWRIVFTRLGSDPRAPACSVNVRICP

SEQ ID NO: 414149 - protein, 344 aa, unidentified
MTDPVYILGIDLSTSRLDCATLPDEQSFHVPCSPAGFRTIVEHLAERRAEGLEVLGAVEATGGYERALVEALLAADLPIAVVNPKRVRAYARGVGILAKTDRLDAWVIARYAREVRPRPAAPVSPERRALDDLLAYRSQLVGEISARSQQKRRYSSTATIDRAETALARLRQEKRDLDREIAGMLEEAEALKKTAAVLLSVCGVGPVVGATLLAYLPELGQLGEKEIASLAGLAPVADDSGKRRGRRHIAEGRAKVRHALYMAVVAALKNNAYLRGVYQRLIRAGKPVKVAMVAVMRKLLVMLNAMVRDGATWEPDSETRRQRRLEPADQGEAPVREDTQTIAA

SEQ ID NO: 414150 - protein, 346 aa, unidentified
MKVLIGVDPHKGSVAVAAIDEAKGELLERASFPQDRTGLRSLQRWARRFPERRWAMENAGGLGRHLAGRLAAAGEHVVDVPPKLSARVRVLSTGNARKNDKLDALATALAASRNGRLAQVDPEADSEVLRLLSERREDLVAERTRALNRLHGLLRDLVPGGVAGTLSAHRAARILRGIRPQGASARLRRRLASEVLRDVRTLDRKIADLNGRIEAEVEASSTTLTEIFAIGPILAARIIGTVGNVSRFPTKAHFASYSGTAPVEASSGEVVRHRLSLAGNRKLNYVVHMVATCQARSDARGGAYYRKKIAEGKSRKEALRCLKRRISDAVFKSLMSDSRAPSCSAA

SEQ ID NO: 414151 - protein, 336 aa, unidentified
MTNIIGCDYHPRFQMIAMLDKGTGEVKVMRLEHENGEAKNFYVSLAKGTRVGIEATGATQWFERLMAECGHELWVGDPAEIRARMVRKQKTDERDALHLLDLLLTERFPRVWVPSPEDRDARQLLQHRQKLVRMRTSVKNQLHGLAMGQGLCRKQKLWSERGRKQLEALELGPWASRRRQELLKLLDELDPQIAELDRAVEAEAAKRPEVVLLMEVDGVGPVTGLAYVLTLGPVERFPRSRQVVGYLGLDPEEDTTGGHQRFGHITKQGNTMMRWLLVEAGQTAARLDPELRRVYKRLKARRGANVAKVAIARRLAVRMYWILREAPPAPAGSHVR

SEQ ID NO: 414152 - protein, 393 aa, unidentified
MICVGIDVAKDKHDCVILNSEGKILAGVFTIPNNADGFDTLLQKIRSCTSSDDKIKVGLEATGHYSYNILGFLINQGLPTYVINPLHTNLYRKSMSLRKTKTDRVDAKTIATMLMSNVDLKSYTDTAYHNEELKSLTRYRFDKVQERAQLKQSVSRLVTILFPELEKLVPTLHMSSVYALLIEFPGAKQIAEAHLTHLKSLLKDASKGRYGRDMATEIRDAAKRSIGSVMPAKSLELRHTIRLIRELDSEIKDIEAAIEAIMEELQSPITTIPGMGFRMAAMILAEIGDFSFFDSPDKILAYAGMSPSTYQSGHLSLAGTYSHMEKRGSRYLRYALYNATKYVCHWDPGFAAYLAKKRAEGKHYNVALSHAAKKLVRLIYALEKSRQPYRRAA

SEQ ID NO: 414153 - protein, 306 aa, unidentified
MCCVLMRHRTKKFANTTKGHDELVSWLKGHKIDHAHICIEATGTYMEPVAECLYDAGYIVSVINPALGKAFAQSEGLRNKTDTVDARMLAEFCRQKRPAAWEAPHPLERALRALVVRHQALTDMHTQELNRTETAREVQRPSIDAHLLWLEAELKRLEKQIKDLTDDDPDMKHRRKLLESIPGIGEKTSAVLLAYIGLKDRFAHARQLAAFAGLTPRRYESGSSVRGASRMSKAGHVSLRRALYMPAMVATSKTEWGRAFRDRLAANGKKGKVILGAMMRKLAQVAYGVLKSGVPFDASRHNPVAA

SEQ ID NO: 414154 - protein, 428 aa, unidentified
MHSTQNERINQITSTTLIVGVDIAKFKHVARAQDFRGVEYGKPIAFENSREGFELFVGWYQKIMKEQTCKEVIVGMEPTGHYWLNLAHYLKEQQVLCVVVNPLHVKKSKELDDNSPTKNDIKDAKVIAQLVKDGRYAVPNLPQGIYAELWEAMKIRDHLSTDLRVVQGRVHNWLDRYFPEFLTVFKDWECKSALQMLSLYLLPHELVSRSDEFLLGHLREAAKRGLGLGRVKSLKAAASRSIGMKQGAELAKMELQLLLVQYELLQCKFEELDAKLEELMKQIPYVQKLLAIKGIGRDTIAGFLAEVGDIRQYRHPKQIVKLAGLNLRENTSGKHKGQTKITKRGRKRLRALLFRVVMPLVAKNGAFKALHEYYTKRPDNPLKKMQSLIALCNKLIRILFGIMKKGHEFSEEKMMQDIPRFMEVPLAA

SEQ ID NO: 414155 - protein, 355 aa, unidentified
MERYLGLDVHAASCTLAVISEKGRKLKDFPVETNGQALVEAIRMIPGHKHLVFEEGLQSAWLYETLSPHVDETVVAGIAESRSSKSDRRDAYGLAKKLRVGNLDKIVFKSPRQFTRLRELSRIHMTLVRDTVRVQARIKSLYRSRGILVSGENVYGVRHRESWQKQLSSSAQTRATRLYDHLDFLLEQKKQAEVDLLREAKKHAIVRILETAPGFGPIRAARLVPIVITPHRFRTKRQFWSYCGLGIVTRSSSDWVQTADGSWTKARVPQTRGLSRQHNHFLKSIFKGAATTVTTQRNKDPLYARYERLLDGGTKPPLAKLSLAPMIAATVLRMWKDEEEYDPGRAGLRADKHGG

SEQ ID NO: 414156 - protein, 340 aa, unidentified
MKVSTIGVDIAKSVFQVHGEDAEGKAIIQKRLGRKGMVGFFSKLPPCLVALEACGASHYWGRALRAMGHEVRLIPAAYVKPFVKRNKTDARDAAAICVAARRPDMRPVAIKSEEQQASRALERSRELLIKQRTQLMNSLRAMLAEFGVVAAQGWRGFAELTARLTCENPGLPETLVAALRLVAAQLDNLTPAIEAMEDRIKTIAKADQTMRRLSAIPGVGFITAHAVVAAIGEGRQFACARDFAAWAGMTPREDSSAGKRRTKGVSRQGESRLRKLFALGAATLMRNARSRDDRATKWQRGILARRPMKVAVMAQAAKTARIAWAVLTSGRSYAPPSAAA

SEQ ID NO: 414157 - protein, 426 aa, unidentified
MNYTQNERIAQVGDNTLVVGIDIGSDKHYARAFTERGMEISRKAFVFENTESGFGLLDTWMEKLAGENGKAKIMVGFEPTGHYWFPLGRHLEERGTAFVVVAPQHVKHSKELDDNTQRKDDRKDPRVIAKLVIEGRYSIAYMPEGKFAELRIVYNRRCELVEQQTRVMNRITRWFDIYFPEYRTVYGKVDAISGMMILKKAPLPKDILELGAEGVNTIWRDAKLKGAGMKRAQTLVAAAEHSIGLDGGYAARLDLWQLLEEYELVASQLAKVMEAIEDLLAEIPEAGRIMEIKGVGVVIAAGLLAEIGDIRRFSSPKQIQKLAGLAIVENSSGKHKGRSGISRRGRKRLRKVLFLAAMALVGHNDEFRQLHQYYTTRKDNPLKKMQSLMALAAKLIRVVFGIIRTGKSYDPTKMLSDIRRVEHAAA

SEQ ID NO: 414158 - protein, 344 aa, unidentified
MSNHDSSGIEVSAKELLVKVRRPDEGVRERRFPNSREGHQEILGYLRRAGRVVRVCMESTGLYGLDLALALSGQEGIELMVANPRAVRHFAHALMQRSKNDPLDAGVLEEFAARMPFQPWVRPAPAALALHALARRLHELVEIQTAEKNRQHAAGLSQAIPAAVRRDLVRSLRAQQGAIERLTREARKLIAQDAPLRERFELLISVPGIAETSAVQLLGELGVLAPDLSARQWVAYAGLDPRCFDSGSSVHKKPRISKAGNKHLRHTLYMPALVAVRHDPHFRGFYQHLQAAGKLKMQALVAVMRKLLHALHAMFASHQPYDGSKLFQLTSTPAQEVASAPALA

SEQ ID NO: 414159 - protein, 466 aa, unidentified
MKKISTAAAKATRNFRDHKLTIGLDLGDRSSWYCVLDEAGEVLLEQKLGTTPKGMQEVFGGMPRSRMALETGMHSPWVSRVLSELGHEVIVAHARNVRLIGESRRKDDRLDARTLARLARIDPQLLAPVKHRSAQAQAHLTVIRARAGLVRARTALINTARGLTKSYGERLRGCNPRNMNPEKAQGLSPELQAALEPLLAAIESLSERIREYNQQIEKIAGESYPPVARLKQVKGVGTLIALTYLLTLEDPHRFRKSRDVGCYVGLQPGRRNSGQSEPQLHISKEGDPYLRTLLVQGAHHILGPFGADSDLRRWGLKLAERGGKNGKKRAVIATARKLAVSLAKSSSATKNGAILGSEGLNTISMLRQSTETLGGREGWESGTPVGACVAHIYILRTGGKLVWTRQLDRNDGGGLPIAPAKGPDLRLPNEFCRSAFPSRVQDACGPHGSNEHTPRAIASDGVHSPR

SEQ ID NO: 414160 - protein, 401 aa, unidentified
MEGPIVSIDVSNGNSHYMCFIKNNKHFGKVKKIDHDIEGFKRLLEDIQKLEAETNEKVCAVFEATGVYTKPLERFLSKNSIKTYMINPLESARKRKEEIHNKKTDKLDPISISKVYYDKEKMMELKKKDETYNWLRKKNRLYEDQLNHLRKYKVTFQNQLSICFPGYLDLFKDGYSDIPMTILKKYPHPDLLKNKKAETVARYLEKNTCHNHKVSLEYALKIIEFAKKTYPGCEKDDVEVEIFKILLDKVIETQRECEKTLNEMITVASTLEEYRYILSIDGIGTNLAARIIAEIGDIEEFKSREALVAYAGLDPHIYQSGDQDGKHLKISKKGNKYLRCLLFLAVGCSIRGAKDNPVNRFYQKKKQQSNPLNSKAAKTAYTAKLLKIIYGICKNKTTYER

SEQ ID NO: 414161 - protein, 350 aa, unidentified
MLIIGCDFHSRFQQIAMLDPQTGEMIERRLEHENGEARKFYAGLATLARVGMEATGYAQWFERMLAEQGHQLWVGDAAEIRAAMVRKQKTDSRDACHILDLLLRDKFPRIWIPSTEERDVRQLLRHRYKLVCMRTSLKNQLHAMAMGQGICRKKKLWTAVGRKELEGLSLGPWASRRRQQLLEMLDQFEPVIDELDRAVIQEAEKRPAAVRLMTQPGVGPVTALTFVLTIGPVSRFQRSKQVVSYLGLNPTEESSGGRQRLGSISKQGNSMLRFLLVEAAQTASIYDPELRRDYQRLKFRRGSGVAKVAIARKLAVRLYGKLREAAQPVPPAPMQGSPAVSVVGESLSCF

SEQ ID NO: 414162 - protein, 433 aa, unidentified
MEVMHERVAGLDAHKAMIVACVRRIVGGKVSRECRTFETTTAGLEALLGWLTEAGCTDVAMEATGVYWKPVWNILSDGAFELIVANAAHIKNVPGRKTDVNDAMWIADLVACGLIKASFVPEEEIQELRSLLRARKQLTREQTSHIQRIQKTLEEANIKLDSVISDILGISGRRMIEAMIAGVRNPLRLAELADRRIKASPKALYDALHGRLTDHHRFMLKLYLGQHDSLSEAIARIDRQVHGLIIRMDAEVKAGQATFRALIILLCSIPGISTLAATVILSEIGRDMSRFPTSGHLVAWAGMCPGQNESPTGQARGLKAHGKRKSSRLRKGTPWLKTMLVQCAWAASRKKDSYYKAQFNRLRGKRGPKKAICAVAASMLTAIYHMLKDGTFHQDLGADHFDRRSTEVKAKRLVAQLTKLGFQVQLQPLAEAA

SEQ ID NO: 414163 - protein, 349 aa, unidentified
MSEYDGHQYVGIDLHRHRSVIVRHDAEGNQLSLTRITNDPIALAEEISKAGEHPDVVLEATNGWYWAADVLTDAGARVHLAHPLGIKGMSARRVKTDARDAADLADLLRMHRLPEAWIAPPALRQLRELVRHRVKLVHQRSGLKASVHAVLAKQGLAVPVSDLFGVAGQRWLAGAPLEAAYRARVNSLCRLISEYDFEIDLMGRLVSTRLAADPGYGRGYRVIQQIPGIGPVLAVVFTVEIGDVHRFGGARHLCSWAGLTPKHRESDTTVRRGPITKQGSTLVRWAAVEAAQKVPGSCAWIAGARAGITVRRGRNIATVAVARTLLTLVYYGLRDGHIRALQTTGRQAG

SEQ ID NO: 414164 - protein, 343 aa, unidentified
MIIGCDFHPSWQMISWLDTESGETGERKLVHASGEAEQFYAGLTGTVRVGLESTGNSHWFVDMLIEMGHEVWVGDAAKIRAMQVRKQKTDRRDAAHILDLMVSNGFPRIWTPSKQERDQRQLLIHRYKLVTLRARVKNELQHLALNKGMQKGRSLWSKEGQKLLLEMPLDYWAGARRENLLELLKSMDQKITVLDQAVKKAAEENEKSRLLMTQPGVGPITSLAYVLTMGDVTRFKRGKKVASYLGLIPREYSSAGKQRLGAITKQGNRFMRMLLVEASQVVVRYDPGFRSEYLHLCHHKPKAVAKVAAARKLAIRLFWMLRTNTPYPEVVRIESSSRVPLDE

SEQ ID NO: 414165 - protein, 310 aa, unidentified
MDAIVVGIDVSKDRLDVHVHPSGESFAVARKAEGLEALITRIAPLGVAAVGVEATGGFETIVAASLSAAGLPIIVVNPAQVRAFAQALGKRAKTDPIDAAVIARFVEATKPTIRPLPDAETRLLASLVTRRRQIIQMIVAERQRERQIPNRHLKKSVVRLLKALEKELNALDIDIDETVRGSPMWCEKEDLLKSVPGVGNVVARTLLAEMPELGNLDRREIASLAGLAPWTRQSGRWRGKSFTGGGRANVRAVIFMGAMVGKRCNPVLKAFYDHLVAAGKPKMVALIAVARKLLTILNAIIRDRKPWQPA

SEQ ID NO: 414166 - protein, 334 aa, unidentified
MNDTIYDHYIAIDWAEKNMAIARMTKKSNKISAIDVPADLSNLKAYLKNLKGTKVLVIEETTTSQWLYVELQDYVDRIIVCDPHRNKLLSEGAKNDKIDATKLVTLLKAGLIKEVYHSNNKFIYFRRLVSGYDDLVKAGVRLKNQRSSLFKCCGKTGKNEPGKLELESDNFVLQCLNRQIDAYEEEKSGYENEFKSLAKKHPEIRYQTSLPGIGHINAVKIVARVVTPYRFADKGHYWSYSGLIKHEKISGQKSYGKRSPRYCRQLKEAYKTGTNAAIGGNNPINDYYEYLIREKGEIPYNARHKACRMLATLSLGVFKSGRKYNPFKKEFVNT

SEQ ID NO: 414167 - protein, 337 aa, unidentified
MIVVGLDVHKHSLTAVAVDELGRSLANHAGPVGAQVVGWARSIDGDLLFAVEDCRHVTRRLEQLLLEQGERLVRVPPRLTAPQRRRGRTRGKSDQIDALAIARAALQEPHLEGPRAGEETLHELKLLVDHRDDLVAERRRCQQRLRWHLHELDPSLEVPLGALDRTVWLDRLGRQLARREKTTQVQIARDLLGRCRSLTRTISELDQELRAQTTEIAPQLLELAGCGPVSAAKLLGEIGPIDRFRSDAQLARHAGVAPLDASSGKHQRHRLDRGGNRQLNCALHRIAITQGRVHPPARAYLERKQSEGKSRREAIRCLKRQLARTVYTTLKAESALT

SEQ ID NO: 414168 - protein, 356 aa, unidentified
MKSGDYDGYTGEIVSESTFASDVKLVIKFIETLKSRYENDVEIKCGYEAGCLGYSLYKSLTARGVDCIILAPTTMQVSAKNKMVKNDRMDALNIAKNLASGSYKSVYVPDEEDVEIKEYIRMIHDFKKELKRVKQEICAFVLRHGYQYDGKSKWTIRYMNWIRELEMSEIQRETLNEYIAEMENLNDKINRFMNRIDEMYQSERYHEKVSKLRCFKGIETFAAMTIQVETADFERFPSAKAYASYTGLTTGEHSSGDKNNRIGITKQGNTVIRKTLVECAQSLVKGNVYAKKSQGLKSRQKGMDVNIIAYADKATERLKKKYQKLIERNVPRNKAIVAVARELACFIWGMETGNIH

SEQ ID NO: 414169 - protein, 359 aa, unidentified
MKKVFIGVDVSKEKLDATIIEKTEERHEVTGYETFENSKDGIRKLSAWVRKTAKATKEDCLYCAETTGGYDRLLCEQLYAKGLTVWRESALEIKRSSGLRRGKDDKTDSKAIAEYAMRHADKAEPYRPADKRLEELRELYLYRDSLVEERKAKATRAKEIKATCANSPSATFMHKTSMEDVKRIEGRIRECEKRIVRLIASDEGLSRNYGHVTSVKGISLVNGVALLVYTANFTKFDNPNKLATYYGVAPFRNRSGSSVNSRADVRCYSNRKLKGQLSQAALIATLYNPTLKAYHDRLIAAGKPRGVALNNVKNKLLHIVFSLVAHDCDYEENHEWKRKLQNSGTGKTEAVSEQNCHQP

SEQ ID NO: 414170 - protein, 372 aa, unidentified
MSQSSTLYVGMDVHKESIAVAYVAQAHGAEVISLGTIGTRQCAIDKLIRQLRSKSKQLVFVYEAGPCGYWLYRYLMKQGYVCWVVAPSLIPKKSGDRVKTDRRDAMPLARLMRSGALTPVSVPAVDDEAIRDLSRAREETLRDLKAAKLRLKAFLLRHDIRSTGRANWSPAHLRWLSEVVCPTPAQQMVFQEYVQTVTAQTERRGRLELALHEQVQTWRLAPVVEALQALRGVQFTVAVTTVAALGDLTRCENPRQLMHYLGLTPSEYSSGGRRQPGSITKTGNTHARRALVEGAWAYRYPAKVSRHLQLRLEKLPKVIQAISWKAQVRLCKRYRQLMAKGKNANQVVVAIARALSAFMWAMAQQVTVPPKA

SEQ ID NO: 414171 - protein, 370 aa, unidentified
MKEYSEAFIGFDTAKKKHAVAIADVGREGEIRYLGEIDSSPLTIERMIRKLAGRYEKLHFCYEAGPTGYGLYRQVRGLGHHCTIVAPSLIPKKSGERLKTNRRDAVSLARLFRAGELTSVWVPDTVHEAVRDLVRARETASQDLRRKRQQLLSFLLRHGRIFSGRQHWSRAHLRWLAQQKFDHPAQQIVFQDAVDAIDDAAARLRRLDAQVAAIVPSWSMAPVVEAYQAMRGVSFAVAVTFVAEIGDLRRFDNPRQLMAFLGLVPSERSTGERVRRAGLTLAGNKRARRVLIEGAWSYRYPARVSQTLQARLEGLPKAVREIAWKAQIRVCARYRRLNAAGKKLPVVIAAIAREMAAFLWAIARHVAPAA

SEQ ID NO: 414172 - protein, 337 aa, unidentified
MDIRVIGIDIAKRYFQVHAVSSTGAVSIRRKVSRDGFLKLLAGLPPCLVGMETGSGAHYWARQLAQLGHSVRLMPPQFVRPYVKTNKNDAADAEACCEAVQRPGMRFVPVKSVDQQTAMALHRVRDHLIRQRTGTINALRGHLAEFGIVSAAQRTGLNQLIAIVEDDGAGELPFAMRAILQMLIDEIRAADERIAELDRKLKDAAKEDEACRRLIEVPGIGPVIATAVVANVQDDSRFTSGRHFAAWLGLTPKQHSSGGKERLLGISKRGDAYMRRQFINGARALVRIATGRAGGLWDWINALLARRSFNVTTVAVANKLARIAWSIQARKTRWRPA

SEQ ID NO: 414173 - protein, 364 aa, unidentified
MHSISNTELSSLEETRCQFNGSKADIKLGIDVHQEFYVVVMQEGGSNPKPPQRFAKGAFLYWAAKLKQKSGAEIYAVYEACGFGFSLQRQLSALAIQCYVVCPQKLDEANKRVKTDGLDAKALCLKLDRFVQGNRCALALVRVPTEEEEQKRAIHRQREQLVGARKRLEAQGRSLMVNHGFEPVQNWWKPRPFAALDVPQWMRELLSNSQPILVALQQKIAAQSVQLQCAAAPNQPRGLGKMTSVVLDREIGDWNRFHNRRQIASYTGLCPGEYSSGNTRLQSCVTKHGNPRLRAALVELAWRLVRFQPNYKPILKWKRLLGKGALATGAARKKAIVAVARQLAVDLWRIKTGRLRAEELGLIN

SEQ ID NO: 414174 - protein, 352 aa, unidentified
MAGVMIGIDPHKASHTAVAISGSEEPLGQLRVRASAAQAERLLEWASAWPERTWAVEGAGGLGHLLAQQLLSAGERVLDVQPKLAARVRLLATGNVNKNDPNDARSVAVAALRSPGVRQARPDDHAAVLKVWSKRRRDLASSRTQVVCRLHAVICELVPGGVPKKIIAAHAARLLGSITPPDAVAAARWELAAALVEDLRRIDGQMRETRKKLDAAVRASGTSLTGVFGVGPVIAATIIGEVRDVSRFTSRDRFAAYNGTAPIEVASGKRKVNRLSRRGNRRVNHAIHMAAVTQVRQKHSEGRAYYDKKLTEGKTHREALRSLKRQISDAVFTRLRADARRAAAQVRDPGGQ

SEQ ID NO: 414175 - protein, 347 aa, unidentified
MQSTLIAVDTAKQVFEVAEADAAGKVRRRLRLNRPQFSEYLATRAPARFVLEACGGAHHWARMMQGLGHEVRLLPVPYVCAYRRRNKTDRADCLAMLEAAKNPEIHPVPVKTPEHQAIQGLHRCRSAWMETRTARINTLRGLLRELGIVLPVGAASALRQIPEALEDEVLPGTLRSALQSLLDEIHDLEARIAAVEHQLEAISRQNPVIEHLRDIPGIGLLTATALYASANDAKHFRDGRHLASWLGLTPREHSSGTIRRLGGISKRGDRYVRMLLTHGARAVLLRAGQMQRAGQALNALQRWALALKERTNHNKATCALANKLARIAWATWRHGTVFDPNQAASVA

SEQ ID NO: 414176 - protein, 408 aa, unidentified
MKTLHKRCAGLDVHKAEVVACLRLISERKVEREVRRFPTTTQGLLALAEWLESARCTHVAMEATGVYWKPVWHILEGHFVLILANAAHVKNVPGRKSDVNDATWLADLLAHGLIRSSFVPPPAIQELRDLTRTRRQLTREIVQHVQRIQAVLEEANIKLCSVITDIMGASGRRMLKAMIAGETDAEKLAALGHERLGCTRAELVEVLTGCVREHHRFLLGQHLRTIEQLEDSVAAFDARIEAALSPFHDIVERLKEVPGLGATATETVIAEIGTDMSPFPTVGHLLSWAGFVPRLDESAGKRRSTRIRKGAPWLKPVLVQAAWGAARKKNSYFQAQFLRLKARHGAKKAAIAVAASILTTVYHMLRDGTCYQDLGPEYFTRRNPAQAAARLANRIRNLGYHVEIRAAA

SEQ ID NO: 414177 - protein, 346 aa, unidentified
MLHVGLDLSRKRIDVCLISDQGELIDRFSAIPDHDGLHGLARRVAVYGEPVRGVVESMNGARLVHDELVSHGWEVLVADAQKVKGLAPLACKTDKIDSRVLAELSFRDLVPAIWLPTFELRREREISRWRLHLVKHRSTLKNRVHSTLITFGHQRHMSDLFGVAGRKLLKELDMPEPWRSHVDASLVLIDDLEARITQIAKDLRRSGADHPYVPTLMTAPGFGWITSFTVACEIGEMSRFASPVKLTGYTGLCPRVKQSGQMDQRGPLSKHGPRYLRWGLMEAAIAASSHPLYRERYQRTKRRLGRQRGPKVAQIDLARQLAEAIWYMLTRNQPFAPAGAIIRLAA

SEQ ID NO: 414178 - protein, 400 aa, unidentified
MLLFFEVITMIFVGIDVAKDTHYAAVSDDSGAVLVKPFAFQNNAEGFCLLLKKLSEFDRSKLLIGLESTGIYSENLICFLYESGYKLAVINPIQTATLRKTAIRKTKTDKVDTMLIIKSLMVNSYRLYSQRDADSLKLKTLCHFRQNLKKSKSRLKIQIAGYVNLVFPEFGKFFKSGIHIAASYALLKKYSSPKEIAALRTSTLCTLLSKASHGRFGKDTAEALKSLALSSVGVKNPYISIQIAQTIAQIELLEQQIKDLNSAIEEAMESINSVLMTVPGIGAVNAACILGEIGDIKRFSKPCKLLAYAGLDPTVRQSGQFTAKSTRMSKRGSALLRFALINSAWQLTLNDTTFKAYYDLKRSQGLNHYGALGHVAHKLTRVIFKLLTSDTPFNPAKLVA

SEQ ID NO: 414179 - protein, 382 aa, unidentified
MQASTAATPTVEHCGTIFVAIELSQKSWLLTVHSPERGRMSRHKLEGGDHAELLALIARARARAAEKLGSVPEVVSCYEAGYDGFWLHRLLEAAGIKNFVFDAASIAVEQRARRAKTDRIDGELLLRTLMAYLRGEPRVVRIVRVPSLEAEDARRASRERDRLITEQTAHTNRIKALLRLCGMAVGNPRRRDWLAWLARQRDWQGQPVPPQLLAEVTREHARLMLMRDQLAALEEAQATQAAPVPAPTAERQKLLLRLKALGPAFTATLVNELFYKNFRNRREVASYCGLTPSPWKSGSTDREQGISKAGNRRARHKAIELAWLWLRHQPDSALSRWFRTRTATAGKRTKRVAIVALARKLIVALWRYLTTGLVPEQAIMKT

SEQ ID NO: 414180 - protein, 421 aa, unidentified
MTRLPMDEFAAFVGLDWADAKHDVCLQAAGSQKREFSVLEHQPDTIDAWVSTLRTRFKGQPIAICLELNKGPIVSALGKYDFLVLFPVNPLTLARYREAFTPSHAKDDPSDAELQLELLLTHRDKLKPLNPQSTAIRALEQLVEHRRRLVGDKVRLTNRLTSALKNYFPHVLQWFDDKDTTIFCDFLTQWPTLKAVQLARRSTLERFFRAHHVRYADVIDQRIQAIKSATPLTTDAGVIAPTALLVQALVSQLRVTLQAIDAFDAAIAQRAQSHPDFPLFNSLPGAGAVLAPRLLAAFGEHRDRYTSADELQKYAGIAPVTERSGNKSWVHWRLQCPTFLRQTFVEWAAESIRHSFWARAYYQQQRNKGSSHQAAVRALAFKWIRILFRCWQNRTPYDESVYLNALERRGSPLIHNLVRDS

SEQ ID NO: 414181 - protein, 331 aa, unidentified
MGCDIAQDTFAFCLRDQAQLLLEGEILNSKTSIRKWLQELKRIHHVDLTNVIFCLEHTGIYGMLLMRTLHERSLTVCVEGASNIKLSLGLQRGKNDRVDARRIAEYAMRYTDRLKQWKPRREVLQKLQLLSGMRSRLIKARNVLSSHTQEVKRFMNKAEYMLLSKGTQEVLKAIERSINNADQKIAGLIRSDENLNHLSKLVTSVDNVGMVTCAAILIRTNEFQDFKESKKFSCTAGIAPFEHASGKSIRGKTRVSHQAHKDLKTLLHMCAVGAISREGELRDYYLRKVAQGKNKMLVLNAVRNKLVGRIFAVVRDGVMYQKDYQYNLVIS

SEQ ID NO: 414182 - protein, 382 aa, unidentified
MKNLAALKEHNIAKTNVLYMALELGQGKWRIAFGNGAKQRQIVIEAADLVKLSEEIQKAKHKLHLAADVQFISCYEAGRDGFWIHRYLTECGIINYIVDSSSIEVNRRARRAKTDRLDAEKLLKQLIRFVGGEADIWSVVRVPNQEAEDARRLHREMQALKKERKRHINRIKALLALYGIRYKNKSRQKWENYIEKVRDWNNQPLPTHVKAELLHEIRRLNLVEEQLTEIETQMLQAMQTNNDPVIQQIAQLIMLKGVGLISAWELVMEWFSWRNFKNRREVGALAGLTGTPYDSGNSQREQGITKSGNRRIRALIIQLAWMWLRYQPKSQLTLWFNKRFNESKRFRKIGIVALSRKLLIALWRCAMQNTIPTGAELKVAEV

SEQ ID NO: 414183 - protein, 349 aa, unidentified
MNRTTYGLDIAKNVMQLHWVDGETGEIGRKKLGRAKLSEFFAQRQPARVAMEACGSAHHWARELGGLGHQVELLPARQVRAFVRGNKDDAADARAIWLAAQHSDIRRAPVKTVEQQAAMSLHRARSHWVSVRTATVNMLRGLLYEFGVVLPGGKMAGLKTIGAKRAEIDDKLPPLMRGLVDLELEALKGVELSIDQLEAEIAGQQRQLDKARTLREVPGIGVLGATALAATLGDASGWRSGREFAASLGLVPAHTGTGGKTRIGHLTKRGDPYLRTLLIHGARAVITQAKVKPAWLEELLRRRPLNVAAVALANKMARTAWALVAHGRAYRPEWKSTPPSGCSAQAQAA

SEQ ID NO: 414184 - protein, 416 aa, unidentified
MSLALPEALFFTGIDWAAETHAVCVMDAGGTIVAGFTIEHSADGIALLTGRLARYGTPGSMPVAIERPNGRLVDLLLEAGHPVVPVSPNAIKTWREGEVLSGAKSDAGDAAVIAEYLRLRQHRLRTAVPYSDETLALRTVVRSRGDLVEMRVAATNQLSALLEAHWPGARAIFADVESPISLKFLTRYPTPAAAAHLGEKRMAAFLVKHGYSGRRTAAELLARLRAAPAGTSRESLTEALRDAVLAAVGVLAALNAAVKNLDRSVAAHLGEHPDGAIFTSLPRSGQVNAAQVLAEWGDCRQAYDGPDSVAALAGCTPVTSQSGKHRSVQFRWACNKRFRVAMTTFADNSRHASPWAAKTYSDARASGKDHPHAIRILARAWIRVIWPCWLEGIPYDPARHGAAAALARQTAQPIAA

SEQ ID NO: 414185 - protein, 344 aa, unidentified
MKCVLVLDVAKSKSMFMLSSDVGEVLLEPTEYIHNKSDFERIDSYISKLNIKDNLTIIMEATSIYHKAPERFFKENNYHVIVFNHLIGKEITNTIRKTKTDKQDCIKLTNLFWKGSIPDRNYTEDEIYTKLNELSRQYYHLDEGLTRHKNRYKELLHLCFPEFELCFKDGKIYDLTALNFIKEFPHAYIIKDKRVDALAYNMANTNDRHINYYKRKSNIIKEYAINSYPGVSENSKDVDNLKQLANIIIEIAKQKEIINEQMIELAKQTKNFECINSLFGIGELSASLIIAELKDITRFNNIKQINASCGLDPTIVQSGKSIDYHGPISKRGNRYARKILFNCS

SEQ ID NO: 414186 - protein, 357 aa, unidentified
MAQIKQLDFRGTTIYCGVDVHKKNWRVNIQDSEFELEDFSQDANAALLHKHLNRKYPGAKFKVCYEAGFCGFNAQRYLSSNGIECWVINAADVATTDKEKRQKNDKIDARKLCEHLQTKKAKSVYIPQTNWEHGRSLVRARSRIVGNQTRSKNRIWQLLHFSGLTLPKNYEAGQYWSKNFIKALQALDCGSDALKTTLELYIKDYQQTRNLLLDATRAIRKLCAESPYKKLILLLRSIPSIGEINAAIMLFELQDVKRFKHLDHLCSYAGLVPDTSDSGDTKVTKGITSRTNHFLRAALIESSWAAIRKDPALLMKYKAYCKKMDKNKAVMRIAKHLLARINYVLKNEKEYVTGVVA

SEQ ID NO: 414187 - protein, 379 aa, unidentified
MNKILYVAIDVDDNAYHGHALAGDETEGADLVTKPSAAHLIQTLRKIQRPGYQITICYEAGYLGYSLYRALVKAGFACDIIAPSLIPKPPGARVKTDRIDAQKLALYYKQGLLTKIHVPDETQEALRDLLRSRHFLRRQTVRVKHHLLSLLRRLGLDYRQQTQNPSAAHWTQVHRSWLTSRLKELENPLVKLNFETLLGRIRLLEEQIHSHDETLRTLALDPKVWPPVQALCCYRGLDVLSALTLVTELGDIRRFDHPRRLTSYAGMDLIEHSSGGKERRFSMSRMGNRHIRTTVIEACQYAFNTPVISQLLQKRRQETPAHLVAIADRCMQRLHQKARRLLYRDKPRNKIKAACAREMLGFIWESLNAVASTTTVRKG

SEQ ID NO: 414188 - protein, 356 aa, unidentified
MTKVKANFENQIVSVGLDIHKRSWNAAIYLGNQYIRNIHQPPNPQALLHYLRHSFPNAHYVCAYECGKFGYWIQRAFSQMGMECLVVNPADIPSTHKDEVYKTDHRDARGIGQSLSAGLLKSVFIPQEEQEADRHLVRQRKKIWRDLVRCKNRLKGFLDYTGTTIPAAFDNANWSRNFINWLNDLKFVHPSNRVTLDYLIKELELLRKELLSISNTIRKLMRSKKYNRLYYLLRSVTGIGPLTAASLLTEIGDMKRFQSFYHLNSFIGLMPMEHSSGEKEMKGRITVRKHRQLRSDLVECAWTAKRTDPALALYYSEQIARGKNGKAVIVKVARKLLSRIRYVWLSGEPYQTSIVK

SEQ ID NO: 414189 - protein, 344 aa, unidentified
MVIVKQCIGIDVSKDFLDCCIGSIDISQEQKLSKTRKFNNTESGFQELLKWVNKERSDVEVIFIMEATGVYYENLAYWLNNQGEKLCVLLPNKVKHFAKSLNIKTKTDSKDAQLLSRLGLERKLDYWKMHSKAMREIKALSREYRENKAKLVLIKNQLHAKSHSYSCPKSTEKRLKRQIKLLETQLKEIESELRAQAKTDFSLSEKIEQLSTIPGVSFITVICVLAETNAFALVSNAKQLVSYSGLDIQLNQSGQREGKTKISKKGNNFIRNALYMPALCSSQHNPTMKAFYQQLSERKPAKKIAVTAVARKLLILMYTLWKTDSEFDVNYQTKKEKQIETGDL

SEQ ID NO: 414190 - protein, 387 aa, unidentified
MYYVGIDIAKLNHFASIVSADGEVLVKPFKFTNDNDGFCTLLSALASYERGSLIIGLESTAHYADNLVEFLVSKRYQVCVINPIQTSTMRKNNIRKTKTDKVDTLVIARTLIAQPHRFFSQEDIDLMHLKNLGRFRQKNIKERTRLKIQLTAYVDRVFPELQYFFKSGLHQKTTYALLKEAPTPELVASMHLTHLAHLLEVSSHGHFNKEQAKELRILAQKSVGSSDRALSLQVTQSVEQIELLDRQINDVESEMTKIMLGLDSVIMTIPGIGYINGGMILGEIGDIHRFSKPCQLLAFAGLDPSIYQSGNFNASHTRMSKRGSRVLRYALINAAHNVVKNNNTFKAYYDAKMAEGRNHYNALGHCAGKLVRILFKMLTDDVAFNLE

SEQ ID NO: 414191 - protein, 388 aa, unidentified
MLLDHPSDGLAAIRTQFGAIFVSLELSRSTWLVTSLSPCKGEKMSKRSMKAGDLSELLKLFAELKRKAQARTGESYPLITIQEAGLDGFWLHRALQQEGIESHVVDPASIATPRRRRRAKTDRLDGETLLRTLLAYKRGEVRVCAMVVAPSPAEEDRRRLCRERETLIAERIEHVNRIKGLLFAQGIFDYAPLRRDRRKRLEALRTGDGRALLAHLKAQISRELDRLELLLDQITAVEREQDALLAASKAAGEKTVSNPVAMLLELKSLGPNFTAVLWSEAFYRQFANRRQIASYAGLAATPWRSGGIEREQGVSKAGNPRLRTTMIQLAWLWVRHQPQSALTQWFKVHSQRGRKRAIVALARKLLVALWKYVTAGVVIEGAEIKAAA

SEQ ID NO: 414192 - protein, 318 aa, unidentified
MPESIVVGIDIAKKTFDAAIGVAGHTETFSNDDAGHDALLAQLAQRPVELVVMEATGGLERDLACALDAAGFAVAIINPRQARSFARAMGYLAKTDRIDAKALAELAQVISHHAERERFITPLPSPDQQALQALVARRRQLVAMHVAEHQRLSVCHAAAQKSIEAIILAIRAQIDDVEAELARHIQTHHADLAKRLESVRGVGPATVASLIADLPELGHLSRRQISALVGVAPFNRDSGQMRGKRAVFGGRGQIRRHLYMAALAAIRFNEVIKCFYNRLVAVGKPKKVAIVACMRKLLTILNAMVRTGKSWDGSYHLA

SEQ ID NO: 414193 - protein, 372 aa, unidentified
MREPTTFVGMDVHKQDIAVAMLVPGRSDAVEWRVANEPAAVQRLAKRLQREGAGPVHCVYEAGPCGYALQRQLQARSLSCDVVAPSMIPIRPGERIKTDRRDARKLAEMARARLLTVVRPPSEDEEAVRDLCRGRDDARLDLMRARHRLGKFLLRRGRVFGQGQQRAWSQAHRTWLGTQSFERTAERVMFEDYLLAVEQLEARKRSLEQHLEDLACEPRYAEAVGWLRCFRGIDTITAITLLAELHDFRRFRAPNQLMAYLGLVPSEHSSGPRQQRGGITRTGNRHVRRLLVEAAWHYRHKPRVGEKLAARRHGQPAAIIALADRAQLRLCRRYRRMERRGKHTTKIVVAVARELVGFLWAALTPATPAATQ

SEQ ID NO: 414194 - protein, 340 aa, unidentified
MGTVTTIGLDLAKNVFQVHGVDADGVAVLRQRLTRSRLLKFFAKLPPCLIGIEACASSHFWARQLIALGHDVKLMPAQYVKPYVKRGKNDAADAEAICEAITRPTMRFVGIKSPEQQSAMMLHRVRLILNRQRTQLSNALRAHIAEFGIVAPIGRNGIDQLLDIVADTNDARLPAEVRTCLDMLAAQLRIVKEQILENDRRIMASARETEIGRRLMEIPGVGPLLASAIVATVPDPSIFRSGRDLAAWIGLVPRQNSSGGKERLGGITKAGHRYLRQMLIVGAIAVIRFAERHKSKRPWLVQLLARKKVKVAAVALANKNARMIWAMMTNGERYREPQIA

SEQ ID NO: 414195 - protein, 315 aa, unidentified
MTKPAATKISVGIDVSKSTLEIAIHESGERWSCNNKTAECTALALKLKQLQATSIVLEATGGFETLVAATLSAADLPVIVVNPRQVRDFAKATGQLAKTDLIDAQVLAHFAAAIDPQPRPSKSAAAQHLEALLARRRQVVEMLVAEKNRLANNRDRAVVKDLKSHIAWLETRLKSSDDELQRVLKASPAWCQHDALVRSVPGVGPVLSLTLLAQLPELGQLNRREIAKLVGVAPFNRDSGRWRGARHIWGGRAAIRSPLFMATLCAIRINPAIRCFYQRLIKVGKAPKVAITACMRKLLTILNVMIKTQTSWRSA

SEQ ID NO: 414196 - protein, 323 aa, unidentified
MIDKEGINNEAQSFVGFDVSKASVDALSLPDGEYKRFENTDCGLQQCLDWVQGKRHCLCVVEASGGYETALAGVLAAAGVAIAVVNPKHVRDFARGMGILAKSDRIDARVLALFAQKRRPPIRALPSETQRSFIDLVDRRRQLVSMRAQEQTRLAQAKGRARTSIQAHIKWLNAAIDDVDRNLNDTLRGCELWLVDSQLLDSVPGVGKVTICTLLARLPELGHLDRGAIAALVGVAPFVRESGQWRGRRFIWGGRAEVRSVLYMAVISAIRCNPVIKAFYRKLLAAGKAPKVALTACMRKLLTILNCMMRTRTHWNPPPAQNT

SEQ ID NO: 414197 - protein, 313 aa, unidentified
MAFLHQQPQLCLGLDIAKDTITAATGTTTRVIANQRRAIRAFLKSHKHAELVVCEPTGGHEGLLLDECLRAGIACHRADTLKVKSFIRSYGTHGKSDAIDAVMLAAYGRERWEKLALWQAPDPDQVRLRALVRRRQELIAIKVAENNRAKAPGGCDLATSFEAVIEAVEHQIQAIEAAMRDLIANSTTLRARAAICTAMDSLGPIMAAKLLAILPELGSMTRRKAAALAGVAPHPNDSGQKQGYRKIRGGRPEVRSTLYMPALRAAAGHGEFAAFYRRLIANGKKPMVAIAAVMRKIVVTLNARLRDAMIPQS

SEQ ID NO: 414198 - protein, 413 aa, unidentified
MRLFAGDDWAEDHHDIELMDAGGRRLAKARLPEGVAGIARLHAMICEQLGEDADEDDAGQVAIGIETDRGPWVAALIAAGYTVFAINPLQASRYRERHGVSGAKSDAADAHVLADMVRTDSHQLRPVAGDTAQAAAVKVVTRTHKTLIWERTRCTQRLRHALRDYFPAALEAFEDLDAADTLELLARAPEPVSAAKLTTAQISAALKRARRRGIAAKAERIQAVLRAAHLGQPDVVAAAYAASVRALIAVLITLNEQVKTLQGQVEAYFGQHPDAEIIASQPGLGGVLGARVLAESGDDPARYTSAKARKNYAGTSPITRASGKKKTVLARHVHNDRLIDALMSQAFTALRVSPGARAYYDRQRARGAEHNPALRQLANRLTGILHGCLKTRTLYDEATAWPQHAAATKKTAA

SEQ ID NO: 414199 - protein, 423 aa, unidentified
MMKLKYSICCGLDVHKNVIVATIVITNKDGISEYKQKSFSTINSDIQKFHCWLIENNCYHVCMESTGKYWIPIFNYLENDIDVCLTHPKYVKAIKGKKTDKKDSKWIADLYKFDLVRCSFIPPKDFRQLRELARYRFKLVCMKSSEKNRIQNCMTVSNVGIASVLSDPFGKTATEIMSYLLEHTADPIDEKAVRKLIKKGAKAKSDEIIEAIKGYNIETDQAKKLELARAHLDYLDDMITQTEVELYVRIKPYYEFVEFVSTMPGMTELSTTIILAETGVDMNVFDDAKHLCSWCGLSPANNESAGKKKSVRIAKAGDYLKPMMVQCALAAVKSKKQPYFAIKYGRIKKRRGHKKAIIAIARMMMVCIYHMVSEKKPFTPTDYEELMDPQNHVERVVLNENNVFAYLETLGYDSSKLVKRNDN

SEQ ID NO: 414200 - protein, 405 aa, unidentified
MKVYIGIDWSTQKHDIVYLNEEGGIILYQTIPHSPAGFEAFDEQRMELGVSVEDCLVGIETEHNLLIDFLTSHQYQQIYVIPPSMIRDSRGRFGASKAKTDRSDAHLIADMLRTDRARLHAWHSDSLLTQQIASLVSLERFLTRTIIQTTNRLRNVLWRYYPNAAGVFSSLDQQIALEFICAYPTPEAATGLTIEQFKSFAKLHHYPRPSKLSACYARLQKPQPDAKQQTVLAYQSEAVRLAHLALQVVQDKAATLKETQELFVDHPDYPIFSSLPGAGRILAPALLAKFGDDRQRYPTPQVLQCVAGTCPVTKASGKHKYVSFRYACDHEFRLIVQQWAKCSIGSSVWANTYFQTIRPQCDSLSHAYRRLANRWLEIAWRLWQDRVPYDEGRHLRQHALRVKPK

SEQ ID NO: 414201 - protein, 391 aa, unidentified
MTKRKTETVNDLSRCLDPLDMDATVIAVIEMSQSSWLVAGIVPGVERQPLKKIAIDEHALLKLLSRWREEAEKKGHKITRVTVAFEAGHDGFWLARRLATLGIEVHVIHASSVAVTREHRRAKTDRLDTELLKRGFLGWLRGERGHCKMVVVPTLAEEDAKRPSRERETLVGEASRIITRLKAAFVRLGIRSFNPKLKAAAERLGTLRTPEGEPIPPNTLAALKRDLERHQIIKRQIREIEQTRLDRLAQAPAKGPHAMVLLLARVVGIGVETADMLVQEVLSRNMRDRRAVARYAGLTGSPDESGAKRREKGLARSGNARVRRGMIQLAWRFLMFQKDSALAEWYRQRTANALSMRKTFVVALARKLLIALWRLARDGVVPEGVRLRPAA

SEQ ID NO: 414202 - protein, 340 aa, unidentified
MGDITTIGLDLAKNVFQVHGVDEAGSVVVRKRLRRGQVLAFFAGIPPCLIGLEACATAHHWARELIALGHEARLMPPNYVKAYVKRNKHDVADAEAICEAVRRPSMRFVPLKTAEQQSALMMHRARDLLIRQRTMLVNALRGHLAEFGLIEAQGLHKVARLITIVMDEMDGRVPDIARQVLKVIVSQIEDIERGIAELETQVLAWHKNNPVSQRLATIPGLGPIIATAIAATVADPNTFRSGREFAAWLGLVPRQNSTGGKARLGGISKRGDSYLRRLLVNSAHTVLLCSKAAKTDPWLISLLRRKPRLVAAVALANKTARVAWAIMSRRETYRHVAAAA

SEQ ID NO: 414203 - protein, 347 aa, unidentified
MRFYTKQHPFYCGIDLHARTMYVCILNQAGETLLHRNMTATPEALLKAIAPYREQVVVAAECMFTWYWLADLCAEHGIPFVLGHALYMKAIHGGKAKNDKIDAQKIAVLLRGGMLPQAYVYPAEMRATRDLLRRRMHLARKRGELLAHVQNTNSQYNLPAIGKKIAYKANRDGVAERFADPAVQKSIEVDLALITYYDALLRDVELTIVKTAKHHDANTLYLLQTVPGIGKILSLVLLYEIHDIERFPRVQDFASYCRLVKCARESAGKRSGTSGAKIGNAHLKWAFSEAAVLFLRDNPAGQKLLTRLEKKHSKGKALTILAHKLARAVYYMLKRQTAFDLETFLHA

SEQ ID NO: 414204 - protein, 355 aa, unidentified
MTDNHQKIIIGVDTHKDFHHVAVISALGESLTDRKFDATPDGYAALIAWVTGQGDVLRAGVEGTGSYGAGLTARLRSAGIEVIDVLAPDKQERRLRGKTDQIDAYSAARAVLSKRATTVPKIRDGEVEAMRILRTSRRLVVKQRTEIMNQLHSLLVSAPETLRAKFAGLKAKDLAKACARLRELAGDDVVTAATKDAAKSLGRRHVELSLEADRFEESIRALVTAYAPELLAVYGVGPDVAATLLTVAGENVDRIGTESALAHLAGTAPIPASSGKTNRHRLNRGGNRQGNAAFHRIVLVRMKRHPETRAYVEKTLARGKTKRDTMRLLKRYLAREIFPILIAVQERHATTQIAA

SEQ ID NO: 414205 - protein, 430 aa, unidentified
MKSNTQNAKIEAITEKTLVLGIDVGSETHYARAFDYRGIEYSKKPFKFSNTEAGFVTFKEWILDIKERHEKDKVVLGMEPTGHYWFNLGKFLQDNEMKPVLVNPHHVKKSKELDDNNPTKNDRKDPKVIAGLVREGRYMIPYLPDGVYADLRTASNIRFQLQAELTRIQNRISRWFNIYFPEYKTVYGKPDAKSGMLILKAAPLPEDILTLGIDGVNQIWRDAKLRAVGKARAKTLIEAAEHSVGSKEGAVAARMEIRMLLEDYESRSIRLQEVMTLIEGLVKQIPMAEKLLEIKGVGIRTVSGFLAEVGDISRFNNPKELQKLAGLALVENSSGKHKGETTISRRGRKRLRYLLFEVAMSLVAKNPEFRELHNYYTTRRLNPLKKMQSLMAIAAKLIRVFYVMLTKGVNYDPKKMVNDIKRPAVYLQTA

SEQ ID NO: 414206 - protein, 340 aa, unidentified
MPVITIGLDVAKNVFQAHGVDEQGTVVLRKQLRRREVLSFFASLPPCLIGIEACSASHYWARELTALGHQVRMMPARYVKPYVQRGKSDALDAAAICEAVSRPTMRFAAIKSVEQQSALTLHRAREILVKQETMLANLIRGCLGEFGIVAPLGIRRMAELVGIIRDEADSRIPPHARIAMTAVADQLGDLQRRIKEIEQAIRAWHRNNDASRRLATIPGVGVITASAIAATVATPTEFKSARHFAAFLGLTPKQHSTGGRQRLGRISKQGDGYIRRLLILGGTALVRYARGAGGTVWAKQLLARRPARVVTVALANKAARIIWALLVRGGVYRSAAPQAA

SEQ ID NO: 414207 - protein, 315 aa, unidentified
MTSADELFVGIDVGKKKNDVYVHGLANESQFHNDAEGIRDLVDSMRQLSPTLIVAEATGGYERLMVAHLSAAGLPIAVVNPTRVRRFAESLGQLAKTDKIDARMIAHFASVVRPPVRTLKSEEEEYLGELLDRRRQIITMQTAEKNRLHTSRGQIRDDIQEHVDWLTSKQRELDKEIAHLIRSNQEWSEKEALLRSVPGVGPVTAATLLADLPELGTLNRQKIAALAGVAPFNKDSGSKRGRRRIFGGRSAVRRTLYMAALSCTRFNPVIKRFYDRLIKRGKEKKVALTACMRKLLVILNAMVRKQEVWRHIPAH

SEQ ID NO: 414208 - protein, 365 aa, unidentified
MQRIYIGVDFHARQQTICYLTTETGELVTCELKHQDKEAVRAFYAAFRGPVIVGLEASGYSPWFERLLEELGYEVWLGHATEIRRRARWRQKNDRRDAELILDLMLHNEFPRLHRPALQSREVMRMLRYRHKLIKIRTMSKNSLQALALQAGVAKRSGLFTRAGKQELEAALMSPVMQWQREHWLQLLQPLDQQVLEAMAWLKAQSKDDVCIARLRTHPGIGLLSSLCLVHTLQPVTRFRNTRKVAAYAGFDPVERSSAEHKRFLGISKAGSRLLRHLMVEAANIAVRKDEDLKRFYQRVADRRGRPKAKVAVARKLLIRAYIMLRDEIDYAEFRRRAVAARLARLGHRPNVPAVVIGQPASTEY

SEQ ID NO: 414209 - protein, 359 aa, unidentified
MKKLIKEEVVTAQPTGNTVGLDLGDRWSRYCLLDANGSIVKEDRVRTTVDGIREQFGGMPGTRIILEAGTHSPWVSRELQNQGHEVTIANARKVRLIYESDRKNDRMDARMLARLGRVDTELLSPIHHRSAEAQADLAVIRGRDALVAARTQLVNATRGIVKSMGGRLPSSTTAAFARKVAASIPATLKSALNPLLESIRDLSEQIRQCDRRIEELAEKKYPETKLLQQVKGVGPLISLAYVLTLEDPKRFPKSRTVGSYLGLRPKQSESGDSAPQLGISKAGNGYLRRLLVQSAQYILSSLAPDSRLRRWGLELATRGGKNGKKRAVIAVARKLAVLLHRLWSTAEVYNPLYGLGPAA

SEQ ID NO: 414210 - protein, 427 aa, unidentified
MPYRIAGIDVHKRMLAVVVSEVEIDGEYDFERRQFGSNPAQLRLLAAWLLEQQVEEVVMESTAQYWKPVWGALERYWKPICQKREGARPTSGTLHLAQAQSNRARRGRKNDFADAERLLKRLVSNELTLSFVPDPEQRLWRTLMRSKYQLRCNQVQLHNRLEALLEEAHIKLSSLISDLLGLSGRRILKALAQGESDPASLAALGDRRLRATKEQLSDALGACQELNPVYRRLVKMALEEWNLLEKQIGQLDQQMADLLHPHQDQVKRLAEVPGLGVDSAQQIIAEVGATAAAFPSAGELSSWVGACPGDHQSAGVSRSHRSPKGNRHMRRILNQAANAAVKYKGSVFEILYRRYVTRLGHNQTIGAMAHRLCRLIWKILHQGVRYEERGPAMNKKSKQYRAARMIRELRSLGYHVEPARSQSVAPA

SEQ ID NO: 414211 - protein, 406 aa, unidentified
MTAVMIGVDPHKASHTAVVISPAEEVLGEVQVRACTQQAQRLLGWAAAWPERTWAIEGAGGIGHLLAQQLLAAGEQVLDVQPKLGARVRLLATGDTNKNDPNDARSVAVAALRSPARRPVVADDHAAVLQVWSKRHRDLGRTRTQVACRLHAVLCELVPGGVAKRITAGQAAQILAALTPQNAVQAARRELAADFAEDLRSIDARMRDTKTKLTAAVQAAGTSLTDVFGIGPVIAATIIAGVRDISRFPSRDHFAAYNGTAPVEVSSGPRKLYRLSRRGNRRLNHAIHMAAVSQVSHRHSAGRAYFDKKRAEGKTPKEALRSLKRQISDAIFTRLQADARRTATPAAMSPGGQPGNHSVSRAAGSHPEHRLFGQATPGPATTIRPRPPAQRQKTTLHPAKTTTRTS

SEQ ID NO: 414212 - protein, 419 aa, unidentified
MSNPNVKHAAFIGLDWADQTHVLTLQEAGSDRRESSTLDQTPEALQTWTQQLRARFRGKPVAIAVEQVRGALIYALMHVDFLHIYPVNPQTLAKMREAFYPSGAKDDPADADLLLEILLTHRQHLRVWIPDDVLTRSIQLLTEGRRHLVDERTALTNQLTAALKTYFPQAVDWFGDLHAQRACAFLQRWPSLQQLKRATPTSIRKLYQRQGYRGQDKLDQLLNNIQLAQPLTDDEAVLLASAMMVQALVTQIPPLTDSIERYDQQIASLFAQHDDSTLFGSFPGAGPVLSPRLLAAFGSDRNRFEFAAEMQQLSGIAPVTEKSGKSCWIHWRLACSKFLRQTFHEFAGRSILESDWARSYYDQQRQRGKSHHAALRALAFKWIRIIFRCWKTRKPYDETIYCKSLKLRGSSLAVALTTK

SEQ ID NO: 414213 - protein, 339 aa, unidentified
METAHDGRQVVGMDLHRRRSVLVRMTGDGRRLGTARITSSPQELRREIARAGESPRVVLEATYGWYWAADTLAAAGAEVHLAHPLGVKAFTYRRVKNDERDSADLADLLRMGRLPEAQLAPHEVRELRELTRYRIKLVRLRTSCKDQVHGVLAKLGVTVTCTDIFGRAGSAWLDQLRLPQPYAGKVTSLRHLAGELTTEITMLSEVIASLLAGDRGYQVIQQLPGIGPVLAAVITAEIGDVTRFKNAGQLCSWAGLTPRHRESDTKVARGHVTRQGSRLLRWALIEAIQRIPKDSVIGGAAPRPGCARPLTCPPARHRPWHLPGTGDPSHACPGPATTS

SEQ ID NO: 414214 - protein, 411 aa, unidentified
MSAPYCVGIDVALHAHRVSVLGPDGEAVGPSFAIAATQEGFTELVRTLQARGAVPAMALVGLEATGHYWENLEASLVQAGYRVLLLNAWQTRRYRDVLRRKAKTDDIDAYVVAGLLRSGSAEGCFVPDDQIQSLRELARLRARLMRERQDYLRQLVGQLDVVFPEHRTALGDVSTVRARGLLAAFPTAHHLAQATPASLRRMAHRAHARGFSVEDATTLRDQARSSAYSGKAAQARGQVVRTLLAQYERLTTAIGELDEAVQTLLPPTEASGGPSDATLLQTLPGVGPHTAGTLLGELGSFTRFANARALVAYVGFYPVISQSGERSAIPYLSPVGSRIARHALYLAAVNAVRRGAEWRALYRRKTAQGKTAKQALIAVAVKWLHAAYAMLKHRMPYDPMRFAGRRIESSI

SEQ ID NO: 414215 - protein, 340 aa, unidentified
MNIKTIGLDIAKNIFHLVGLNRYGKRVLKKKLRRSQLLNYFANLAPCTIAIEGCASSYYWQRELIKLGHKVKLLPAQHVKAHVRGNKNDYNDALAIAEASLVPEMREVTAKTIEQQSMQALHRLRASAIRDRTALSNQLRGLLMEFGIIFPQGLTCIREGLFGVLEDAENDLPCSLREALAFKHQQFRQQDDLIKEFNRLINEASEVHTEIALLQSAPGYGPILSSAFYSVVGDAKAFAKSRDVSASVGIVPRQHSSGDKTVLLGISKRGDGYLRKMLINGARSVVNHAHKKTDALSIWVTLLIERRGRNKATVALANKLARIGWAIIRSGKPYQENYAV

SEQ ID NO: 414216 - protein, 372 aa, unidentified
MKKPTRWVGLDVHAATIAVAVAESDGSVRSLGTIPNTPEAVAKLMRKLGEKATIRACYEAGPCGYVLYWQLTKLGIACDVIAPTLIPMKAGDRVKTDRRDAERLARLHRSGDLTAVWVPDAAHEALRDLVRAREAAKKDQLRARHRVGKFLLRRGLRRPEGSNAWGSRHMQWLQSVHLEHQADQDTFIDYRTEVEHAVARIERLDLAIDAAVEKAPEETREVIDALQSLRGVAKITAVTLVVEVGKLSRFERPKQLMGYSGMVSSEASSGERTRRGAITKTGNSHLRRVLVEAAWMYRFSPNIYPALRKRQEKQPEIVKAIAWKAQHRLNGRYRKLAARGKPQPQVLTAVARELLGFIWAIGVHVEQRRCAA

SEQ ID NO: 414217 - protein, 351 aa, unidentified
MSRKTEAGLACTIGIDTGKNTLHLVGLDAKGAVVLRDKLARGRIAARLANVPPCLIGIEAGMATHYVARELLVLGHDVRQVPPSYAKPFRQGHKNDFRDAHAIAEAVQRPSTRCVPVKTDAQLELQALHRVRSRLIGGRTAAINQIRSFLLERGITLRQGLRFLRQQLPQVLATRTDVLSPRTIRIIEDLSSDWRRLDERIEHVTEEIELLASDSEACRQLMTVPGIGPIIASAMVAAIGNGAAFAKGRDFAAWLGLVPKQMSTGDRTILGRITKRGNRYLRTLFMQGARVVLLRPTNWAKHSFGPWIAAAAKRLHHNVLATALANKLARIAWTVLAQGRSYERRAVPGIV

SEQ ID NO: 414218 - protein, 323 aa, unidentified
MSKYKEIYGVDISKDVFDVYSEKSGHHQFKNGGKGFTSFLKSLPKGALVVMEATGYYHYRLAQYLYKQKVLVSVVNPLSVKRFIQMKLAKVKTDKSDAKAICEYGQINEVPLYTALTDVQSECLQLFRLLDNYLKKRTATKNKLHGEDTLGIPSKFVYRSLKRDLKHLNKEVKGIEERLLELVKQDQQQQLTLLKSIPGMGVKTALFLIVVTDGFSKFEKASQLCSYAGITPTIRESGSSVRGRSRISKVGNRKLRNLLFLCAFSACKHNKACREVYERIVNKGKSKKLALIAVANKLLKQAFAIAKSGLPYDENFVSVLSNK

SEQ ID NO: 414219 - protein, 332 aa, unidentified
MHDLKDSTDSNDSSLRDPAVVGIDVAKATLDCYFDPSGRRLRLANDEKGIAELLSHLRSMKVELVVIEATGRHHRRVAAELLDAAVRVALVNPQRARKYAQSVGKLEKTDRVDAQVLSAFGRAARHHVLEKPSEKQVELADLVSRRRALVAMRVAEKNRLAEEHQPKLARTQAREMLRLIDQQVEDIDRAIAQLIDDDDRWKRLLEIITSVPGVSTGTANQLLADLPELGKLNRQEIAKLAGVAPLADDSGPRRGQRRIQGGRLNVRNALYMAAFNARQECRRFKDYFDGLIARGKLYQVAMTACMRKLLVTLNQMVKNNTHWDQNFHGALT

SEQ ID NO: 414220 - protein, 386 aa, unidentified
MQKLNDLSRSLTSLEPDGTLIAVIEMSQSSWLVAGIVPGIERQPLKKIKVDESTLLKLLHRWREEAEKAGHRIKRISVAFEAGRDGFWLARWLRARDIEAHVIHASSVAVSREHRRAKTDRLDTELLKRAFLGWLRGERDHCKMVAIPTIKDEDAKRPNRERESLVGEQNRIINRMKATLIRLGIRGFNPKLKKAAERLEGLRTAEGEPIPPNTLAELYRDMMRRRLVSDQIRQIEDARLERLKQAPSDGPHAMVRLLARVIGVGVETADMLVQEVLSRNMRDRRAVARYAGLTGSPDESGRKRREKGLARSGNARVRRGMIQLAWRFLMFQKDSALVQWFRTRTENARGTRKPMIVALARKLLIALWRLVREGVVPDGVVLRPAL

SEQ ID NO: 414221 - protein, 405 aa, unidentified
MERVIERCAGLDVHKKTVAACVRVRGTQHVRTFGTTATELLVLRDWLFAHEVTHVAMESTGVYWKPIFYVLEDAFTCVLANAAQIAQVPGRKTDVKDCMWIAQLLEHGLIRASFVPPAPIRELRDLTRYRRALIEERTREANRLHKVLEDAGIKLASVASDVLGVSGRAILAALIEGTTDPMVLAELARGVLRKKLPALRHALMGRFREHHAFLVTQILAHLDYLDELIATVSGQVEVAIAPFADELARLDTIPGINQRTAEAVIAEIGVDMTVFPSARHLASWAGLCPGNNESAGKHRPAHARKGNRWLRSALTEAALAGAVRSKKGALAARYRRVMPHRGHKKAVVAVAHAILVTAYHLLARRVTYTDPGADYYERRHADRVRQRAVQTLERQGYRVSLEPAA

SEQ ID NO: 414222 - protein, 340 aa, unidentified
MRELYAGSDLHGNNNLVGIIDGQGKKVFKKRLPNDPQLVREVFEPYKEEIVGIVVESTYNWYWMVDALMNEGYRVHLANPAAIQQYSGLKHADDKHDAFWLAEMLRLGILPEGYIYPKEERPLRDLLRKRGQLVRLRTSLILSLQNMLSRNLGVRVRVNDVKGIREDRVSGLLGGDEDLALAGRVSKETIDFLTQQIHQIEGVVEKRVRLKEAYRYLLTLPGVGKILSLTIMLETGPISRFATVGEYASYCRKVPSQWTSNGKKKGCGNSKNGNKYLAWAYSEASDFARRDYPEPRAYYQRKMRKTNAAVAHSALSHKLARAAYYMMRDQVPFRPEKLFG

SEQ ID NO: 414223 - protein, 398 aa, unidentified
MKTSGLEVHKDTIFCAIYDGKSYSAVKEFSTTTVSIRSLGEYLKSERVKKVAMESTASYWVPVWDILYETGFELKLVNPLHIKQLPGRKSDAKDAQWIAELLHKNMLRSSLVPCPLIQELRSYTREYRTLVNQRTKILTQMDRILVMCGIRLSSCISNIDSKSFRQIVEALLRGETDPDTLVRLVYGNRKNKESGKLKESLSGNMKAHHRLKLTTCKQQFDLFESQIQLYLNEMQKLCEEHFSEEISNLTTLPGVSQISAMIIVAETGGDMSAFENSGKFTGWTGLRPRNDESAGKFKSTATTKGNKHLRAIIVQVAWAASRTKGSFFMDKFTKLAIRKSRKKALVAIGRKMLVIIWHILSEKTQYNPNLVHIYDPVKVEHKIKYHEREIERAKKLIA

SEQ ID NO: 414224 - protein, 370 aa, unidentified
MGLPSGLQAGRQWRGRVRNPLAWVTDQVRWEPEPFVPGSETRTVDRAALESLLVFARMSPNTMTTIHAGLDIAKLNLQLHLAGRLHDLPNTAAGHRRLLKLLAGQPGVHVVCEATGGYERDVAAALHEAKVPVSVLNPARVRHFARATGQRAKTDDLDAAVLSAYGHALQPKPTAPRTQQEQQLAELVRRRVQVVEILVGQRQQIERLTMPALRRQAQSLVRRLERDLEQIEGQLKALRTQAAALDERVQKLEAITGVGAITALGVLAELPELGTLNRRQAAALAGLAPHPRESGQWHGRRRIGGGRAPVRRALYMAALVAAHSNRQLKEFYQRLRAAGKPAKVALTAVLRKLIVLMNHILKNPDFALQN

SEQ ID NO: 414225 - protein, 319 aa, unidentified
MEKKIYIGIDVSKDMLDVAVHGDKQHWSFPNDEAGINKIVSKFRELPPALVVLEATGGFEVPLAAELGVAKIPTAVVNPRQIRDFAKSVGMLAKTDILDARIIARFAATVQPTPYPIPGIEAQELGAITARRRQIVSMITAEKNRLSTASKTVKPRIRAHINWLEKELDDVNRSLRQKVKDSPIWQEKDKLMQSVPGVGPNLSITILAELPELGTLNRKQIAALVGVAPLNRDSGTLRGKRTTWGGRATVRTAFYMATLVATRHNPLIRCFYERLCAAGKPKKVALTACMRKLLTILNAMLKYGTRWDYPVAQIFGPCH

SEQ ID NO: 414226 - protein, 310 aa, unidentified
MGIDVAKAQLEFACRPDGETGTVANNDAGLQALVTRCQACAPTLIVLEATGGYEAALVAALATAGLPVVIANPRQVRDFAKATGQLAKTDALDAQVLALFAERVRPSPRPLPDDTVRALDALLTRRRQLLGMLTAERNRLPLAQPPVRRDLEQHIRFLERRIREADEDLHSAVKASPAWRVKDDLLQSVPGVGRVVSLTLLAELPELGRLSHKEIAALVGVAPLNRDSGTLRGKRLVYGGRAPVRAVLYMAALVASRCNPAIRAFYLRLRAAGKPAKVALTACMRKLLTILNAIARSGTPWTPDHTLVRT

SEQ ID NO: 414227 - protein, 422 aa, unidentified
MLEETQDTEELIGRVAALDIGKAELVCCVRVPSAQGSGKRLQEVRTYPTMTRSLLVLADRLGALGVTRVVMEATSDYWRSPFYLLEAHGLECWLVNARDVKHLPGRPKTDKLDAVWLCKVAERQMLRPSFVPPPAIRMLRDLTRYRADLVAVRTAEKNRVEKLLEDAQIKLSVVASDIFGVSGRAMMAALIAGERDPKVLAQLARRRLRAKLSLLEEAFYGRFSDHHAFLLERMLDRIDQATADIAALEAKIDQEIAPFQAAVDQLDEITGVGRTAAQVVIAEIGVEMGRFPTAGHLVSWARFAPGVKQSAGKQKGKATTGHGNPYLARVLGEAAVAAGKTDTFLGERYRRIARRRGAKKAIVAVGRSILIIIWHLLSDPDARFHDLGPGFYDTRIDADRRKRNHVRQLEALGYKVTLQPAA

SEQ ID NO: 414228 - protein, 428 aa, unidentified
MNEVDISRIERFRQFKNEIRGSDRFLIVGLDIGKSLHHGFLGSATGKTVKRGVRVENSARGFEHLLTSVQFYMDRDGFKEVVFGLEPTSVYHKPLAEFLITQGHLVVYVTNEAIKKNRTLLDGRWDKNDTKDAANAADLVVQGKCQFYDLPDIGLRDLRALLSVRQRLKKQLHSTRVRIRNNLVAQYFPELDKCWKQAQAENLAIVRWCLSPHKISQLSFEDFFKMVTTGNKGLRQYKRLSKIWEMAPYSIGCQPGIAMQLEARILVENIKSIEAQIALVDETIEDISLGFREYQYLLSIPGFGPYVSAVVLAAIGTAQRFDNTHQVLKFAGFDLSANRSGKKSQSAVPVISKKGNAAVRYAVYQAALIASSLNTQFKDYYHKLLKGREREKGIRTKMRVKLAAKLLVIAWTLMKKKQAFDPSYLKTQ

SEQ ID NO: 414229 - protein, 373 aa, unidentified
MSRNLRHVGLDVHAETIAVAVAEPGGEVCPLGIIPNRPEAVAKLVRKLGPREQLRVCYEAGPCGYVLYWQLTKLGVPCDVVAPTLVPTKPCDRVTTDRRDAAKLAHCYRAGDLTPVWVPDAAHEALRDLVRAREAAKQDQLRARHRLGKFLLRHGRRPPEDVKPWTQRHRRWLDALQFELPAHRATLADYLYEIDHAAARVARLDAALDEAVQAAPAPMRAVIAALQTLRGIRQVIAATIVSEVGSLSRFPHPRELMGYSGTVPSEHSSGSHVQRGAITKTGNAHLRRILVEAAWAYRFSRKCAKGLRQRQRGQPEVITALAWKAQQRLCRRYRRLLARGKPTPHVITAVARELVGFIWAIGVAVEREQTMAA

SEQ ID NO: 414230 - protein, 340 aa, unidentified
MDEYGGRQYVGIDLHRRRSVIVRMTPEGDRLGSAVRIDNDPFELAQQVASWGENPEVVLEATYGWYWAADVLADAGASVHLAHPLGVKGFAYRRVKNDELDARDLADLLRMGRLPEAWIAPPEVRGLREAVRHRCKLVALRSGLKAQVHSVLAKQGVHVPMSDLFGVGGTKLLDELALDAPFHARVLSLRRLIDAFTFEIDVLAKRTGGQLSHHPGFQAVQTIPGVGPVLAAVFVAEIGDVTRFPRPEKLCSWAGMTPRHRESDTKVHRGRITKQGNHLVRWAAIEAVQRVYGGAIGVTRTRLTERRGANIAKVAVARKLLTLVYYALRDGHVRCLARPA

SEQ ID NO: 414231 - protein, 308 aa, unidentified
MQIICGVDVSKKWLDAWLEPAGHRRFAHSPEGVAALGVWCREHGAGLVVMEASGGMEQPAFLTLWEQGQPCAIANARSVRRFAEAMGRLEKTDRIDAEMIARFALSKRMVATMPPSADQQHLTALATRLRQVTQDLANQKRRLHSTRDPVALASLKEAILFFTRQADELADRIGRMIEADPLRQALDRTIRSVKGAAGRTVAYLLAELPELGTLSNRAVAKLVGLAPLPDDSGQRRGQRSIRGGRAGIRSLLVLIADLASRFDPSLADFKQRLLEKGLAKMQVRVALARKLLVRLNAKARDTRAQFCT

SEQ ID NO: 414232 - protein, 419 aa, unidentified
MSFKILKNNCCGLDVHKTWIFACIGITDSNNRTEYKQARFSSFTKGLQELCHWLAKYNCNDVCMESTSKYWIPVFNVLEKNNIWVTLSHPKYTKPQKGNETDRKDAKWICDLYMCGVVKPSFIPPADIRELRDLVRYRFKLTCMITSEKNRAHNCLTVSNLKLDDVFSDIFGKSSRSITEQILQHPGETFDVTPFVDSRCKTPIEEIQAAVDGAISMERAVKLRQCLNHIDELEMHKAEIEREIFRLSDKYEEVLTLIRTVPGFDKNPMTAIQVLSEIGGDMSVFPTAKNLASWAGCCPRNDQSNQKIKSTRISRAGSYFKPVLVQVANALVKSKKHPEFATHYRHIKARRGHKKAIIAICRMFLAAIWHILTDLKPYTAEGFLESRPVNESKILTASQALNLLKQRGYVIKDDAVSVI

SEQ ID NO: 414233 - protein, 341 aa, unidentified
MEYIGIDVHQRESQVCIVDDGGRVLIERRVRTRRERFAALLGAHAGARVLLEASTESEWVAHAVEGLGHEVIVADPNFAPMYANRRRRVKTDRRDARTLADACRLGAYRPAHRTSAAQRTVRAQLAVREALVRTRTRYSSVIRAVRRCDGVRVPSGGAATFGPRVQALALSATQHRLIAPLLALLRSLNQQLAVLETQLAREVAGHAAGRRLCTVPGVGPVMAAAVVATLDDVGRFASADQVAAYVGLVPRERSSGEQQRRGPLTKAGNSRVRWLLVQAAWAYWRSRATAGTVLRAWVERLAGRRGRLRAVVALARRLARILYAVWRDGTVYQPVRLAVVA

SEQ ID NO: 414234 - protein, 422 aa, unidentified
MSYCPVAGIDVSKRFSDMCILSPDNKIFAQEKIYHDETSINRANALLQKAERLFFRKPVVVMESTSHYHLILFQFFSEHGYDVIVVNPLQSNSMKDFSIRKRKTDRVDAFKLAMMYRTKTLRPSQIPQTATRALRQLCRHRAELLNDVSSYKNRLTALLDQTFPGYDKVFSDVGGVTSCAVLVRFPTPTILLVEEESELVEVIASASKSGYSFAKKKAGLLISAAQKAQAWGIHSCADETLIVCIIQMLRTLSESVLQIETAIDNLLAQIKEMRNNVSLLQSIPGIGSHSAALLLGEIGDISLFKKPKQLAAYFGLDPTERQSGSFRGTKNKLSKRGSPYARAALHMGVVNSICKRGKDSAANPVLLSYYEKKCKNKPAKVAQAASMHKLVFIVFAVLRDQKPFELKMPEQHAVEQGFVKAA

SEQ ID NO: 414235 - protein, 331 aa, unidentified
MKKLDFLYFIGIDLSKQTFDVAIMNDNTSKSFLFDNTNKGVKAFLRLLKNQRMALNDTLICMEHTGIYGRLLITKLLEAEANFCVEMSLRITRSLGIQRGKNDKIDAIRIAQYAVKNCNEMELYRPIPEILEKIKILIKAREQLVNFKADLNKYPNEAKRFAPELGKLAQKQIRKTNKCLTDEIKRIEAELKALILSDEKLNKTVGLVTSVTGIGTMTALYFVIFTNFFTRYQEAKQLACYCGVVPFEHTSGSSVQKRSRVHHMANKTMKKHLHMCALSAVRHDPELKVYYQRKAEEGKNKMLVLNNVRNKLVLRVCAVIKRQKPYQKRVA

SEQ ID NO: 414236 - protein, 367 aa, unidentified
MKKISTVAAKQSRNISLQKLTIGLDLGDRSSWYCGLDEGGRVLLEQKVSTTPKAMQEVFGGMPRSRIALETGMHSPWVSRLLSGLGHEVIVAHARNVRLIGESRKKDDRLDAQTLARLARIDPQLLSPVKHRSAQAQADLTVVRARAGLVRARTALVNTARGLAKSYGERLRGCNVRNMNPEKAEGLSPELQKALGPLLAASAALSEQIAEYNERIEKLAQESYPQTALLKQVKGVGTLIALTFLLTLEDAHRFQKSRDVGCYLGLQPGRRNSGQSEPQMHISKEGDPYLRTLLVQGAQHILGPFGIDCDLRRWGLKLAERGGRSGKKRAIIAVARKLAVLLHHLWVSGEVYEPLHNSNQRAMPAAA

SEQ ID NO: 414237 - protein, 343 aa, unidentified
MQIRSVGIDLGKTTFHVVALSAAGKVLLRKKFTQKQLITFTANMQTSLIGMEACSGAHFLGRVLREQGHDVKLIPAQFVKPFVKSNKNDFLDAEAIAEAVDRQNMRFVPIKTDDQLDLQAMHRVRDRLVARRTSVINQLRAFLLERGMVFAKTPFKLKQAMPEVLENADANLTPRMRNLVSLLWSEWKDLEQQIVAMNEEVEQIASSDPACQRLRQIPGIGPLVATAIVAAIGNGAAFHKGREFSSWLGLVPKQHSTGGKARLFGISKRGNSYLRKLLVHGARSAVLRVKRERSPFGPWLNALERRAPVKVVITAAANKLARIAWAVLASGQDYRAVPDAITV

SEQ ID NO: 414238 - protein, 431 aa, unidentified
MKYKQSKKQNQRITRISDKTLVVGADIAKETHVARAIDYRGIELGKDCVFSNTRTGLEQLVQWMKELQQEHAKSDVLFGIEPTGHYWFTLAEYLGQQGIPLVIVNPHHVHKSKELEDNSPTKNDYKDAKVIADLVRNGKYSEPKLPTSIYADLRILMNLREKIMVNLGQVQRRVQNWQDRFFPEYAEVFKDWEGKASLITLDEFPTPGEIVGLGAEAIAQRWKKDVKRAVGTKRAQLLVETARNSIGLTEGLPAAKIEIKTLLEQYNMFARQLEEILSEVERLLGQIPGTKEMLTVPGVAVVTLAGFLAEVGDLSGYEHGQQIIRLAGLNLKENSSGKKKGKSSITKRGRARLRALLFRAVMPMVAKNAEFKALHQYFTTRSQNPLKKKQSLVALCGKLIRVLHTLGTKHIPYDANDVLGPVRQAQIQMAA

SEQ ID NO: 414239 - protein, 431 aa, unidentified
MLKEQPIETQDKQEQKPDKEQKEKYLPVGIDPGKNICGVVLLHPDSGNDTVLSSMFMDNCSFEDADALIAESRPSGRERAEKVANSFGLKPIFVIEATNILWRPLFSYLKSKGCLVHTVCATQTKSSRGTKMRKTKTDLIDAKHIARIYKQGESHPTKFPEGIHMDLRELVRLHSFFTDMKGRILNRVYGYLFQVFPEFVSFFNSNSFLGTMWTLLKEGLVHPDCLQKVRIDKLTSILRKASMGRFKREKAIMLKEKARNSFGISEGREGFSSCLKLLACMYEFVEKSIACLEEDKIKPIVDQIPNKLNTIKGLGIAQAYFLAESRKPEEYENVDDVVAWFGFDPRLSESAGKKKKNRHISKCGTKYGREAMFLSTDMVMIHNPTVMVKYRRLRKNGRTNREAKTIIAADLVKACYSMQRDNVPFNPSLIH

SEQ ID NO: 414240 - protein, 345 aa, unidentified
MTEAYDGRQVVGMDLHRRRSVLVRMTEDGRKLETVRIENSPAALRAVIARAGKNPRVVVEATYGWYWAVDVLEEAGAEVHLAHPLGVKAFSYRRVKNDERDCADLADLLRLGRLPEAWIAPEPVRALREVTRYRHKLVGQRTSCKDQVHAVLAKAGIPVTRSDIFGRGGGIWLDGLPLPQPYAGKVASLRALIGVLDGEIARLEAQAAGMLAGDTGYAAIRRLPGIGPVLGAVITAEIGDISRFRNPGQLASWAGLTPRHYQSDTRVIRGRVSRQGSRMLRWALVEAIQRAPAGSRPRQVKDAIIARRGAEARGIAKTAAARIMLTQVFYGLRDGHIRRAISQAA

SEQ ID NO: 414241 - protein, 344 aa, unidentified
MGIAVLGIDLGKNVCSVVGLDEAGTVVLRRRIRRDSLIALVGKMPACIVAMEACCGAHHLGRLFTAHGHDVRLMSPEYVRPYVKAQKNDDRDAEGVAEAATRPTMRFVEVKSEAQLDMQTLHRSRDRLVGERTALINQLRAILLERGLIAPQGKHKLEQYLVALMDEHEGRGLSPRMRTLVADMRTQWRELDGRIAAFDAEFVSWARENVDARRLASIPGVGVMIATALVAAIGRAESFARGRDLAAWLGLVPRQSTTGGKPRLLGISKRGNKYLRKLLIHGARAALPHVAERDTPLGRWAKGLLGRAHPNVVVVALANKLARIAWAVLRRGERFAAEGIRATA

SEQ ID NO: 414242 - protein, 343 aa, unidentified
MQTVTTIGLDIAKSVFQVHGVDASGQVVIRRQLKRRYVLQFFQKLSPCLVGIEACASSHYWSRELKSLGHTVRLMPPAYVKPYVKRQKNDAADAEAICEAVTRANMRFVETKSPEQQSGLMLHRTRHLLIRQQTAVINAIRAHLAEFGIVAPLGRQGVWELLRVIADRNDQRVPEIVRGCLAALGNQLLRLKEQILGFDRMILAWHRSNATSKRLICIPGVGPLLATALVANIADPKAFRSGRHFSAWVGLVPKQHSSGGKDRLGGISKQGDRYLRSLFVAGALAVIRYAKIRGAKHRPWVTALLARRPTKVAAIALANKLARIAWALMAKGERYKIPAALTA

SEQ ID NO: 414243 - protein, 416 aa, unidentified
MNERGTVAAGTGTRKDARALCVIDLVGRVVATGAYAADGEGYDRIAAAIGDPRDCVVVGVEGTGSYGAGISRRLAALGYDVVEVVRPKREKRMAGRDKNDPADAERAARDALAGKASGAPKAGGGWVEALRFRMVARDAAVSESTRAANSAHALIVTAPAPIRGELGGMKTPALMKALSRRRRARDVVESSLWESLRSLSLSWIGAKKAAAAHEEAMREILLANAPALLDIHCCGTISAARLAVTAGDNPERVSGESAFASLCGASPVEASSGKVKRHRLNRGGDRQANRALHTIARQRMKRDSRTKPCVDKRTKEGKSRREIERILVRYIAREVYGALMRPMDAACEPYRASARAAKSERLRAGAAQAQASRALGVASARISEMERGRLVDAPLLQRYRSWLESLSAGERRESPE

SEQ ID NO: 414244 - protein, 358 aa, unidentified
MSDGSREREKMTVGLDLGDRYSYLCLIDQESGEVIEEGRLRTTPEALRRRFASEQPMRIAIEAGTHSPWVSRVLEGCGHEVLVANARKLRLIYANKRKTDEVDAENLARLARLDPKLLYPLKHRSEESQAHMALIRSREALVGSRTQLVNHVRGAVKSFGRRLPKRPARSFHNKAAEHIPETLLPALGPILETIASLTQRIRDYEHELESISREHYPETDLLRQVEGIGPLTALAFVLTLEDPYRFEKSRSVGAYLGLVPARDQSGDTDPQKRISKEGDEMLRRLLVSGAHYILGPFGSDSDLRRHGEKIASRGGKNAKKRAVVAVARKLSVLLHRLWVSGEFYDPLYNAHRCGDVAA

SEQ ID NO: 414245 - protein, 314 aa, unidentified
MAQFAPKVGIDCSDARLDIHLHPLGIGFSVANDPEGWSELARRLEAVQAEIVAIEASGGCEREVCRFLLARRYSLRLVDPYRVRQFAKAAGKLAKNDRIDAEIIALFVATLPTRPMVRHKHLERLAELVTARAQLLEQVTVAQNQARRREDSLLRRVDARRAKALQADIKLLDQCIAELVDADDDLKAKNAILRSMKGVGPVLAHTLLALLPELGQLTRKQIAALVGVAPFEDQSGKRQGVRYIQGGRPTIRAPLFMAALVAGVHNAVLSRFRGRLRTAGKKPKVAIVAVMRKMITTLNAMLRDGQKWNSATAG

SEQ ID NO: 414246 - protein, 308 aa, unidentified
MKKDNHELVAVDVAKETLCVLIAGRLFTLANTACGLAALLKHLRTLKSPWLFCEATGGYERTLVEMLHKHAILVTVINPALVRHFARSEGVKAKNDPIDTHMILRFAQQKDLAPSAPPKRPALTALMDRRTHLSDELARERTRLQNSSKLIHSSIRRMIRLLEREVNRIEQAISALIEKDDTAHYAADVMQQTQGVGPVTAWAVLAYLPEITQLSRNRIVAMAGLAPFDKDSGKSKGPRHICGGRHKIRNVLYMAAMVACRHNPVIKPYAQRCTDRGKDKKWIFTAVMRKLLIHLQRNLKNHQICLVS

SEQ ID NO: 414247 - protein, 368 aa, unidentified
MDAAYCTTIGADVSDRTTKICVMSKADGKPKIVQETTIPTTPDGFRAFLERQDKAAALVFETGTHCRWIDKVASGLGFKTFVANPCRLRMITESTTKNDKNDARTLARMALADIELLHPVKLRGDEHQKMVNLHEIRDQLVKERTAEVLQIRAIAKSMGFRLPDCSAECFHNVAKRDLPKELSDIVWPLMKELKSKAVTIKTVEKQMRRLAKSDTFRAQVERLMEIPNVGFVTATCFVAVTGGDMDRFDRPRDIGPWLGVTPKQDQSGDIDRQCHITKAGSKMLRWKLTECAQRVLQKNSADIDLKVKGLRIRARGGKIAKGKSITAVARGLAVLMVAMLKKPDEPYVPLSEDKARELEQIRAAMTAA

SEQ ID NO: 414248 - protein, 351 aa, unidentified
MYYIGVDYHKKYSYVVVKDKEGKVERRGKVNNTKEEFRQLLKPYQAGKAVLEATRNWGLIYDWLEEILDDVALAHPLKVRAIAEARIKTDKISADILCDLLRSDLLPEAYVPNKETREAKNVLRQRMFFVRVQTMVKNRIYTILDRHPEILCEAPEVSDLFGASGMKWLRQALLPGQDNQLLASELELLEVLKQKISGSNGVVKELAKGDKKVKLLRSIPGLGPFFSVLLAKEIDDISRFRDEKKLCAYAGLVPSTYASGGRVFHGRITKTGNKWLRWAFIEAVAPATRSDADLYAYYERLKMKKGANAAKVATARRLLTIVYRILSQERLYQRWNNRVKRNAIPAALVTS

SEQ ID NO: 414249 - protein, 408 aa, unidentified
MLAVKSIISELFNWRGIELTRKPVAFSNSMEGFNSFYNSVVELMQKNELKEALVGIEPTGHYWFDLGQFMGEKNIKFVMVNPHHVHKTKELDDNSPSKNDRKDPRVIAGLVRDGRYFYSYMPTGVYAELRNASNRRFVLVEEQTRAKNRLQKWVAVYFPEYKGIYTHIDAKGGLLVLKQAPTLEEIVRLGVEGIIKIWKDAKLRGNGHKKAILILNAAMKSIGLKAGLTEARMEIQDLIEDYELQTKRLERVNDLIKELCQQVRYADKLLEIKGIGITTVAGFIAEVGDITRFDSTKELQKLAGLELVADSSGKHDGKTKISKRGRKRLRYLLFEAAISVVGKNEEFKEIHRYYTTREKNPLKKMQSLIAVACKLIRVFHVILTKGISYDASKMLKDIRRPGEQLKAA

SEQ ID NO: 414250 - protein, 388 aa, unidentified
MTQAPGALPTPTVLDYERTLILAIELSNTSWVLAAQIPGLPGVKAKRSIEPTPEALMAAIEDYRTRAVKAGQNVERVVAIYEAGWSGFWLARWLAQYGIETHVIQASSVPVDRRARRAKSDGIDAELLLRTLLAWLRGEPRVCSMVPIPAEADEDARRRVRERAELVAERVGLVNRIGAVLATLGVGEYNPLRRDRRQRLDELRTALGGSLPTHARAKIVRMLDRLELLLLQITELEKSRDAVLEDENPDKAASMIQQLAKLRGVGVQSATVLVREGFVREFANGKALGSYAGLTSTPYSSGGTEREQGIGKAGNVRLRSLMVELAWLWQRYQPDSAQVSWFHERVSGTGRRMRKVMVVALARKLLIALWRFATQGVVPEGAVMKPAT

SEQ ID NO: 414251 - protein, 337 aa, unidentified
MKRYLFIGIDISKATLDVCMLSLLHITDSHYHQFPNNTKGFILLLKWLKQKSNLVPIEDWRLCMENTGMYSLELNCFLHDKGIWQTMENALQIKRSMGVVRGKTDKADCKTIALYAYRFFDRLKPYVLPNVTLLRLKALFAQRERLVSMHSQLLVGNQSLKGYPKDIVKDIEKQNEKLLKNLSEQIKAVDKLLKECLKQDEELQRKATLIQSVPGIGPQTAAYLLIVSRGMNNFATPRQFACYSGCAPFAHTSGSSIRGKTKVHFIANRKMKMLLHMAAMNAITFNEEIKAYYQRKVAEGKNPMSVLNAVRFKLICRIFSVVKRDQEFVKEYRKIAA

SEQ ID NO: 414252 - protein, 417 aa, unidentified
MSMILNVGIDISLRKAASSFLNQEGKYLGKVFEIPNNPSGFDQLNNKLSQAVTQQGFQQIRLGLEATSNYGFHLMDYFTRTTLPCEIKVYQINAKYIKRFKKAFPEREKTDLVDAQFIAEYLRFGKLPVDYKPEALHLPLKRLVRYRYHLVKNIEREKKVFIANLFLLFPGWVQERPIKTLTHTSMVVLNDLSLDDIVNMSLEEMAAFVAKTGKNRSPDPGAIAEKIKQAARESYRIRPELANSCQFILASITKTIAALKKALVEVDLALADESKGFINPLLSIKGIGPVYATGIVASIGDIKRFSSDDQLARFAGLVWKRNQTGQTESEEKHLVKECDKYLRYYLVEAANSLRTHNEEYQTYYLKKYQEVNTHQNKRALVLTARKLVRLVFALLAKNQLYDPQRRFQSPVASCEKV

SEQ ID NO: 414253 - protein, 428 aa, unidentified
MNEKNHTRVEEFRQLQKEIRGSKDYLIVGIDVAKERHSAFFGTATGKTLFRRLVFGNDREGFERLLLQAEAMRVQHGLKKVVFGLEPTANYHKPLGEYLLKGGHGVVLVSAKSVKRNRELLDGRWDKHDTKDSANVADLISQGKCLYYEYPEMKLRELRSLLMLKRRLKRQEHGFRVRIRNHLIAQYFPEFDRYFGRSESEGLAIVRWCLEPSVIEGLSCEEFVRLVAPGRRSIRQQERLRAIRQRASASIGCEVGEAVRFEAKVMVEGLKQVREALGAIEAKITEICRGFPEYEYLLTIPGFGPDVSSKVLGALGDPFRFDRGTQVLKMAGLDLVAARSGKRSDGVVPIISKNGKADLRYALYQAAMIASSRDREFIIWFTNRLRGRQREKGIKTRMRVKLSAKLLIIAWTLMKKREPFDPKYLITE

SEQ ID NO: 414254 - protein, 343 aa, unidentified
MQTITTIGLDIAKSVFQVHGVDVGGQVIVRRQLKRRYVLTFFQKLSPCLVGIEACASSHHWSRELQALGHTVRLIPPAYVKPYVKRQKNDAADAEAICEAVTRANMRFVETKTPEQQGGLVLHRARHLFIRQQTAVINAFRAHLAEFGIVAPVGRHGVEELLNVVADPNDKRVPEMARACLLAFGAQLRRIKEQILEFDRMISAWHRSNEMSMRLDEAPGVGPVLATALVAAVADPKSFRSGRNFSAWIGIVPKQHSSGGKNRLGNISKQGDRYLRGLFVAGALSVIRYAKIHGTKHRPWLTALLARRPTKVAAIALANKIARMVWAMMARGERYKEPVALAR

SEQ ID NO: 414255 - protein, 341 aa, unidentified
MSEVSTIGLDLAKRVFQAHGADACGRVVFRKRLRREQVLTFFAGQPACVVAMEACSSAHYWARAIGELGHVVRLIPPAYVKPFVKRQKNDTTDAEAICEAAQRPTMRFVSVKSETAQANAVVFRARDLLVRQRTQAINALRGHLGEYGVVVAKGPSHVAKLIAHVEDPAAGLPEAARTVLRVLIASLQFLSERIDLLDREVARRAREDKEVRRLTTIPGVGPVIATALAALAPPAGAFRRGRDFAAWVGLTPSQHSSGGKQKLGATSKMGERTLRRLLIIGASSVVRKAIKHGTRSGSWLGQMLARKPRMLVIVARANKMARTVWALLATGGIYRAPLAAA

SEQ ID NO: 414256 - protein, 315 aa, unidentified
MSDMPCFVGIDVAKAQLDIALRPSGERWAVPNDTNGVTTLVERMQTLQPTLIVLEATGGLERMVTSALATAGLPVVVVNPRQARDFARATGQLAKTEALDARALAHFADVIRPTPRPLPDAQTQELRALLGRRQQLIGMRTAEQNRLAGTNARLAKDIEAHIAWLNAGIATLDDDLETMLRASPLWRENDDLLQSAKGIGPVCAHTLLLELPELGTLTRQQIAALVGVAPLNCDSGTLRGRRTIWGGRAHVRTVLYMGTLVATRYNPQIKVFYERLLAAGKVKKVALTACMHKLLTILNAMLKYRTPWQPQEVQN

SEQ ID NO: 414257 - protein, 393 aa, unidentified
MQRDTKEVLAELVGKLKAKLDPTKVAATSAGEKHQRGELRPNLDRLTVGVDLGDQWSHYCILGLEGERLAEGQLRTTQEDLATFFQGLNEARVVVEVGTHSAWVQEVIRGCGHEVLVANPRLMDGSKRRKRKNDRIDANKLARLGRVDPESLYPIQHRSREVRQDLVMLRARDALVAARTEIINTTRGLVKSMGTRLPKCSSRSFAQKGEEAVAVEMREALLPLVRLAATLSADIKEYDKKIEELGREKYGHTALLRQVKGVGPITALAYVLTLENPQRFTKSRDVGPYLGLVPKQEDSGESQPQLGISKAGDTMVRKLLVGSAQYILGPFGPDTDLRRYGLRLCERGGKNAKKRAAVAVARKLAVLLHRLWVSGEVYAPLHHAMSAPIVAAA

SEQ ID NO: 414258 - protein, 346 aa, unidentified
MKHSVGLDVSVKETAICIVDEAGKVVREGKVATEPQAIIAFLSSAGVEYARIGLEAGPLSQWLVNRLSEAGLPVSCVETRHMKAVLKAQQVNKSDRNDARGIAQMMRVGLYKPVHVKTLASQQARMLLTSRKLLRDKLQDMENELRGTLRNFGLKVGVVSSGHFEARIKELVAGQPPLEMIVVPLLAVRRVVREQLAKLDKMVLDQVRDDKLCRRLMTVPGVGPIVALTFRATVDQAQRFARSKTVGAHFGLAPRRFQSGERDYDGGVSKCGDAMMRTALYEAAQVLLTRTRTWSWLKAWGMQVARRRGAKKAIVALARRLAIVMHRMWVDGTEFRWRKEADTAAT

SEQ ID NO: 414259 - protein, 368 aa, unidentified
MLIIGVDYHPSDQYIAFADTETGECGERRLNHSEGEAEKFYRDLQSRAASVRVGMEATGYSRWFERLLAELGIELWIGDAAEIKTRRVRKQKTDSNDARLLLRLLLEDNFPRIWVPSPENRDLRQLLWHRHRMVQMRTRMMNQLQALAMNEGQRRKKKLWNEQGRAQLEGLPLAAWASRRRKDLLELLDRMNPTIEDLTRAIEREARRRSEAARLMTHPGVGPITALAFTLIIGTPQRFGCGKQIGSYVGLIPAEDSSAGHQRLGRITKQGSRLLRFLLVEAAQAAARGDTDWKRRYMHLAMRRERNIAKVAMARRLGVRLYWMWRNGWEYAEWVKFGSNAGQLGTGHGVHSNAVHLNGHPAPSPEGV

SEQ ID NO: 414260 - protein, 348 aa, unidentified
MIAIGADVHKQQCTLAVQRPDGKLSMLPSMDNTRENWLDLLTQLPPEAQIALEVSTSGHFVMSVLEEAGWRDRAHWVHTAGIDSLRKQKTDRLDAQRLARKLSVMEQDPLPEAWFPPRPIRELRLRARQRCWVAVLRTRVKNRVRSLLQMSGRCAGTNPFTAAGRTWLKEQKLSEATRESVEQLLRFHDFLTTEREKSETSLRGMEKDFPEIARLQTLPGLGHILSAVIWSEIGELKRFDSPRALVNYTGLAPSLYESGERSVRGGITRQGPVWLRWALITAVNAATRGDNAFARRYRRLRRHKLPNVAKTAVARSIARCAYGVLKHGIDYQEQRWGRKAGIEMEQEA

SEQ ID NO: 414261 - protein, 408 aa, unidentified
MSQNIIFGIDVSSRSSTVCVVIDRVKQGNPFTITNDSFGYQDLLDHLNQYLITPLVVFKATGVYSLSLQAFLEDHHIKYLRLNPLQAKKLMDNNLRHNKTDKLDAYHLALIQFSAPQKLQAPQSREYHELQAASRYYEELTRALIVNKNQLHRNLQSTFPQIEHILSNPSGKIYWTIVSLFPHAQYVLDMNEDQVKQRLLSISGIGRQRAQYLTARLYAFARQAYPYDRKDGITVRAIQRTISNLLSLSNERDQVINYMEKLTKVVNARALTIYLSIPGIARTTALRLIAELGDLRRFNTSAQVDAFVGIDPGRSQFGDKDSRLGITKHGNHIARKILYRVITQMETVRATQPCHITDYYDKKKQSSHSPGYKKIAIASVHKLIRTLFALIKHNQLYDYNIATKNQRL

SEQ ID NO: 414262 - protein, 320 aa, unidentified
MAIIGVDVSKLSLVAVRTSSTGVVKENFEITNSKGEIDTWLDKLKSKYKYLLVASEATGDYHNVLAKACLKREITFRLLNPILTKQFNRGTVRRSKTDLKDAEVIARLAIQGDGSKVSLATFSNSKSLHRTAIRLGKVYQTLKLMSLRMETNIPEEKQANMALRKCWQQIDTTRELLRKRARITTDPMLSKLLMSIPGVGEKVVVTLINEIDDISRFPSPKSLIAYAGLDPRVRQSGTSLKHNTHITKRGSVYLRRDIFIAAYIAARWDDEIKLYYEKKIGEGKRYKEAMIATSRKLLNRVYAVWKRGTPYERRPAITNT

SEQ ID NO: 414263 - protein, 321 aa, unidentified
MTHFYLGIDVAKSKLDCALRLPNGKFRSKVIANSAAGFTQLTDWLAAQQATSVHVCMEATGIYWEAIAQSLATAGMTVSVVNPAQIKAYGASRLTRSKTDAVDARLIADFCAERKPEPWQAPSPEEITLRALILRLEALQTMRTQESHRLGVARDAVQDDIQQHLAWLDNAMQQLVKTINEHIDQHPDLQQKRALLDSIPGIGERTSAILLAFYANTDRFANSRQAAAFAGLDPRHYESGSSVKGKPRLSKIGHAFLRKALYMPAMVTLYKTTWGKDFKDRLAGAGKPPKLIIGAMMRKLVHVAFGVLKSGKVFDPALHCA

SEQ ID NO: 414264 - protein, 259 aa, unidentified
MLPEGRSWRINYTPEGLARLLDQLEQVAPALIAMEASGGYERACADCLAGAGLAVAVVNPRLVRRFAGSLGKLAKTDQIDAAIIARYAAFARPANCHTPDPEHAALMALAARRRQVVAMIVMEKQISALIASHAMWARITAALQNVTGVGPQTATTIITHLPQIGTLNRRQAAALAGLAPINRDSGSKRGRRFVQGGRQPLKTALYLAALSAARFHPTLKPFYTSLRNAGKAPTSALIAVARKLLIILNATARQAINTP

SEQ ID NO: 414265 - protein, 473 aa, unidentified
MTSSKQRREVQGQPTLSNEALYIGIDIGKFKHVAGFLSKTLLERHKHFDHCPAFTFEQSREGFRAFVERIQAYCPLEQCFILMEQTGHYHQSLLQYLLELDLPVFVIHIQRRQEGMVKTDKRDALGLANQLYTQLELGAQVANTLQAIRRALPPSEAAAQLKGLVRHRYELVNEATQRKNKLTAICDELFPEFTQVFKDPNAALALDLREHFPTPSAIAAATSVELRTVRRRNHPSEAQFVQIQQLARQSIGTKDTARQDSLIVEQTLLIQELRHLQNHLEQLEEKIGQIVEKSREGQILTSIPPIGPLFAASIIATIGSIGNFEDAAHLKSYFGWAPIRTQTGVSFDRTRLTRAGSREMKKVMFLVAWKAIQMDTEWAKLYKRLVPRLCFYDERMQAYKGKGKALGHIIGRLITLIFALLKKDYELLNKLSPGAEPPPLTLYDPELHHRHRTGHYSPLRKEGPKNRIVQHSS

SEQ ID NO: 414266 - protein, 371 aa, unidentified
MGNHSEAFVAFDTSKLRNSVAIAEAGRSGEVRFFGEIDNTPAATEKLVRKLAAEFSRLTFCYEAGPTGYGLYRQIKALGHDCVVAAPSLIPKKPGERVKTNRRDALNLAKLLRAGELTSVWVPDERHEAMRDLVRARGAAVDDLKSKRQQILSQLLRLGRHYPGKRTWTRAHMIWLVSQKLAHREQRIALEEMLLAARQAAERVVRLDQAIVAAVPDWSLAKVVTALMALRGLDLVAATIFLAEIGDLSRFASARELMAYLGLVPSEHSTGEQVNRGGITKAGNHRARRILVECSWSYRHPPRVGKKKLDKIAAAPREVQDIAWKAQARLTTRYRALTRRGKRPTVVVTAIARELAGFIWAVGRSVDLPAM

SEQ ID NO: 414267 - protein, 346 aa, unidentified
MKHYAGIDVSLEYSSVCVVDADGGIVREDRVLSEPEALVAWFAAFGAPMERIGLEAGPLSQWLHAGMANAGLAVELLETRHVRAAFRTMPVKTDKKDARGIAQLMRLGWFRPVWCKSLPAQEVRALLTARKLLQGKVHDVEMSLRGILRGFGLKVGATTPRTYAARVQTLAQGHPTLEGIVEALLKAREVMGVELRAFERRVQAIAREDERARRLMTTPGVGVVVALTFVAAIDEAERFRSSRMVPAHFGLTPRKYQSGETDYTGRISKIGDASVRTALYEAAHVILMRPVRSSDLKTWALGVAKRAGMRKATVALARKLAVVLHRMLRDQTDFIAHKTAGRMIAA

SEQ ID NO: 414268 - protein, 351 aa, unidentified
MITVGLDLHKRYITACALDDAGTVLSEHRRLEPSLDALGRWLGGLAAPVLVAMEATLYWHWLERQLTARGFNVMVAHPYQVKLIWQARTKTDPIDARKLAELARAKLLPAIWIPDPATRALRQLLRGRVFLVRQRTVMRNRIHAYLTAENLRCPELDLYSKAGQAWLATVDLPSVVRGQVGLVLANHALLTTQIQALDHHIKATVRRDETARRLQTIPGIGPFGALLLEAEIGPITRFGSAQELAAYAGLAPSTRSSGDKTRHGHVGRGNPWLKWLLVEALQTLKLAPGPVGNHYRKLLRAKGKPKATVAAARKFCTYLYWMLKEEWSYTEWLRQHDRPEVRPVQPLGSAA

SEQ ID NO: 414269 - protein, 314 aa, unidentified
MKQISNARPILRYVALDIHREYIMIGGMNREQEWVLRPRRVEMERFRTWAAANLQEGDAVVLEATTNVWDIYDIVAPLVSRAVVAHAAAVRQIAEARVKTDKQDIERLLRLLIADIVPEVWVPAVPVRELRGLISYRWRLVKMSTMIQNRLHSLLHRHNIQAPEGGLDTEKNQAWWEQQEFNPVEALQVKQELAMLAQIEQHKEEIEQELGRLSLTEPWASQSAYLMQLSGVGVVITMTVLAAIGDISRFESPKKLVGYSGLGAGVHDSGKEHRDKKITKSGRKELRWAMVEAAWRAVRSNPYWGKAVRSLEAP

SEQ ID NO: 414270 - protein, 371 aa, unidentified
MGRDSTTKFIGLDVHSKTISVAIADEGRKGEVRHYGTIGNTTEAIEKVLKSLTSTGAELRFIYEAGPCGFALYRYLTGNGFKCVVTSPAMIPKRKTVRIKNDRRDALTLARLYRAGELTGIYVPDPEDEAVRDLARARNDARVAERKAKQRLNSFLLRHNFVYPGKKPWTKTYFVWLGKVSLRHPAQKIALQEYIEAVHEGTERVKRLSEQISLAVEEWRMAPTVKALQSLRGVSLITATITVAELGDISRFSHPKELMAYLGLVPSEHSSGESIKRGHITKTGNSHARRVLVESAWTYKHHARVTLPLIKRQEGLPRNICQISWKAQLRLCARYRRMMARKKPMQVVVIAIAREIAAFMWAIAKEVEATA

SEQ ID NO: 414271 - protein, 419 aa, unidentified
MSEQYRYFIGIDWATESHEVCVLNAEQQVVDRKAVEHSGSGIAQFVEHLEKLSSGDPEEVAIGIEIPRGALVETLVERGYAVYSLNPKQMDRFRDRHTVAGAKDDRRDAFVIADSLRTDMKLFHRVRIDEPLVIRIRELSRTEEDVQQEQVRIGHQLRDLLRRYFPQLVELCPSVDELWFWELIELAPTPAKAAKLTRARMEKILRAHRIRRLTADEIVAQLKAPPLRLAPGAVEAASEHVLLLIPRLRMLHQQRKDIAGRIEGVLKDLGADGESGEHRDVTLLLSLPGAGRVVAATMLAEASQPLGDRDYHALRSYSGVAPITRRSGKRCVVVMRQSCNERLRNAVYHWSRVSAQCDDRSREHYAELRRKGHTHGRALRGVADRLLAVLVAMLKTGTVYKPEFRNNSPQSGELVAERI

SEQ ID NO: 414272 - protein, 390 aa, unidentified
MIYVGIDVAKTTHYAAAADSDGVVLVEPFAFDNDAPGFAKFISKIASFPKEQLIIGLESTGIYSENLICFLFDSGYKLAVINPIQIAALRKTNIRKTKTDKVDTLLIIKSLMVNSYRLYTEQDTQSLKLKSLCRFRQSLKKSKARLKIQLSGYVNLLFPELLSFFKSGIHISTCYTLLKRCSSPAEIAALRLDSLSRLLSNASRGRFSRSTAEALKSLAKSSVGVKNPYISIQIAQTIQQIELLEQQIDEIENVIKDTICELDSVIMSIPGIGAIDGAMILGEIGNIDRFASPAKLLAYAGLDPTVCQSGKFKARSTKMSKRGSKILRFALINSAWQLTLKNDTFFNYYQLKLSQGLSHYGALGHVAHKLVRVIFTLLKHNVLFDPTRLV

SEQ ID NO: 414273 - protein, 318 aa, unidentified
MKLHVLGIDLGKTVFHLVGLDSTGRVVIRKRCSRRQLLTFTANLQVQLIGMESCSGSHFLGRVLREQGHEVRLMPAQYVKPYVQTNKSDYIDAEAIAEAVQRPRMRFVPIKTEEQLDLQALHRVRERWVMRRTAVVNQIRGLLLERGFTLPKGRRYVDEALPRILEDAELPLSGSFRLLLAQLKLELEQLTARVEQLDVVILERAKEDEGCQRLTAIPGVGPVTATALIAAVGNGSAFRKGRDLAAWIGMVPRECSSGGKQKLLSISKRGNAYLRRLFVQGARSVMQQRHRQAPGLSCWVGAIVGAQAPERGHRGLGQ

SEQ ID NO: 414274 - protein, 414 aa, unidentified
MESVYRSVAGIDVHKKMLAVVIRRPSGEQAGYEKRKFGTTQAEIQHLAAWLQREAVSEVVMESTAQYWRPVWYGLEPHFRLHLTHPLKTRAPRGRKSDFGDAQRLADRWSAGDLEDSFVPGAEQRAWRWLTRTRVQLKKKLGVIHSQVEGLLEQGGIKLSAVVSDLFGVSGWAMLEHIAQGVTDVEVLAGEARGALRRKDAELREALAGRLEPVYRLLLKQHMEQVRLLRRQVEEIHRALAEAMAEHLAALHRLTKIPGVDLYAAQELVAEIGPKAAAFPSAEQFASWVGVCAGSQESAGVNYSHRSAKGNRYLRRLLCQIAWAAIHTKDTFFAGLFARLKPRVEGKGAAWAVAHRIAKIVWLVLHREVEYQEKGSAPPNERTLVRKFKRMLQEFGRLGLDVRALLDQQLPVPA

SEQ ID NO: 414275 - protein, 310 aa, unidentified
MELATVVGIDVSKDRLDVYVLPSEEAWAVPRDAEGLAELCNRLQGLSGVVALEATGGYENVVAATLSSASIPLVVVNPAQVRAFAKALGQRAKTDPIDARVIARFAEATKPLVRPLPDQATQMLGHLLARRRQIVEMMASESQRLPRTELARVRKSIERLLAALKRELADIDHDIDDTMRGSPVWREKENLLASVPGIGRIIARTLVADLPELGTLGRKQIGALAGLAPFVRQSGKWKGQAHIGGGRPTVRTALFLGAQVAKRCNPVLKAFYQRLLAAGKSKMVATIAVAHKLLIILNAILRDKTPWQNA

SEQ ID NO: 414276 - protein, 339 aa, unidentified
MKYIPVGVDIAKHLMQVHFVDEHTGEIIDKQVKREKFLEYFSNREPCLIGMEACGGSHHWARELQKLGHKVRLLKGRFVKAFVMGNKNDVMDARAIWLAVQQPVKSVAVKSEEQQATLGLHRMRQQLVKFRTAQINALHGLLLEFGETTHKGRAALAKEVPEALERLKERLPLYLINMLDEQYQRITELDEHLDHIEKQLQAVARQNETCQRLLNIPGVGPLIATAAVATMGDASAFKSGLEFAAFIGLVPRQTGSGGKIRLLGISKRGDKYLRTLFIHGARAAALLTKEPGPWITELKKRRPASVAIVAMANKLARTVWAIAAHGRKYDKNHVSIRPD

SEQ ID NO: 414277 - protein, 352 aa, unidentified
MKIHTIGIDLAKTVFHLVGLNAHGEVVVPRKCSRSQLLRFTSKLPECLIGMEACGGAHFLGRALRDQGHDVRLMPAQYVKPYVKTNKNDYIDAEAIAEAVGRPRMRFVPIKTDDQLDLQSLHRIRERWVVRRTAVINQIRGLLLERGITIRKGRLYIEASLPAILEDADNKLSGILRVLLTQLQLEMQYLGRQIGESDKLILEIAKGMDSCRRLIAIPGIGPLTATATIAAIGNGAAFKKGRGFAAWLGVVPGEQSTGGKQKLTGTSKRGNKYLRKLFVQGAHTVLLQKSKQSSGLGTWLADLTARKRKQVATVAMANKMARMVWAVLTKGEAYRPPLLLQPAGNGLQMTPA

SEQ ID NO: 414278 - protein, 452 aa, unidentified
MADKIKRAEGLPVINRLAAGIDVGSRFHVVAVAADLDPEPVQTFSAFTTDLHRLADWLIRCGITTVAMESKGVYWIALYEILESRGLTVLLANAREVRAVPGRKTDIKDAQWLQKLHACGLLRASFRPGRDICALRAYLRQRERLLDYTASHIQHLQKALTHMNLQLHHIVSDVTGVTGLRIVRAIIEGERDAEVLSEMRDVRCKATAEEIRGSLHGNYQPEHLFALRQALDLHDYYQLKVAECDAEIERVMAIFRSKSSTPSAPIPAARHRTRAANALAFDVRTSLYEWIGTDLTQIHGPGPNLALRLVGECGTDLSRWPTSKHFASWLTLCPGSKISGGKVLSSRSRKSANRVVAHLRLAAVTVGKTQTALGAFYRRLSARIGKAKAVTATARKIAVLFYNAMRYGMEYRDPGANTYEEKYRERLVKGLGRRVAELGFSLQPIAAQAGVS

SEQ ID NO: 414279 - protein, 429 aa, unidentified
MSYRIAAIDVHKKMLAVVVSDVDVESEYVFERRKFSSNPEQLRLLAAWLLEQEAEEVVMESTAQYWKPVWESLERYWKPECEKRENARRKSGTLHLAQALSNRGRQGRKRDFPDAERLVKRLVAQELTLSFVPNPEQRLWRTVTRKKHQLRRDRIRLQNQLEALLEEAHIKLSSLVSDLLGHSAQRMLKAIAEGEINPATLAALADERLRATTAELCDALGACTELNPVYRRLVSMALEELRLINEQITRLDQEMAGLLKAHQDAVERLAEVPGLGVDSAQQIIAEVGPTAAAFPYAKCLASWVGVCPGTDETAGVNYSPRSPKGNRQMRRLLNQAANAGARTKGSIFEIVYRRLVPRLGHNQAIGAIAHRQCRLIWLILHERVRYEERGSGLSKRSKQLRTWKMIRELRKLGYQIEPPISEQDRATVG

SEQ ID NO: 414280 - protein, 446 aa, unidentified
MAAAYVGVDGPSTASLCQNEVVADLIQEEPSVNDLIRIGMDTSKSVFVLHGVDAAERPVLRKTLRRRQVIEFFAKLPPTQVGLEACGAAHHWARELGALGHEVKLLPAQRVKPYVARNKNDTADAEGICEAMSRQRMTFVPVKTAEQQAALMLAGMRDQLVARRTQLSNTIRGYAAEFGLVAAKGLEKIEPLLARITADESLPALARELFAVLGAEYHELKLKLRKIEAQLLAWHRQNELSRRLAEIPSVGPIGAALMVMKVANPRAFRSGRDFAAWLGLTPKDHSTGGKQRLGVITRAGDEALRRVLVLGATAVIQQVRRGRGHSSLWLVALLKRKPPKLAAVALANKTARIAWKLMVSGERYRGACATEVTHGNVCFEGASSQPRKPGAVLAAVKARPGSAAARRTGNATAGLDGGCARRPTTIAVGTKKRSMVEQRNESHGHD

SEQ ID NO: 414281 - protein, 347 aa, unidentified
MNFYNSTHRHYCGVDLHARSLYVCILNQQGKTLLHKEIPASPDALHRLIQPYLDDLVVGVECMHCWYWVADFCEEQGITFILGHALYMKAIHGGKTKNDRIDSHKIAALIRGGNFPLAYVYPKSMRATRDLLRRRTGLVRHGADLKAHVVNTTSQYNPPPNKVNLKNVSAREQLGKTFDDPLVQRNIDLDMAVLDCYHRELSQVEWLLEKQAKKHQPTYYYLLKTVPGIGRILALTILYEVGDIRRFESVQKFASYSRLIKCKAESAGKTYGTQGNKIGNAHLKWAFSEAAVLYLRGNPGAQKLLQRFQKRMSKAKALSALAHKLGRAVYFMLKNEKVFDEQRFLTS

SEQ ID NO: 414282 - protein, 417 aa, unidentified
MKCFVGLDVSSTKLDVCIMLSDTTTPFTASLPNDLVGAQEIKKQILELNDTYSFERIVIGMEATSLYSFHPAMFFHEDSDLKALMVEVMVEQPNKIKKYREAFEESKNDTIDAFYIADYFRAERFSPAFLKEEKYLALQHLTRTRLQLIEQLTRTKQHFIENIYYKCNTLSTEIKNESLTTSLWSSTIISLMTEDYTLDELATVPLNDLADFIQKLGRGRFKAPEKLAKAIQSAVRGSYRLPKLQQDSINVILGLLAREIRNLEKLIKDIDKAIEDMVEVIPEYQCLTSVPGVGKVYAAGIIAEIGQIDRFKDHPQVAKYAGLNWKQNQSGNTNSQNTELVKRGNRYLRYYLVEAANSVRRHDSEYQTFYKKKYHEVPKHQHKRAIVLTARKFVRLVDALLRNRQLYAPPRRLMEDR

SEQ ID NO: 414283 - protein, 359 aa, unidentified
MLSNNQELNFSGENVYVGIDVHKKSWKVTIQLDELVYKTFSQDPKVQILESYLKKNFPNASYQCAYEAGFSGFWLQQELEKVGINCIVVNPADIPTTDKEKKQKTDARDSRKIARSLRNGELEGIYVPVVEELEDRQLVRTRSTLARDLSREKNRIKSILNFYGIEYPEQFRDTNKHWSKGFFNWLSQIELKTNNGNNSLRTHITTSLYLREKILDLTRQIRQLSKTEKYVKIAPLLCTIPGIGLITAMTILTELHTIDRFKNLDKLCSYIGFIPNTHSTGEKEKVGEMTNRGNKYLKNVLIESSWVAIRNDPALYIVYSKLCKVMESNKAIIRIAKKLTNRIRFVLLKNEPYVKGLVK

SEQ ID NO: 414284 - protein, 314 aa, unidentified
MAMPASRPEIGIDVAKDDLVIHLQGLNQTFTIDNTPQAIRQWLATLPEGCDIAIEATSTYHMDITERAHAKGHRVYVVDGYRLSNYRKGVGGRAKTDLADAQLLARHLHKEKDELRPWSPPPKAYRMLQSLLRRRAALVKARTALRQSLSGEPELKAPLRALIAKMDRIDSLIQKRLKSAVSAAGLQTQVQRCDAIDGVGEITATALVMAFLRGDFKNSDAFVAFLGLDVRVRDSGKLTGKRKLTKQGDTEVRRLLHCAAMSASRHPVWRAFYQHYRDRGLHTTQALVILARKIARTAFALMKQQQEYCPAKLF

SEQ ID NO: 414285 - protein, 321 aa, unidentified
MANVNKIIGIDISKEKFDACFSIQPCGYSSRTYTYDAEGVKSFLQEIPADCICVMEATGVYHLRLAYALNKQGIAVSVVNPLSVKNFSRAVMCRTKTDKADARQLVDYARRMELTEWKPTSDNYIRIQQIYRSIELFLTNITQFENQLEAINNSPVSDPRLCRMLHSHIKRLNKQIGLLEKQIEDLIAQEDARVVEHISSVPGVGKKTAIALLTATKGMHGFENYRQLSSYFGLCPRIYDSGKSVHGKAHICKMGMGWIRKLLYMCSISAIRHNRACAALYIRLKEKSKPIKVILIAVVNKLLKQIFAIVKSNSVYSEILT

SEQ ID NO: 414286 - protein, 429 aa, unidentified
MNETKTETPAVELAAYVGIDWADRAHAVCLRTADGAIESGTLAQEPAAVAAWAQELRTRFDGRPVGVCLEQSRGALVYALSAFSWIVLYPINPKSLARYRESLYPSRSKNDPTDAALLSDFLAKHRDQLRPWKAEDSETLHLRFLLENREKLVDDRTRLSHRLRDTLKRYFPQAIEWAGPLTSATSWAFLLKWPRLGDLKKTSKGALLRFFHAHRVRRCDKVADLWPLIQAAVEPVQDPALVESSVLMVEGLCKQLQALQPTIDRHERQIEALYARHPDKGLFDNLPGAGPVLGPRLLVAFGTDRDKFTGPEPLQQLGGIAPVTEQSGQRSWTHWRWAASSFLRQSFHEFAAHSIARSTWSRAYYQLQRQRGKKHHAAVRALAYKWIRVLYRCWKDRQPYDEARYVACLIAHGSPLAAALQSQQLEACE

SEQ ID NO: 414287 - protein, 367 aa, unidentified
MEKSSKVFVGMDVHKESIDITLAEVGSEVRRLGQIGGDRGSLLKMVRKQQSQGGERVFVYEAGPCGFWIYRELVALGERCMVVSPALVPKRAGDHVKTDRRDSERLASLARAGELKAIHVPDIRDEAIRDLVRGRDDAVIAQRRVRQQLKALLLRNDIRYVGKTSWTGAHRSWLSELKLPEPAQQIVFEEYVDAITVATGRIERLTRAIETEVLTWRFAPVVGSLQAMRGIQFVHAVTLVAELGDLTRFGSARALMGYLGLVPREDSSGEHRRQGSITKAGNSYARRALIEAAWAYRHPARVTRIIATRQAGIPKAVCDIAWRAQLRLSTKYRRLAARHLHHNKIVVALARELSGFVWAIGQSVKPQ

SEQ ID NO: 414288 - protein, 320 aa, unidentified
MKHVLGIDVAKSKLDVALRLPDGKIRSKVVDNTTEGFTALSAWLDKYTVTELHVCMEATGTYWEAVAEYLADAGHMVSVVNPAQIKAYGAARLVRTKTDKVDARLIAEFCVAQHPDPWHAPSPAVRELRALVARREALETMRTQEHNRLLVARPAVRIDIEAHLGYLARAIAEIDAAIRQKIDDDPGLKEQRELLDSIPGLGDKTIPILLSYYGGPLRFDKAKEAAAFAGLDPRQHESGSSVRGKSRLSKVGHTLLRKALYMPAMVAITKTAWGRAFKDRLAAAGKPPMVIIGAMMRKLVHVAFGVLKSRSPFNPALHAA

SEQ ID NO: 414289 - protein, 320 aa, unidentified
MSAYEFVGIDIAKDKFDSALSIDNRYKHAVFSNSKKGYEDFLKWLNQYASSPWVCMEATGHYSEGLADFLVEKGVRVSVVNPFQVKSFAKACLARNKNDTIDAKITAQFCQRMEPRIYQSSSAEQKEIKELTKVLDMLKVQVIQLTNQLHSIRGRAAQKSLKKMIEKRKQEIKAIQQQIDELISNNQQLQEKLDLLLSIKGIGKLTAYYVLARMPDIQCFQTTKQFAAYIGITPKQHQSGSLIGKTTLSRLGDSRLRKALYMAALVAKRYNKALDGFVKRLQCNGKTPKTIICAVMRKLAHIIFGVLKNKQPFNENLGCF

SEQ ID NO: 414290 - protein, 347 aa, unidentified
MDQQCHYVGLDVSLETTSICVIDDAGAIIWRGKCHSDPDTITAIVRHRAPGAVRVGLETGQLSNWLTLSLRRRGVPVVCMDARHAKAALSLQINKTDANDAFGLAQVVRTGWYREVAVKSMDAHTLRMLLVARSRLVSQRQATANTIRGLLKTFGLVVARGSKGLFPVRVREQIAGNPALIAIIEPLLAVWHAVRDQVAMLDRQMLARARNDQVARRLMTIPGVGVVIALAYTAVIDDPARFRRSVSVGAYLGLTPRRYQSGEVDTTGHISKCGDSLLRGYLYEAAAVLLYRDGRASVLKSWGLGLAKRIGMRRAKVAVARKLAVIMHRIWSDQSEYRWTAIPSTTA

SEQ ID NO: 414291 - protein, 348 aa, unidentified
MGELYCGIDFHKRKSWLFAVNEEKEVRIDVEIMSSRICEYLSPYSEEMRVAIEATGGANHLAMKLVEMGFEVVLVETNQFHPRNKKRGSKTDRKDAEALSKYLRMDDLPEVYLKSLEARKLKTLLVQREHLLNTRRNTTNHIRGILREYGFTIPVGVDAFLKSAGKFIDQLESASTKDLMKFHLDQAQIYLQKEAELNANLERMAEGDEDCLRLMTVPGVGPMSALCLVAVVDDITRFEEARKFAAYLGLVPREFSSGGKQRLGQITRSGPEMLRRYLIHGARAVLLKSGPRLENDPNRKWAERVQSRGNTNKAVVALAHRNARICYGILKNKMSYNPNYSAQLEKAG

SEQ ID NO: 414292 - protein, 500 aa, unidentified
MKLLYRRCAGLDVHKKSVSVCVRIRVRGQKEAEIEEAVFGTFTQDLERLRDWLRQHKVKQVAMESTGVYWIPIWNILEPVRWGFQLLLVNPQTVRALRGCKTDRIDARRIAEFLQYGLLRGSFVPPAPIRQLRDLTRMRVHLQGDRNRVINRMGRLLETVNIKLGSVASNIVGKSGRAMLQALAAGENRPQDLADLARGHLRAKKPDLVLALEGRMSEHTRWLLGRLLQELQWLDGRVTELDARLTEQMLPHADLVKRLCTIPGVDRLTAWVLIAELGLDMQQFPTAGQAASWAGLCPGNAESAGKRFSGRTRKGDRYLRRILVQNAWAVAHQKDCFLTALFYRIAYRRGLKKAAMAVAHRILIIAYHVIRDGSEYRESGGDYFDRLHPERTAQRLANRLTRIGFDVVLTPRHTQPPTTALDNPQPVQKRRGRPCQCAARGIPCQHGIPPKSRETQTRSEAEQPPQTQCRNCAKWGIACIHARPRKRHGHLPATGPQSTA

SEQ ID NO: 414293 - protein, 446 aa, unidentified
MNDRSGLSRGDRNRNARLARLRQLLPFDHAIVGIDLADDKQAAVVTDHDSRVIARRRVSARAWELGDLLDWAVAQASAAGFASVTVACEPTGHRWRVLDQLAAGRGLALVCVQPLLVYRSREGEDLTRDKSDPKDAVLIARLASELRCYEPERADAVQSRLRHLGARRRQLTTDATAQVNQIRDLLECAWPAVLGASGSPFRSATWCAALAVVLDRCAGDLGRVLRLGAVRFEGAVRRELPRWGAVRPCLRIVRAVFAALRDPAGVMAHRPGALERAHLALGDWRDTRARLADAEARMVAVLDDLGLTALVTTIAGLTPAGAAAILAETGDPARFASPRSLVKHAGLCPRDNASGEHQGKTSISGRGRPGLRLAAWRAVWAALPNNPVMAARFTYLTTRHDNRLARQQARTACAAALLRWIHVVVTQRVTWDPAIAAGGRPLQQAA

SEQ ID NO: 414294 - protein, 352 aa, unidentified
MALPTLPHPQVLVTLGVDTHADSHVAAALDQAGRPLGTRTISTTPGGYAALLGWARRLGTVDRIGVEGTGSYGAGLARWLRAHGQLVIEVDRPDRAARRRQGKADDLDAHAAARAVQAGTATGQPKAGDGTVEMIRSLRLARRSAVKARTQAANQLKALLVTAPDGLRAQLRRLPPAELVTTAARLRAATKPATPTDAAKLALRSIARRWLQLTQEITALDTQLERLVAMAAPALVAVKGVGTETAAVLLVAAGDNPERLRSEAAFAHLCGVAPIPASSGKTTRHRLNRGGNREANWALYLIAVGRMAWHGPTHTYVERRTKEGKSKAEIIRCLKRHIARELYGILASRPAT

SEQ ID NO: 414295 - protein, 298 aa, unidentified
MGVDLGDQWSHYCILGLEGETLAEGQLRTNPQDGAEFFEALNAARVVVEVGTHSAWVQEVICGYGHEVLVANPRLMEGSKRRKRKNDRIDANKLARLGRVDPQSLHPIQHRSREVRQDLVVLRARDALVAARTELINATRGLVKSMGTRLPKSSSPSFAQKDEEAVPFEIREALLPLVRMAAALSDCIQGYDEKIEELGREKYGHTTLLRQVKGVGPITALAYVLTLENPERFVKSRDVGPYLGLVPKQEDSGESQPQLGISKTGDTMLRRRGAGALSGDGWILIYENQGDRSHTGQW

SEQ ID NO: 414296 - protein, 354 aa, unidentified
MSGEKYIGLDVHQATISVAVMDSQGKLIMESILETKASTILEFLAGLRGTLSLTFEEGTWAAWLYDLLKPHVAKLVVCNPRKNALLKQGNKSDKIDARQLADRLRLNDLKSVYHGETGVRMLRELARSYLTVVKDLSRVMNRLKALYRSWAIPCAGRDVYYTRHRSQWLEKIPEAGTRRRAEQLYQQLDMLQHLRQQARRELLAESRKHTITAKLRQIPSLGPIRSALAVALIQTPHRFRSKRQLWTYSGLGLETRDSGEYHFVKGQVRRKKPVWIRGLNKDYNHDLKGLFKAAAMRASIQPGPFQEFYQRSLAKGIKPTMVRLTLARKIAAITLTVWKKGENFDVEKLKSQAA

SEQ ID NO: 414297 - protein, 375 aa, unidentified
MCERAVLTNRPSLDLSPFVLEGHRACRGAWDRSGVFLNPNSCMGLEPGPSKEGSWMMAQNDLVVAGVDVAKDKVDVCIRSLLLRRMFASTAEGRRELASWLRRNKVGKAVMEASGGYEREWAKALRDAKIEVRIVDPKRVRSFAQSAGRLAKNDTIDAEMIAWFAETFDEARGQSYDATREQLHQMVNARQALKEMQAKLETRREHAVPAAVQRIHARISKTIAVELVKIEATISALIQATPRFAELAEIIESVPGIGRVTSAALIAAMPELGQANNKIVASLLGVAPYDDDSGRRRGERHIKGGRRRTRNVFYMACLGAATQHNPVLKAFYDRLVAKGKLKKVALTACMRKLIGILNIMIERRQKWDAKRYAVS

SEQ ID NO: 414298 - protein, 352 aa, unidentified
MTNDIIETIGCDLGDKTSEVFVLRGDGGVERATVKTTKVGMLSYFTRPATHVVIEVGAHSRWVSEVLKGLGHRVTVANPWQVKLISASNTKTDRRDAELLARLGRADVKLLAPVKHRGRAAQADLAVAKARDALVGARTKLVNHIRGTVKSFGERMPKCTAESFQRQTWVLVPTELKAALGPVYEALAALDQQIKEQDKMIERVAAKYPDVEVVSQPGGVGVLTALVYVLTVEDKRRFAHSRMAGAFFGLRPKRDQSGGGDPQLGITKAGDPFVRRLLVNSANYVLGPFGKDSDLRRWGLRLAERGGKNAKKRAKVAVARKLAVLMHRLWVTGEVYEPIGYRDWRPEAAAVA

SEQ ID NO: 414299 - protein, 351 aa, unidentified
MIIIGVDYHPSSQTIAFLDQETGEYGERQLNHSDGEAEKFYRELKQRGVSVRVGMEATGHSRWFERLLAELGFELWIGDAAEIKTKRVRKQKTDREDARLMLKLLLENRFPRIWVPSPENRDLRQLLWHRHRLVQMRTRIMNQLQAVAMNEGYRWKKKLFSEKGRGLLEKLPLAPWASRRRKELLELLDQLDPKIAELTAAVEQEAKKRPEVLLLMTHPGVGPITGLVYVLVIGMPERFPCGKQIGSYTGLIPCEDSSAGRQRLGHISKQGNTLLRFLLVEAAQAAARCNPDWRRRYMHLRMRREKRIAKVAMARKLGVRLYWMWRNNWQYSQLVEFGSNAGKLVTGHGVK

SEQ ID NO: 414300 - protein, 324 aa, unidentified
MIFIGIDISKLTFDAAYIFNSRTIHKQFSNTPKGFGEFSLWMNKSKKEVYTCLEATGIYSFDLAQYLSRQKTNVMVVNPIITHAFFKMELNRNKTDKADAQLIARYCEHVVLTGGYEKKCYKPKGADYEAIQRLVTRCDQLEKSKTQENNRLEASVNKQASRSIKRLQKAIDNEIVRVKKTIVDLVKNNQTLCQQVELLVSINGIGERTAWSILAYIGDINFFSNSKQIASYAGLTPKIIQSGTSIDKSSLSKLGHKRLRKSLYMPALVAIRYNPILKAVYERLVNNGKPKKVAIVAVMRKLLILSYGVLKSEKPFDINYQITD

SEQ ID NO: 414301 - protein, 353 aa, unidentified
MLKTQVLAQDRGIALGLDVDARSVAVAALDVANGEIVFQGRLSHDEADWQRFLQHFPDCRLWACYEAGYTGFHLCRMLKATGVDCHVVAPSQVPKSPNSSQQKTDRRDALMLAQLYFHPPRTFVRVPTEQEEQDRQLLRTREQVVRDHTRTQNRIKALLAFHHREALKPHPWTVAEKDALRKASLPAAVRAALDVHLDTLERLEIQLRGLNRQLVALSREDRFHDRCALLREIPGVGPLTAMAFLLEVFRPEDFPTAEALACHVGLTCCEWSSGRARHQGHITHWGSPILRRMLVEAAWSWVRKDEQAKARFAQISQNGKRKKTAIVGMARRLAIAFWAMTVKGEPFAYRFAA

SEQ ID NO: 414302 - protein, 450 aa, unidentified
MTRADLGITFCCQQQESTRSSLNFRYSAYTVPPPQKEDAMRIIRKRCLGLDLHKKQITAHLRVHRGSDLEPETVDVQFGTMPEELERMREWIRAREVTDVVMESTGVYWMHVYELLEGITTPAVVNASHVKKVPGRKTDVNDAQWLAELHAHGLLRLSFIPPKPIRELRALTRYRTKLVANRTAIKNRTIKLLEMAGIKLSSVVSSVFGKTGRAILDGLSQARTIDLTKAAKGTLREKLPQLEAALRCPLTDAQRELLQMHLRAYDSVDAQVAEVELELLTRAKPYATMVEQLDPIPGINPLAAITLLAETGMDMSVYRNERHLTALAGLAPGNAISSDKRRRIAVRKGNRYLKRICVQIAWAASRKKDSFQRMRFLRLQSRIGRNKAIVAVARQILVLVFQVLSTGQPYQDLGACFYDARDKQRAVERYTKRLTALGFLVQLQTKNEGA

SEQ ID NO: 414303 - protein, 314 aa, unidentified
MDHIGIDVHKRESQIYILAEDGEIIERRIRTEDERFAAVLGDRPRARILIEASTDSEWVARCLEALGHEVIVADPNFAPMYATRTRKVKTDRRDARALAEACLLGAYRPAHRLSDPQRHVRGRLGVRDALVHTRTCYISVIRALLRQHGYRVPSGSAGSFIDRVRSLPLPGRLRSVVAPLLAVMGHLNEQLAYSDATIEHLAVQDPRVPRLRSVPSVGPVTAAAFLATIDDVGRFPHAHQLEAYLGLVPREYSSGDTQRRGPITKAGHSRVRWLLIQTALSILRRRPPAAEALWTWASPGAGASTSPSWHWPAA

SEQ ID NO: 414304 - protein, 356 aa, unidentified
MADKPIVGIDISKEWLDLCTSQAVEVERIANTPEAVAAWLERTGPGLIAFEPTGGCERFVSAAARERRIPFLRVHPNDVVAFRQSRGIKAKTDAIDARLLLAFAGDRLARRELRTSVLGDERLRALAARRRQLVETLQAEGCRLGAAALPAVRNSIEAVMAALRHSLDALEAELAAVIAANPQTAELARLLQTICGIGPVVATALIADLPELGLLSSKQIAALVGLAPYTRRSGKIQFRETTGHGRVGVRRALFNAARATLRHPSPFKDFFDRLVSDNRRPGKVALTAVMRKILITANAVARDRQPWRGLRHTTPPPGAVGTLCQPHGEQTGHRPGRVKAAAALRAVARSASLDAA

SEQ ID NO: 414305 - protein, 354 aa, unidentified
MIIIGADYHPAFQQIAFVDTETGELQERRLEQPEGAEKFYRELVVQGKRVRVGMEASGHARWFERLLAELNIELWIGDAAEIRRKRARKQKTDRQDAQHILRLLLKDDFPRIWVPSWENRDLRQLLWHRHRMVQARTRMMNQLQAVALNEGLRCKKKLFREAGRKQLEAFRLAPWASRRRQDLLELLDRLNPTIATLSQAIEQEVEKCPAAQRLMTHPGVGPLTALAFVLIIERADRFQCGKQIASYLGLVPLEDSSGNRRRLGHITKQGNSLLRFLLVEAGQVTVRSLPEWRSKYVHLTMRRGRKIAKVAMARKLAVRLYWMMRQGWDYEQLKKFGSHAGQPGHRDGVKSNIE

SEQ ID NO: 414306 - protein, 312 aa, unidentified
MDAIIVGIDVAKDRLDVVMRPSGESFVVARNGAGIGELTAKLAALSPRLIALEATGGFETVVAAGLAAAQLPVVVVNPAQVRAFAQALGKRAKTDPIDAAVIAHFAEATKAQPRALPDDQTRLLADLVARRRQIVEMMAAEGQRERRLTDKRLRKSIARLRKAMEKELAELDSAIDDQVRGSPVWAEKEDLLASVPGIGPVIARTLIAELPELGSLDRRQIAALAGLAPWTRQSGQWRGKSFIGGGRKAVRGALFLAALVASRHNPVLKRFRDKLVAAGKPKLVALIAVARKLLTILNAILRDKRQWQPKTA

SEQ ID NO: 414307 - protein, 418 aa, unidentified
MSRGNDNEILSIVHQVCCGLDVHKEQISATLLMNQRDGILREEVKEFGTFTDDLYELREWLLENECPVVAMESTGVYWRPVHNVLEDMCEVILVNARHVKKVPGRKTDISDSRWLAGLLRHGLLRGSFIPERHIRVWRDLSRIRKKYVQNLSDYKRRVHKLFESANIKIDSVVSDLFGVTGRNLMDLLVSGHEITLSDVETCAKGTLRTKTFELFKSIKGFFTEHHRFLLVSMLDVVKLLERQIERVHKRLGKLLSNRRDKVRMLMEIPGIDEVSAHAILSETGDTLEQFDTAASLACWAGLCPGNNESAGKRHSGKSPVKKHHLKTIMTEVSWGAVKKKGSYYREKYYRLKARRGSKKAIIAIAHRIIKAVFVVLKYGTPYRELGEDYLIHHNREGRLRNLTKQAAKLGYTLVPAKA

SEQ ID NO: 414308 - protein, 342 aa, unidentified
MAIVGGLDIHRAQLTFDYVDLDSGEVFRGRIAPADRAQLRHWLGRFLERTDVAFALEGCTGWRYVVEELHRAGITAHVAEPAETAARRGPKRRAKTDRSDAQLLRDLLLEGRIPESWIPPQPVLEARALVRLYKDLLDERTGWLQRVHASMFQMGVPDLDVSTMSAAGRDRITAAELSVATRTAVDVAMRQVDRLTAEMTMVREQIHAIGRRQPACRALQAAHYGIGPLTSVVIWAEMGDTRRFRSSDDAVRHAGLDVTVYSSDGRRSAGHLARQGPPMLRWALYEAAVYAGRPSSPDHAYFQQVKARLDGQLALLSMARKLARRCHHTLRNLDDQVLAPAA

SEQ ID NO: 414309 - protein, 468 aa, unidentified
MQKAPCLSLLSLLCTGLEERMAKKGKKTKPMPDNMLIIHPHAAGIDVGAEEHWVCVPADRDAQPVQKFSAFTCDLHRLADWFTACRITTVVMESTGVYWIPLFQILEARGFEVALVNARHVKNVPGRPKTDRFDCRWLQKLHTYGLLAPSFRPPEDLCQLRSLLRHRENLIRMTVKHIQHMQKSLDQMNLHLHHVMSDITGVTGMRIIRAIVAGERDPRPLAQYRDSRIQSSADTIAKALEGDDRAEHVFTLTQSLALSDFTQQQIAACDQEIERVLATLDSQVDPDEHPLPPPTTTHRHPQRNEPAFDLRTHLYRITGVDLTQVPGFQAPTIHIILAEVGLNRHKWPTDKHCASWLGLCPDNQIRGGTVLATGSRRVQNRASRALRMAAQSLRTSPSYLGAFYRRMRSKLGPAKATTATAHKLAKILYHMLKEKTSYRERGAEYYLHRDQERKLKQLRKQAKHLGFD

SEQ ID NO: 414310 - protein, 408 aa, unidentified
MEIFCGIDWAERHHDVAVVDQTGRLLGRRRISDDLAGFSDLTALLVEHAGEQGEQVTGVPVAIETDRGLLVAALRAVGHPVYAINPKAVDRYRDRHAVSGAKSDPADALVLAHLLRTDRHAHRPLPADTEQAQVVRVLARAHQDAIWARRQDANRLRSLLREFFPAALTAFPDLTTRTALTVLAAAPTPAAAAALTRANLTGLLHAAGRGTRPADAARLADIFAAADQLRQSTEVETAMGAAARAIVRTLAAANQSVHELELALADHFEQHPDAEILDSLPGLGLVLGARVLGEYGDDPTRWPDAASRRNYAGTAPITRASGRSRIVLARHIRNKRLADACYLWAFTALTKSPGARAYDDTRRAAGDTHNAALRRLASKLLGQLHHCLTHRQPYDEHHAWPPATPAAA

SEQ ID NO: 414311 - protein, 350 aa, unidentified
MKIVGCDFHPSYQQVAVFDTLTGEVEERKLIHADGQAEQFYRELEAPALIGMESVGNAQWFVSLVESLGHQLWIGDAAKIRASYVRKQKTDKRDAGHILKLLLENRFPRIWVPNQQQRDLRQLLLHRHKLVGVRTRLKTELQHLALNLGVQKKRQLWSVRGRAELEKLPLQGWTKRRRQDLLALLKVVEPQIEELDKAAAEAAAAHPQARLLMSQPGVGPLTALAFVLTIGEVARFARSKQLASYLGLIPSEHSSGSKRRLGSISKQGNVFLRTLLVEAAQSAVRHDPLFRKEYKHRCHHKPKGVAKVAAARKLAVRLYWMLKTSKPYPEVLHIEGSPRHPVAVKASPSC

SEQ ID NO: 414312 - protein, 346 aa, unidentified
MMIIGCDYHPSWQQVAWVETETGECGERKLVHATGEAKVFYQQLGSPALIGMEATGNSQWFIELVEDLGHAIWIGDAAQIRASYVRKQKTDKRDAAHILRLVVENRFPRLWTPDREQRDLRQLVLHRHKLVEMRSRVKNELQHLAMNKGMQKKATLWSQAGQQRLRELPLKPWASCRREDLLGLLGMLNQQVGTLDQAVQQAAEEHAQARLLMTQPGVGPNTALAYVLTLGDVTRFRRGKQVASYLGLIPREESSGGRQKLGAISKQGNRLLRSLLVEAAQIAVRFDPGFRKQYLHRCHQKPKGVAKVAAARRLAVRLYWMLRTQVAYPEIVRIESSPRVPRVGAS

SEQ ID NO: 414313 - protein, 414 aa, unidentified
MEQKMIYVGIDWANDHHDIVITDDSAKTLDQFRIDHTCDGFALLHSHIANHQTPPSLVLIAIETSRGLLVHELLQKGYTVYAINPKAVNRYKDRHVLSKAKSDVLDALSLGHLLRTDRHLFRPLMPLPEDYRLLDRLCGDLRKAVDEKSRILNQVISCSKEFYPKALEMFSLNSQIFIDFLKAFPDHDTLSACKKKTFLAFLRKHRYSYPAKAEELWKTIQSPSLQPDKVTACSGRLRLGMLLGQLENLKEHITHYEREIQHILDHLPESTPIKSLPGVGERLAPELVSILGPNSKEGHHRFQAAAEIAKLSGCVPVVRESGKWKTVSLRYACVKPLRRTFRDWAFTSISRSRWARAFYDYHKQRNQNHSTILRNLGKKWIKILFALWSQGTTYDETVHIQNLKAKNVPWAIAL

SEQ ID NO: 414314 - protein, 315 aa, unidentified
MHSEATFVGIDVAKDQLDIAIRPGEARFRESNDDSGIQALIVRLLSLKPQLILLEATGGYEILAAASLRQAGLPAHIINPRQVRDFARSSGRLAKTDKIDAAVLAHFAEALKPDLRPWPDEQQQELAALMSRRRQLVEMLVMEKNRLALTYSPRVRKSLQTNLQSLKEQLKELEQDLDDFIRQSPVWLKKAQLLQSVPGIGPLTCQSLLAWLPELGTLNRKKIAALVGLAPFNRDSGQMRGKRTIWGGRARLRPPLYMATLAACRVNPAIRAFYLRLVAAGKSKKLALTACMRKLLIILNAILRQQQPWCPHAPV

SEQ ID NO: 414315 - protein, 367 aa, unidentified
MKKQKQTRQQTVIGIDLGDSKHAICVTGKGGEVQREFWLANQRKELERLALDYPKARVAMEVGTHSPWISRLLESKGMEVFVANSRKLRAIYENERKCDRQDARMLAKIARLDPELLAPVRHGSEDSQKDLLPIKLRDALVRQRAAIINTVRASLKALGVRLELASTASFAREARQALQEERADLLGIIAPALSALEALGTQITVFDKAIDHIAVQRHPQAQKLRQIGGVGPITSLAFVLLVEDPQRFAQSRDVGSYLGLTPRRDQSGKTDKQLPISKAGNRYLRCLLVQSAQYLLGRHGKDCDLRRYGLRLAARGGKAAKKKAVIAVARKLSVLMLTLWRQGSDYEPLRSQQRPEAKSPTPLRQAA

SEQ ID NO: 414316 - protein, 341 aa, unidentified
MKNKSFIGIDISKNVIDASIFCERTPIKDFPHDVFNNSRKGFGEMCTWLKKNHVVLSNCLFGMEFTGNYSMELEKFLNARKYQFCMLSTHVIKHYPMGSKDKSDKIDSAKIADFLYRYNGTECVKPYKMPDKTMQRLKTLMNERKFLVEQRTCFMNRRQLCTTKEDAQLYDSYIKKLSHDIENIELEIQKLLETDDSLSTTYKNLLAIPGIGFVNAMNVIVITRNFTAFETARQYASYVGVAPHSHTSGTSVKWRPRPSARCDGQAKADLSMAATVAVQYDAELQSFYNRKLGGKQDSDTKRKALNAVKFKLILRMFAIGKQNRKWEPLDSKSSNEKLAIS

SEQ ID NO: 414317 - protein, 317 aa, unidentified
MKDKNVIGIDVAKAKLDVFDSKTGRHTVVANTPEGVDALVRGVAPAKTLVVLEATGGYEGLLVEALERRGVDCAVVNPLHVRHFARGCGMVEKNDKLDARIIARFGEVVRPEPREAPSASEAKLKALVHRRDQALAHLGAERNRLQQTRDPETAEMIRQGVAFYRAQIREVDKRIARVLEQCPQLAAKSRVLQSCPGVGVATTATLLAELPELGRLNRGQVAKLVGVAPIAKDSGQKQGQRKTYAGRSMVRKVLYMAALVATRYNARMQAFYQRLLAKGKAKKSALVAVMRKLVVTLNLMVRNNETWSEPSLAIDNN

SEQ ID NO: 414318 - protein, 387 aa, unidentified
MFYVGIDIAKNTHWASIMSSDGEIIADPFSFSNDSAGFQILLSKLESLDREKILIGLESTAHYGENLISFLFYLDFKIGIINPIQTANLRRSNIRKTKNDKVDTFIIIKALTLGNYAPVTSRDINNLKLKGLCRSRRNLVTLRSRAKIQLVSFVDQIFPELSSFFKGNLHLNVSYQLLKDYSSPSELANLNLTKLSNILKINSHGKYKKEDAIKLRELAKNSVGISNPSLSLQIKHAIIQIELFDSQIQEVEKLYKEIVDELDTTITSIPGMSYNQAAVILGCIGDINRFNSSSQLLAYAGLDPSVIQSGNFSARSTRMSKRGSGMLRYALIYSAHNVAKNNVTFKNYYDLKRSQGKSHYCALGHVAHKLVRIIFKMLKDNVSFNLA

SEQ ID NO: 414319 - protein, 366 aa, unidentified
MLTVIRKEALMATYYIGADVHSNSIEMAIRHGKKVVKRYAIPASISAAVQVLDSLPGKKQMAIEEGPMSGWLYRNLRQKVDRFVVADPRRNKLISSDGDHDDKIDSAKLALLLAGGYLREVYHSDDERRVELKHWVSLYHDRIRNAVRSINKIRARCRMHGVTIPRRVLRQPEHRSIWLTKLKQPALTKQLLMLWVGYDAAAKQARMAKQQLINMSKKYPIIRIWKQLAGIGIIRAVTIFAYLDTPWRFRRKNKLWKYCGVGLQRTASGTDKKGKPKPARLQLPWAANRTLKNAILGAAMTAINQKQNTFKDDYERMVKNGIIPSNARHTVARKLLTVMWGIWKRSCQFDQTKATLLEPVEECVGT

SEQ ID NO: 414320 - protein, 339 aa, unidentified
MTSSKLALRVIGIDVASKKIDVYDPAGKIKKKEVLNTTASIQKHVISKIQNCDETFVVCEATGGYERTLVKALQAAGIAVCVANPFQVRQFGKGLGVLEKTDPIDAQLLSRFGEVVDLQPTLPKSPEYDHHEALVRRREQVMKMINQEQNRLGHEDDKPVREMHDKVIKLLQKQLKTVDSELEAFLKEEAKTNNTVVVLQSVPGIGTVTTSTLLVDLPELGTLNRGQIAKLAGVAPIANQSGKRQRPRSIFGGRSSVRRILYMAALVGTRHNPAISAFYQHLLAKGKLKKIALVACMRKLLTILNNMVHNNTVWRTGTAAKQMNKLGDVPEVEIVVAGT

SEQ ID NO: 414321 - protein, 448 aa, unidentified
MTNHVSLPVVDCLAAFVDVGSEQMHVSVAGGPPEVFGTFTTELHRLRDWLKERGVKSVAMEATGVYWLPLYGVLEAAGFKVSMVNGKQTRNLPGRKTDMKDCQWGATLHAHGLLQPGFVPPAQIRRLQDYLRLRSDHLTSAAACVQHQQKALERMNVKLHDVISSLVGESGIRVIQAILAGERDPGRLLTLCDQRIQKKKAERVKESLRGTWAEEHLFALRQAVENWEHYQRQIAACDQQIQAVLHQISGPEESVGAAVKSKPLKRGGINAPQIEGLHQILCRLCGGKDLTILPAHTDYSLLQLIGEVGTDLSAWKTEQHFTAWLGLAPGSHQSGKRKGSVRRKRNRGGRLFCMMARSLAQSKNIALGGFYRRMAARRGGLIANIALARKLAQLFWRVMVKGLSYAEAGLQSYEEQVLETKRRTLCRLAKELGRVVLPSLAELQTAKA

SEQ ID NO: 414322 - protein, 482 aa, unidentified
MQPKPQEKTTKDTCRTEPGHWHEMNRKQRRETMRKIQSDDLSLEVVHPDAAGIDIGNESHYVAVPPMRDSQPVRRFGCTTAELKAMAQWLKQCGIRTVAMQSTGVYWIAVYDILEAADLEVYLVNARERKNLPGRKSDVQESQWLMKLHTYGLLRNSFRPSQQIRMMRTYWRQRNDLVQAAGRHILRMQKALTQMNIQLANVLSDVSGMTGQAIINAILVGERDPHKLTEFRDPRVKASKHEIALSLEGNWQEDLLFVLKQEQDGYEFCQKQMLECDRQVEQYLQQREDRSKGTPLPEEKRKGRLKKKKGNAPQFDLRGELFRMSGVDLTQIDSIDVMTATTILSEVGWDMGKWETEDHFVSWLRLCPDNRISGDKIIGKGRLPTKNRVSISLKMAASTLRRSNTYLGAQFRRFRTKLGSPIAIKAMAAKLARLVYRMLRHGMKYVDQGAKFYETQHRNLQIKQLKWKAAKLGFQVVQAPAA

SEQ ID NO: 414323 - protein, 391 aa, unidentified
MIFVGIDVAKDKHDCFILNSEGTVLADVFTIANNRIGFETLLSRIQSCSQGESKIKVGLEATGHYSYNLLGFLLDSGLATYVINPLHTNLYRKSLSLRRTKTDRIDARTIAMMLMSDVDLKSYSNTAYHNEELKSLTRYRFDKVKERAKLKSSVARLVNILFPELEKLVSSLHIAVVYALLSNYPGASYIANANTEELAETLCTSSKGRYTKSKTAEIQVAAGVSIGSKMPAKSMELKHTIALIRELDKEISEVESAIDKITSQMDSPIFTIPGIGRHMGAMILAEVGDFSNFASADKLLAYAGLSPSTYQSGQLQNCYAHMEKRGSRYLRYALFNAAKYVCLWCPTFSAYLEKKRSEGKHYNVAISHAAKKLVRLIFAMQRSGKAFLADY

SEQ ID NO: 414324 - protein, 425 aa, unidentified
MNETTPFACTIGLDWADQKHDLWICPAGSSKSEHLRLDQTPEALHEWVAKLRARFDNQPVAIGIETSRGPVISGLLAYDFISLFPVNPKALKDYRAAFSVSGAKDDRTDAMLLEEWVRLHRDKLKALEPDTELTRKLAGLVENRRRLVDERTRIVNQLHSALKTYYPLAESLLEGQMTKPMATEFLIRWPDLEVLQKTSAQILRAFFYKHNSRSAPLIEQRLQALQQAKALTTDPAIVEPARVLVSALAGMLRPLHKAVSHMDQQIQHAMDQHPDAALVRSWPGAGPALAPRLLVAFGTNRERFGSATEVAQFYGIAPVVQQSGSAKTVHMRHRCPKFGRQTFHENAACALKKEPWAKCFYEEHKTKHDDKHHQACRALAFKLVRIYFRCWKDRKPYQPERYLLALQKHGSPLHKSLAPQPAKAL

SEQ ID NO: 414325 - protein, 427 aa, unidentified
MTEQVDDSAELVERVAALDIGKATVMACTRIPHEDGRRRLQEVREYGTTTGALLALAGQLHELGVTLVVMEATSDYWKPVFYLLEAEGFTCWLLNARHVKNVPGRPKTDKLDAVWLAKVAERGMCRPSLVHPRPIRELRDLTRYRRSLIRERTAEKQRVEKLLEDAQIKLSSVASNIFGVSGRQMLAAMLDGEGDPTVLARMAHGRMRAKIPQLREALAGNFTSHHAFLLRMMLDRIDGLTARVEEVTARIEEQAAPYARAVEQLDEITGVGITSAQELIAEIGVDMSRFPTAGHLVSWAKFAPIDRSSAGKPKGSSTGKGNPWLAATLGEVIAAAARTDTFLGERYHRLARRRGKRRAIVAVGNSILTIIWHLLSDPEASYRDLGHGYYQQRSDNRHRERDLIRRLERLTGQTVTLQPAPGQEPAA

SEQ ID NO: 414326 - protein, 402 aa, unidentified
MTQNQSYAAFIGLDKSDKKINVSLQQCAKNKMERSIVKGGAEALHAWVAALCARFPGQAVAICLEQPASGLIHALMSYDFIVLFPINPMTLARYREAFTPSRAKDDPTDADFLCELVALHREQLKAWQPDDVCTRKLRHLTLSRRRSVNMRTRFSNQLKALLKTYFPQALELCGDDLTTPMACALLQKWPSLQQLKKSRAETIRRFYYAQNARRGDVIEKRLALIAQAVALTNDPALIDSSIITVQALTLGLRAAHTAISCYDREIARTFAQHPDASLFAALPGSGTAYSARLLAAFGSRRELFESAEAMLNFSGVAPVLKRSGQATITHRRYARPLFVHQSFIEYANESIRHSLWARAFYQMHKAALEKPLGHHPRLGLQMDPYPLPLLAAAHALRRNPLP

SEQ ID NO: 414327 - protein, 342 aa, unidentified
MQQFIRIGVDLAKNYFQIHALASEDGSSIVRRKLTRTKMREFFSRIEPCLVGMEAYGSAHYWARELKAMGHEAVLMPPAYTKPYVKRGKNDAVDAEAICEALSRPGMRFVPVKSPQQQATLAVHRTRDLLVKQRTMSVNALRSHLAEFGIISAKGIGRVDDLVDKAEHDVTLPSAARVVVKTLAQQIREIDISVDRLEREIAEAHSSSDMSQLLAEIPGVGKLIATVIDASMPNADVFRSGRDFAAWLGLTPRQNSSGGKQSLGAITKQGNRYIRKLLVLAATSLLNVLGRRKGALRDWIVGLLAKKPARLVTVALANKLARIIWAVKKTGESFRSEKFAKA

SEQ ID NO: 414328 - protein, 341 aa, unidentified
MEQYAGIDVSLEQSSICVVDATGRIKREGKVSSDPQGLIAWFASLGMNLTRIGLEAGPLSQWLYVGLKQAGLAVELLETRHVRAAFKTMPVKTDRTDARGIAELMRVGWFRPVHCKSLAAQEIRAQLTARKLVQSKLFDIEMSLRGILRGFGLKVGPTTPKGFAERIQELVSGHATLEAVAAALLAVHAVLLREFAGFEKRVRQAARSDDRVRLLMTVPGVGAIVGLTYASAIDDPGRFKSSKMVGPHFGLTPKKYQSGETDYTGRISKIGDGSVRLALYEAAHVILTRAVKGSALKSWAARLAKRAGLKKATVALARKLAVVMHRMLADGTPFNAAAAAA

SEQ ID NO: 414329 - protein, 398 aa, unidentified
MKVCGLDVHKDSVFCALYDGKVYSEVKEYETMTDHVRTMGEYLQGEGVQRIAMESTCIYWTPVWDLLEEMGFDLILVNPYQIKQMPGRKSDVKDAQWIAALLHKGLLRSSMVPDPVIKELRIYTRKYARFQQQTSQILTEMDRIMVTASIRIGSCVSTLDGKSVIRIIEALIDGKTDPDNLVSLVYANTANKKNGKLRQALTGNFREHHRIPLKWAKQRYDLVQEQIQECLFYMNQICNEYYSKEMELLTSMPGIKNVSAMCIIAETGADMNTFENSGRISGWAGLRPRNDESAGKFKSKAITKGNKYLRAILVQVAWAASRTKGSYFKEKYHRLALRKSNKKAIIAIARKMLVVVWNILKERQPYNPSLVHVYDPVKVERAIVYHQKEIERVSKLLH

SEQ ID NO: 414330 - protein, 341 aa, unidentified
MEKNVFIGIDFSKLTLDVTFFNVKSFQEKHYEQFGNDRSGCVKMFKWIKKRYPDTSLWLFCGEFTGIYTLTLALFLRDKKIDLWLENPMQIKLSNGINRVKNDKVDSMQIANYAYRFQDKMKLYKPQSDASMEIKELVRFKDRLTKVKVQLQVPAAEIKRVMKGCDVANSILNSTKELVAGIEGQIKDVERRIHFLLKKDADMDRLYTLVTSVVGVGMQTAIYLLVHTSAFTSFSNVRQLACYCGVAPFAKSSGTSIRGKNQVSHIANKKLKSLLHMCALNAVRYDPVLKAYYQRKINEGKHKMNVLNSVRNKLLQRIWAVVQSGEIYDQTYHQNKAAIAA

SEQ ID NO: 414331 - protein, 336 aa, unidentified
MKKNFNYYIGINVSKLTLDVCILRECENGTAQVHYKIENSEKSIAQFLKKKFGSAPADRLLFCFEDTGIYSFPLACYLHENSLIYCRIPAVEIKRSKGITRGKDDKTDAEDIAFYAFSNTHKLRPSAIPATSIQQLKLLVAEREKILKALSMFERTNENKGFIAKEVFETVADMNSSITRCLKKNLKKIEAEMMEIIASQEQLSQQYKLVTSIPGVGMQTAVYLLIATKGFEAFENWRQLACYAGVAPFPYQSGTSIRGRTKVHPLADKKLKSLLNMCAMVAVRHDHELKAYYERKTAEGKAKMLVLNNVRAKLLARVFAVINRKTPFVDTRKFAA

SEQ ID NO: 414332 - protein, 386 aa, unidentified
MRRTQKRGPGPSSVLITPDHAGNVVGIDPHKQTLTATVVDPRGGIAASEHFKVSGGGHRALEVWARQFGPIARWGVENAAGWGRHTAVFLVGRGYDVRDVCANRTPRQDRARQRGKSDTLDSERIARETLAHPLLPKAFKRAGQDQGPDELHQLLALWHNRRRSILTSRQHLVNEAESLLCELPLELREQLPDSKSVRPRLAALQRRNRRRRYDPPTRLRLELLDGYYTQIKALDREEKQVTAHLDELVRQSGSTLGELCGLSTRSVAELLVEVGDVRRFTEGGFRRFNGTAPLPASTAEGPGEPVRHRYNPGGNRRINAVLHRMAVTQLRHEPRAQQVYANARANHHTKKEARRVLKRHLSDVVYRRMIRDLAAASHPAKPLLAA

SEQ ID NO: 414333 - protein, 313 aa, unidentified
MAKGITICAGIDTGKYKLDIALEGASEQLQVDNTPADHTVLADWLRRHRVKRVGIEASGGYEQAVVAALRRKRFVVVVFQPAQVRAYAKFRLQRAKNDKIDAALIAACTAAVKTIHAPPDPRLAPFAEQLTMIDQIGEDIARLKNRLESCRDRRIWRSWSEEIARLTKRRNSELKALVAAIRQHRDLAERLALIESVDGIGLPTAVAIVVRLPEIGRITREHAAALAGLAPYDDDSGKYVGIRHIAGGRERLRRALYSAALPASMRWNPQLISLYRRLIAAGKEHKRALIACARKLLIFANTVVARGTPWGRA

SEQ ID NO: 414334 - protein, 408 aa, unidentified
MTANPQEGPIHVRGRAVVGIDIGKRKHSATAVSPQGEVLARLASFSNTSEGIDLLESEVLQKVGGPGKTLIAMEATGHYWICMYWELTRRGYCCVVLNPIQTNARMGARIRKTRTDPIDSLGIARFILSGEARATRIPDEKTIELRLLVRHRWRLVQARADMERYAQTLLDRVFPEYESVFSKPLLPSTLALIREIGIDPRQIVSRADEVRNLLRRVSRRKISDDKIDQLLQKASHSIGTQQATTLIAQQLHDIFQYFELIEKQVAQIDEQLEDRILEAGSPLLSLGIGPVLAASIHAESDSIGDFSTPGQYVAYAGLDPSVHDSGDTVRGRSKISKRGSPTLRRALYQAAFIIYRKHDYFLRRYKKYRRKGRSHTEATIIVADRLARVVWRLLTDNRPFKKRPPKKS

SEQ ID NO: 414335 - protein, 404 aa, unidentified
MVFLGVDWAEEHHDVCMLDEQGKVLGRAQVANSLHGVGRIHALVAEHSEESGEVVVGIETDRGLLVQALLAAGYQIYAINPLAVDRYRDRHSVSGAKSDAADAKVLADLVRTDRNNHRPVAGDSAEVEAVKLLARAHQSLVHSRQRQVNQLRSALHEFYPAALEAFKDDLGGRDAVAVLEYAPTPSRGRSVSQAKLISALRRAGRERNLKARATELQGILQQPHLEQPATLVAAYGVIVKSCVRLIRELNAQTTELEQELTKSFELHPDAELYLSLPGLGFVLGARVIGEFGDDPNRYSDAKGRRAYSGMAPITRASGTRHVVLARYARNRQLADACYLWAFSSLKRSAGAHQYYRALRARGKSHAQAIRALGNRWVSILHGCLRHRQLYSEKVAWRAPVAVAA

SEQ ID NO: 414336 - protein, 346 aa, unidentified
MLYAGLDLSGKRLDFCLLDQLGEKVEVGAVPPDADGLRGLAARVARFAEPVRAAIESMNGARFVHDQLEQAGWDVEIADAVKVKGLAPLACKTDRIDAWVLAELARRDLVPAIWLPDPEIRAERERARFRLHLVRHRTSLKQRVHAVLLAHGKPCPVSDLFGMAGRALLERLALPEPWLATVEASLQLIDELDSQIADCENELQRLGVDHRYVPLLRTVPGIGWVLAYTIAAEIGDISRFATPTKLTGYTGLCPRVYQSGQSDRRGALAKNGPRYLRWALIESTMHASRHPLYRDRYQHTKQRLGKQRGAKVAQIDLARRLAEAIWHMLTRDQPFAPAGAADPLAA

SEQ ID NO: 414337 - protein, 349 aa, unidentified
MRFYTKTHQYYCGIDLHAKTMYVCVMNQHGDILVHRNIRTDQRRFLSLIEPYRDDLVVSVECIFTWYWLADLCTREHITFVLGHALYMKAIHGGKVKNDKLDSQKIALLLKGGMLPQAYVYPADMRPTRDLLRRRMHLSRQRAHLIAHIQNTVHQYNLPALGVRLGKPTERGDVVECFPPGDTQAMVQLDLDLISYYDQQLARLEPQLVKQARTHDAQMHHLIGSIRGIGRILSLVLLYEIQDIDRFPTQGQFLTYARLVRCDKESAGKKVGKSNKKIGNSYLRWAFGEAAVLFMKGNPPAQQWLQKQASRHGKGKALAILSKKLGQTVYAMLKNNRCFDEARFMSHLN

SEQ ID NO: 414338 - protein, 368 aa, unidentified
MSLELSRSTWVITSLAPGSGEKMSKHSVRSGDIAALLARLSQLKEKARARTGHVFPTIVIQEAGLDGFWIHRVLQKEGIESHVVDPASIATSRRRRRAKTDKIDGEALVRALLAYKRGEPRVCAMIKAPSPQEEDRRRISRERETLTAERVQHVNRIKGLLFAQGIGDYEPLHRNRRERLEELITGDGRPLPECLKAQISRELDRLELLIEQVKAVEAERDALLAQAQASPGVPAPAALLLALRGIGPEAAITLWSEGLFRTFTNRKQVAAYAGLAPTPWQSGSVHRDQGVSKAGNPRLRTIMIQIAWLWLRHQPQSALAVWFRERIKRKGGRLGKTMIVALARKLLVALWKYATAGVLMEGAVLKPA

SEQ ID NO: 414339 - protein, 402 aa, unidentified
MQSVAGIDWAKDAHRVCVLDAEGTRLAEAGIGHDEQGLRRLVALLADHGVGRVAIERGEGVLVGALLEAGRAVLVIHPNQARAARPRFRMAGKSDGFDAYLLAELARTDAHRFATLAPDADQTQALRALTRARADLVETRVALANRLRAELERFWPGAAGVFAAVDSPIALAFLARYPSPADAAGLDEKALSAFLARHACSGRRAPAELLGRLLAAPAGRAGAAEVEARRGIVLGLLAALGPVVEQVRLLTSQIAGALDAHPDGALFRSLFRDPKSVITAATLLAEIGDRRERYADGRALAAQAGVCPVAIESGRRRAAGFRWACNKRLREAFGTLADSSRHHNPWAAARYRDARRAGKDHPHAARVLGRSWALVIWRMWQDRTPYDPARHGGLRRLLAEEG

SEQ ID NO: 414340 - protein, 368 aa, unidentified
MTSLAHRGFVHVGMDVSRDSISVTVLHPDRDTAELDKISADEPSVRRLFKRLGRPSGLWACYEAGPTGYDLYRVLTSMGVRCDVVAPSLTPKGRGDRVKTDKRDSRRLAGLHRAGELVAIGVPNPAQEAVRDLCRTRGDMVEDLTRARNRLGKFLLRHSLVYRDGSNWTVRHYRWLQGIHFDDRALTKTFEHYRATVTLRDTALEAIEADLSAYFTTEPFAEAVLRMGAYRGVTHMGALCLGAEVFDWRRFAGARPFMSFTGLTCSENSSGLSQHRGAITRAGNSHIRGQLCEASWSYQHQAHVGPGLRSRQQGVPAATVARSWQAQTRLCRRFRVLAARKNVKSVVAAAIARELAGFLWAEMTAADN

SEQ ID NO: 414341 - protein, 435 aa, unidentified
MDRRAVEVDLWGYAMGSDQAFTVFVGIDWADAKHDICMQAAGSSRREFSCIAHEPAQIESWACSLHERFGGPVAVALELTKGPIVYALQKYDFIVLFPINPATLARYRQAFKPSGAKDDPSDAELALDLLVCHRDKFTALQPQSAPMRTLIHLVEQRRQLVNDKLRFTNRIGNALKQYYPQALAWFEQRDTTLFCDFIDRWPTLAQVKRAHRAGLERFFQNHNVRFANVIEERIRAIKAATALTTDEVVISAYRLQVEVLIEQLRTTLRAIDRFDRQIAKLAPTLPDYDLFSALPGAGPHLAPRLLAAFGEQRERFRSADELQRYSGIAPVTERSGKKNWVHWRWQCPTFLRQTFVEWAAQTISKSFWAGAFYRQHRDQGSTHQAAVRALAYKWIRILYRCWQTRSAYNEVTYLNALQRRGSPLFKHIAVASKTC

SEQ ID NO: 414342 - protein, 399 aa, unidentified
MFVGVDWANESHDICVVDPAGKISGRATIAHSQEGLDELTKHLGRWAEQGEILVGIERPEGRLVDRILQAGHPIVLIPTYAMKDLRRRYGVGGAKSDPGDAYVIADVTRTDGHRLRRLEPLSEQTRALRSVVRARGDLVDQRVALGNQLRACLQAYWPGAAVIFADVCSEIALAFVERYPTPDAAARLGEVRLASFLKKAGYSGRRSAAQLLGRLRSAPEGLGGVEAEARADSVRAMLRVMRSLNRSIKDLDRAVVAHLGEHPDAEVFTSLPRSGRINAAQMLAEWGDCREAYPCPDAVSMLGGLCPVTHASGKHRDVSFRWACNKRLREAITTFADNSRHASPWAADIYRRAIARGCDHPHAIRILARAWVRVIWRRWQDRRPYDPALHGAAVLLEAA

SEQ ID NO: 414343 - protein, 400 aa, unidentified
MRAVFGIDVSKTSSEVAILVNGEKVHGYTILNDAIGFNRLLGDLKTVHNPEIIFEATGVYSRRLQAFLEEYSYAYTRLNPLEAKKQLDSLRVRKTDKIDAEKLAKSQLVHNRKPTYVQEEVYQHLRDLSRFYQNMTEDLVRTKNRLHKVLQVTFPELETLLSTPTGEQYWNLVMAFPCKEFVLSLSQSNLCEIVRQSTSKRISEKRITYLTDKLIKLAKQSFCAVKNTSPMLEEVRYYAQELLRLSERRQVVLNDMVALAQPLPEYDILRSIPGIAETTATSIIGELGDIRRFQSSNQIKAFIGIDLRHYESGNFLAKEHITKRGNPYARKILFKCIHNIASASHTNPCHIADFYEKRKRQSTIASTKPHTIASIHRLIRTMYYLITHNKLYDYSLTQNR

SEQ ID NO: 414344 - protein, 320 aa, unidentified
MRNVFVGVDVSMSSLDICLTLDGLSYDTFNIFNSEKSILAFFEYLQKTYKKSNFYFGYEATSNYMHVLQKLCTEHNINQIMINPYMMSHYLKHLNSRKKSDILDSLGITKYIFSLDTKDFKTVFNQDEKTFKKYNSAINLLRKLDTQLKNFTHSQKDNPIVFMDTLILALSHKIHETKKELEKEAQKILMELYPHIIELKNEIKGVGYSLLLELIPLFLKSESYTLKQLQSFVGLSPRVFESGSSIKKRETMSKRGSPLVRKLLYMSAMVSIRHNEIIREKYLRMVATGKNKKVCLVACMAHIFRAVYIKFNKGLSHGFI

SEQ ID NO: 414345 - protein, 440 aa, unidentified
MGTQSAAALTETWGAPAPTGLLYLGIDIGRRQHLAAAIPESRMWDGSWERAPARTIATTAHGFRGLTGWLGELGFAPDQARIGMEPTGGWYGRTVAAWLERHGYHVDWLQNFALHDRRHLMIGKQTKTDALDARLIARLLFERERLGLKGGFLQRPPRNSDSLRMLVRNRARLVEQRIRCRNQLTAIEDVLFPELKDFFKKSVTSSSARLLLESFPTPNHVAAADPADLHRVVVRQGHAGALASRLMDLQLAAADSAGLATDTDAILHTQDWLLYQLNLLDDQIAQVEGAIGVVLEEWSDQERAVLDSLPGMTMLRQAVLLACIGDIAYFRDDRQLRKLFGWYPEARVSGSSLSRHRLGSSGNRMARRELWLWAWELITPSQGATPFRDYYRRLRNRGMAGYVAMGHLAGKLISVLFYCLRSGTTYDPQRHARDLGIADA

SEQ ID NO: 414346 - protein, 426 aa, unidentified
MKVMTLGIDLAKSIFRLHGVDARGVAVLRRQLTRQQLLPFLAKLSPCLVGMEAGPGAHCWAREMSKLGHQARLMSPHFVKPYVKSNKNDANDAEAICEAVGRPSMRSVPNKNTSQQDVQALHRIRAQLIKWRMALANEIRGLLAEYGIVVTRGIAPLRRMLPVILEDAENGLSGPFREMLVEMAERLRILDERLRQYDLRVARVFGQDERCHRLAQVEGVGPLVATALVAAVGNAHEFKSGRELSAWLGLVPRQHSSGGKTVLLGISKRGDRYLRTLFINGARSAVRTVESRKDLRSLSISRLKGRRGPNVAAVALANRNARVLWALLTKGESYRTNSFSARIPQVGGGTAGGKRLLPTRDCAGGFNDDGEPVRPALSKPELRRGPRGHTSDEVETARIPSGPRVPKCHPSRRPDICEQPILSIQR

SEQ ID NO: 414347 - protein, 402 aa, unidentified
MITCGIDIGKGKHAVAIIDELGRQLVRTRFYDNTMAGAEKLMEELARHAEPAQVHVGMESTGNYWRAYYDFLSKKGCVVDVINPIVTSASSAGDIRGRKTDKRDAESIAEVVMRGKYVRRRDEGLQERKLRALTRQRGFIVEERSAAKLHLSSMVAEAFAEFESLFEDPYGPLALAVLSKYPTACHMARARKPSLAKIVRAHTRGRDADAEARRLVDAAKDSISLACEITDALARCIVSSIQTITALDERVKDIEKAIMDFDPPDLAAKLMAIKGSGKVMPMVVASEFGDISRFRTNPKNGSETGMHKRLLAFAGCEPRIRESGKWRGRKFISKRGSRQLRTALYLIANNIRQWDPYFKAVYDRKVEAGKHHNVAVFYVVAKLLEVLCALYKSGRSYAATQP

SEQ ID NO: 414348 - protein, 406 aa, unidentified
MAQPMGGPSRYLHHLTGRQHVHVAAVLDSATGRCLGVESFPAERAGYAALHAWLAGHGEVDAVGVESTGSWGAGLSRHLTAAGVGVIEVDRPDRKTRRQEGKSDPIDAQAAARAVLSGRATGTPKSGDGPVEAIRALEIVCHGATRDRTRAINQFKALLVTAPADLREHLAGLSFSRQLELARRFRDHDDIVEAQVRFALKTLARKITFLDQQINDLEARMNTLTGQAAPALAGTFGVGPHVAAQLLAALGDNPERISSEAAFAKLCAACPIPASSGKTTRHRLNPGGDRRANNALYTIVLVRMRHHAPTRAYVARRTAEGKTRLEIMRCLKRYVAREIFNVVTRPPAVPTGHDIRQRRLQAGITLTALANTLDIAPIRLSRLERGLDFNNDLATRAATWLTQNAA

SEQ ID NO: 414349 - protein, 451 aa, unidentified
MSARKLSQEKRMKLPKHLKHINLHAAGIDVGSRSHFVAVPEGATEEPVREFSSFTDDLQLMADWLIACGITTVAMESTGIYWIPVFEILENHGLDVKLVNARHVKNVPGRKSDVLDCQWLQQLHSYGLLAGAFRPAEQICALRAYVRQRMNLVRYAASHIQHMQKALAQMNLQLANVVSDITGMTGMRIIKAILNGERNPLVLARMRDPRCKNSTETIARSLLGNYRPEHLFSLKQAVDLYAFYQRQIDECDHQILAQLSSFDAGNSGNDPKSELPVTIGEALQQMTGVDLTRIDGIDDNSALKIIAEIGIDMSRWKSAKHFSSWLGLCPGTKISGGKVLSSKTKAVANRASMTFRMAAFTLFRSKSALGAYLRRQRSRLGAPKAITATAHKLARLVYSMLKYGTDYVDAGQEYYETRYRTRVLQNLKRKAQELGFELVEISGLEQKNIAT

SEQ ID NO: 414350 - protein, 326 aa, unidentified
MHLSTSALGIDIAKLKFDVCLIKENGRAKHKVFANTPHGFEQLVRWLDSHHATDLHACLEATGTYGEPLALFLYDAGFVVSVANPAAVRAFANAGLSRTKTDKVDAKLIARFCLVQRPQTWQPPAPELRELQALVRRLESLVEMRVAEENRLSSGVSAEAVRHSLEEHITYLLEEIKQTEALIREHINNHPDLKEQSDLLDSIPGIGETTAALLLAEIVHIKQYTSARQVAAYAGLVPRERRSGSSVRGRTCLSKIGNARLRKALYFPAITALRSSEFFKAWAEPLRTRGKSKMSVIGAAMRKLIHLAYGVIKTGKPFDPNWAKPA

SEQ ID NO: 414351 - protein, 334 aa, unidentified
MVYAALDIHKSVFQAAVLDLESGALEERRFAARPEALDDWAMRWRGRLAAVAVEATTGWRWVVARLQEHGFEVQLVDPGQTSALRGRRRRPKTDRLDARWLVQLLARELAPRSWLPPEEIQRLRDLTRLRKRLADEKRRWAQRLHALLQQEGWACGRGRLLTAQGRRWAAALVLEPAACLYRDSALAMIAACEAQQEPLERELRRFARADRRCRALMQIYGVGELLACHLLAEIGEAARFRRARQLVRAAGLDPVVADSGERRRRGRLSKQGSPFLRWALVEAAQHGHRPSSPDGALVERVRARAGGGRAKLTLARTIARRAFFLLRELELEQA

SEQ ID NO: 414352 - protein, 437 aa, unidentified
MSEKKSVEIRVSVDVGYRRHSVAIGLPSGEVLEEFEIAHRPEGFAEFFSRIEKYQKIRGCEVAVAMEGFNGCARPLDAMVRRRGYRLYNINNLKLARFKEIFPGAAKSDRIDARKGLELFQLSDHLPLAKEVLQEVKGTPRENEVLKRLTRRRRRLVDERVRVISNLQTDLQAVCPGLLEITKNAGNQWFLNFLVSAPTLSQLARLRPATLRKIPAVGRKYAGLIEDWQKRAHFSEEVEWVGEMIQEDAKRCLELDEKIKALRAKIKEVAKDSKIAKVLLSIPGFGTICTAELAGEIGTIERFSKEGSLALYIGMSTLDNSSGKYQGSKQPKHVNTRAKAAMMVALDRHRKYVPESQRYYEKKRSEGKKHNQAIRALGRHLCRIIYKLLKEEREYEIRPEKGNTKTKVSPRSLIKRQIRKPKISDKGKNNKIYHQGA

SEQ ID NO: 414353 - protein, 331 aa, unidentified
MGRKIDHAVVGVVESFRSEEALLLFAKKQLERAERVVLVYEAGPLGYSLYRKLKALGVECYVCAADSSEQQRKRRKNNRIDARNLTSKLFNYLNGDQSALQMVRVPSEAQEQLRLTSRQHDQLVEERKRLGAKGNAMLLSQGFGSWSNWWRPKAWARLGSLVPGWLLERLQVWVDVLKMLDEKICQAKVGLARGCSGPRPKGVGALSQMQLRSEVLDWHFYSNRRKIACLAGMVPSEWSTGDSERRGSITKVGVPAIRRIIVEMVWRMILFQPQYKPVQKWQEVLRGSNPALKKKAVVAIGRQLIVDLWRLETGRVTAQELNLVMIEAEGV

SEQ ID NO: 414354 - protein, 379 aa, unidentified
MEQSSTLYVGLDVHKDSIDIAVAEAPRDAEVRHLGSVAGGVTAVSKSMRRLVSAGHRLHIVYEAGPCGFVLQRHFTALGWRCDVVAPSSIPHPSGERIKTDRRDAMKLARLARSNDLAVVRVPDGADEAIRDLVRARDDAVREQRNGRHRLKALLLRNATPYAGKCSWTAAHLRWLATIKLEHATQQISFQEYLHSITESGARIGRLEQAMRDALPDWSLRPLVQALQALRGVQLIAAMTLVAELQDFLRFDNARKLMAYVGLVPGEHSSGSKRRQGSITKAGNSAARRMLVEMAWHYQRGARVSDSIATRQADLPAAVTAIAWAAQLRLSAKFKRLVARRVMKTKAVVAVARELAGFVWAIGREVQISGWQGVKPATA

SEQ ID NO: 414355 - protein, 313 aa, unidentified
MSESFVGIDISKNNLDVHILPDDFRKTYAYEEQAVKELIKKLKQIAPQLIVMEATGGYEISIAVQLATAGLNAAIVNPRQIRDYARAIGKLAKTDTLDAYVIARFAQDVKPEVRIQLTVKELELKELVARRQQLIDMRTAEKNRLTRAHAPRVIMGIRNIILALDAQIKAIDKELKNEIKNNPAWNKKVALITSVPGIGPTTAQVLLFCLPELGTLNRQQIAALVGVAPLNRDSGIMRGKRTIAGGRAQVRKALHMPILSAVTQWNPRLISFYNRLIANGKKHKTALTACMRKLLVILNTMLKNNSAYSLEFC

SEQ ID NO: 414356 - protein, 429 aa, unidentified
MNCTQNKKIEQVKETTMIVGIDVGSEKHYFRAFNWRGIELTRKPVAFSNSMEGFNSFYNTIVELMQKSELEEALVGIEPTGHYWFDLGQFMGEKDIKFVMVNPHHVHKTKELDDNSPSKNDRKDPRVIAGLVRDGRYFYSYMPTGAYAELRNASNRRFVLVEEQTRAKNRLQKWIAVYFPEYKGIYTHIDAKGGLLVLKQAPTPEEIVRLGVEGIIKIWKDAKLRGNGHKKAMLILAAAMRSIGLKAGLTEARMEIQDLIEDYELQTKRLERVNDLIKGLCQQVRYADKLLEIKGIGITTVAGFIAEVGDITRFDSTKELQKLAGLELVADSSGKHNGKTKISKRGRKRLRYLLFEAAISVVGKNEEFKEIHSYYTTREKNPLKKMQSLIVVACKLIRVFHTILTKGIRYDASKMLKDIRHPGEQLKAA

SEQ ID NO: 414357 - protein, 364 aa, unidentified
MKKHTTMNKPVSAIDVSVCTTVAVDLAKKVFQVAGEDAQGQLAYEQRIKSREAFQVFLQKLPEGVTVLMETGPGAQAWARLLQAQGNPVRILPAQRVAEHRSGAKNDRNDAHAILRAGRDSSIASVPVKSVAALAMQAWHRVRRGYVRRRTAMGNQIRGLLLEQGIALAQGDVGLKQGVTRVLEDASQPLPALLRELIDEMLNEWKRLGERIAALTGRLEACAAADPTAKRLMTVRGIGPITATALLAKQVEPERFANARQFAAYFGIVPDQHSSGQKVRLGKMTKRGDAYVRSLMVVGSHAVLKQLRPDSEHPDDRRLQRWLQRWGARARQCDWPTATCVSPGCCCAANKPTSASRMLAGRWK

SEQ ID NO: 414358 - protein, 492 aa, unidentified
MAWLKRGASAMEVSGIRRARHGLLPASMERSIPMAAVMIGVDPHKASHTAVAISAAEEPLDELRVRACVAQAERLLAWAQAWPERTWAVEGSGGTGHLLAQQLVSAGERVLDVQPKLGARVRLLAAGDVNKNDPNDARSVAVAALRSAGVREVRPDDHAAVLKIWSKRYRDLGRTRTQVACRLHAVLGELIPGGVPKVITAARAARVLKAIRAEGAVEAARCELAAAFLEDLRGIDARIRETRKKLAVAVAAAGTSLTGLFGVGPVIAAAVIGDVRDVSRFPGRDHFAAYNGTAPIEVSSGKRKVYRLSRRGNRRLNHAIHMTAITQIRNRHSEGRAYYEKKLAEGKTPKEALRSLKRQVSNAIFACLQADARRAAARAEGPGGQTGNGSVTSAAGSHPRRRLFGQATPRPVLHPTTPAGSSAPGPAARGRAGHSPVAATMPSSTPRVQMERPQRSEDERPGGAARRRPYSATRKATGQEPLVKPQRPEGTS

SEQ ID NO: 414359 - protein, 412 aa, unidentified
MDVYCGIDWAGDHHDIAVVDRDGRLLARRRISDDAAGLAQLPGLLAEHGDTPEDPIPVAIETPRGLLVACLRATGRPVYPINPMSVARYRDRHSVAGRKSDHGDSFVLASVLRTDMHAHRPLPADTELAQAIAVLARARQDAVWDRTTAHNRLRSHLREYFPAFLAAFAGARGGITRPEARAVLAAAPTPADAAKLTVTQLRGILKKAGRSRGLDTEAARLHEAFRAGQMRQLPLVEQAMGRQALALPGQLDAACAAAGDLEHAVTQSFNLHPDAGIITSFPGLGALTGARVLAEIGDDRSRFQDAKGLKAYAGAAPITRASGKTRSVTRRKVKNNRLNAAGYNWAFSALTASPGARAHYDRRKDTGDRHAAAQRNLFGRLLGCLHHCLTTGQHYDEATAFPAATKKISQAA

SEQ ID NO: 414360 - protein, 290 aa, unidentified
MFQTLPNVKAGFKQLKKLLPNPEHCLIVLEATGGFEREVVAELIDAGFRVAVINPKRARDFARALGLVAKTDRIDARVLALFAEKVQPAPSEKTPEKQAEIQQLVARRRQLIDLKTQESNRWDVAHVKAAKNSIQAVINTLEAEIRGIEKVIESLVESDDEWRNKAQLIESVPGLGGVTAATVMADVPEIGKLNRQQISALIGLAPFNRDSGAMKGKRSISGGRKSVRCVLYMAAIAAKRCNPVIKAFAQRLAEHGKPFKVIITACMRKLLVILNAIVKSGRPWMAQITS

SEQ ID NO: 414361 - protein, 388 aa, unidentified
MSSIEHISEERASVRNDLSAIFVSLELSQSTWLITSLSPGGGEKMSKHQVRGGDIAGLLARFSQLQAKCKVRTGQPYRLIVIHEAGLDGFWIHRTLQNAGIESHVVDPASIATSRRRRRAKTDGIDGEALVRALLAYKRGEPRVCAMTKAPTPEDEDRRQISRERRSLIAERVEHVNRIKGLLFAQGVADYQPVRRDRRQRLEALRTGDGRVLPICLKQRLSRELDRLELLLEQIRTVEAQRDALLTPQAEAPQSPPVVLQKLRGIGPEFAMVLWSEGFFRHFDNRRQLASYAGLAPTPWQSGTVAREQGVSKAGNARLRTTMIQLAWLWLRHQPKSALTLWFHERTKAAGGRNRRVMIVALARKLLVGLWKLVTTGVIPEGAIMSAA

SEQ ID NO: 414362 - protein, 310 aa, unidentified
MAVMIGVDPHKGSHTAVAIGAGEEPLGKLRVRAAAAQTEKLVAWAAAWPERTWAVEGAGGLGHLLAQQLVAAGERVLDVPPKLAARVRLLEAGDTNKNDPNDALSVAIAALRSRARREVAAEDYAAVLKVWSKRHRDLSRARNQVTCRLHAVLCDLVPGGFSKEISAGQATRVLEQVTPAGAIAQARHELASQFLQDLRNLDTQLQETRKKLAAAVKANHTTLTEVFGVGPVIAGTIIGDAGDISRFPSRDHFAACNGTAPVEVPSGNKKVHRLSLRGNRRVSHAIHMAAITQIRHRHMRCPEASGQSIN

SEQ ID NO: 414363 - protein, 344 aa, unidentified
MNFNRFIGIDVSKKTLDASIFLSGEVINKFPHIQVRNDKQGFKDLLRWAREQGVSIKDALFGLEFTGYYSDELEQFLTGKQISYTMLPTTVVKHYQRGPRDKNDKIDSAKIADYLFRFNGTECIRLRVLPSKAMQELKALKSERKFLVQHRVACENRLKVAKSKSGEKHLQRLIELYNEEIGQVEKQIQDVVTSDEEIYTTYQQLTSIPGIGFVNAVNTIANTQNFTAFETARQYGKYLAVAPSEHSSGTSVQWRRRPSPHADLQAKADLSMAALHAIELSAEMRLLYERKLGSRPKDKDMQKKALNAVKFKLIREMFAVVRQARNFELRGLDKAQAETHSTGK

SEQ ID NO: 414364 - protein, 342 aa, unidentified
MHNPDVCGLDVSAQELVVMVRRGGKTEPCRSFPNTRPGHQELRRYLSRPPERVRVCMESTGMYGLDAALALRADPRIELMVANPRAVKSFSRALLQRSKTDPLDAWVLLEYAARMPFQPWQPPPAEALQITALARRIHALTQQCTMEKNRLHAVAATATTLRVIVQDLRRSVRGLETAIAKLSREARKILAATPELERRFLRLQSTPGIGAVSALQLLGELLLIPANCDVRQWVAYAGLDPRHHESGTSVHQKARISKVGNRHIRRALYMPALTAVRFAPHLRAFYLHLQARGKCKMVALVAVMRKLLHAIFGMFKHDAPFDGAKLCPALTLAVPPEVACAA

SEQ ID NO: 414365 - protein, 427 aa, unidentified
MSGIETGGQEPAFAAFVGIDWADQKHVWCLQGQDSTKRESGELEHTPEAVEAWVAQLCQRFGNRPIAVALEQSRGSLVFMLTKYEPLHLFPVPSTMSASMRKALYPSGSKDDPRDADVLLDLLLQHRNKLRRLSPDTEATRRIQNLVEERRKLVDEKTEHTNRLASHLKIYFPQMLKWFEHLDTELVCALLERWPTLEDLQKVPPSKLRKFFGKHHCRNQELTEWRILAIRQSIPAIRDRAVIEAKSAAVKVIVQLIRILLEGIADLDERIEEAAAAHPDFFIFKSLPGAGPALAPRLLAAFGSQRERYRNAGEVQTYSGIAPVMEKSGKKQWIHFRWACPKFLRQSFHEWAGHSIGYSVWARAYYRQQRGKGVDHHGAVRALAFKWIRIVFRCWKQRVAYDESKYLAALTRRGSPLVAVVAIAKAL

SEQ ID NO: 414366 - protein, 367 aa, unidentified
MKKVSTAVVRQNRNICPPKLTIGLDLGDRNSWYCVLNEAGQIQLEQGVRTNAKALREVFGKMPCSRIALETGTHSPWISRLLSELGHEVIVAHARKVRLIGESRKKDDRLDAQTLARLARIDPELLCPVKHRSAQAQADLTVIRARAGLVRARTALVNTARSLAKSYGGRLRGCNVRNMNPEKAEGLSPELQSALEPLLNAIESLSERIVEYNDRIEALAQHSYPQVALLKQIKGVGTLIALTFLLTLEDPHRFRKSRDVGCYLGLQPGRRNSGQSEPQMHISKEGDPYLRTLLVQGAQHILGPFGVDCDLRRWGLKLAERGGKSGKKRAIIATARKLAVLLHHLWVSGEVYQPLHNSSRTTVPAAA

SEQ ID NO: 414367 - protein, 352 aa, unidentified
MDQYFGCDAHKQYSLFVGMNQEGYTGPSTKVPHDRGEFRHFLSSLPPRSPIAVESVGNWYWLIDEIERAGHIPLLAHAGKAKLMMGQINKSDKLDARGLALLLRNGTLPSVWIPPGELRDQRELPRMRMALVRVRTMLKNRIHATLAKYAIQIHEVSDLFGVRGRTLLQERLGELPPETCQSVEVQLKLLDQVEEQIRLTEGRIEAVIEKTPSIRLLMTLPGVGSILSIVIALEIGDVERFPGAQHLSSYGGTVPRIKSSGGKTFYGKVRPDVNRYLKWALIEAANCIVLHQTRMSDRHVVQLYRRIMKHKGHAKAVVAVARHLAEAAYWMLKKNEPYREPTSHKLTSSTQR

SEQ ID NO: 414368 - protein, 343 aa, unidentified
MEKITTIGFDLAKSIFQVHAVTGDGKVAVRRSLRRSQVLEFFRSIQPCLIGIEACGTAHYWANAIAAFGHTVRLMPPAYVKAYVKRNKTDAADAEAICEAVTRPTMRFVPVKSGEEQAAGMVLKTRELLVRQRSQMSNAMRSHMAELGIIAATGMPSIAKLVVIVRDEEDHRLPPSARAALLEMADQIEILTGRIEKLDSKIVAAVKADDAARRLTTIPGVGPIIAATVRASVPDPAGFRTGRDLAAWIGITPWANSSGGKERLGKISKRGNKQLRTLLVVGATSILKQARRGAKLPAWIASVLARRPYKVAAVALANKIARTIWALLVKGGTYQTPAVMIKA

SEQ ID NO: 414369 - protein, 339 aa, unidentified
MNKIITIGLDIAKKVFQVHGIDGAGAILVQRSLRRAQVLGWFAAQPACLIGLEACATSHYCARELSKLGHTVKLLPPAYAKAYVRRNKNDPADAAAICEAVSRPSMRFVAVKSEAQQAAAGLHKVRAMLTKQRTMLMNQLRGLMAEFGIVVGEGPQHVAKLVAILDDPADGRIPAPLHEALVALGQGLRGLALRIAALDRQILDWGRDNATYGHLLTIPGYGPILASAMAAMAVDPTAFRSGRGFAASLGLVPRQDGTGGKVKLGPISKRGNGYLRRLLVNGAMSVLGAKRAKQDPWLVKLLATKPRKLAAVALANKMARIGWAIMRRQEDFRALPAAS

SEQ ID NO: 414370 - protein, 342 aa, unidentified
MDIVIIGIDLGKNSCSLAGMDASGLVVLRRRMRRSSLERFTKGLGRCIIAMEACCGALGRVFATQGHEVRLMSPEYVRPYVKAQKNDDLDAEAIAEAASRPTMRFVEVKSQVQSDIQALHRARERLVAERTALINHLRALLLERGIVAPQGRRKLEEQLSTFVDEDGIEALSPRIRLLIEDLRAEWRALDERIAAFDGEFVRMARDDEAVRRLTKIPGIGTINATALAAAVGNARAFRRGRDMAAWLGLTPRQMTTGGKPCLLGISKRGNRYLRKNLIHGARAVLPYLVERETPLGRWARGLLARAHKNVAVVALANKLARIAWAILARGCAYDAGYEMVSA

SEQ ID NO: 414371 - protein, 417 aa, unidentified
MHTHYAWFLGIDGGYEAHQICLMDATGLIVMERQVAHDAAAVQTAITALLERTGAAPAQIAVAIETPRGALVATLLERGFAVFALNPKQLDRFRDRHTVAGAKDDRRDALVLADSRRTDPRAFRRVQLDDAVVMQLRELAHAEDDLKRDLGRLTNRLRDQIYRIAPAVLPLCPAADEPWFWTLLEQAATPAAQRALTRTDVLTLLKRHHIRRLTAADVLAATQAPAFYLAPGVAEATREAVELLMPQIRVVAAQLKRCEARQEDLLTVLRERPASEAEPGEHRDVEILESLPGVGRMVTVTMLVDATQPLATRDYDSVRAHVGVAPITKASGKRRVVSMRYACHPRLREAAYHWGRVSLQHDAASAAYYRRLRARGHTHGRALRSVVDRLLRILVVMLRHRTLYDPIRFAIPVAVPA

SEQ ID NO: 414372 - protein, 393 aa, unidentified
MRYLGLDVHRDFCEVAICECGRARSIGRIDTTRDALELFASSLAPDDRVVLESTGNALAIANILRGHVADVVLANPMQVRAISHAKVKNDRVDARTLAELLAADLLPQVWIADEQTRVLRRLTSRRTQLVRQRTRTKNEISAVLARNLIARPQVSDLFGRAGRRWMATLVLPVDERHTLDGCLRQVDFLADELAVIDRAIAERVLASKDMRRLITIPGVDATTAATMMATIGRIQRFPTPRQLVGYIGLDARVRQSGNRPARHGRISKQGASAARHVLVQAAWAAIKTPGPLHAFYLRLKARRGAQIAIVAVARKLTILAWHLLTKQQDYAHQRPVLVARKLRRLELQTGAPRRPHRRITGPNTDKHDLHRARFAETVYTELTTDWTPRPLRT

SEQ ID NO: 414373 - protein, 318 aa, unidentified
MIVYQFIGIDVSKEKFDVCLLKEDGSLQKTFNHVKSGFNEFVKWINTNCGHPWVCMEATGHYSEILADFLVSQGVQVSVVNPVQIKYFSKVKLSRNKNDRIDGKIIAEYCQVMRPRLFKPRATEQKYIRELIQLEDTLKQQRTQLKLQLSCAQSAEVKKEFSYTIELLDKRLKEIELTIKFTIESIPQWSHFIDLLISIKGFGVLSAYRFLAYLPDITLFKNAKQLAAFIGVSPKQKESGKYVGKTTLSKLGNPRIRNILYMPALNAKRFNEALKPFVIRLEKNGLAPKAIVGAVMRKLVHIIFGMLKNDTYFDPNLA

SEQ ID NO: 414374 - protein, 441 aa, unidentified
MAMRKREDEVFPNAAAIDVGASSHWVAVPPHSTDAPVREVGTMTDDLHALADWLLGCGVEVVALESTGVYWIPVYEVLEQRGLNVWLVDARQVKYVPGRKSDVQDCQWLQKLMSHGLLRAAFRPAAEVCVIRAVARQREVLLTEQASWVQRMQKALVQMNLQLTEVLSDVMGMTGQAIIRDIVAGERDAKRLARHRHRRIQASEGDIVKALTGNWREEHLFVLTQALAMYDDIAKRLRECDDKLAALLSERSAAAKVDIGKTPREGSKARAAFDARQQLANWAGCDLTRINGLGLDSVMKILSEIGTDLSRFGSVKHFCSWLGLAPATKISGGKVLSARTKHSANRARQALKMAAMSLSHSDSALGAFYRRLCSRMDKPRANTATAHKLARLVYFMMTRGEAFVDQGQQRYEQQQRERSIAALKRRAAALGFHVHPLPAAA

SEQ ID NO: 414375 - protein, 372 aa, unidentified
MTQSNILFIGMDVHKESIVISLADDDRTEVRRYGSIGGTLDDFKKLLRKLVSTGKELFFCYEAGPCGYELYRYISSQGHQCIVVAPSLIPKKAGDKVKTDKRDADNLTRLLRSGDLTAVYVPNADDEAIRDLSRAREDAVLVLKSAKQRLKSFLLRHGRRFNGSANWSEKHLRWLAEDMNMPYPAQKVVFQEYVNSVTEGTERVKRLEKEILYHTKQWRLYPIVECLMALRGVRMVVAVTIMAELGDLTRFDNPKQLMSFLGLTPSEHSSGDKKKKGAITKTGNQHARRVLVEAGWAYRFPAKVSKEMQKRQEQLPLAIRDIAWKAQLRLTKRFRTMANNGKLKNVIVVAMAREIAAFMWSIAQEVPIIAHD

SEQ ID NO: 414376 - protein, 340 aa, unidentified
MTITTVGIDLAKNVFAVHCVDQHGKTVLVKPKVSRAALPELIASLPPCVIGMEACSGAHYWARLFRQYGHEPRLMAAKFVSPYRMAGKSGKNDAADAQAICEAVRRPHMRFVPVKDESQQAMQCLHRIRQGFIEEKTATYNRLRGLISEFGVIAPQSTDALRHMVSEQKSSLPLQVQQCVNDLLEHIDRIEDNITEYDRILSRMAKTDHRSQRLMELKGIGPTTACALVASIGNAHDFKNGRQLAAWLGLTPSQNSSGGKSKLGRITKAGDSYLRTLLVQGARSVLIGAEKRTDLFSRWVCSLVDRRGYWRAVVAIAAKNARLCWASLHYGDDFRLYSAS

SEQ ID NO: 414377 - protein, 343 aa, unidentified
MRHYAGLDVSVKETSVCIVDESGKVCRETKVPSHPEDLARALHDRAWCLERVGLEAGPLSQWLFSGLAATGLPVVCIETRHTKAFLQAQVNKSDRNDARGIAQMMRVNLFRPVHVKTLTSQKRRALLTARKLLQEKALAVDNDIRGLLRNFGLKVGPIGASRFETRTRELVEGMPELAEIIDPLLEARRKLRELFAVLHRKLLVIVRDDTVCRRLMTVPGVGPVVSMAFTATIDVPARFKSSKAVGAALGLTPILNQSGESKRLGRVSLCGDGMTRTLLYEAAQVMLTRTTKWSWLKAWAMKVAARRGIQKAIVALARRLAVILHRIWVSGMDFRWTREVQST

SEQ ID NO: 414378 - protein, 482 aa, unidentified
MPERQGTLLPRKTSSPASPESFPLVAQETLYVGVDIGKRAHVAGFLSVTLLTRHQRFEHCPALSFDNSREGFRSLIDRIQTFVPLTQVQVLLEVTGHYHRALMQYLQDLDIPVYIIHVQKRREGLLKSDKRDALGLANMLFNQLEKGIQVDDPLQAVRKLAPPTEAAAQLRGMVQHHAELVRESTQRKNKLTSICDELFPELTRLLRNPNLPTALALRSRFPTPSDLALASFAELRAARGRTCSVSDAKLVELQRLAAHSIGAKDPARVHALVFEQKQLIAELNLLGDHLQLLEAEIIQVVEHSREGKILTSIPGIGPQAAATLIATIGTIANFERPAQLKSYFGWVPKVAQSGSSLDWTRLSPRGVRQMKQTMYLIVWRAMQWDSDWKEIYERLVARKCHTDERTRRLVGREKVIGRLAGQMTAVVYVLLKRDQELLAHLAPGAKPPEPQLYDSALHRQHRMGHYQPVRERSREEIQLPTK

SEQ ID NO: 414379 - protein, 319 aa, unidentified
MNDISHIPVIGIDVSRDWLDIHCLPDDHRVRLPNTCEGHAQLTALARDRHALVCFEATGGQEWRLWAVLDAAGVNTRQLPPAQIKAFAASRGTRAKTDRIDAELIARFMAFRPDAGRRLPAEKLRILRAMTTKRGQVVETRKRLLAQVKARQKQGADKLLGEMDAELRALLNRQIATLEAQIEALISFDCELCKTAEVLRSVPGIGPVASTMLLAELPELGQISGEQAAALTGLAPIAHDSGSLRGKRAIGGGRRALRHVLFQAALVASQHNTPLKIFADRLRERGKPHKVIITAVARKLVTIANALCKSGRKWQCQVN

SEQ ID NO: 414380 - protein, 344 aa, unidentified
MTLVGCDLHTRKQQVAALDTETGETHERQLVHEGSAVEEFYAALPRPVTVGIESTGYAIWFHALMHRLGHTVLVGDAAKIRAMVVRKTKTDQRDARHLLDLLRHDRFPTVWVPDPATRDLRALLTHRRRLVRIQTMLKNGLHAIALNERLVCGSKLLRHAGLAQLQALPLPPYTAQRRDHSLELLELLHTKIQQLDGAIATATLAHPDAPRLLTHPGVGPLTALATVVVLGPVTRFADAKHVVSYVGLAPSLNASADKYRLGHITKQGSSLLRWVLGQAAPHAARLDADLSRTYGTLRHRRGRAKARVAVTRKLLVRLFIMLRDQIDYAEFRRRGRPPAPVAAG

SEQ ID NO: 414381 - protein, 307 aa, unidentified
MTAAGIDVSKASLDLAVDEQTGVTRFANTGAGIAKVIKRLKALGASRIVVEATGGYEEPLLEACCDAGLWIARVNPRQARSFALATGELAKTDAIDARLLALMARVFADRLRCHVAPLPWQRELRDWLRRRGQVVTQLQAHKQQAAMASTQVRKLAARTIAALARELAAIERAMQALSQQHTTPALRSSKGLGPVFQATALALLPELGQLDRRQIAKLVGVAPMNRDSGNGQGKRRVHGGRAPVRVALYMATLSAVRWDPVMKAHYQQLRARGKLGKVALVACMRKLLGIVNARRRDELHAEGQLAA

SEQ ID NO: 414382 - protein, 449 aa, unidentified
MSHFTNMSPTNEVGKPLNSHGPVRCLYHSAIGVDVHAQLLVYCFQKHLPETNQLLSEQAQFGTSNCQIKQFVDWVSSHKPEIILMESTGVYWMSPYEALESAGFTSQQLAMVNARDIKAAYGRKSDKADARRLTEFARMNSFKRSFVPSRDIRTSRLIARRLHHATQDCTRESNRMQKLLSCSGTRISSVFSSFKGKAAQKIINSFLDDSYPEFIACVRSNCSRLRATFTDIVDAFRQLNTPTFKELLLEQRKSWRQAMERRDRLEALLRIQMKPYKKTVDQLCVIPGVKELEALKILSEIGTDLSSFRSSEAFCSWIGICCGNNESAGKAKKSGTPKGNNYLRAYLTEVGQAIALVKTYTTVLRKVFQAFKERKGHNRAVVAIAHKIARIIYTMIKNSIAYVEISSPTLEKIRLKKLRASINNAKEVGISLQKLSVVKDSTGEILSDT

SEQ ID NO: 414383 - protein, 351 aa, unidentified
MKECSTVSFKGQVIYCGIDVHKKSWHVTIRHCCHQIENFSMNPDPVKLAKHLKRNYPEAEYRSVYEAGFSGYEAHRTLCRLGVKNIVINPADVPTSGKEREYKNDSADSRKLARELENGSLEGIYIPEPENLELRNLTRRETKLTGNIVRIKNRLHSHLFFLGLKFRGWSGRSLKIMELDAVKRHDYALLSDLRELRFLREEKIRVIRDERECLKRLNRDKIQENLQSISEIGFRTAVVLQAELWDLLRFPNKDSLNSYVGLAPHTVGSGEHEKIKFGGNRKKKQLHYLLIESAWRAVRFNLEYRARYGAMLAKGACPQRAISIIAKKLLLSIRAVWIQNRQFVELLPRTK

SEQ ID NO: 414384 - protein, 322 aa, unidentified
MRTYYVGMDVHRASIVIVVLNGAGKVVMESVIETGAERVRGFLKQLRGKVYVTFEEGTQANWLHEVVRSLVTEVVVCDPRHNKLLQSGNKNDRVDAKKLAELLRHGALKRVYHGDHGVRTLQELVRTYDCLVSDSTRVMNRLKAIFRGRAIACAGHEIYRPERSGQWLAKLGEPGAKQRAGFLYEQLAALKPLRRKAKLAMVKEVRRQTAYLWLMSMPKLGSVSVAQLIAVVGTPHRFRSKQQFWTYVGLAVVTRSTADHEVVGGVLRRSQRPVSTRGLNRNHNHLLKRVFKNAATSACHSGPSKLVMTCGWPEGWLPAWRA

SEQ ID NO: 414385 - protein, 370 aa, unidentified
MAQSTSLFVGLDVHKDSIAVAHALGGGTEPPVYVGAIGTRQADMDRLIQRLHSKASTLIFAYEAGPCGYGLYRSLTGKGLTCQVVAPSLIPKKPGDKVKTDRRDAVELARLLRSGDLTAVHVPSVEDEAIRDLCRARDAARVTGKDAKLRLKAFLLRLGLHYVGRATWNDAHRRYLAKVVCPTPTQQVVFQESVRAVDEQVDRRQRLDAELLERAPAWRLAPVVDALQALRGVQFLVAITVVAELGDLTRFDNPRQLAAFVGLIPSEYSSGGARRQGGITKAGNSRARRALIEAAWAYRHPAKVSLHIQQRIDQLPKPLQDLGWKAQVRLCKRFRRLVARGKHPNIAVTAVARELIAFMWAIAKAVPLPA

SEQ ID NO: 414386 - protein, 354 aa, unidentified
MNYVGVDIHKRYSVLVAVDERGRELARGRISGNSVHAFAQFFEALQGPGKVVLEACWNWGRIYDVLSEIEQVEEVVLAHPLKTRLIAEAQIKTDGLDALALATLLRGNLIARAHVPSKATRARKELLRQRLYWARLRTRVRNRVHAVLDRQRELEMPQCSDLFGRKGLNALSKLRLAEPDATLLSEELDLLKLIDSQIKAQEGRIVAFNANEQATQYLQSLPGMGKILAAVAAAEIDAIERFDGAAKLCAYAGLVPTTYGSGGKVHQGHLLKSRNKWLQWAFIEAAWVAVGCSSYFGGIYRYHRARGKKANIAITIVARRMCRIAFTLLKERRNFQEQHRTFPGRSAVRLTAAA

SEQ ID NO: 414387 - protein, 402 aa, unidentified
MNAVGIDVSKGKSMVAIMRPFGEIVSAPFEIKHTASDINSLVELINSVEGESRIVMEHTGRYYEVLAHQLSEANLCVSAINPKLIKDFDNDSLRKVKSDKADAVKIARYALDKWQNLKQYSVMDELRNQLKTMNRQFSFYMKHKTAMKNNLIGILDQTYPGVNTYFDSPARSDGSQKWVDFASTYWHVDCVRKMSLNAFIDHYQNWCKRKKYNFSQSKAEEIYGKAKELVPVLPKDNITKLIIKQAVNQLNIASATVESLRTLMNETASQLPEYPVVMAMKGVGTSLGPQLMAEIGDVSRFTHKGAITAFAGVDPGVNESGSYEQKNVPTSKRGSSNLRKTLFQVMDALIKTHPQDDPVYQFIDKKRAQGKPYYVYMTAGANKFLRIYYGQVKEYLSSLPES

SEQ ID NO: 414388 - protein, 346 aa, unidentified
MKFIGMDAHSRTCTFVVLGKRGRVLERKTITTHENEIVRYVRTIKGSKMLTFEEGSMSHWLYLTLKDEVDELVVCQPPRKKGGAKTDKIDAFEMADLMRVGRLKSVFHEDSQLQDLRVLVSGYGDLMQDIVRAKNRYKALFRQVAIPNDESGFYDSVEKVLLLPTSEQRFVAGGLYDRLMVLGQLHGEYLARFEANVRKHKPVKLLTSIPGIGAVRANQLVGVMVTPYRFPNKYHFFSYAMLTPHTRMSDGRPYGKNRAQGQTTLKAVFKSATESATRGDTAFRRKYETMIAAGKPHKTARSAVTKMLAATVLGVWKSGRKYDDKHMEVTRRRKRCCHSGTESLRV

SEQ ID NO: 414389 - protein, 371 aa, unidentified
MTEVLHSVVSLYLAFELSNTNWKLAFSTGGKIRLVNVPAGAQARVLEAVAVAKKKLGLPPDAPVYSCYEAGRDGFWIHRWLATQHITNLVVDPASIAVNRRQRRAKTDRLDAELLMRQLLRHYREPESVVWKVVRVPSVAEEDQRRVHRERERLVAERTGHVNRIRALLVLHGIRIPRLKRMVLEEVRDWAGQSLTPQLQAELQREVTRWELVEQQLRALQQLQKDRLAAPQTPAEQQARRLMRLYSLGPISAWTLSHEFFSWRQFRNRRQVGALAGLTGTPYDSGGSRREQGISKAGNARVRTLAIELAWGWLRFQPNSALSVWFKKRFGAGTARQRRVGIVALARKLLVALWKFLDHAEVPAGARMRAA

SEQ ID NO: 414390 - protein, 418 aa, unidentified
MEVLHERCAGLDVHKKTVVACVRLARDGGVAKEVRTFQTTTADLLALGEWLDGHDVNHVVMEATGVYWKPVWHNLDDGERELVLANAAHVKNLPGHKSDVSDCDWLSDLEAHGLIRGSFVPNRQTQELRGLLRTRKQKVRERSSNTLRLQKTLEEANIKLDSVISNVIGVSGRRMIEAMIGGETDPVALAALADRRINAPPEVLCEALRGRVTGHHRFLLGLQLEHIDALDGMIDKIDQQIDASVEPFRAAAGLLTTISGVNQLAGRAIVSEIGIDMSRFETAGHLISWAGLCPRNDESAGKRRSTRIRKGAPWLKDILVQCAWAATRTKATYLHAQFVRIRSRRGPKKAIIAVAASILTAAYHMLKNGVPYRDLGPQHFHSRNKQAQAKRLLARLRDLGFTADFDSLKPIPDALVSY

SEQ ID NO: 414391 - protein, 409 aa, unidentified
MERQLERSAGLDVHRDTVAACVRVPGRGGHREQHVQTFGTTAAELLRLREWLEAHGVTDVAMESTGVYWKPIYYVLEEAFTCLLVNAAHIKQVPGRKTDVQDCVWIAQLLEHGLLRASFVPPVPIRELRDLTRYRKGLIQERQREANRLHKVLQDAGIKLASVATNILGVSGRAMLEALVGGTTAPAVLAELARGKLRAKLPALREALAGRFRPHHAFLVSQGLAHLDYLDEAIETVSTEVERLLIPFAAPLRRLDTIPGINARTAQVVIAEIGVDMSRFPSEHHLASWADLCPGNNESAGKHKAGTTRKGNRWLRMALIEVALAAIRKKQSAFGARYRRVMRHRGHKKAVVAVAHSLLRTIYHVLAEATEYRELGADYYDRRQTTRTTRRAVAQLERLGYRVTLEPAA

SEQ ID NO: 414392 - protein, 450 aa, unidentified
MGNASGVSRGDRNRNARLARLRALVPMQSAIVGVDLADRKQMVVVCDHDSKVLARRTFRCRAWDLGAALDWAADRAAARGFAGVTVACEPTGHRWRVLGQLAAQRSMPFVCVQPMQTSWARRSEDLTFDKTDDKDAVLIARLTAQLRCYVPEPVDETWGRLRHLGARREQLITEAGSQIQQIRALLECVWPAALDAARQPLRSKTWAAAMTVICDRDGGQLTRTRRLGLARFERAVRREITRRGGQKPSLRILRALFAALADPAGVIAHRSGALERVQLLLEDWQHAGQRLADTEARMAVVLDQLKLTALATSITGLSPIGAAAILAETGDPRRFPTARALVKHAGLAPRENLSGAFTGRTRLTGQGRPGLRLAAWRTVWGAQKANPVYAARYRHLTTREDNKLTPTQAQTVIAAGILRHLHAVITTGTAWDPSIATHGTRHRQAAPIAA

SEQ ID NO: 414393 - protein, 391 aa, unidentified
MICVGIDVAKDKHDCCILDSEGTTLADCFTIPNNLDGFKRLLQTIKDCTQKSDKIKVGLEATGHYSCNILGFLLDNDLPVYVMNPLHTNLYRKSLSLRKTKTDRVDAKTIATMLLSDVDLKSYTDTAYHNEELKSLTRYRFDKVQERAKLKQSVSRLVTILFPELEQLVSSIHGTSIYALLREYPGAKQISEAHLTRLANILVKTSRGHYRKDKATHIRDAARTSIGSVMPAKSLELKHTIKLIQELTSEINEIEDAIRKIMDELKPPILSIPGMGFHSAAMILAEVGDFSNFNSPDKVLAYAGCSPSTYQSGKLTNCYAHMEKRGSRYLRYALYTATKYVCYWNPVFTEYLTKKQAEGKHYNVALSHATKKLVRLIYALQKSGKAYLAVT

SEQ ID NO: 414394 - protein, 440 aa, unidentified
MNEEDRTRLEEFRQFRREIRKSAEYLIVGIDVAKDKHHAFFGTATGKTLFKRLVFENDIEGFRKLLVQAEAMKVQEGLKKVVFGLEPTGNYHKPLGEHLMRCGQGVVLVSGVAAHENRKTLDGRWDSNDTRDAANVADLISQGKCLFYEFPVESLQDLRNLLSLKRRLKRQEHGYRVRIRNHLVAKYFRELDRYFEESEKTSLAVVRWCLDPSVIAGLEYPKFVEMVSSGQRRLSQENRLQAIWKMAVDSVGCEVGPAVAFEVQVMVEGLKQIRERIRDIEEKIYEICSQFPEYEFLLSIPGFGPDISAKVLGAVGDPFRFQSGKQVLKMAGLDLSAERSGKTSQSAIPVISKKGKADLRYALYQAAFIASTKNQAFIVYYTHKLQGREREPGIKTKMRVKLSAKLLIIAWTLMKKKEPFNPSYLRVEFQPFSAGAGRES

SEQ ID NO: 414395 - protein, 434 aa, unidentified
MNCNTQNAKIKSITEKTLIVGIDVGSETHYARAFDWRNIEFSKKPFAFSNDEAGFTSFKAWLEDIKEKFGKTIVLPGMEQTGHYWFNLGALLQDNGMKPVHVNPHHVHKSKELDDNNPSKNDCKDPKTIAALVNEGRFNYPYIPTGVYAEIRSLYGLQVMTQEALIRVKNRIARWLSIYFPEYKDVYRSCDAISGVMVLRVCPLPADIVILGADGVNKIWRDAKLRAAGMKRARTLVEAAKHSVGSTESPEAAKYEMELLLGDYDVYTKSLEELTEKIEAKLEEIPYVDKLLEIKGVGKKIVSGLIAEIGDISRFDNPKQVQKLAGYAIVACSSGKHKGESHISYRGRKRLRYVLYEAAISLIGQNAEFKEIHRYYLTRQNNPLKKMESVIAVACKALRVFYAILTKGVSYDGKFMLESIRYPESQVLGNRIAA

SEQ ID NO: 414396 - protein, 341 aa, unidentified
MKVTTVGLDLAKQVFSVHGVDEHGKAVLRKRVSRGKLLELFAQLPSSLVGMEACSGAHHWARELERLGHRVGIMAPRFVAPYRKSQKNDGNDAEAICEAVGRPSMRLVPVKSTEQQGLLVLHRVRQGLTAERTGAINQLRGLLAEFGIVLPKGRCQLRAHIGAVLEDAENAIPGLARRAFADLNARIGELDQRILAYDRELEGLARHSEAARRLQQIPGIGPITATALVASVADAKLFKNGRQFAAWLGLVPRQYSTGGQVRLGRITKRGDAYLRTLLIHGTRAVLSSTKDKPDRLSRWAEGVRARRGTRKAAVALAAKNARIAWVLLARGEDYQSRCAAG

SEQ ID NO: 414397 - protein, 414 aa, unidentified
MDVIHSRCCGLDVHKRTVVACVLLSEPSGPPHREIRTFGTYTNELLALADWLAEHGVTHIVLESTGVYWKAVWNLLEDRFALLLVNPRHIKTVPGRKTDVLDAEWLAELLRYGLLKASFVPDRAQRELRELTRYRTSLTNERSAAVNRLQKTLEGANLKLASVASDVLGLSGRHMLVAVVEGTTDANALANFAHGRLRDKLPQLEQALSGRVGPHQRFLLAEQLAHIDSLDASIERLNAEIAERLRPFDELIDRLDAIPGIGRTIAEVLLAEIGADLTRFATANHLASWAGMCPGHNESAGKKRSGKTRKGSPWLRAALVQAAHAAAHSKQSYLAAQYRRLTARRGTKKAAVAVGHSILVIVYHLLTHDCPYAELGPTYFDQRDPRGVQRRLVYRLEALGYNVQLTPLAEAPAA

SEQ ID NO: 414398 - protein, 347 aa, unidentified
MTIVEDRPVITGGVDTHADAHVAAALDAIGGLLGVQQFPATAAGYADLLGWLGEFGKIALVGVEGTGSYGAGLARHLAAAGVRVVEVDRADRQDRHRRGKSDPLDAVSAARAALSGRASGAPKGRDGAVEAVRALMVAKRSARRERTQAINQARALILTGPDELRERLAGLSAAALAAAAAGLRPRPGDDVPGYATRIALRELGRRVRFLDVQLGRLDELIIPLVTARAPGLLALHGTGPDTAALLLIAAGDHPERLRSEAAWAHLCAAAPVPASSGKTTRHRLNRGGNREANHALWRIVITRMSSHPATRAYVERRTAEGLSKTEIIRCLKRYTARQVYRHLRDGG

SEQ ID NO: 414399 - protein, 341 aa, unidentified
MKKSTVLAIDLAKTTLQLGKFEHDGKMVYNRALSRQQLKERLIKEPSAVVAMEACGGAHYWARFAQSCGHQVKLMNARSVKAFRTGQKTDRNDTLAIAIAAGQPTVRAVPVLSTEAQAAQSLDRARRLADNQCVSLSNQIRGLLSEFGIVFPQGYVALRRRIYGVLEDGENGLPATFRELVWSLWRMLERQRAHADELQRQLERRVTEIESCRRLLALEGVGPVGAFRLWLSLGDGSGFASGKNAAACLGLTPKQHSSGGKERIGHISHVSADQPLRSTLYQGALAVIRHLKRRHPRTRKEQWLAALVQRRGVKVAAIALANKTVRTAHALLSQNTTYQPQ

SEQ ID NO: 414400 - protein, 348 aa, unidentified
MTIVGGFDVHRAQITFDYLDTDTGEVTRGEIRPATRSVLRGWFGRFAGRADVAFAVEGCTGWRFVVEEMVAAGVRPHLAEPADTATQRGRKQRAKTDRADARLQRELLCQGRLPESWIAPPHVLEVRTLVRLYVALMGERRTWQQRIQAQLFHQGVPALRGLLTEEGRATLSSAALSPAGRQLVDTALAMIDELGERVRPLRAQLQAIGRRQAGARSLTAHYGIGALCAAIIWAELGDPRRFRNSDQAVRFAGLDVTVWSSDGKRAAGHLARQGSAVLRWALFEAAQSAARASSPDHDYYLATADRLGGKRPALSVARKLIRRCYHTLRELGDEAWSTVGGSIEKQVA

SEQ ID NO: 414401 - protein, 367 aa, unidentified
MKNTIVHYEGTASLEAVATKVKLRGAEIKIGLDVHARLYVAVAQYDHLLPKAARRLRPEQFVPWVETLLRQGHTVHVVYEACGFGFSLYRRLIAAGAHCYVIAPRKLDEECSRVKTDPRDATTLCQRLSRYLEGNTRELAVIRVPSQEEEQARHVSRQRTQLVCHRQKLEAQGRSLLISHALPAPAHWWKEQTFSRLGRHLPAWVTTRLQMARPALLSLQQQIDALTNELETSAPSTLPRGVGRLTSVVLTREICDWGRFNNRRAISSYTGLCPGERTSGSKRVPGSVTKRGNPRVRAALVECAWRMVRFQPQYPPVQKRLAVLAKGSRAIGAVRKKAIVAVARRLAVDLWRLHTGRCTAEQLGLEL

SEQ ID NO: 414402 - protein, 351 aa, unidentified
MKSLLMRFIGIDLGKRSMEVHFIDSQDRHSTWSCQTDVSGRLRLLSKLKSTDTIAMEACPLAFILYSMIKESLGAKVLVLNPLGLAMIYKSTKKTDREDAAKLAWVIQRLPEQELPVVTVPTKEEQNLRYLVAEQVELTQNRTREINRLHALFTQDGITTITKKNLVNSKSREVQYPLLSASLKERALRYEKIICVLEENLEDVEAQIIKEVSGHERTPFLLSIPGVGPNLIAAYLGYLGTGERFTADSSGDSSRYGPITKRGCPILRRAIVQAAWALVRAKNGGCLQEKYFALKTRKGYSKALVATARKLLKTMWIVSTRKAMYLNYDPVKYRAKLEKYDVEFVGVVGAA

SEQ ID NO: 414403 - protein, 436 aa, unidentified
MEQIYQRCCGIDIHKKILVACLIVLTADGHKHKEMRTFRTVTQELLQLLDWLQANNCTHVAMEATGVYWKPLFNLLEGHVQLLVVNAQHIKAVPGRKTDVRDAEWIADLLQHGLLKASFIPPAAQRDLRELTRYRTTLVEERARIVNRLQKTLEDTNLKLGDVVTDILGKSARAILDALLAGQTDPVTLADLARGRLKAKRAELEQALVGTLKPHHRFMLREQLAHIDSLDEAIVRVGAEIAVHMRPLEQAEQRETCADDAVPENQKQALTWAQAIVLLCSIPGISQRAAEGILAEIGIEMNRFPSAKHLASWAGMSPGNRESAGKRLSGKTNKGSPWLRKLLWKPLTPAAHTKNTYLAAQYRRIAARRGAKKAMIAVGHTILVMIFHILNTQKGYEDLGGNYFDEHDRQATEQRLVRRLQKLGYEVELKVAAPAA

SEQ ID NO: 414404 - protein, 349 aa, unidentified
MQFYTKTHHHYCGIDLHAKTMYVCVLNQAGDILEHRNIKTDQDRFLSVIAPYRDDLVVSVECIFTWYWLADLCAREQIPFVLGHALYMKAIHGGKVKNDKLDSHKIALLLKGGMLPQAYVYPASMRATRDLLRRRMHLSRQRAHLIAHIQNTVHQYNLPALGVRLGKPTERGHVVEHFPPGDTQAMVQLDIDLIDYYDQQLSKLEWQLVKQAKVHDAQLYHLLGSIRGIGKILTLVLLYEIQDITRFPTKGQFLSYARLVRCQKESAGKVVGKSNKKIGNSYLRWAFGEAAVLFLKGNPGAQKWRQKQTSKHGKGKALAILAKKLGQTVYAMLNKNQCFDEAKFMAHLK

SEQ ID NO: 414405 - protein, 352 aa, unidentified
MHASTVAIDLAKEVFELAFADDRGRVVERKRLSRRAFARALEQRPPLRVLMEACGSAHYWARRFQRLGHAVRLLPARDVRPYVRGNKTDRNDVAGILEADRCGDIAGVPVKTPEQQGIQALHRLREHLKAERTATTNLLRGVLREFGVTIPAGALKVPAAVRDALEDGDNELPMPLRYSLDDQLQRLAQLQADMAAIEQRLEEFADRDVAVQRYRRVPGVGLLTATALRASAGDLSRFRNGRQFAAWLGLTPREHSSGQQRRLGGLTKRGDVYLRTLLVHGARAVLTAARLKPRRGQPLDPLQAWALKVQDARGHNKAACALANKLARRLWAMEHHGQAFDPRHVSQRPGAH

SEQ ID NO: 414406 - protein, 347 aa, unidentified
MRFYTKQHRYYCGIDLHARSMYLCVLDCQGEILMHRNMTCSPESFLKAMAPYREDVAVAAECIFTWYWLADLCARENIAFVLGHALYMKAIHGGKAKNDKIDAHKIAVLLRGGMLPMAYVYPAEMRSTRDLLRRRMHLMRKRSELLAHIQNTNSQYCLPQFGKKIAYKRNRHDLPEHFTDLTVRRSIEMDLSLIDHYDKLLAEVELYITQNAKVHDVNAFNRLRSVHGIGKILALVMLYEIHDIKRFPTVQDFVSYARLVKCSRESAGKRHGSSGKKIGNVHLKWAFSEASVLFLRANPKGQRWVDKLSSKHGKAKALSILAHKLGRAVYYMLQRDKAFDMNKFFNS

SEQ ID NO: 414407 - protein, 351 aa, unidentified
MEVYAAIQKRRSNMNITTLGIDIAKNVFQLHGVDQDSKTVLTKRLSRAKLLEFVTNLNPCLIGMESCGGSNYWARKFIAAGHIVKLMSPQFVKPYVKSNKNDKNDAEAICEAVARPNMRFVCVKQIEQQDIQSIHRIRTRLVAERTALANQIRGLLAEYGIVIPKNIGNIRSNLPEILEDGANELSGIGRETFKDLYDELVDKDKKILAYDKKIKLICNQNAKCKKLTEISGIGPITATAILAAVGDARVFKNGREMAAWLGLVPKQCSSGGKERLLGISKRGDKYLRSLLIHGARAVIFKHKNKDDTKSKWAKQLVERRGINKAVVAVANKNARIIWAKLTGAQPWQAAA

SEQ ID NO: 414408 - protein, 366 aa, unidentified
MKKISTVQVFGNEVFKEQKLTIGVDLGDRWSFYCVLDEAGKIILEQKVSTTPEAMKQTFERIPRSLIALETGTHSPWLSRLLKELGHEVLVAHAQKVELISKSNRKDDRHDARTLARLARIDPELLGPVRHRSAKAQIHLTVIRARAELVSARTALVNAARGLTKSYGERLPKCGTEQVSRELAAKLSAELREVLEPLLHEIESLNERIKEYDARMEKIAKESYPQVALLKQVKGVGTQIALTYVLTLDDPHRFAKSREVGCFLGLKPGRRDSGESQPQMHISKEGDRYLRTMLVQGAHYILGPFGEDSDLRRWGLRLAERGGKNAKKRAVVAVARKLAVLLHRLWVSGEVYEPLRNSHKAMRAAA

SEQ ID NO: 414409 - protein, 343 aa, unidentified
MQTVTTIGLDIAKSVFQVHGIDAAGKVLIRRQLKRRYVLAFFQKLPPCLVGIEACASSHHWSRELKALGHTVRLMPPAYVKPYVKRQKNDAADAEAICEAVARANMRFVETKTPEQQSCLMLHRTRQLFIRQQTSVINAIRAHLAEFGIVAPVGRKGVEDLLAVVADASDRRVPEVARACLAALGTQLRTLKAQILEFDRMIMAWHRSNETSRRLDDIPGVGPVLATALVASVADPKAFRSGRNFSAWLGLVPKQHSSGGKDKLGSISKQGDRYLRSLFTAGALAVIRYAKIHGTKHRPWLTALLARRPTKVAAIALANKMARMAWAMMAKGERYKEPVALAA

SEQ ID NO: 414410 - protein, 337 aa, unidentified
MNNCGIDISSESSDICIIDEKGQLLRRQTVDTQSGDIDKGLSGLGKLKVIIEASPLAEMVARMIEDSGHIAVIVDARAAKNLMSAMKKTDRRDARTLAEICRCGWYIEVHKKSAKARQMRSILQARQALLKSNKALGASVRGLLRSHGIRLGKVSKGQFVERVKEVTESGAPGILDALTGMLDAWALTGKRAEQLKQAMAKECKRDEISGYMESVPGIGPLISTAYRATIDDPQRFKHEEEVGDYLGLAPRIYQSGEVEYRGRITRQGDAMLRSLLVEGAHVLLTKGKDCALKRWGLSIEKRKGSAKAKVAVARKLAVLLWRLWKDKKMFEAFPQTA

SEQ ID NO: 414411 - protein, 351 aa, unidentified
MRTSQNTAETINTIGIDVGKNTFHLVGLDKRGAIVLQQKVTRHQLGRRLSNISRCLIGMEACSGTHFIARQLAALGHDVRLIPAQYVKPFLKGHKNDYRDAEAIAEAVQRPTMHFVSIKTPEQMDLLALHRVRSRLVRQRTGVANQIRGFLLERGITVRQGFMPLRKALSEILSSKSDALSPRMLNLIGELIQDWRRLDDRIASVSTEIEAMAKRDESCQRLMSVPGVGPIVSSAVVAAIGNGTGFKQGRDFAAWLGLIPKQESTGDRTILGKISKRGNKYVRTLFVQAAHVVLERRPRTARQGLWPWIEQASKRLHRNMLAIALANKLARIAWAVLARGHAYQPRIIANA

SEQ ID NO: 414412 - protein, 409 aa, unidentified
MEVCYPKCAGLDVHKDTVVACVRVHGKKIEPAVRTFGTTTAELEKLAEHLAEHGVTHVAMEATGCYWKPVWTVLAADFELILANAAHIKNVAGRKTDVKDSAWIADLLAHGLISASFVPPSDIQALRDLTRTRKQLTRERAAHVQRIDKVLQTANVKLSSVITDITGQSGRAILNALVRGETDPKALARLVHRNVQASPEKIAEAVHGRVDKNHRFLLKLHLDQIDGIEQALEQIDARILELMEPLEQATKTLVSIPGVSRLSATVIISEIGTDMSRFPTAGHLISWAGLCPKNDESAGKHRSRSLRKGAPWLKTTLVQCAWAAARSKNTYLRSLFFRLKSRRGPRKAIMAVASSMLKSIYHMLKNNVAYQDLGPEHFDKVDKMRKADRLVRQLSQLGFDVQLKDKTAA

SEQ ID NO: 414413 - protein, 414 aa, unidentified
MTSNVNIAAGLDIHNAFVLATILWSTGQMIQERFSRTQEGLIQLKNWILSHNCEVIACESTSDFWVPIYELLNNLVPVIVGNARDIKALSHKKTDKVDSELIARLALHGMIQPSRIFSKSHREFRKILRLRHRLVEKRSSFKNQIRGILNTEMIHIRSVLSDIFGKSGLLILNGIINGMPLKDIIAILPPRIQQKSDSIEAVLKQSISHSALFQIKVLLDVIKCLDEQEKLLKESALHYAFENYPREMEILMSIPGIGAVSAATLIAEIGNIHDFGSGDKLAAWLGLVPTVYQSAGKLRMGNITKRGSVHARWILNQIAHAATRCKINSFRTFYERKHIVIGKAKAIIALARKIATIIWHLLMHDEYYEDPVFGKKNIPKLSKVAIPREVTIEQLLEIFAKADILLKSPDPDIL

SEQ ID NO: 414414 - protein, 340 aa, unidentified
MQSTIIAVDLAKSVFQIAVSRRPGKVSESHRLTRSQLLRFFAERQPALVVLEACGTAHYWARELQALGHRVQLLPPHEVRSYVHRNKTDRADAEALLEAHRNERICKVPVKSLAQQTLAGLHRMRSAWMADRTARINLLRGLLRELGFSIPVGARHVVVQTLGLLEKLPEPLRPVLAEACQEIGEFEARVAAVEKQLRALAKQTPVVERLQSIPGVGLLTATALVALVGDVQRFPTSRHFASYLGLTPREHSSGLVRRLGAISKAGDSYLRTLMISGARSALYAASRPKDQPDRLRRWALQVHRLRGHNRAAVALANKLARIVWAVWKHDTRFESQAVPA

SEQ ID NO: 414415 - protein, 367 aa, unidentified
MTVTIVDAARPVTGGADAHLEVNVAPGLVTGGVDTHLDLNVAAALDGIGGLLAVAEFPATLAGHRELLGWLSGFGPVARVGVEGTGSYGAGLARFLRAAGVAVVEVDRPNRQARRRAGKSDPLDAVEAARAALSGRARGAAKSRDGNVEAIRALVVAKRSARSAKIQALNQIRHLSFTAPEQLRQRLAGVSRHQLAARAAALRPASREGADPVVAATKTALRLLGRRVLALDEEKARIDALLAGLVTQTAPQLLEVFGVGIDTAAALLVTAGDNPGRLRSEAAWAHLCGTAPIPASSGKVTRYRLNRGGDRQANRALWGIVITRLRNDPRTKAYMDRRLGEGRSKPEVIRILKRYVAREVYHRLPRT

SEQ ID NO: 414416 - protein, 343 aa, unidentified
MRSDYRLFVGADIAAASVTVAWQAPGAAVGRPVTIEQSPTGFAALRQRLLATGRAPATILVVMEATGSYWLALAQSLAAHGFAVSVINPLQAHHFAKALLRRAKTDAIDAQTLAQLAALLQPAPWTPPPAIYDELRQRLTQRDALLALRQQVRNQRHALLQGPTVVTSVQARMEDLIDTLTAQIAAVEAELAAVVDQDTAWAGAIRRLQSIPGIGRLTAAWLVVSTLNFTLCATAEQAAAYAGLVPLPHESGTSVRGRPSIGRGGNGRLRTALYMATLSAAQHNPAIKPFYDRLRAAGKPKKVARCAAARKLLHLAWAVGTTQQPFDPGYQQQQHAPFHAQAA

SEQ ID NO: 414417 - protein, 470 aa, unidentified
MTNYYLGSDVSKGYADFQFIDTKKQKVGASFQLDDTHTGHAALYLRLQDFLNEHPDSQLYVALESTGGYERNWYASLEKFQSSLPLHVAILNPAKVKFNNDVGHKVTTDALSAYGVAAYMVAHPEKVSFESQDYFTSPKRHWKYLQMLNKQKTQLFNLLQSELYLVLPDIQAFCKDGYPQWVMRLLKQYPTAKRLSRARVSTLAEIPYVSEQRAIDLIQAAKQSVASVDDALAEEMVRSLVTQIQQLEQLIKSLIARLKQELPMPEIELLKTFTGISDYTAIGLMIEIQSIHRFERSQNLASYFGVHPVFRQSGDGESGFKMSKQGRKEPRRLLFMVAFSASIHNPVIRHHYQMHLAKGMSRMAALGACMHKITRVIFGMLKHNTPFDPAIDQKNRDRTKAKSAKVLSAAQIARIQEFDKTAPVSRRQNKKRKEQERLSQKANGIMNGIGCSAPEKINENKSTITSNLTG

SEQ ID NO: 414418 - protein, 374 aa, unidentified
MSDYSEAYVAFDSSKLRNSVAIAEGGRNGELRFVGEIDNTPTAVRRLVKKLSRKHARLTFCYEAGPTGYGVYRLIRELGHECSVVAPSLIPKKSGDHVKNNRRDALALAKLLRAGELTAVWVPDERHEAMRDLTRARWAAVADLRTKRQQVTALLLRLGRPYAGKTTWGKAHWAWLMRQTLAHAEQRIAFEEMLLAVRQAQERIERLDEAIRAAVPEWSLEPVVTALMALRGFDLVSAATLLAEIGDLSRFRTPRELMGFLGLVPSEHSTGDRIMRGPITKAGNRRARRVLVESAWSYRYPPRVSEAKQARVEAAPQAVRVIAWKAQTRLYARYRALVRKGKLKTVAITALARELAGFVWAVGHEVSPTVAPAI

SEQ ID NO: 414419 - protein, 316 aa, unidentified
MAMRVSKSIVGVDVAKAELVIYLADPDLLTSITNEKPVIKRWLKTLPGPTAIAVEATNVYHVDLVELAHESGHDVFIIDGFQLSNYRKGVGGRSKTDASDARLLARFLKNEGEDLRPWTPPPAVYGKLQSLLRRRASLIQAKTSLTQSWANDASLKAVFATFVKSMERLDLLVQKKLKEILREAGLLEEVARCQAIEGIGFLTATALVMAYNRGDFTSGDSYVAFLGMDLRVSDSGQKNGRRYLTKRGCSEVRRLLHNAAMSACRSNAWKAFYNHHLSCGKATTQVLVMLSRKLARIAFALMRNQSEYQSKGAVIA

SEQ ID NO: 414420 - protein, 448 aa, unidentified
MMTPATIEWYRLHKPNLKQEEPSKMKNTLARKLKQVPEGYLIIGIDPHKKRHAAVAISQDFTTRDKFKFDNTREGLETMLRRARTEMVKYGCRGVMFAIETGGHYWRNIAYFLDERGLPFRLINAFTLKRRREGKELNRRKNDYRDGEVAAQLLCTGEFTESKLPQGVYAELRTAHNAYRRLVKESTRITNLVKGLLDGLFPEFTQVFKDPCGLTALSVLSTCAIPRVIAGMTEDEFVAIIEAQYKGRRLMRKKLRALHFIAGTSIGIDAGARSVSSEIAFLVDKLELIRQHICIIERTLVRLVDETEEGKYLLSIRGLNYIAVAGLLAELGCFKSYQSAKQMIKMAGSNPTESESAGKRSTNTPMSKKGRPVLRYCAWTSVIPMLRFNPDFRAWAKQRRERPVHANPLGGREVVGAALNRLLRLVFALVKKQTFYQLPRTDLVEIAT

SEQ ID NO: 414421 - protein, 344 aa, unidentified
MSISMIGLDIAKSVFQIHALNNAGKVEMRRKLRRSELIPFFENQEACTVVMEACAAAHHWARVLTGLGHEVKLIAPEAVKPFVKKGKKNDAADAAAICEAALRPDVKFVPVKRLEQQGVLALHSARSLLVKQETMLANAMRGLATEFGLTVPKGIGRLDELMALVDADEAFPEQARQVFTGLRDHCRATAQRIATLEAGIVAHARRDETARRLATIPGIGPITASLIAATVGDISMFKTARHFAAWLGLVPRQYSTGSKSRLGRITKSGNREIRRLLVLGATSMVFRAEQWNSAAGVWTRGVLERRPVRLVTVALANKMARIAWAVMTRNEVYHAKGRAAAAAA

SEQ ID NO: 414422 - protein, 321 aa, unidentified
MTYIGIDVSKDSFVVAYSPEKNSKTKTFKNTTKGIYEFIRSISKDEHHCVMEATGNYSALLVYLLSEAGITTSLENPLKVKNFARAMLSTVKTDEIDARLIALYGEKMQPAPYKLRSDAILTLKQKRTVIRQLKKQLIATRNLKGSMEVLPFFDAKCKKSIERTIAFLEKQVKDLEEDLSSLARSEYKKQMDLLTSVKGIGVTLAAALIIATGGFTYFDNAKQLTRHLGLSPTYQQSGTSVNFKGHINRNGDSSLRSQLYVAAFASLRCNTECKACYDRLRSNGKPGKVAVIAVANKLIRQAFAVVTHDKEYVDGFVSNRP

SEQ ID NO: 414423 - protein, 434 aa, unidentified
MNTAHPYDLVIGLDRSDKKADLCLINTHTGQRRSEIIHTTPEALWEWLLALRQQFPQARVGLCLEQPAVHLIPFLEPYAWITLHPINPLTLQKYREAFVTSRAKDDTKDADFLADLLLHHHAKLPVWAPEDSATRAVQQLVFHRRAVVDERTGLSNRLIALLKSYFPQALVFCGDDLWRPLATAFLLKWPSLQTAQKAKPATLKQFYYRQGSRSQKLVEERLALLAKAVPVTDDSAVIDSFVLRVLLVCRQLQQLHQTVAKFDRQLAAAYSVHPDRMIFASLPGAGPVLGSRLLASMGSQRERFADSASQLQCYTGIAPVTKKSGGSCYIHRRYLCPKFHRQSFHEYAKESVLWSRWAAAFYLQQRKKGNPHHTAVRALAFKWQRIIWRCWQDRQPYDELKYEAVLKQRGSELLKLFPSVDLGKSPWKNPAKIN

SEQ ID NO: 414424 - protein, 337 aa, unidentified
MEYFAGLDVSMEETHICILDREGSLIREGKASSTPKMIAAFLAAGPTCAKAVFETGRMAPMLYHGLAELGVPVVCIESRQAYQALKSLAGHKTDRNDARGLAHLARTGFYKPTHVKSLSAHAIRSLIAARKKLVGQRVTIDNQIRGLVVVFGVRLPRALSLAFKDAALKVSDGVPGLHAALRGLFAAREAILAAVTAIDSDIKAMTRKSKTCTRLMTVPGVGPITALAFAAAIDDPARFKRSRDVGPYLGLVPKRHQSGEVDYIGSISKRGDVRVRTLLYEAANVMLTRYAAPLKLKSWALAIGQRSTMRKARVALARRLAIILHAIMRDQTDFQAV

SEQ ID NO: 414425 - protein, 408 aa, unidentified
MSAATTGPLDRASSDLIGAWPLFGLVAVVSARPTSGDPTRLPARRIPGLDVITSVIVGVDTHKDLHVAVAVDGIGRRLGELAVPTTAAGYQQLLHWAEGLGTVEAFGVEGTGSYGAGLARYLRGRTGRVVEVNRPDRAARHRKGKSDPLDAEVAARSVLAGTATAVPKDGDDVVETIRILKLTRDSAVKAQTQATNQIKSVLVTAPTELRESLTGLGLVALLERCAALRPGQPITPVSAAKHALRLLARRALALRAEAKQLRGHLATLAAAAAPALVALIGVGPDTAAALLLAAGDNPDRLRSEASFAALCGTNPIPASSGKITRFRLNRGGDRQANAALHRAVITRMHWDETTKVYVARRTAEGKTKPEIMRCLKRYLARHVYRCLRPADSATQHTHESPKDLAAAA

SEQ ID NO: 414426 - protein, 350 aa, unidentified
MKIRKQAIGIDTSKDTFTACLSSKLENGTIRFSPVQVFKNTKSGFNRLLRWAKPMVDTNAPLVFLMESTGVYYEKLAHHLHGVGKTVHVVLPNKSTHYAKSLNVKTKTDAVDARVLARFGTERTHRVWQPPSPLLAELRNLTRYYVQLQEQKTAMNNMVQSKQAAHHVQSFIIGSNKQLVRQIDRQIERCKLQIEQLIASDQILSERVDQLASIKGVGRLTVAVILAETRMFEGIENVRQVVSYAGYDVVERQSGTSVKGKTRISKKGSRYIRNALYFPAMVACRFNPDIKEFYQRVIQNKPSKMVGQVAVQRKLLVLMYSLYKNGTLYQEGYNKVAPAEMAEATQDSTA

SEQ ID NO: 414427 - protein, 457 aa, unidentified
MPSSLSEARPMKQKKPSKKGSVKLPKHLQHLNQHAAGIDVGSRSHFVAVPEGADEKPVQEFSTFTDDLERLAKWLRSCGVTAVAMESTGIYWIPVFEILERHGFEVRLVNARHVKNVPGRKSDVLDCQWLQQLHTYGLLRGAFRPTDQICTLRAYVRQRATLVRSSASHIQRMQKALAQMNVQLHNVVTDITGVTGMGIIKAIIAGERNPKVLAGLRDKRCKNSVETIARSLHGNYRVEHLFSLQQAVELYEFYLQKIADCDQQIVAQLRSFDASGGIDPDSKPPSSIEEALQQMSGADLSCINGINTNTALKIIAEIGTDMNRWKTVKHFTSWLGLCPGSKISGGKILSSATKPVANRAAAALRMAALTLFNSKSALGAYLRRQRSRLGAPKAITATAHKLARLVYSMLKHGTAFVEAGQEQYEEHYRSRVVLNLKRRAQEMGFTLVAIQEETQTV

SEQ ID NO: 414428 - protein, 375 aa, unidentified
MKDKLRFLGLDVHAETIAVAVAEPEGEVRSLGTIPNRAESIRKMIKKLGPAEKLRACYEAGPTGYIVYWQLAELGIQCEVVAPTLVPIKAGDRVKTDRRDAEKLARCYRSGDLTAVWVPDEGSEALRDLVRAREAAKQDQMRARHRLSKFLLRSGQRPPTGVRSWTRPYLIWVAQLRFVQIAQEATRQDYLHEVEHMRERVARLEQAIMEAVKLASPALQQVINDLQALRGIADISAVTIAAELGQVSRFGSARQLMGYCGTVPSEDSSGKRVRRGGITKTGNAHLRRIVGEAAWSYRRPPCIWYGLRRRQESISEEVKEIAWKAQHRLHKRYMKLGAAGKPQGKIITAIARELLGFIWAIGIRAETIAGQQAAA

SEQ ID NO: 414429 - protein, 495 aa, unidentified
MNRKSNTPKNQEENVGRTGKRSPGSKTGKKNELKRLTKGEQRDLEIKAEEIGNSLTSFTWKELETGGKFDKNKKLDFIKDDTLIVGCDVGSETHFVRAIDTRGRELSQGILAFNNNSEGFEDALSWALLVAAQYGKTQIVLGLEPTGHYWFTLTAWMQLHGVSVVQVNPYAVKQTKELEDNSQDKNDRKDPKLIANLVKDGNYGLPYLPGDTYATLRVLSGLRDQRKEELIRSMNRLHRELTIVFPEYKVAFGKIDGPFTLSLLSQAPIPAELVALGEDGIRKIWHDRKLRGAGYRRAAEIIRQAKSSVGITEGVEARKTCIMYYVADIERLKSEIAEIEAELAAKCREIPNAENILAICGLGETITAGILAEIGDVDRFDDAKEIQKLSGLGLVACSSGKHKGQTKISHRGRKRLRYWLYQGAMSLAAHNEAFRQLHVYYTTRAENPLKKMQSLIVIACKLLRIIFTILKKGAQFDAERMLKDIVRPEAGKAVA

SEQ ID NO: 414430 - protein, 347 aa, unidentified
MSMRTHDSISVLGIDLGKNWFHLVGLNGAGTPVLRKRLSRARLTELAATLPPCIVAMESCPGSQYWGRVFANAGHTLRLIPAQFVKPFLKANKNDFNDALAIAEAAGRPDMHCVPLKSTEQLELQAIHRVRERLITERTALVNQMRAFLLENGIVVAVGRRVFAKHLPSLLEDAENGLSFTLRALLSRLRQRWLALDQEIDEITRLLTRHAEQSEPCQRLRTVPGVGPIVATALVAAVGNAQAFSRARHMAAWLGLVPRQTTTGGKPRLGPISKRGNRHLRKLLIQGAQALMIHLKRDRSALGEWLGRLQARTHRNVAVVALANKITRICCKVLHSGEPYRPYPAAA

SEQ ID NO: 414431 - protein, 397 aa, unidentified
MYIVGIDIAKRKHEAAVIDGEGTVIIKPFSFTNNCSGYNRLLAMLAKAKLPIDEVSFAMEATGHYWLALFTRLQKEGFRVQVINPVQTNSIRSFYIRQAKTDPRDALLIAEVIRFGHFSESTLHPENIYELRELCRGRHAIVSMQADVKRKVVALLDQVFPEYETAFTNLFGDTSMAILQTCPTPKELSEMPFEELCHLIEVSSHKRFRMAKARELQELARNSFGFAMAGDVFSTMIRLYAKHLDFLKQQVREMDRKIAEIMETLDTPITTITGIGPTLGAYILSEIGDISRFSSAAKLAAYAGIDPTMRQSGEYNGVRNRMSKRGSPYLRHAIWLAASSAVLHDPALKLYFQKKRDEGKPYMASVGHACRKMVSIIYAVMRDNKAYTPYIPNEISA

SEQ ID NO: 414432 - protein, 337 aa, unidentified
MKQIRRIGVDLAKNVFQVHGVDHHERVVLRRALSRAKLREFFAQLPPCLIGMEACGSAHHWARELERLGHRVRLMAPQFVSPYRKNDKNDGNDAEAICEAMGRPNMRFVPVKDAEQQAVLCVHRARSLLVAERTGLINQIRGLLGEYGIVVGQGASRLRRALPELLEAADNGLPALAREVFAERYSHLQGLDERIEAYDQRLRALAQQMAPARRLMQVPGVGPLTATAVVATVGDAQMFRNGRQFAAWLGLVPRQHSTGGKPRLGRITKRGDAYLRTLLVHGARSVLCRPGEDPRRRWAQALVQRRGFNKAAVALAAKQARLLWALLARPDDYRPAA

SEQ ID NO: 414433 - protein, 406 aa, unidentified
MLDVHKAQVTACVRVPDGDGGRRQEIREFRTTTAGLITLADWLRSWAVTVVGMESTGVYWRAIYYLLEDEFECQLFNARHLRHVPGRKSDVQDAEWGCQLIEHGLVRTSFVPPRPLRELRDLVRYRKAKIQERGREVQRVEKTLQDAGIKLSSVASEVLGKSARLMLDAMISGTHDPQLLAELAKGALRKKIPALREALEGRFTGHHALLVGQMLAQIDFLDETIATLSERVEELTGPFSREIELLDTIPGVDKRAAEMLLAEIGPDMSRFPTEHHLASWGGMCPGQRESGGKQHSAATRKGSKWLRGTLTECSKAIVRTKGTYLSARYHRIKSRRGHAKATVATGHKILTAAYHVLDKGVPYNELGEEFFYRRDTENTERYKRRLVHQLERLGHQVTLDPLPEAA

SEQ ID NO: 414434 - protein, 344 aa, unidentified
MEQYAGIDVSLELSSVCIVDAQGKIVKEAKVASEPEAVIGFFETLGFAVDRIGLEAGPLSQWLHAGLKRAGFDAVLLETRHVKAALSAMTVKTDRKDARGIAQLIRMGWFRPVHAKSIGAQEIRALLVARKQLLGRLIDVELSIRGILRGFGLKVGPVTRKIFEVRIRELVTGQAMLERIVAAMLSARAALKAEYAKLHKAVLAIVRDDAVCRRLMTVPGVGPLVAITYKSAIDDPHRIAKSKAAGALFGLTPKKYQSGEKDVTGGITLAGDEMVRTVLYEAANVLLSRITRFSKLKRWGMDVAKRRGSKRAKVALARKLAVILHRMWVDGTTYRWAEAEPIAA

SEQ ID NO: 414435 - protein, 321 aa, unidentified
MLKCSLGIDVSSKKLDVVLSVIDSQQLVKVVASKSAIANTMQGFKNLKEWINKHLKKYDIPLTICMEATGVYHENCALYLYQAGFSVSIILPNKAKKYLQALGLKSKNDGIDAKGLAQMGAEQSLKKWKPLGEFFYKLRSLTRQNQNIQELKTSIGNQIHAIEHGMFLEKSVLKQLKKTVALLDKQLATLEAILLKQLKSNETVFTKIENICKIKGLCVLTVATILAETNGFELFENAKQLVSYSGYDAIANQSGKHFGKTRISKKGNSHIRRCLFMPAFSVVKYKSGNFHNLYERTYQKHGIKMKSYVAVQKKLLTTIFA

SEQ ID NO: 414436 - protein, 410 aa, unidentified
MDAFCGIDWAEDHHDVALVDRDGGVLARLRISDDAAGLTRLLELLAEHGDSPEDPVPVAIETPRGLLVACLRAGRAVYPVNPMAVARYRDRHSVAGRKSDKGDAAVLANVLRTDMHAHRPLPADSELAQAIAVLARAQQDAVWDRVTAHNKLRSHLREYYPGFLAAFAGAKGGIMRPEARAILAAAPTPATAARLTLAQLRALLRKAGRSRGIDAEAARLREAFRQEQMRQPPLVEEAMGRQALALLRQLDAACQNASDLEAAAIGSFNQHPDAGIITSFPGIGALTGARVLAEIGDDRSRFADGKGLKAYAGAAPITRASGKTRSVTRRHVKNNRLAAAGYIWAFSALTASPGARAHYDRRRDAGDRHAAAERNLFGRLLGCLHHCLATGQHYDEATAFPSHPAIPAAA

SEQ ID NO: 414437 - protein, 372 aa, unidentified
MKEDSVIFVGLDTSKLKISVAVADGVRNGEVRFFGDISSEPVSVASMVKKLSKGGAQLRFCYEAGPTGYGLYRQLIELGHDCMVVAPSLVPKRAGDRVKTNRRDAISLARLHRAGELTSVWVPDESHEAIRDLVRAREAANSALKQARQQLQSFLLRHGRIYTGRTPWTRAHTRWLAHQTFDHPAHHILLAEYCQAIEDAGVRLDRLSKLVVETAASWSMAPVVAAYQAMRGVAFMTAVTFVAEIGDVRRFDNPRQLMAYLGLVPSESSTGERVKRGGITKAGNIRARRVLIEGAWTYRFPARVSPQIQARLEGLPRTVREIAWKGQVRLCARYRRLIAAGKPKVIAVTAIAREMAAFLWAIGQEVAPIAKG

SEQ ID NO: 414438 - protein, 345 aa, unidentified
MDHVIRIGMDTSKSVFQLHGVNAAEEPILRRKLRRKDMVVFFKNLAPTVIAIEACGASHHWSRLLHSFGHRVKLIAPQLVKPYVKRGKNDAADAEALCEAMSRPTMRFVPTKSAEQQAALMLVSVRDRLIRNRTQLANSIRGHAAEFGLTAATGKAHVVPLLDRLQADTSLPAMALELFAILAAEYAQLEVQIDEIDAKLTAWHRADECSQRLDKIPGVGQVGASMLKMKTPAPELFRSGRHFAAWIGLTSRDHSTAGKVRTGGITRAGDEGLRSALVLGATAVIQHARRTGKGSPWLLELIKRKPPKVAAVALANKIARIAWKMMLTGEAYNANPAAAVSAAAA

SEQ ID NO: 414439 - protein, 291 aa, unidentified
MVYVGIDVSKDRLDVHVHPSGEAYAVVRDGKGLADLVERMKTLGPERVAVEATGGFETVVAAALAGAGLPLVVVNPAQVRHFAQALGRRAKTDPLDAAMIARFVEATLPELRPLADEATQLLADLVARRRQIIEMIVAERNRERRVSVKRIAKSISRLIAALEKELSEIDSEIDTGVRGSPAWREKEDLLASVPGVGSVTARTLLAELPELGQLDNKKIAALAGLAPFTRQSGQWKGRSMIAGGRKGVRSALFMAALAACRFNPTLKTFRQRLIDAGKPKMVAAMPPPASC

SEQ ID NO: 414440 - protein, 465 aa, unidentified
MGKTLGIDLACRAAHQASLAGSDGSVEWSGRKFFTRPADLERLWADLDLTDPAELTVVMEPTRNAWVPVAAWFRRRGAKVTMVPTSQSADLRAYYSKHTKNDRLDSKILARLPLLHPEGLREHTGHGPSVPLHRVVRQRASVVKRRTAIYQRLDAQLELLGPAWYEALSSDYGKTALAVLARYADPNSLIRLGKNRLTRFLIRHSRGAWRENQADLLLKAARESLALWGTDSIDFAELAADIAVEAEQAQVLTEQIEDLDERIANLYEETDPDGIIASAPGVGPVVSGVIAGRIGDPHRFHSLAAVRAYSGLVPKVNQSGLAEHHNGITKAGDTVLREAIWSAADQARRTDPQLAAKYKRLMDTERHHDSAICHVATTLLTRIIACWRSGEHYVLRDTDGRVITEKEGRQIVRNKHKVDARTRQHLADQRRSQRLKGRTGREHKESPSAPASRPATNSLKATPVA

SEQ ID NO: 414441 - protein, 357 aa, unidentified
MDGFKQLLQTIRDCTKKSDKIKVGLEATGHYSYNILGFLLDNDLAVYVMNPLHTNLYRKSLSLRKTKTDRVDARTIATMLLSDVDLKSYTDTAYHNEELKSLTRYRFDKVRERAKLKQSVSRLVTILFPELEKLVPSLHIASVYALLSEYPGAKQVSEVHLTKLTNLLTTASKGRYGKDKAIQIRDAAKTSIGSVMPAKSLELKHTIKLIKELTSEIDEIEDSIQQIMDELHPPILSIPGVGIQSAAMILAEIGDFSNFESPDKILAYAGCSPSTYQSGKLTNCYAHMEKRGSRYLRYALYNATKYVCHWNPVFAKYLAKKRAEGKHYNVALSHATKKLVRLIYALQKSGKAYLTAA

SEQ ID NO: 414442 - protein, 358 aa, unidentified
MKYVGIDVHKKMCQVAVLDEEGKLLDEIRFANDPEGIEEFAGKLTTFHDEVKAVVESTGNLWIPIHDRLEEHGFDVALSNPAKTRLIAEAKIKTDKVDARTLAALLRADMLPTCYVPGEELRSRRELLRHRLNLVKNRTEVKNRIHGLLDKHGLRMPGTTAFSKDNVAWLRELSLGFMDDAILRSDLAVLEAVDAQVTLIEEKIAALAAEDRRVRLLMTMTGVGYFTAMLVVSEVGDVGRFRGDKEFASWMGLVPSVHQSGERTRIGGVSGPGNKGLRWALVESAQTAVRYDPRLGGMYERVSRRRGAGCAVVAVAHEMARIMYFMLVREEPYWGENRGLTERKLKNMGKRALDGLRN

SEQ ID NO: 414443 - protein, 381 aa, unidentified
MDTKTVQSTLQSPISQQLYLAFELSQKQWKLGFTVGMGQRPRIRTIQARDLQALQWEVQEARHRFRLPDTVTTLSCYEAGRDGFWLHRYLHAQGIANLVVDSASIEVSRRSKRAKTDMLDVDKLLEMLIRYHGGERKLWRVVHVPSLEVEDRRHLHRELTTLKAERTRHINRIKGLLVGQGVCMPVIEDLLEKLETVRLWDGTGLPVGIHTRLEREYQRIQLVNQQIQQLEVQREEQLRTSDHPSVVQVRQLLRLKAIGVNSAWLFVMEFFSWRDFHNRREVGALAGLTATPYRSGGASREQGISKAGNRHIRAMIVEIAWIWLRYQPNSQLSRWYQQRFGQGSNRLRRIGIVAMARRLLIDLWRYLETGTVPEGAVLKSS

SEQ ID NO: 414444 - protein, 371 aa, unidentified
MNSIVYVGMDVHKEQYTLCCYSYDRDKVEYKQTVPSDYKLVLKYMEQVRTRYEGEVTFVCGYEAGCLGYSLYHQLRDHAVDCKILAPSTMAVTNTHHVKTDKRDAANIARCLAFHTYSEVYVPDNDDNDVKEYIRMRDDQKLYLKKVKQQILAFVLRQGKRFEGGKTYWTIAHLKWLKNLELSTLQRETLDEYLLTYEYLTEKINRFDERIEELASAERYEEKVKHMSCLLGVKTHTALSMIVEVGDFERFEKAPKFAAFLGLVPSEDSSDTRVNRYSITKAGNSHLRRLLVEAAQSYTRGTIGHKSVALKQRQKGNPPEIIAYADKANERLRRRFYKMTLNKGVNRNVATTAIARELACFIWGMMTEHVS

SEQ ID NO: 414445 - protein, 353 aa, unidentified
MTSTKYIGMDVHKESISIAVRNDAGKVVMECVIETKANVILDFLHGLRGELQVTFEEGTWATWLYDLMKPHVEKLVVCNPRKNNRQGDKNDRIDARELSDLLYMNKLSSVYHGGAGVRTLRELARSYLTISKDLARVMSRVKAIYRSWGIPCSGKQVYGLRHRAEWLAKITEVGVLRRAEFYYQQLDALRPLRHQVRRELLAESKKHKATKLLCQIPSIGPIRAAMLIALIQTPHRFRTKRPLWKYSGFAIEMHSSADYRSVKGELQRSKKQVSVRGLNRDCNHDLKNLFKIAATIASVKPGPFQEFYAALLAKGMRPEMARLTLARKIATIVLIVWKRGVRFDAKYLKSQTA

SEQ ID NO: 414446 - protein, 347 aa, unidentified
MNYIGVDCHISTLDFAVVTKTGKVKSKARVKTSVKEFMEFIKTVPKPRKIFIEEGTLANWLLETSMRYGEKLIITDPKTNKWIGKSMNKDDAIDAEKLAHLARGGFVKAIYHPVNKKRRFKELVFAYHDTVKSLTRIKNKLKARFRAEGIRCNGVTVFSEHSRNEWRSKLPPNAIARLIADELWKQLDQLHEAKKTLRKNIGTESKQYPVIKRFMKVPGIGLIHASTIFAIIDTPYRFSNKKKLWMYAGIGLAERSSGGTVYSIKLTREFNRQLKDAVKKAVEAAIGAKDNQFKRQFVRLTLEQGLPAHKAKLTVARSILSILYGMWKNGEAYDPDIAKKRVEGNKT

SEQ ID NO: 414447 - protein, 313 aa, unidentified
MKKTICGVDVSKAKLDACIEPGHRLASFNNDTAGIAELAAFCREHAVTLVVMEASGGYERRAFIELWEQGISCALTNPRNVRRYAEAMGILEKTDRIDSSIIARFADAKNLAPTPLPSQAQQRLKALVARLRQVTGDLTVQKQRRASLLDNSEMLASLDEVIALLKRQSRSLEGEIASMIDDDPLWAKLAETWREMKGVAGRTVARLHAELPEIGTLSNKAIAKLAGLAPIANDSGKRKGKRPTRGGRAGVRSILFLVAAIAARYDKSLGEFRDRLLKAGKEKMVVRIALARKLLVRLNAKARDARTEYANAT

SEQ ID NO: 414448 - protein, 349 aa, unidentified
MSDTKPGFARFVGVDIAYLDFTAATLLADAKPKLEAKPFSQTREGFTQFIERLLETGIAASSQLVVMEATGSYWIAPAIALHEAGFIVSVVNPAQAHYFAKAQLKRAKTDALDAQTLAQLAQALELPHWTPPPQSYHELRQRLTQRDNLVKLRNQVENQLHALSVNPVIIASVQAQLQELSTTLSSQLKAMDKEIKEVLEADTSWNKSIALLQTIPGLGILTACWLVVATLNFTVCDSPEALVRYVGLAPIERSSGSSIRGHPQIGHSGHSRLRTLLYLGTLTSVRFNPAIKAFWQRLRIEKNKPMKVARCACARKMVHIAFAVVKSGKAFEADYQPKPKAKEVQAVAV

SEQ ID NO: 414449 - protein, 309 aa, unidentified
MKEELVYVGVDIAKAYLDAAIGNEKRRFANDTLGHRQLINWIKQMPASVQVICEPSGGYERALVRALVAAQLKISLVPANRVRQFARAAGILAKTDRMDAKVLCAFGEAMQPGTISASQLEQEHLRELESQRRHLTHLLVMEQNRAVRMSDLWVCKLNRRLITQIKKQIEQVDLLIQRQIKASRELSSKAEKLTAISGVGARTAALLLAQMPELGQLNRREVAALVGVAPFNRDSGRMRGKRAIYGGRRSVRHGLYMAALVAARHNPILRAFYLRLRAAGKPAKVALTATMRKLLIVLNSSLKPDLTYA

SEQ ID NO: 414450 - protein, 346 aa, unidentified
MQSTTIAVDLAKSVFEVAVSREAGKVAKRHRLSRSQFDRFLAMQPPATVVMEACGTGHFWARQARQHGHRVVLLPPHAVRPYVLRSKTDAADAKGLLEALRNDAIHAVPVKSVEQQTLASLHRMRSAWMATRTARLNTLRGLLRELGIVIPTGARQVVPHVEAALSDADSAVPHLLRPTLFAATQEVRELELKIRAVEAQLEKLVRASPLLVRLRTIPGVGLLTATALVAFVGDVGRFRSGRKLASYLGLTPRESSSGTRRHLGRISKRGDAYLRMLLIHGARSVLLHAKKDEHPDRLRAWALDRERARGHNKAAVALANKLARIVWAVWRHDQSYTASHPPLPQP

SEQ ID NO: 414451 - protein, 424 aa, unidentified
MNLTQNDRLKQVTADTLIVGVDIGSKTHFCRAFDWRGFELSRKVFRFSNTGVGFLTFLRWTEEVMNKTGMKKVIVGCEPTGCYWLTFQKFLQDHGVQLVTVNPFTVNRSKELDDNSPEKSDLKDPKTIALLVKDGRYSTSYLPSGVYAEIREASVCRDQIMKQHIRLSNQIQGWLQKFFPEYLECYAEWDSTSGLLLLKEAPSPQDILRIGTGGINQIWRNAKVRAAGIKRAQTLVEAAQNSVGLETGEAARLEIWVLVNDYILKAEQLKRLDEYLEEKVKEVPNVEKLLAIKGVGMSTVIGFIAEVGDIGRFTDPKQIQKLAGLEIVKKSSGKKKGQPRISKRGRRKLRRTMYESARALMNWNPAFQDVFLYYRNRKKNPLGGMQAKIAVACKAIRIFYVVLQTGCDFDEEKFRKDIIRLETA

SEQ ID NO: 414452 - protein, 346 aa, unidentified
MSYSTTVGVDLAKNVIQVSVVSGRGKELLNRSFTRRKFAEFLGKQKQSLIAFESCASAHYWARAAKRHGHKARIIPAKAVAPFRLGHKTDSNDALAVAEAACRPNIKEAPMKTVEQQGLQAIQRARELLNQECTALSNHLRGLLMEFGVVIPQGFASLLRALPEVLEDGDNEIPDLYQPTLHRMHARLLDLREDIEAMTKEVEILVREHPVCSRLTALEGIGPIGALLLYAVMGSGKVFRNGREFAAYLGLVPRQYSSGGKTNIVGLSKKVGNRKLRAVLILGARAYTYRLKEPKSSKDRWLMDLIDRAGHSRAAIALANKNVRTAWALVTQGTEYQRRAQLEVAA

SEQ ID NO: 414453 - protein, 346 aa, unidentified
MTISVVGVDLSKSVFQLSVADAKHHVIDRKRLSRVQFHRFLAQSTPARLVMEGCGTSNYWGRTAQLHGHEVKLLHAKYVKAYVRRTKTDAADADALVLADRDTSLHPIPIKSEELQALQGLHRIREQWKRARVARICEARALLAEFGISVSVGVRGIGKKLTLATEQAPVLIQPTLMDLIQEIDDLDQRLRRVEHALAAYAKTNPEVQVLLSIQGIGVIVATAFVARVPSIHMFKRGRSFSSWLGLTCREYSSGQTRRLSRITKQGDRYLRTMLIHGARAALMAARRKAANGKSLTRLETWAVNTQVRVGHNKATVALANKMARIMWAVWTRHETFNGDDALRFAA

SEQ ID NO: 414454 - protein, 387 aa, unidentified
MPQPNDQSRSLAALDQDSTLIAVIEMSQATWLVAGIVPGINRQPLKKLAADEAALLQLLDRWRDEATKAGRTIDRIVVAYEAGRDGFWLARWLRARGIEAHVIHPTSVAVSREHRRAKTDRLDTELLKRAFLGWLRGESRHCSMAKIPTPEEEDAKRPNRERENLVGERTRIVNRMKSTLARLGLRGFKPTLRQAAERLDRLRTAEGVPLPPNTLAELRRDMARLRFVMDQIREIEAARLVRLEQHPEQASHAMVRLLARVIGIGIETADMLVHEILSRNLRDRKAVARYAGLTGSPDESGARRREKGLARAGNARVRRGMIQLAWRFLMFQKNSALAQWYRRQTTDSRGTTRKTMIVALARKLLVALWRLVTTGEVPEGVVLRRVA

SEQ ID NO: 414455 - protein, 352 aa, unidentified
MQEYIALDVHKHYTFAGREEVGTRRAAYDRLEHTKGIIKRYLAEVEPGTTVALEATGNWYWVVDEIEASGMKPALVHPYKAKVMLGCINKTDKLDVTGMNRLQRTGTLPTVWIPPIETRDLRELPRTRMFLTQLRAKLKNRIQATLTKYALNVTGYSDAFGQQARRVMEKRMEELPPQAKKATQQLLELLDPLEEQIQDQEKRIQELVKVTPEMDLLITMPCIGKILAIVIASEVGDIRRFPKAENYTSYAGTAPRIKASGDKYRIGRLRADVNHYLKWAYIEAANCVCMHQKDYPDRHVTQLYKRIARRKGHPKAIGAVARHLAESTFYVLTRNQPYRDPALSKRVVTTGT

SEQ ID NO: 414456 - protein, 407 aa, unidentified
MIKKGGIEVNSPCVAVDVSKGKSYYEGFYDFKNPTTKATPFMHDLEGLKSMYEAGQKIKGTYGEVVYVFESTGIYHKIIETFLMNQGEKCIILNPLEASRVRKTAIRATKTDARDCMSIAKAYYTNDYRLHNQKDELYEKLQSMNGYYNFLVQQLREMKVCFRNALDIVYPRFDEVYPDPYLDIPKAILSRYPHPDELKSKRAETIVKYIMKDTKHRESKATEEAKKLKSYIDNVSSGCRNSAHEVSILKTLVTQINDQETGIDLCLDDMRDIVSEIPLYHQLMTIPGIGDNLSIRLIGELGDLDRFERSEQLVAYAGIDPRVHQSGQMTGEHLHITKRGNKHLRTLLFLAVSSNIRIGKQNPILEFYNKKRQQTNPLVYKAALIACANKLLRIIFGMYKSGRNFHQ

SEQ ID NO: 414457 - protein, 427 aa, unidentified
MNESESNRVDEFRQFKSQIRGSREYLIVGLDIAKRKHHAFFGNGNGQTILKGLIVENSAEGFRHLLSQVRFYMQRDGFSRVVFGLEPTSVYHKPLAEHLISQGHLVVYATNEAIKKNRSLIDGRWDKHDTKDSANVADLVAQGKCHYYDLPDQRLRDLRSLLLLRKRLKKQVHSCRVRIRNNLVAQYFPELDLFWNNAEAENLAIVRGYLDPARIRQLTCEQFIARVSTHNGGLRQRRRLRHIWEAAGNSIGCRPGASMQLEAELLVTSLKSIQEQLDQVEQAVQELAEGFPEYGYLKSIPGFGPYVSAVTLAAIGNPHRFENRAQLIRLAGFDLCASRSGEKSNTAVPVISKKGKADLRYALYQAALVASSLTTHFRSHYNRLLEGRQREKGIRTKMLVKIAAKMLVIAWTLMKRKEPFNPAHIQA

SEQ ID NO: 414458 - protein, 444 aa, unidentified
MKNNTEKQNKSANTKVGTEELRDQNSKIAFITDDMMVIGVDVGSENHYARAFTNRKIELSSKPFKFTNTKDGFEAFKAWAADLAKRNGMKFIIVALEPTGHYWMNLGTYIKDSGMILAQVNPAAVKKSKELDDNDPSKNDRKDPKVIAGLANDGRYCLPYIPEGVYAEIRELSNQRIRAVEELTRTKNRVARWFSIYFPEYLDVYGNVYNVTGTMILKKYPLPQDIVAAGIDGILKVWSDNKVRGTGRRRAEKLYEAAKNSIGRKEASKSARMELMDLLNDLETYESRVDRIMEEVTDLLWQIPNTRELLNISGVGTISVLTFVAEVGDISRIKDAKALQKLAGLAIVADSSGKHNGESGISYRGRKRLRWCVYQLAISLISRNRDFAAIHAYYTTRKENPLKKMQSLIAVGCKAMRVFYKILTTGTPYDGHKMTSDIIRPAAA

SEQ ID NO: 414459 - protein, 420 aa, unidentified
MTTSDSTPAAAVLVAIDIAKVRNEVLIEAPGHKRRRRLLVLNTRVEHDHLIEVLQAYGRPVVCAFEATGNYHRPIAWRLAEAGFEVRLVSSLALARTREALHNSWDKNDPKDAQVMLHMLRIQATQVYHDPLRAGINDVQELSKTHEAIARAKTEIQHRILTHYLPLYFPEIDRFRGNSRSDWFFAFLHAFPTPASITGLTKEEFVTAAWDVVGRKVSKTQILMDIYETARSSIGLPLPLDAPAIRMFRMVIDEARSLIRQRNEIEAQADELLRHSQDYQLLRQIPGIGPINALTIIAEAGDLRRFGHHRQFLKFCGLDLSTQQSGQYRGQTRLSKFGNARLRRTLWIAGQVAIRQRENGFRHKFERYIARDRDNPDLRRKAMTAITAKMARVVHAVVKGGSDYRPFVEGRVPGGRTSVS

SEQ ID NO: 414460 - protein, 343 aa, unidentified
MEHFAGLDVSVKETSVCVVDDTGKIIREVKVASEPGTLLAVLKNPAYHLKRIGLEAGPLSQWLFSALAEAGLPAICVETRHMRAALKAQINKTDRNDARGIAQMMRAGLYRPVHVKTVRSQKLRMLLTHRTLLQSKAIAIENDLRATLRNFGLKVGMVGTVKFEARIKELVENLPDLTVLVEPLLIVRRVLREQIGILHRRLMAIVRDDDVCRRLMTVPGVGPVVALTYRATVDVPTRFRNSKAVGAVFGLTPSSYQSGEINLTGAISRCGDEMMRAVLYEAAQVMLTRTIKWSWLKAWAMQIARRRGMKKAIVALARRLAVIMHRIWVDGSEFRWTREAAAA

SEQ ID NO: 414461 - protein, 342 aa, unidentified
MTVYIGCDFHPYQQTVAFCDSDEGLIQIKTLRHSGDSVRSFYKQFHGEVIIGLEATSSFGWFENLLFELQIKLLVGHPTEIRRRARSRHKSDKRDAQLLLDLLLKQEFPQIHRPSKESQTILEQLRFRHSLVKQRTCVSNHLQALARLAGLPKAQMQTAKAKAALKQAELSPTQAQQRDAWLALLQDLDQRISKIDDWCAEVVQKDEKAKLLMTHPGVGPLTALCVVHTLGEFQRFSSTRKVCAFVGLDPLEDSSAQTRKIGSISKRGSKLLRFLLVQAAQISIRWDSRLKSFYSQVSRRRGKAIAKVAVARKLLVNLFIQMRDEIDYQEFTRRGVEGSLPE

SEQ ID NO: 414462 - protein, 342 aa, unidentified
MSEKRYMGVDLHRKVFTCCMRLENGRQFLSEWRLEQLPQFVKKLRATDEVAVEVTSNTRLFYEAVAPQVARVVVVDPHQFRVISQSVKKTDPNDARNLALYLAKGLLPEVRMKEKQQAQVASLTQTRDRLVKLRTALKNKVNNLLSARGIELEKEELSGEKGLTRVLAMEVEELTRFELQVLVEQIRSLNHSIAELEKVIDREGKKLKGHGNLTSIKGIGSLGASILLSVIGDIRDFSGEGRLASYFGIVPRVHNSNETEHSGHITKRGSKLGRTALVQCALIAKRYSPYLANYYERIRSRRGTGRAIIALARKLLGIIYRTLKNNWVFEDFPNFVLREATA

SEQ ID NO: 414463 - protein, 351 aa, unidentified
MPRTSNVHAVTTIGMDMGKNTLHMIGLDSRGAIVLREKVSRGRITSRLANLPPCLIGIEAGLATHYVARELAALGHDVKQVPPTYAKPFRQGHKNDFRDAHSVAEAVQRPTTRFVPAKTDEQLDLQALHRVRSRLVSERTAVINQIRGFLLERGIIVRQGLRFLRQALPDILAKRTDVLSPRMVRIVADLASDWRQLDERIEPVTDEIETLAKSDDGCRRVMTVPGIGPIISSAMVAAIGNGAAFARGRDFSAWIGLVPKQMSTGDRTILGRITKRGNGYLRTLFVQAARVILLRPASWPKHSFGVWLARAAQRLHRNVLAAALANRLARIAWTVLAQERSYEARIMKAAA

SEQ ID NO: 414464 - protein, 318 aa, unidentified
MKPKTNQNINVGVDTGKFQLDIYIRPLDIFFTVKNDEAGIKYAVKTIKKHKPERIVIEATGRLEMAFIIACAKAGLPFTIANPIHVKRFAGAIGQRAKTDKLDAQLIAHYSEAIKPALSKLKPDTMQDMSDLVSRRNQLLGMQTMEKNRLQNLPKSLAMTIKPVLTIFKTQIKKIEDKIVKLIESNPEYQAKNMILQSMTGIGKIAAASLISNLPELGHINSKQASALIGVAPMNRESGRFKGKRKIQGGRPQVRTVLYMAMMSAMQSNPVFKGTYQRLCAAGKPKKVAIIACIRKMIVILNSMLRDGVMWDATTVKN

SEQ ID NO: 414465 - protein, 418 aa, unidentified
MKSMEITAVGIDVSKSKSTVAIRRPGGVIVARPFDISHSNHDLEKLVSILKTTGGDIRVVMEHTSNYWKPIALTLKEAGFYVSVVNAMLIHDFSDNSIRKLKTDRADSLKIANYALTFWNELPPFNDEDETRLVLREQSRMYERLASTATSLRNGLIALADQTFPSIDQAFGHAIKNADGHEKWVDFFSIYWHRDCVLRLSIEKFTESYRKWCLRRNYKFRTNTAHKLYALAQDAVPTLPKNNGTKALVLQACKSLHAVCEAKQSTQEEMNRLASLLPEYEVVMQMEGTGPITGPALMAEIGDVRRFKNKKALVAFAGIDAPPFQSGNFESKSRHVSKRGSPHLRRAVFLVANIILTLSNKDNSVFCFMDKKRAEGKHYYVYTIAGSAKFLRIYYARVTEYLRTQEIPVAASCLNGNS

SEQ ID NO: 414466 - protein, 523 aa, unidentified
MPVTRSRKRSSSRRLEVLQKPRGVIHPRVQKVGPEHFGIVSVDCAKARSKWMLCDFYGNVLLPFTTVEHNRVALAAAITQLRQAIAQHDLHDVIVAIERTGRYHHATQRAFAAAGFEVRIVHPFATKQFRQASDPGIKTDDTDLVAIQRAAVNGFALTELPRDDNWKELQLLIRYRRDLVFKTSALCAQIREHLEAALPGYATCFYNLWIRACAFPLVRAFGSAEAMLQAGLPGLTKVLRQQELRFQERTLKRVLAWAEQAAPSDQAAAVHRRLALSLEEDRQRKSLEIQGLEREIASRLVRTPYVLLLSFPGINVVSAADFAGEMGPIGNYANSRCITGRAGLRPSRYQSDQVDRPNGPLVRCANRKLRAAILGIADNLVCCNHHFNVLALRWKAAGKDPRHTRVKVGLRFCRIAFQMVAGGQVFRHPCLQHRSYILDKLNAFHREHETPLPQALADLQAAIEHLPRSAYAEEAKPLAEELQRIEEGRRRGPQLLGDILPIVLARLGVTALQSKESGEHDLT

SEQ ID NO: 414467 - protein, 394 aa, unidentified
MIYAGVDIAKMDHVIGAVDERGAEMCRPMPFKNTEAGLERAVAWLEGLAESPSGVVVGMEATGHYWMACYSFLVARGYSVAVINPMQVKAVRRLKGLDKVKNDRVDAGLIAEALRIGQYDETRLATDEVASLRSLSRYLQSLRGMVAELKTQCICLMDAHFPEYAGIFSDMFGAGSRAVLSKSPLPFELARRRSDSLARDIAEASRRGGRSAGYAAEIKAAAKSSIGVRLGQEAASFQVKSLIRQIEFAESECAKVEARVRALLDEVEPLVLTIPGVSYVTGAQIVSEIGDVSRFRNAPALVSYAGLNSSVSQSGQFDSGGGPITKHGSPYLRRALWLAANRARQCDPGLRAFYEKKRAEGKPHRVAVTAVARKLCHIVFAVMRDQAPYDPDRE

SEQ ID NO: 414468 - protein, 405 aa, unidentified
MNAVGIDVSKGKSTVTIRQPGDVILMPPRDIPHTQSDINSLIDYIRGLDGETKVCMEHTGRYYEPIATWLSDAGIFVSAVNPMLIKDFGDDSLRSPKTDKADSKKIARYALDRWAKLKQYGSMDKTRNQLKTMNRQFGFYMAHKTAMKNNLIALLDQTFPGANNFFNSPARSDGSQKWVDFVHTYWHVDCVRSRSLDAFTEHYQNWCRRKGYNFSAFKAEDIYRLSSDIIAVFPKDDSTKLLIRQAVAMLNTASETVESLRVKMDETASTLPEYPVVMAMNGVGPTLGPQLMAEIGDVTRFTHRGALTAFAGVDPGKDESGQHVRKSVPTTKKGSPYLRKTLFQIMDGLIKRSPVDDPVYAFMDKKRAQGKPYYVYMTAGANKFLRIYYGRVREYLSALAKAENI

SEQ ID NO: 414469 - protein, 355 aa, unidentified
MDSKKYMGMDVHKEAISIAVLNASGKLVMESIIATKAITIVEFMQGLRGELHVTFEEGTWSAWLYDLLKPHVQKTVVCDPRRNALLKDGSKSDRIDARKLAQLLDTNMLRPVYHGESGVRTLKELARSYLTISKDQVRVMTRLKALYRSWAIPCSGKQVYAVRHRAEWLDKIREVGVRRRAEFYYQQLDALRCLRREVRRDLLTESAKHRASKRLRQIPSIGPIRAALLIAILQTPHRFRTKRQLWTYSGFGIETHDSGEHRYVDGELRRSKKKVSVRGLNRNYNHDLKNLFKSAATNAAAKPGPLQEFYTALLVKGIRPDMARLTLARKIAAITLTIWKKGKSFDAQHLKHRTA

SEQ ID NO: 414470 - protein, 420 aa, unidentified
MKTQDLLCPYTVTIGIDWADSKHDVFERYLDGSIYQHQIASAPEAVREWLWAVRSRAKGGRVAIGVEMSRGPLFHSLSQHPDWIDIFPINPQTLARYRQAFYPSRAKDDPVDSQLLEELIRSHPDRLRIYRPGPEMERKLDLLCQQRRKVIGMAVKLENQLRAALKEYFPLAIDLCASNGLRNKLALDFLQRWPTYALLKKARSQTLRSFYYAHNARNQALIEARLAKFSSSVPLTEDAAVIEPLSLVAQMLVRAIRAIERTVEQLQDKIATLFAQHPDHLLFENLPGAGKNLAPRLLCAFGSDRSYWPDATAIQKYSGIAPVIERSGKSSWVHRRLFRPKFLCQTFHEFAGQSIHHSKWAALFYERQRSKGKSHTCAIRALAFKWIRIIFRCWESRKPYDETLYLGSIENQYKKPLKII

SEQ ID NO: 414471 - protein, 464 aa, unidentified
MVYWGLEPASESGPDVAPYPVLSPPATRGARGAECLLQRRPRDPPPEELAMDTVFAKVAGLDVHQKFITVGVRCRLDTGTLFAEVRTFGTMTRDLRALADYLEALGVTHVALESTGVLWKPVWNILEGRFTLLLVNPRHIKQVPGRKSDVKDAEWIAQLLQCGLLRGSFVPPRPLRELRDLTRSRAQLVSEQTRLANRIHKILEDANIKLGAVASDILGKSGRAMLRALIRGEHDPAKMAELAEGRLRGKIPELKLALEGHFTEHHRFLVEHLLRHLDELERHVEEISGRIAEVFRPLLSDARVQRLDAIPGVNRRTIEDVVAEIGVDMSVYPDEHHLSSWAGICPGNEESAGKRLRGRTTRKNRWLRRALTQAAWAAGRTKESYLGAQYRRLAARRGRKRALVAVGHTLLVIFYHLLKSEEEYQDLGAEHFDRMDPERLRRYLVKRLEQLGYQVDLRTKDEAA

SEQ ID NO: 414472 - protein, 391 aa, unidentified
MSTYFVGIDISKYKHDCCIINAADQSIVAKFTIQNDKDGFNELLTSLQSLSTPDDIKIGFESTAHYALNLELFLEKAHHSFMEVNPVLISEYKKSTSLRRTKTDSIDCESIARWLMTVEYKPHSKGFYHAYSLKSLTRLRDRLIRQRSFYLVKITNVLDHTFPEFKPFFQERFSKTALYLLENYGSAEKMAHMNSASYDNLRRISRGKFTPQKFLELKALATNTVGVNNSIFDTELTCLLTLYKEAAKQISVLETQITGLIEEVHPHYMSIPGIGPLSAAVIYAEYGDISNFSSPAQMLAFAGLEPGISESGTESHKGRMIKRGSSQLRYTLMNCALPLIRFDMTFATYYAKKRSEGKPHRIAISHVTKKLVRVIFALERQNTDFVATALR

SEQ ID NO: 414473 - protein, 425 aa, unidentified
MNYKQNEKINQVKESTLVVGIDIGSTTQYARAFDWRGIELGKVFPFSNSREGFESFKAWMQHLQDKYKKLDAIVGIEPTGHYWFDLGAYLEDEGILLVMVNPYAVKQTKELDDNSQSKNDRKDPKVIAKLVTEGRYSAPYTPDGVYADLRIMVANRKRLIREMTQIKNRFARWFAIYFPEYTDVFGDYEAQSSMLLLKKVCTPEAIVELGAEKINQIWRDAKLRAVGMKRATTLCETAKRSIGLKKGSSAARYEMKLLLEDYEYKKAQLDAVMEEIEKLCRKIPESEQMLAIKGIGVITVAGFLAEVGDVRRFESPRQIQKLAGLSLRENSSGKHKGQTTTSKRGRSKLRAVLFNAAIPLIAKNPEFKSLHEYYTTRANNPLKKKQSVIAISCKLIRVFYAILANGVTYDAQKMLSDIHRQPQVA

SEQ ID NO: 414474 - protein, 416 aa, unidentified
MKLFVGLDVSSDKLDACFLTDTLTILHQGSYANDIEGATQIKETIVNMFEQFAFDKVVIGMESTSMYSAHPLIFFHEDEDLKNMHCVVTIEDPFKIHNYAKVFNADKTDTNDAFFIADFLRSERYSHSPLKEEQFISLQRLTRSRMQLVNMLVETKQHFIENLYYKCNTLSRELRDEESLSTTVFSTSIIELITSDMGLDEIAQLPLNKLAETLQTLGRGRFKHPEKLAKTIQKAIRSSYRLSPTFETSIDIVLATLVGQMRSLEASIKQLEKGIERIVKAMPEYQCLTSIPGVGLVYAAGIIAEVGQIERFENQAKLAKYAGLHWKKSESGNYKSENTPLTKRGNRYLRYYLIEAANSVRRHLPEYNEFYRKKYQETPKHQHKRAIVLTARKFVRLVDTLLRNHQLYTSPRSVES

SEQ ID NO: 414475 - protein, 326 aa, unidentified
MLNEAGNRVWRGRCATDPTAIAAAVRRYAPMAARIGLETGPLTTWLWTALTAEGLPMVCLDARHAKKALDMKVNKTDANDAEGLAHLVRAGWYREVRVKGRSAMLAKALLGARSQLLNMSLALENQIRGILKTFGRIVPKGAGGLFDKNVRALITDDGEIAAVIMPLLQARQMARSKCAALDRRLIGSVQSDGTCRMLMTMPGIGPLTAVAYVAALEKPDNFKQSRAVGAWLGLTPRRFQSGEVDYEGHISRRGDCQLRALLYEAASVLLTRVRRDSVLRRWGLMLWKRLGFKRAATALARRMAVVLHAMWKSGTAFNPTLGAATP

SEQ ID NO: 414476 - protein, 352 aa, unidentified
MDKGSKLDFTGQHIYIGMDIHKKSWSVSIHTEHFEHKTFTQPPEVKKLAYYLQRNFPGATYHSVYEAGFSGFWIHDQLTQEGIRSMVVNPADVPTKHKEKAGKADKVDCRKLARTLRSGDINGIYTPSRTEVEDRHLIRTRQSMVRKQTRCKNQIKAILFFYGIPFPEEGHWSRNFINRIETTRMERASGDLALKAHLEELKHLRQIIAGLNKAILALSRTDTYRDKVLLLRSVPGISTLTAMTLLTELYDISRFSSLDKLASYAGLVPDIRSSGETEYTAGITHRRNPALRTVLIEASWVAARKDPALIIAFNKFSLRMKKTKAIVHIARKLLNRIRFVLMNQERYVPAVV

SEQ ID NO: 414477 - protein, 310 aa, unidentified
MEATVVGIDVSKNTLDVHVHPSGEAFAVARNADGIDALIARIAPLGVHAVAVEATGGFETVVAASLGGAGLPVIVVNPAQVRAFARALGKRAKTDPIDAAVIARFVEATKPQIRPLPDEDTRLLAELVTRRRQIIQMIVAEKQRERQMPTRHLKKSAARLIKALEKELDVLNTDIGDSVRGSPVWREKEDLLQSVPGVGPVVARSLLAEMPELGTLTRREVASLAGLAPWTRQSGKWRGKSFTGGGRSSVRTTLFMAAMVGARCNPSLKAFHQRLIAAGKPKMVALIAVARKLLTILNAILRDKIPWQPA

SEQ ID NO: 414478 - protein, 392 aa, unidentified
MQAAADRAEAPTAIQTDLRAIFVSLELSRSTWLITSLSPSGGEKMSKHSVPAGDIAGLLRRFAQLKEKARARTGRDFPIIVIQETGLDGFWIHRMLQSEGIESHVVDAASILTSRRGRRAKTDRIDGETLVRTLMAFKRGEPRVCSMARAPTPQEEDRRRVCRERRTLVGERVRHVNRIKGLLFAQGVFGYQPLRKGRREQLEELRTGDGRPLPVHLMAQIVRELDRLEVVLEQLKTVEAERNALLKPATGAAASPPAMLLELKGIGPETAAVLWSEGLFRQFDNRRQVAAYAGLAPTPWQSGSIDHEQGVSKAGNPRLRTTMVELAWLWLQNQPASALSLWFHERVRRLGGRMRKTTVVALARKLLIALWRYTTAGVVIEGAVMKSAPATI

SEQ ID NO: 414479 - protein, 326 aa, unidentified
MNEFKPEASRITTVSARLALPEHGCYAAYVGLDVHKETIAVAVAEPGRQEPRSEGEIANRPKSVEKLVRRLSERFGGGVIQFVYEAGPCGYGLHHQLAGPGHACVVVAPSRIPKAPAERIKTDRRDALKLARHARNGDLTPVWVPGPEQEAMRDLTRARGDMKVQERKARQQLSAFVLRHGHAWSAGKTRWTAAHYAWLESLKFAHDWQQVVLQEYVDAAKAATRRVADLRAQMERALASWSMAPVVVALRGIDTLAAMVLLAELGDITRFDSPRQLMAFLGLVPSEHSSGGRRRQGGITLTGNGHAGRIGLELPLPGAPDETPQA

SEQ ID NO: 414480 - protein, 418 aa, unidentified
MKKHSNSRKKSEATTKRAKSRGPVQRDTKEVLAELVGKLKEKLDPKKAAAASAGDGHPRGELRPNLDRLTVGVDLGDQWSHYCILGLEGETLAEGQLRTTQEDFATFFQGLNAARVVVEVGTHSAWVQEVICGCGHEVLVANPRLMEGSKRRKRKNDRIDANKLARLGRVDPESLYPIQHRSREVRQDLVMLRARDALVAARTEIINTTRGLVKSMGTRLPKCSSRSFAQKGEETVPVEMREALLPLVRLAAALSADIKEYDKKIESLGREKYGHTTLLRQVKGVGPITALAYVLTLENPQRFAKSRDVGPYLGLVPKQEDSGESQPQLGISKAGDTMVCKLLVGSAQYILGPFGPDTDLRRYGLRLCERGGKNAKKRAAVAVARKLAVLLHRLWVSGEVYEPLRPGMSATMTPAAAA

SEQ ID NO: 414481 - protein, 344 aa, unidentified
MSTIKVVGIDIAKSVFQVCVWMADGSVAWNRKISRQKLLHTMRQFPPQTLIAMEACSTSHFWGRTLISMGYDVKLIPTQHVKAFARHQKNDANDALAICETACRPGIHFVSVKTTEQQDIKALRSARQLIVEQRTALANQLRALLAEYGVIIPAGLQRLQQQLPEVLEDGDNTITFTLRRLLSLLREDMQMLTERIDVLDKELAELSSQQVAYHHLLTIPGVGPLIAAAVVSEVDATQFSSGRELSAWCGLVPRQHSSGGKQRLSSMTKNGNRNLRTLIIHGARAVMRCVQKRDDSLGRWVKAIELRRGFLKATVALANKLTRIIWRVLTDSVDFSMNRAFAGS

SEQ ID NO: 414482 - protein, 387 aa, unidentified
MEKNKGRVIGLDVHPDSFAGAVLEGRDALRARAVSVSSRVELTELERWAQRQSTTQDTLVLEASGNAFAVAARLRAIGRRVEILESHRAGKVGKAYCANDRVDAVKIARIYLSALSPVVWQPDPLTLERREVFSAYQGVVKDATRARQQLCAMLNEHCVRLPKGFRLAHPQAIGRLLALREWTPARAMLLEQLHAALVAARTRRTALRRHMAAEIVAEEGLLKLTRLCGISLVTLYGLVAAVGDVRRFAQSKKLVAYLGLNPSVSQSGNWEGGGALKRHGRGPIRSLLIQSAKKLLQVHNPLQRWGLAVAARRGRNKAAVAVARKLCVAVWHLLMGHTIGALDRVDTLTTKLGKLATGAGPAALSALGFGNKSDFVEKKLYLLKSYP

SEQ ID NO: 414483 - protein, 475 aa, unidentified
MNVKGTKKKNQVVKANIFDQQELLKKAEVIKENLIASTWRELEANGKFDKNEKLSFISDDMLILGCDIGSETHYMRAIDTRGRELSKSAFPFNNDSEGFHSAKEWAVKIAAEHDKSQIVLGIEPTGHYWFCLATWMISNGISVVQVNPYAVKQTKEVEDNSQLKDDRKDPKLIANLVKDGNFGMPYLPEKLYAELRRLSMFRDQLNEDRIRTINRMHREMKIYFPEYKDALGKVDGAFSLELLKQAPFPDDLISLGEDGIRGIWHNAKLRGRGYSRAGEILQYAKASVGIKDGAIAGKTAIKWFVQKIMELDAELAVIENQINQKCQEIPHAGNILEISGIGENTLSGILAEMGDISRFDDVKEIQKLSGLGLVACSSGKHKGETKISHRGRKRLRYWLFQAAKSAVAHAEEFKELHMYYTTRADNPLKKMQSLIVIACKLLRIIYTIMKTGTVYDPKKMLMDIRRPEKKEAIAA

SEQ ID NO: 414484 - protein, 314 aa, unidentified
MTQASKFPRYIIGCDVGKASIVVCDSRDGRIRSIANRRDALAAFVASLDATCLVVCEATGGYETELLAATTFAAIPAHRADARKVKAFIRSFGTLGKSDAIDARALTRYGQDRHASLARWQPHDTDRVQLQALMLTRQDLVAARVAFANRRSAPGADAAKPFIDAVLTAFDAQMAAIEATATTLIRSHAPLCAAHKTLCSVTGIGAVTAASLLAVMPELGTLGRRQIAALGGLAPHPNQSGATEGYRWTHGGRREVRPVLFMAALSASRHHKTLRVFYNRLLANGKAKLVALTAVMRKLLIICNAMLRTAAAPA

SEQ ID NO: 414485 - protein, 304 aa, unidentified
MFGIGIDVSKATLDVAVHGEQFRQFSNDKRGFVRLIRWLKTWPIKQVVLEASGGYERAALDVLHAAGLPMVRINPARARRFAQGTGRAAKTDRLDATVLAQMAHLLPLTRYVPPAPWQQRLAEFAQCRRQLVQMRVSEMQRLRRLVDPDLIAMKQRHIAQLSDDLKQLDKAIAEQLEGQPGWKNIGALKGVGPILISTLACELPELGSLGSKAIASLVGLAPMNRESGTWQGQRRISGGRAVVREALYMAALTAIRYEPRLRAFYAGLKAKGKASKVALVAVMRKMLVILNARKRDAEVALSCP

SEQ ID NO: 414486 - protein, 399 aa, unidentified
MGWTSIKITLLHVLCTPEGKEIQTFSTKTVFLIQLVDWIKEHGCTHVAMESISVFWKPIVNLLEAEEIQFLVVNAQHIKAVPGRKTDVKDAEWIAKLLRHGLLKASYIPDRNQRELRELVRYRRSIIEERARQHNRIQKVLEGANIKLGSVVSDITGVSATNMLRAIAEGEEDPETLANFAVRTLKRKKDELELALRGYVSPHQRLMIKTILTHIDFLTVQIEMLDQEVAQRVNAYQEDVERLDSIPGIAKRMAEQILAEVGTNVKDQFPSAAHMCSWAGLVPGHNESAGKRKSSKTKKGNKYLRAGLTEAAHSLKGSKNYLGALYRRTAARKGKKRAGIVVAHAILRISYYLLTRKEMYVDLGEDYFDMQREQSIVRHALRRLEGLGYIVSIKEAEAS

SEQ ID NO: 414487 - protein, 326 aa, unidentified
MKNFIIGIDVSKDTLDFCMLERDSRRKLQQGVIANKEREILTWLKNLDKENVVVALEHTGHYGALLSWLLEEQLFTYYLINPLDLQRSLGLQRGKSDIVDAYRIADYIITNHHKLSPFKLPCESLRKLKALMTARERYVKMSVQIQNSLKAEVILSEKVALKQLIKLEQKQLKSIKKVIEDLEIQMMEIIESNQELNSTYTKISTVIGVGMITSIKCIIETDNFTRFTDARKFNCHCGLAPFPYQSGSSIKGRTKTHFLRDKTLKSILFKAAGSAIQHDPQLKKYYEQKLEKGKHKLTALNAVANKIVLRIFAVAKRNEPFVKLIA

SEQ ID NO: 414488 - protein, 310 aa, unidentified
MNKSELNFVPCGIEVSSETLLVARGSKAPREFPNTAAGHQALLRFLEQGGGRVRVCLEATGRYGLDLALALHAARLPVMVANPRAVRHFASALMERSKTDPLDARVLAEYAARMPFQSWQPPLHAASLSEALSGYVRLEIAHHLRTLEHSVQRLTRAAEQFIGDDWALAERYQLLQSIPGFGPTSALHVLAELSLLGADLDVRQWVAAAGLDPRHYSSGSSVHQKTRISKLGNARLRRGLYMPALVAIQHEPHLAAFYRKLLGRGKAKMQALVAVMRKLLHAIYGMFKHHQTYDGSKIHALTPLPEALCV

SEQ ID NO: 414489 - protein, 419 aa, unidentified
MLRIVHPICCGIDVHKKFLVATIASTDSKNVTTYFKRRFNTFNSDLKSLESWLLMNNCTEVCMESTGKYWIPIFNVLEKSCHVVVANPKYLRSIKGKKTDDKDSAWIADLFKFGIVPSSFIPPKKIRALRELFRYRFKLVGQRSSEKNRLQNCLTVSNIALASIVTDSFGKSSSAIVNYILTCEEFDPTHCVSLLKGSLKSKADEVVNSIIGYELSSDQSTKMAICRKHYDYINVCIDTIDSNIAILAMPFQELIDLAVTVPGIKEQSATFIIAEIGNDMSAFHSSKHLCSWAGLTPQNNESAGKKKSVHVSRAGVYLKPLLVQCANAAIKDKDNPYFKFKYDRIKKRRGHKRAIIAVARMILTCLYHMFLRKEAFNPSDTDYSDIPEILYQRHRQQYIANAIKLLEKEGCTIIPPIAS

SEQ ID NO: 414490 - protein, 359 aa, unidentified
MEGNQERSDRRIVGGVDTHKDLHVAAVVDEVDRVLASQCFATTRHGYKQMLAWMRTFGSLQRVGIEATGSYGAGLLRYMQKAGVEVLEVTTPDKHDRRKRGKNDDLDAQNAAHAGKRTVTPKSRDGMIESLRVLKACRKTAVAARRVALQMIQNTIVCAPDELRETLRKMTRMQLIRTRAAWRPDLTDYRNVASAYRITLKSLGRRYLELHDEIADLDTMIVAIVDELAPALVARNSIGHETAAQLLLTAGDNVQRLRSEASFAALCGVSPVPASSGKTTRHRLSRGGDRAANSALHIIAIGRLRTEPRTQAYVAKRITEGHSKLEAIRCVKRYIAREVFSLIKQRPQQIHRPQPQLDL

SEQ ID NO: 414491 - protein, 344 aa, unidentified
MSEVIIIGLDIAKHVFHVHGADEQGRAIFRKRISRGKLLGFFASQPSCTVALEACGGAHHWARQLAQLGHQVRLIPPAYVKPFVKRQKNDANDAEAICEAAQRPSMRFVAVKSERQQAAALVFRTRDLLVRQRTQLINAIRGHLVEYGWIAPKGPSHVAILADLLKEEEMASSLPEAARAMFRLMLDLIAGLDGKIAALDKEIARRARDDEVSRRLMTVPGIGPISATAIAALAPPAETFAKGRDFAAWLGLTPLQRSTGGKQKLGATSKMGERTLRRLLIIGSSAVVLQASKRGAPKGSWLEQMLARKPCMLVPVALANKMARIIWARLVKQENYRAPVAAKA

SEQ ID NO: 414492 - protein, 345 aa, unidentified
MIDGRQVVGLDVAKSVFQLHTVDMDSGEIVSVQLKRAKVLEHFINRQPCLIGIEACGGAHHWARQLTGLGHSVRLIHAKAVRPFVAGNKTDATDARAIWLAVQQPGTKFVGMKTLEQQATLVLHRQRELLMRMKVMQTNALRGLLYEFGAIFARGRGALFSEIEATLESLVNDIPQYVADSLREQAHRIKKIAEDIKAIEVRLAQRLRADADMKRVAAIPGVGLMTATAAVATMGEATAFKSAREFCAWLGLVPSQRGTGGKVKLLGISKRGDTYLRTLLIHGARSVLTHTKEPGVWLEQLQARRPANVVIVAQAAKMARTIWAVTARQQDYQRGYVSSRPQVRA

SEQ ID NO: 414493 - protein, 349 aa, unidentified
MTIVEDRPVITGGVDTHADLHVAAALDPLGGLLGVQEFPASANGYARLLDWLGGFGAVALVGIEGTGSYGAGLARHLADAGVRVVEVDRADRQDRHRQGKSDPLDAVSAARAAQSGRASGAPRGRDGAVEAIRALMVAKRSARAERTQAINQARALIVTGPDELRARFAGHRPAQLVEAIAALRPRPGDVPGYATRVALRELGRRARFLDAQLERLDELIVPLVTTRAPGLLSLHGVGPDTAALLLIAAGDHPERLRSESSWAHLCGVAPVPASSGKVSRHRLNRGGDRQANHALWRIVITRLGSRPGHPATRAYVERRTKEGLSKKEIIRCLKRYVAREVYHQLHDSP

SEQ ID NO: 414494 - protein, 317 aa, unidentified
MKYVGIDISKEKLDIHIRPTNTFFVVKNNKEDILKLTKELKELNPEMVVMESTGGLEMPLLISLFEEGIKVASVNPRKTRSFALALGYLEKTDKIDAKVISHFAEAVKPSLQVLPDEKTREMNALMTRRRQLMEILKGEKNRLSSCLESVKKRVDGHITWIKNEIEDIYKELSIHINSKIEFQEMEKLLTSVIGVGKVLSNSILSGLPEIGKLSNKEISKLVGLAPINKDSGKMRGKRMICGGREDIRTALYMPTLSAIRWNSVIKSFYERLIASGKPKKVAIVACMHKLLIILNSIIKNKKEWDKDFKSKSLKKVV

SEQ ID NO: 414495 - protein, 405 aa, unidentified
MTKVFVGHDWAETHHDVHVEDDQGRRLAKVRLPEGVEGVARFHELIAAHAQDPADVTVATETDRGLFVGALVAAGYRVLAVNPMSTSRYRERHSTSGAKSDPGDALVLADLARTDGHNHRPVAGDSDLAEAVKVLARAHQSLIWTRQRQLNQLRSTLREFYPAALDAFDELGSGDALAVLAVAPTPSLGRLLSRSKIASALRRGGRQRRIEERSEQIQTALRTDQLQAAPLIAEAMGATVTALVAVASQLTTQIAALETQLADRFEQHPDAKIIRSLPGLGMTLGARVLAEFGDDPNRYADAKSRKNYAGTSPITRASGKHRVVLARYARNRRLADACHLWAFATLTASPCARAFYDQRRAGGDTHNRALRALANRLVGILHGCLTHHALYDEHTAWGHRNELAA

SEQ ID NO: 414496 - protein, 315 aa, unidentified
MRDMPCFVGIDVATAQLDIALRPSGERWAVPNDASGVMTLVDRVQARHPTLMVLEATGGLERAVTSALATAGLPVVVVNPRQVRDFARATGQLAKTDALDARALAHFADVIRPTPRPLPDAQTQELRALLGRRQPLIGMRTAAQNRLAGTNARLTKDIAAHMTWLNAAIATLDDDLETILRASPLWRENDDLLQRAKGIGPVCARTLLLELPELGTLTRQQIAALVGVAPLNCDSGTLRGRRTIWGGRAHVRTVLYMGTLVATRYNPQIKVFYERLLAAGKVKKVALTACMHKLLTILNAMLKHRTPWQPQEVQN

SEQ ID NO: 414497 - protein, 410 aa, unidentified
MRHYLGVDWADQTHAVWVVDERGMKITARTVTHTAEGLGEWGRELDEWRAQGIAVWAAIERPDGRVVDFLLDHGVVVYPVNPKALDRARDRFRQSGAKSDPFDARVLADFLRTDHGHLRPLQPSSEAAQELKLLTEDCQRHIRQQTRLVNQLTATLKAYYPRALEVAELTSVLAREFLPAYPTPEALTALTERQWQRWARAHRLTEARTGELWPVLRQPQLPVPAHVVRAKARLMRALMEQLVPVMAAVAQYRKAIDDFFASMPAAQWARTLPIGKHGITAPTLWARLGDAPGRWESFRHLQAHAGTVPVTKRSGKQQRVVHFRFACDKALRYVVDQVAFLSLLSSAWARTYYDQQRARGHSHRQALRALGAKWLKIIFVMWERHVPYDEQYHLATMTRQQLRSCQKQIA

SEQ ID NO: 414498 - protein, 347 aa, unidentified
MTYYVGLDLHKSMSVLVVKDRDGRLIREGRVANDPTELQQFFAPCQDQPVTIALEATTHYTWMYDTLEALGHTVQLAHPLKVRAIASARIKTDRIDAGILCDLLRGNLLPTSYVPPPPIRALRELLRHRIRLVHDRTQVKNRLTVLLAKTNQTVSGTDPFGVKGRALLAALPLPPMLAWQREDGLSQLEALNRQIKRIDVHLRDLAREHPEVPRLTAIPGIGIFSALLILAEIGNIQRFPSAKQLVGYAGLAPGLYQSGCTRHGRGITRQGSRYLRWILVEASQHVIRHPGPLRSTYLRLAKGKGHGKALVAIARKLLVGLYAVLHDQHAFCPTTTPIPVSGARPRD

SEQ ID NO: 414499 - protein, 489 aa, unidentified
MSEPLQKSQKGKNRRQKAIVSPKPSKWGEMNRQQRREMMRKMQSEDLSLEVVHPDAAGIDIGNDIHYVAVPPSRDRQSVQCFGCTTAELNAMADWLKRCGIRTVALQSTGVYWIAVFDILEHAGLEVYLVNARDTKNLPGRKTDVQESQWLMKLHTYGLLRNSFRPSPGVRTLRTYWRQRQDLVQAAGEHVQRMQKVLTQMNIQLANVISDISGVTGQAIIKAILHGERDPRELAAYRDRRVQATEEEIARSLEGNWQDDLLFVLRQEEAGYEFCQKQMAECDRQLEQCLQQMEDRSRGAALPAEKRKSRLRKKTGKNAPGFDVRTLLFRMTGVDLPQIDGIEVMTAMTVFSEVGWDMSKWKTENHFVSWLKLCPNNMISGGKIIGKDRMPTNNRATTALRMSARSLRLSDSYLGAQFRRLRSRLGAPVAIKAMAAKLARLVYHMLRDGMKYVDKGAQLYEFQHRQHQINFLKRKAAMLGFQVTEVPAI

SEQ ID NO: 414500 - protein, 360 aa, unidentified
MKLDAALDTSATTTAICVVNSRDGAIVLETTVPTDPKAIFRALEPFLPRLHLVGHEATGWSAWLQRQLEARGVPMVLLETHHTARMLEAQRNKTDKNDARGLAQIVRSGWFKPVHAKSDASNRMKLLLAHRRTLKRKLMDIENEIRQSLKMFGLMVGRRVQRASFETRVTALVADDPLLGSTTACMLRCWATLWTEYKRLHTLLVQVVGRDELCRRFCGIPGVGPVAALTFKAAIDDPARFAKSKIVGAHFGLTPKREQSGTSVDHDGHISRRGDGEVRTALYEAANAMMTRSQKHCAVKAWGLRLAAKRGHKRALVAVARKLAVIMHRMWLDGSEFRFSASDQPAGKERNPAPAAPACA

SEQ ID NO: 414501 - protein, 330 aa, unidentified
MYAALDLGQRTIQAVLKSEDGKIIREIKTRKQADTILQFLKGTHANVVMESGYNYQYLYDLLKNKGYNVKVAHPLMVKAIAYAKVKTDKVDARILADLLRTDMIPECYIPDEKIRNLRDLARRRHYFVNTRTMFKNKVHVELSKRWIDYSTGNSSKSDLFTQKGREYLRSLKLSGVKDCLDTIDFLNTKIQEMDNQINILANNDKYAKHLITIPGISYYAALLISSEIADITRFPDYEHLSSYAKLVPGTHQSGETQYSKADMKGSQMLNWIMVQCTHIHVRHGNSSITRHYNKIKSRKGTKIAIIAAARKMMRVIYVMLKEGRSFRPDG

SEQ ID NO: 414502 - protein, 341 aa, unidentified
MKQDMSVVGIDIAKRVFHLVGMDERGKIVMRKRCSRGEVLPLMANLGPVTIGMEACGGAHYWARHLREQGHEVKLMAPQFVKPYVKSNKNDMRDAEAIAEAVTRPSMRFVPVKDIAQQDIQALHRVRERLVTARTALVNEMRGLLAEYGIVLPQGVAKFRQALVSTLEAAQTKLTPLGQELFHKLFAELGKLDAEVAYYQEKLEALADTHPVCQRLQTIPGIGPLTATALMAAVSDAQVFKNGRQFAAWLGLVPKQYSTGGQTRLLGISKRGDSYVRKLLIHGARATLRWVKLKTDDRSRWMRGLLARCGWNRTAVAVANKNARIVWALLSRGGVYGDNAS

SEQ ID NO: 414503 - protein, 344 aa, unidentified
MKIKRIGVDLAKNVYQLHGVDQGDQCVWQRRLKRENWLKALFKKAGPGCEVGMEACTGSHHWARLLESRGYPVKLIAPQFVKPYVKSNKNDAKDAEAICEAMSRPSMRYVPIKTVEQQDIQAMHRIRSELISHRTAKGNQIRGLVAEYGLVASQKMAKLRLAIPQWLEDGENGLTDRFRGLLNGLWGDLKGLDQRVSELDKAIQAVAQSNPDAKRLQQLRGVGPMIATALVASIGNGEHFTKGRQMSASLGLTPRQHSSGNKDRLLGISKRGDPYLRSLLVHGARATIWSARNKDDHLSRWVKDLAVRRHPNIAAVALANKTVRMAWAMLRNAEDYQPDKVMVN

SEQ ID NO: 414504 - protein, 359 aa, unidentified
MGAVVIGVDPAKRSHTIEVIDERESTLLVERFDNDNDGYRLMRAAAKRWPVRVWAVEGASGVGLHLAQRLVSDGETVVDVPAKLSTRVRAMDTGHGRKNDPADAHAVAVVGLRTPNLRAVLADDQLVALRLLSDRRRDLVRSRTRAVNRLHQVLMELIPAGASPNLTATKAKTVLAMVRPRDVAGRARRQLAVDLIDDVVILDRKLKAIQARIADAVAATGTSLTQIVGVGPITAATILGETGHVARFASNDHYGSYTGTAPIEASSGQVKRHRLSRAGNRRLNSALHMVALAHKRHDPRGSAYYAGKLAAGKGSKGAMRCLKRRLSDVVYRALVDDQAARAKAGPGGQLGGDTHIQRG

SEQ ID NO: 414505 - protein, 335 aa, unidentified
MDFCYFVGIDIAKDTLDWAVFTQQGLQLSTHTANTLAGIKTALAEFKALPGWNSCQAVFCMEHTGIYSAHLLELLYELKLAVWLESSLQIKQAGGMQRGKTDKVDAGRIAQYAYRFRDQMRLWQPPREVMQKLAFLSASRQRLNQAYNLLAVPVAEQETFISRSLQKTLKGNVKKSLAALKEEQKAIEHQIHQLIQDDTRLKELFDLMVSVPGIGPVIATELLITTNEMQAINDPKKLACHAGVAPFEYRSGSSIRGKTKVSHQARKRLKSLIHMGTMSAIQMEGDLQDYYQRKIGEGKHTMLVLNAVRNKLIHRVCSVVRRGQKYDKNYAPALA

SEQ ID NO: 414506 - protein, 354 aa, unidentified
MKRSTKHVALDVHQATTMASVREDSGRVIARSILPTEAPALVEFFRGMRGTIHVAFEEGTQAQWLHELLTPLVDQVVVCDRRGEARQGNKGDQVDADELSEQLRRGGLRPVYHGDAHRATLKELTRSYLNLVEDATRVMLRLKALFRARGLKAPGKRVYHPTGRAQWLAQLADRGARMRAAALYAELDVLRTLRPPAKAAMVVEARRDPAWAVLQSIPFLGPVRGAQLLATMQTPWRFRTKRNLWAYAGLAVVTRSSADYVLVAGQPVRRRRAPLTRGLNRNHNRMLKDVFKGAATAAAARPGPLQEWYHGVLARGMREELARVTLTRKLAAVTLRLWKTGERYDPTKLTIQAR

SEQ ID NO: 414507 - protein, 344 aa, unidentified
MITIGIDPHKASLTAVAVDPSGRLLDRRRLLVNAGTLGQLRAWAAGWPARRFAVEGAYGLGRPIAQQLAAAGEQVLDVPATLAARARLLSVGGGRKTDAADAASVAQAALHGSRLRRVAAEDQTTILRLLAERRDDLTGERTRILNRLHGLLRDLIPGGAPTNLSAAKAAALLRGVRPATATAACRRELARDLLGDLRRVDTRLKANMVQVRDALAATGTSLTEVHGLGVVVAAKLLGHVGDIGRFPSQDHFASYTATAPLDASSGNQQRHRLNTGGNRHLNAALHTIAVCQARDPGPGRRYYLRKLAEGKTPAEARRALKRRLANVIYRRILADQHRHQPAGG

SEQ ID NO: 414508 - protein, 349 aa, unidentified
MTKVTIGVDLGDQYSQLYVVDAAGTCVETGRVRTTRAGLERWFARQAPARVVLEAGTHSPWASRALQALGHEVLVANPRTLRGLYENDSKDDRVDAEYLARVGRLDPALLKPITHRGAAAQADLAVLHARDALVRTRTQLISHTRGVVKALGGRLPRCSAEAFARRASGDVLAELQPALAPVLAQVQQVTAAIRAFDRELERRCAEQYPATARLRQVSGVGPVTALAYVLVLEDPRRFARSRAVGAYLGLRPRRSQSGERDPQLGITKGGNPFRRRLLVQGAQYILGPRGPDCDLRRHGERIAARGGKNAKKRAVIAVARKLAVLLHRLWISGAVYEPLRHSTALAQAS

SEQ ID NO: 414509 - protein, 347 aa, unidentified
MKHYAGLDVSLRETSICVIDERRKIVREAKVASEPETIAAWLEKTGFEFEAVGLESGLLSPALHDGLLAAGLPVVCLDARHLKAATSAMPVKTDRIDARNIAYALHAGWYRAVHVKSQTTHKQRALLRSREMLIKCRIELENHLRGILKAFGLKVGTPVKSGFEARVRELVDGDAVLAPVVDAMLSVRRELLERLDDLHRLLLATVRTDPVCGRLMSVPGVGPVTALAFRTAIEDPARFAKSSLVGSYFGLTPRKYASGETDRNGSISLCGDKMVRSLLCEAANVLLTRVQRWSWLKRWGIEVARRRGHMRARVAVARRLAVIMHRMWVDGTSFRWTRDEAAEAAAA

SEQ ID NO: 414510 - protein, 371 aa, unidentified
MYIVGIDIGKNHHEASIVSPKGKQIGRSLRFATTHKGADSLMSFIFKNIGNSPCVFGMEATGHYWYPIYSFLKAKGYTIYVINPIQSDSLRKMYIRQTKNDSIDSFLIAEVIRFGQFGTTSMADENILAMRQLCRYRDSVISSRTEIKLRIGTIMEQIFPEYEKQFSSLWVSTSMGILEKYLTPENIENAPIDELFEIIKDKSHNRLTRAKAISIKEAAADTFGIKIAQDAFSFQLKQLIDRMNFLDKQIEALDCQILEYYEKFDCYLHTIPGIGMIAAATILAEIGDINRFKSSSALVAFAGIDPTVRQSGEFSSTHNHMSKRGSPYLRHAIFLAATARSFHNSPLNAYYKKKRDQGKHHLTATGAVARL

SEQ ID NO: 414511 - protein, 341 aa, unidentified
MGQASTIGLDIAKRVFQAHGADATGRVVFRKRLVRAKVLEFFAGQPPCLVALEACGGAHYWARELGKLGHTVRLIPPAYVKPFVKRQKNDVADAEAICEAAQRPGMRFVPVKDEAQQANTVVFRARDLLVRQRTQCINALRGHLAEYGHVVPQGPAHVDSLVALVEDPKSSVPESARGILQVLIRTLNALEEQLKELDGEIARRAKADPVARRLMTIPGIGRIAATAITALVPAPEGFRAGRDFAAWLGLTPLQRSTGGKHKLGAISKMGERTIRRLLILGASAVVRWASRRGAAAGSWLARMLARKPRMLVTTALANKMARIVWALLVKGGTYRAPAVAA

SEQ ID NO: 414512 - protein, 422 aa, unidentified
MSYCPVAGIDVSKQFSDMCILSPDNKIFAQEKIYHDETSINRANALLQKAERLFFSKPVIVMESTSHYHLILFQFFSEHGYDVIVVNPLQSNSMKDFSIRKRKTDRVDAFKLAMMYRTKTLRPSQIPQTATRALRQLCRHRAELLNDVSSYKNRLTALLDQTFPGYDKVFSDVGGVTSCAVLVRFPTPTILLVEEESELVEVIAAACKSGYSFAKKKARLLISAAQKAQTLGIHSCADETLIVCTIQMLRTLSESVLQIETAIDDLLAQIKEMRNNVSLLQSIPGIGSHSAALLLGEIGDISLFKKPKQLAAYFGLDPTERQSGSFRGTKNKLSKRGSPYARAALHMGVVNSICKRGKDSAANPVLLSYYEKKCKNKPAKVAQAASMHKLVFIVFAVLRDQKPFELKTPEQHAVEQGFVKAA

SEQ ID NO: 414513 - protein, 340 aa, unidentified
MEKRYIGIDLHRNRFTCCLRLENERTYVTEWELEDLARFVKKLRPGDEVAVEITSNTRLFHDAVAPYVKRVVVVDTHQFRVISQSVKKTDPNDARLLSLYLSKGLLPEVRMKDKEHGQLASLTQTRDTLVKLRTALKNKVNNILSARGLNLAKEALSSEKKLAEVLELPFDEIVRIELRVIIEQIRSLNKSIAELEKTIGEEGSKLEGHKGLSSIKGIGKITGAILLSVIGDVNDFADEGRLASYFGIVPRVSNSNETERLGRIHKHGTKLGRTALVQSALIAAKYSPYLKRFYEQVKARRGAGKAIIALAHKFLGIIYRTLKNQWVFDDFPNFVLAEAS

SEQ ID NO: 414514 - protein, 344 aa, unidentified
MNWTVAIGVDTHKNTHTASAFDLVGHRLGRLEVRANSAGYLELLEWARSLGEPAFGIEGTASYGAGLTRLLMAAGVPVYEVERPKRAERRAGKSDPLDADRAGKRLLAGDGLAEPRGLGKRETLRALLVERRSAQQARSSALNQLQALLLTAPPRLRERLGDRRGEQLALSCLRLRPRPSEPESTALVAVLRRLADRVTQLDQELRAVDQAVTQTVAELAPELLAEYGVGPFCAAQLLVSAGDPRRLRSDASLARLAGVSPLPASSGKTQRHRLNRGGDRQLNYALHVIALHRVRFHPETRAYHQRLLDRGKSKREATRCIKRALARRFYHLLITNPRLHYATT

SEQ ID NO: 414515 - protein, 365 aa, unidentified
MEQITGRQIVRVGVDLAKRVIQVHAVDGAGRVVTARALPREKFLPWCAQLPPGCAVAMETCSGAHHWARRLRAMGLQPLLIAGHFVGPYRMQGRRGKNDANDAAAVCEAAGRAHMRFVPIKTAEQQAVLAVHRLREGYKEERTACINRIRGLLAEFGLVFAQSPEALRTQLPDVIEDASNELPHLARVALQRAHLQWLELECHLAWCDERIAGHVKADEQASAAAQLMGIGPVTASALAASVGDFGQFRTGAQFGAWLGLVPSQNSSGGKTSLGRITKRGDDYLRTLLIQGAKSAVMTAHKRKDRISQWLVQLAARVGWQKAVVAMANKNARILWAVLAKGRRFDADHVSVKPEGSAPAVLAAAA

SEQ ID NO: 414516 - protein, 411 aa, unidentified
MEVIVERPAALDVHKATVTACVRVPDEHGVRVPHLTEFATTVRGLLALRDWLAAHRVSQVVMEATGVYWKPVWHILEDDFELLLVNARHVKQVPGRKTDMSDAAWLCQLAEAGLLKGSFVPPKPVRALRLLTRYRKTQIAERQREANRLHKALEDTNIKLDCVASDILGVSGRLMLDALVAGTTDPEVLADLAKGRLRKKLPALKEALEGRFDRLHALLIGSILAHLDFLDEQIDGLSDAIEEQLAPFAMGAVALLVTIPGVGERSAQNILAEIGTDMSVFRTDKHLTSWAGQCPGNHQSAGKQRSGRTRKGSKWLNEALKESALAATRTKNSYLQALYQRLRPRIGHGRAIGAVKHAILQAIWHMLSTGETYRDLGGDYYTRRDPQRATRRLVAQLQRLGHTVTLQDAVA

SEQ ID NO: 414517 - protein, 378 aa, unidentified
MPDVSSVAPEVVRKFVVFDVHKNSLVAGVLPPSGGAPEVERVENTERAVRRFVKRQGGPDGLAVAYEAGPGGFALYRLLSELGVACDIIAPSLVPVRAGDRVKTDRRDAKKLVRLYRAGELVFVRPPSVEQEGLRDLVRCRDDVGRARTAARHRVAKQLLRHGRVFREGKKSWTLRHRAWVRRQRLDDGLAQRALEHALAHLDSLDAQLAAIDAELEQIAGQAPWCDPVRWLTAFRGIGIRTALGLLAEIGDWKRFGHPRELMSYLGLTPSEYSSGDQQHRGHITKCGNEHARRLLIEAAWHYRHRPRRARTGPDVPPDVSARAWRAQVRLHHRHRTLTGHGKRSTVATVAVARELAGFLWAAMTHQPLRDRQEVAAA

SEQ ID NO: 414518 - protein, 348 aa, unidentified
MTTLARSVTGGVDTHLEFHVVAALDERGALLGVERFETTTRGYKKLLGWLESFGPVVLVGVEGTSSYGAGLTRHLHTEGIVMVEVDRPNRLRRRRKGKSDPEDAISAARAAFSGDANGAAKTQDGNVEAIRVLRVARTSARSARTQALNQMRSLVSTAPEPIRGERRGLSVQRLLARASTYRPGANRDVVSLTKFTLRALARRAIELEEEIKTFDAILEPLVSETAPELLSTLGVGPDSAGALLVAAGDNPERLRNEAAFAHLCGAAPLDASSGKQQRHRLNRGGDRQANSALWHIVITRMAYDARTNAYIERRMNDGQLTKKEAVRCLKRYVAREVFSLLPMDRLTA

SEQ ID NO: 414519 - protein, 355 aa, unidentified
MSRDIKYIGMDVHKEATVIAVLNANGNLVMESIVETKAGSLLQFIHGLRGELHVTWEEGTWAAWLYDLLKPQVQVLVCDPRRNALLKEGNKSDKVDARKLADLLRTGMLRPVYHGEHGLRTLRELGRSYQTISQDLNRVMNRLKALYRGWGIGCAGTQVYAPRYREEWLQKIEHAGVRRRAELLYQQLDGLQALRRTLRPELLAESRKHKATKLLRQIPCIGPIRAARLLALMQTPHRFRSKRQLWTYCGLGIETRDSAQYRFVRGQLQRAKKPQQIRGLNRNHNHEMKEIFKGAATRASCGVGPLRDFYVALLDKGMKAEMARLTLARKIAAIALTLWKKEERFDAEQLKLQAA

SEQ ID NO: 414520 - protein, 341 aa, unidentified
MKYVGIDLHKRDLVVAVEDEQGPVGKPQRLLCENESAIIELFDKLRPFVAVIEASASYRWLYERLEPMGRVVLAHPLRLPGIVTRRAKTDKNDAAALAELLRLGRIPAAYVPPKRYQELRDLTRARARLSQAATAAKCPLCALLCRANVHSPFRSPFGKRGRRWFASLDLGVAGNLTRDELLLRLEHYERAAAKLDAGLAELATQFPEVEALLDLYGIGLFSALLIVGELGETERFASDRQVGAYAGLTARVHQSGGHDYHGHITRQGSTWLRWVLVQAAMKVIRADDKLRNFYTRVRKRSSKHIARVAVARKLAGICWIRLRRWHREHAVGQGQSDGHAA

SEQ ID NO: 414521 - protein, 318 aa, unidentified
MVNESFIGIDVSKQWLDIGWEPSGRTERLAHEEVAIAGLCERMAQERPSLIVLEATGGLETHLASALAASGLAVAVVNPRQVRDYARACGRLAKTDRIDAAILAAFARAIRPQVREPKDEESAELGALLARRRQLIDMRVQERLRLERASALQRKSLKEHIDWLTKRIQRLDIELTHRLRSSSLWREREDLLKAIPGVGVITRSTLIAMLPELGRLNRREIAALVGVAPFNRDSGKHRGERVIWGGRAQVRRVLYMAAVAAARSNPVIRCFYQRLRAQGKPGKVALVACMRKLLTIMNAMLKHNTPWNPNTLDLQHSC

SEQ ID NO: 414522 - protein, 358 aa, unidentified
MSEITRVGVDLAKAVIQVNAVDAAGRLVVNRQLSREKFLSWCAQLPAGCMVAMEACAGAHHWARKLIAFGLNAKIIAAHLVVPYRLQGKGGKNDANDAAAVCEAASRPNMRFVPEKTTTQQGLLCVHRLREGLKQERTACVNRIRGILTEFGLVVSKSPEKLSEKLPDMLEDASNDLSGLARLAIEEAYGHWKEIDQRIKWCDERINAHVKEDAQAKAAKELIGIGPVTASALIAAVGDFKQFKNGAQLGAWLGLTPRQNSSGGKNSLGRITKRGDMYLRMLLIQGAKSAVMTAHKRDDPISIWLYQLREKSGWQKAAVAMANKNARILWAMMTKGCSFDPRHVSVKPSVVCAVPATP

SEQ ID NO: 414523 - protein, 418 aa, unidentified
MKSMEITAVGIDVSKSKSTVAIRRPGGVIVARPFDISHSNHELEKLVSILKTTGGDIRVVMEHTSNYWKPIALTLKEAGFYVSVVNAMLIHDFSDNSIRKLKTDRADSLKIANYALTFWNELPPFNDEDETRLVLREQSRMYERLSSTATALRNGLIALADQTFPAIDQAFGHAIKNADGHEKWVDFFSIYWHRDCVLRLSIEKFTESYRKWCLRRNYKFRTNTAHKLYALAQDAVPTLPKSNGTKALVLQACKSLNAVCEAKQATQEEMNRLASLLPEYEVVMQMEGTGPITGPALMAEIGDVRRFKNKKALVAFAGIDAPPFQSGNFESKSRHVSKRGSPHLRRTVFLVANIILTLSHKDNSVFCFMDKKRAEGKHYYVYTIAGSAKFLRIYYARVTEYLRTQEKPVAAGCPNGNS

SEQ ID NO: 414524 - protein, 360 aa, unidentified
MIVIGADTHKASHTFAAVREQTGRIVATRTVRADADGLLEAWQWAHSLAEGCERVWALEDCRHVSGRLERMLIGQGERVVRVAPKLTGELRRGERRPGKSDEIDAVAAARAAIREGLENLPVACLDEQALDIRLLNDYRAQLVAERTRHQNRLRWHLVDLDPELEHRVPDRALAREQWVQRINRRLARLAQNRRVRIARDLLSRIRELTRSERALERELTALIKAHRPDLLAEPGIGPITAATLIGRTAGAGRFPTDGHFARQAGVAPIPASSGNTQRVRFNPGGDRQLNCALHRIAFTRARICPHTRAYLERKQAEGKTRAEAYRCLKRHIARHIWHLLNHTPDPTPQPPTAIHCNTPK

SEQ ID NO: 414525 - protein, 377 aa, unidentified
MKATSTRPAAVLGLDVGKSSHWACLVDRDGEVLASAPVRNREAELDALFASAPAGTLVVVDQFRNIGSLAVRRARAAGLGVAYLPGLAASRAAGLFAGEAKTDERDAAVIARTALGVPDSLSGVPGRGEALEAARALSSQRDHVVACATRDKNRLRAVLLESCPALEAAVDLSDRRWLELLAGFGGAWGIARSGAGGPRAEAAGEAAAASTAPPPALVEAENRQVRFLAARISEALDEAGALEAETAALLEGDETYACLLTVPGIGPRTAAQLAVSVDIGRFPDHDHLASYCGIAPRVRSSGTSVRSVRASRRGDARLKSLLIFSCNSLVRSSGRYGEYYRACRARGMGHGRALKAVARKRLRAIYAVMRDRVPYRE

SEQ ID NO: 414526 - protein, 345 aa, unidentified
MIPQDVYAGLDVSLETTSICVVDSTGATVWRGSCPTDPAAIAGVLRRHAPKARLIGLETGQLSNWLTRTLCELGLPVVCVDARHAKAALKLQVNKTDANDAWGLAQIVRTGWFREVAVKSMDAQALRMLLVARTHLISQRQATANVIRGLMKTFGLVIARGASGLFAPRVREAAAGNGTLLAIVEPLLAAWQALREQIAVFDRQILSRAKTDAVIRRLMTIPGVGTIVALSYTAVIDDPARFRRSSSVGVYAGLTPRRYQSGEIDVSGHISRCGDSLLRSHLFEAANVILARYSKASALKSWGLALAKHIGKRRAKVAVARKLAVIMHRIWVDGTSFIAEGKAVS

SEQ ID NO: 414527 - protein, 419 aa, unidentified
MKLFVGLDVSKAKLDACFLLREDDTNTILWQETVANSESGATMIKDKILRFHEELDFDKILVGMEATGQYSMHPSLFFSNDPELKLINVETIVENPRVIHRFSKVWTEEKNDKLDAQIIAEFLTTGKHTKSQPREEKFVALLRFTRTRYQLIRQMTEAQQHYVENLYYKCNTLSSDLKAENISTSVFSSTMIQLMNGDISMAEIRTMNSVELAALLQKFGRGRFKDPVKLAKVIRKSVSDSYRLGKLAQDSIDINLGVQMRVIRGFEQEIKIIDKAIENIMETIDSAKTLLSIPGIGPVYAAGIIAEVGQIDRFNHEAQLAKYAGLYWPKHQSGNYQKEKTPMSKSGNRYLRYYLVQAANSVRRYIPEYEAYYQKKYKEVPKTQHKRALVLTARKLVRLVFALLSDHQLYIARSEAMES

SEQ ID NO: 414528 - protein, 418 aa, unidentified
MTVDSVAQKRSVIKPDALVIGIDLAKHTHVARARFYDGSYSRPMKVPNTRAGFLTLIEQIGVWKPRPDSPVIVGVESTGSYGVNLVRWLSEYGCRVVLVPSLHVCREKELPDNGRGTSDSKDALIIADLVARGQYLGFVALSDACLELRPLVNLRARLVREQTGWFNALHQTMDVLFPEFETVFVDLKRPNVRLIMGRFGTVASARAHSPAAMRRLLVRDGAVRVSLAKLEQLKAAAGESIGPLTVSAGQERSLREMLDTLAALDGRIAGLETAIAGLLEQLPEAGYLMSVKGIGAMTSAVVLAETGGLAQYSCAAAVQKLAGLNLYQNSSGQYRSGRRISKRGRSQLRRALYMVAVQHARRGWPLYPYYAALVERGKPKPVALTAVCCRLVRLLYALVRDGRCYSERPPEEGRLQVA

SEQ ID NO: 414529 - protein, 410 aa, unidentified
MIFVGDDWAEAHHDVYVCDEAGTKLAARRVPEGIAGMTVLHELVASLAADPAEVVVGIETDRGLWVHAMVEAGYVVYAINPRAASRYRDRHSVSGAKSDPGDAKMLAELVRTDRHNHRHVAGDSALSEGVKVLARAHQTLIWERTRATNRLRSSLREYFPAALQTFDELAHRDALAVLAKAPTPSDAARLTPAKVRTLLRNAGRRRNIEPRADIIAAGLRIEALRAPAAVEAAHGATTRSTVAILSELNVQIEMLAAELADHFKQHPDSDIYLSLPGIGVILGARALGEFGDDPNRYADAKSRKNYAGTSPITRASGTRNVALARFVRNKRLADALDQWAFCSISSSPGARAFYDHRRAVGDSHHKALRALGNRWVGILHGCLHHRSLYDENTAWAHRNDNNLNKIREAA

SEQ ID NO: 414530 - protein, 359 aa, unidentified
MAIKVQRNKINFKGKMINIGIDMHKRFWHITVLVEGDIVMAVTLSRPEYDSFKKILTQFEGNYVRIVYEAGPGGFGLYDRLTDDGIECIVTPPSLIPTESGNKVKTDKKDSYKLAKLLESNMLKKVWVLTPEQRAQRQLVRTRRQIVNHRSDVMRQIKSLLLFNSIEIPFPSRQQWTGSFIKWLHELDLKDEYLNKSLKALVHLFDYLSSEKRRLTHEVIQLAREEKYASRVKLLKSIPGIGALSAMEILVELQDIGRFETADELAAYLGLTPSQYSSGEHIRMGHITHMGNSRARTTLIESSWILINKDQDMREKYENIKYRRGGKRAIVAIARSLSARIRRMLLDEIPYKIGFQKAA

SEQ ID NO: 414531 - protein, 417 aa, unidentified
MNTHWTEQPYFAALDWAKDHHDVIVVDRIGTIVADFRFAHSVQGWDEFNQKMQSFGKCPVTIETSAGMAVDRLLQRGYPLYPINPLSAKEYRKRKAPSGTRTDRHDAWAEADALRTDGHAWRLLHLQDEATATLRLLCRDEIALIEHRTALVNQLQATLGEYYPLALESFDEWAKPLTWAFVRTFPTPAALAKAGKRKRENFLHVHKLWRAQTAHERLEHWARGQQLNASPAVVNAKSLLALSLVKVLDTLQRQILEYRARITEAFAKHPDHDIFGSLPGAKQTLAPRLLSLIGTVREVFPDADSLMCQVGVSPVAYQSGKICKARIRFVCDHFLRHTVHLWVDESRKTCAWAQTYYRAKRDKGHNHASALRCLGKRWLKVLWRMWQEHTSYDEAKYLKALQQHGSFVWKNIQNPLA

SEQ ID NO: 414532 - protein, 355 aa, unidentified
MDSKKYIGMDVHKESISIAVRNDAGKIVMECVIETKASMILQFFDGLRGDVHVTFEEGTWAAWLYDLLKPHVTQLVVCDPRRNALLQEGNQNDRVDARKLAELLHNNQLRSVYHGDHGLRTLKELVRSYLTITQDLSRVMTRVKALYRSWAIPCIGKQVYASRHRAEWLGKIREPGVRRRAEFYYQQLDALRCLRQEVRRDLLAESKKHQAWKRLCGIPSIGPIRAAALLGILQTPHRFRTKRQLWTYGGVGIETSSSADHQVVKGQLERKKRQVEIRGLNRNYNHDLKNLFKGAAIVAATKPGPFAEFYAKLLAKGMRPEMARLTLARKIATIVLIIWKRGVCFDAQYLKPQTA

SEQ ID NO: 414533 - protein, 345 aa, unidentified
MKITTIGIDLAKSVFAVHGVNEHGREVLKKVLKRDQVAKFFANLQPCLIGMEACGSPHHWARKLQGFGHDVRLIAPQFVKPYVKTNKNDAADAEAICEAVARPNMRFVPVKNVEQQAVLAQHRVRQGFIKARTAQANQIRGLLAEFGLIIPQGIANIARRVPELLEDATNELPGSFRLLVQRLMEHLKELDRQAGEIEAQIVTWHRDNELSRKLAEVPGIGPITASALVATVSDAKNFDNARQLAAWIGLVPRQNSSGGKNVLLGISKRGDTYLRTLLIHGARSVICAFQRKKDKVDGWLGALLARRNPNVAAVALANKNARIVWALLAHDREFRPGYTSAQASA

SEQ ID NO: 414534 - protein, 442 aa, unidentified
MTELAVLDPRAAFVDVGSEKMHVSIGGGPPQVFGTVTSQLEALRDFLIEHQVRSVAMEATGVYWLPLYSVVEAAGLDVQMVDGRQTRHLPGRKSDMQDCQWGSTLHAHGLLRAGFVPPAHIRRLQDYVRLRGEHIAAAAGHVQHMQKALDRMNIKLHDVISSLTGASGLAVVRAILAGERDPAALLELCDVRIRKVKAERVLEALRGEWADEHLFALGQAVQSWDHYQAQIVECDGRIAEVLARMPGGDGPAAGAEQPARRRTRPGVNTPQIDNLRELLQHMCDGKDATTLPAHSEYTVLQLVAEVGTDLTRWPTEKHFASWLCLAPGSAQSGKRRTTVKRRRNRAGQIFCVMARALARSKHIALGGYYRRMAARRGGLVANKALAHKLAILFWRVMVKGMDYVEQGLAHYEAQVLETRQRLLRRLAKQFGQQLVPIQGSSP

SEQ ID NO: 414535 - protein, 463 aa, unidentified
MSNRHRITKAARRTTKRVSVEGSLPLLRPNAAGIDVGAEEHYVSVPADRDSESVQRFGCYTSELRRMAEWLKACRIETVAMESTGVYWVPVLEVLEEYGFEVYLVDARQTKNVSGRKTDVVDCQWIRQLHSYGLLSAAFRPAQEIAAMRAYWRHRQGLVESCTRQIQLMQKALEQMNVQLHKAVSDVTGVTGLSIIRRIVAGDRDPKALATMRQRGIRRSEDEIAEALNGNYRDEHVFALAQAVEGYDFLQGQIERCDREIQQCMTGIATKISPPLESKRSSRQRAKNQPHFDLRGELHRIAGVDLTRIEGIDALTAQTVISECGVDMTRFPSDKNLASWLGLCPNNKKTGGRIRSRRTKRIKNRAADALRRAAQTLHHSKSALGAEYRRLRARLGAPKAITAMAHKLARLIYRLLKYGEAYVSEGLEQYETRHRERALRSLNHQAQELGYDLVLRATGEVVS

SEQ ID NO: 414536 - protein, 402 aa, unidentified
MFFVGIDIGKRNHEAAIIDEQGKPIGKPIRFSNTKAGSEKLLQFINDHDLLPDNSMIGLEATGHYWLSVFSFLTALEFNVVPFNPIQSDTLRNFYIRKTKTDTIDAVLIAQVVRMDLPDQTYLPSEDIVRLKQLSRFRYSIVDQTSDLKRKVIASLDQVFPEYETLFSDMFGKSSTQLLLQSPLPEDLLEIDAQKLIDLLNEASNGRLTIEKSTQKVHQLRDLAQDSFGIRVATDVYKLQIQLLLQQILLLEEQLKTVEDEMAELVAAQDQYLTTITGIGPVTAAVILSEVGDIHRFERPNQLLAFAGLDASVHQSGDFTGTRNKLSKRGSPYLRRAIWQAAFIASNRDPALSLYYQNLRKRGKHHGTAVGAVCRKLVNIIFAVWTKGKPYEVHINPDLNTD

SEQ ID NO: 414537 - protein, 429 aa, unidentified
MPYRIAGIDVHKKMLAVVVSDVEIESEYQFERRMFSSNPEQLRSLAAWLVEQKAEEIVMESTAQYWKPVWGTLERYWKPLCEKREGARRRSGTLHLAQALSNRGRRGRKRDFVDAERLVKRLVARELTLSFVPDAEQRLWRTVTRKKYQLRRDLVRIHNQLEALLEEAHIKLSSLVSDLLGVSARRMLKALADGETNPAALAALAHERLRATPEQLCDALGACTELNPVYRRLLKMTLEHLQILEQQIAQLDQELATLLHPHQDAVERLAEVPGFAVDSAQQIIAEVGPAAATFPSEKCLSSWVGACPGEEESAGVNYSHRSPKGNRHMRRLLNQTANAAVKAKGSIFEIIYRRCVPRLGHNQAIGVIAHRQCRLIWLILHQGTRYEERGPAVTKRSRYQRTWRMIRQLRNLGYRIELPNPQASQAQAQ

SEQ ID NO: 414538 - protein, 370 aa, unidentified
MEHFAGIDVSLELSSVCVVDGVGKIVHEAKVASDPEALVGFFRGLETRVTRIGLEAGPLSQWLYAGLVAAGFEVVLLETRHVKAALSAMVVKTDRKDARGIAQLLRMGWFRPVHAKSPAAQEVRALLVARRLLQTKLLDVEFSIRGILRGFGLKMGEVSKGRFVARVRELAAGHAMLERITEPMLRAREALRTEYARLHGEMLAIARPDPVCRRLMTVPGVGALVAITFKSAVDDPGRFARSRVLGAHFGLTPRKYQSGETDVTGAISRVGDATVRMALYEAANVMLSRVTRFSSLKRWALDVAKRRGLKRAKVALACKLATVLFACGSMAPRSVGASRPTLPCNQRRRLSGRGRPASASRGPATGTRIR

SEQ ID NO: 414539 - protein, 282 aa, unidentified
MQDVHYVGLDVHKKTIAFCEKKQDGRVVEEGVLEATRSALQSWANRRVPWVGGMEATLFTGWIYDFLKPFAVELKVGHPLMLRSICAGKKKSDKIDARKLADLLRCDLFPESYMAPAALRDLRRVLRFRNLLVRQAVRMKNKTAGLLMECGVAYEKRRLHGRAYFRELLEKIEDVPESLPTLLNMSRSAMETFDLAQKRLITALRESENLAGRVELLMTIPGVGEVTALTWALEAGPVERFAGIRNAISYCGLCSAQRESAGKIQRGPLSKQRNKFLQKLRS

SEQ ID NO: 414540 - protein, 445 aa, unidentified
MHYKRLLSLIDSVSSYLSVGLDVGADFTWMSIALPNGSFIGKPFKIIHSVPRSRDLAVTKIKEAQETYSLKSRCFLESTGIYHIPLLCFLRDKGFDCSVINPIITKNSTNINIRKLHNDKFDSKKAALVGLNVSLKTSILPDDSVVDLRNLVRDYYYFKDIQSAVALKLTAELKVSFPAYAKVFSKVTTQSSLKLLSSYPLPEDMLAASKEDIVDIIRSTARFGEAYALRKYDAIISAAQDAAVFGRALPSNAVRIRLYIDTYQEYQKHLDAFLKALHETVEKLQDTLIYDQICLLQSLYGIGFLSAVVLVAEMGDFKLFSSPKKLYAYFGLDPAVKQSGKLNGDKVNMSKRGSSLARRVLHMAALNNVKVAKGSGTPVNPVVYDYYTRKCSCKKKPVAMGAVMHKICNIIFAMLRDNKPFEIITPEEHCRRFAAEHPDKIRKAA

SEQ ID NO: 414541 - protein, 429 aa, unidentified
MDKTNAEQTTEVQYAALIGIDWSDQKHDAWIYETETGKQSHRVITHTPQALVEWITELRAAYQGRPVAIGLEQFKGALMAALLGYEFITLYPINPATLAKYREAFSPSRAKDDPSDAELLMELLLKHRDKLKAWKPDDEDTRTLGMLNEERRKCVDSRTKLVQRSQALLKGYFPQAIDLLAHNLSSDMACDFIQKWPTLDALKRAKPQTVRAFYYGHNYRRGDLIEQNLEKIRTAVALTKDKAIVTASTITARVLAKQIRLINAAIELYDTEIKALYRKHPDAFIFKSLPGSGEVMGPRLLTAFGTDRERYEQAGDIQTYSGIAPVTERSGKHQWVHWRWSCPTFMRQSFHEFSGCSRNFSLWAKAHYQLQRERGKKHHAAIRSLAFKWQRVIFRCWKDRKPYDEQQYIEALKRNGSALWPRIQALQNA

SEQ ID NO: 414542 - protein, 310 aa, unidentified
MDAIVIGIDVSKDKLDVHVLPAAQAFAVARNGAGIEELAARLAALAPAVVAIEATGGFETIVAAGLAGAGLPVVVVNPAQIRAYAKAIKQRAKTDPIDAAVIAKFARATRPEVRPLPDEATRQLADLVARRRQIVEMMAAEGQRGRRVDHKRVARSIARVKKTLEAELAELDQEIGDQVRGSPLWREKEDLLVSVPGVGPVVARTLLAELPELGRLERREIAALAGLAPFTRQSGRWRGRSFIGGGRATVRTVLFLAAMTAARHNPPLKAFRDRLVQAGKPKMVALVAVARKLLTILNAIIRDNRPWQNA

SEQ ID NO: 414543 - protein, 444 aa, unidentified
MTNSGMILISKGEDAPVIMGISKPAGLKSPHGEVKIVNPLFVGIDVSSKNNVAYLMKPDGSKHSNFSVQNNLGGAKLLSERIVSALRSMQLSDVVIGLEATSIYGDSLVYALREDGSLGRFQRKIHVLNPKQVRKFKEAYSDLPKNDWVDAFVIADHLRFGRINREVYMDDYRYKALQTLTRARFDVIQNLTREKQRFANYLFLKCSGMAQDKDIQNTSATTIALMEHFETVDDLANADLEELTAFITETGRGKFADPDATAKAVRAAAKGSYRLPKTVNDTVNQAMAVSIASMRALKGQVKVLDKAIEQQFEIIPNTLTSIPGIGKVYSAGIIAEIGDIHRFESQASVAKYAGLVWNRNQSGDFEAEHSRMIKSGNRYLRYYLLEAANSVRRCDSEFRRYYNLKLKEVNKYQHKRALALTARKLVRLVFRLLKDNRLYIPPEG

SEQ ID NO: 414544 - protein, 330 aa, unidentified
MKNYKEVVGIDVSKKTIDAYCYHGQSHKAFINDIGGYKSLVKWVFKVAKTTELFYCFENTGYYSLKLALYLTSQNIIYVEESPLKIKRSSGIVKEKTDVLDACLIARYGWLYREELNPSTVKSSSQLELGRLLALRDQLVRNNAGLKGRLKEMKVLLTSPTTDTGCIGLKRSIDYLEKQVKSIETRIKVILSEDSSMEKNYELLTSLRGVGLVVACQLIYHTGNFTRFDSWRAFSSYCGTAPFEHRSGTSIHRRKQCHYLGDRKMKSLLSMASVSAIQHDSELRLYYKKKLAEGKDKMIALNNVRNKLISRAFAVVKRGTPYVVLQQHAA

SEQ ID NO: 414545 - protein, 371 aa, unidentified
MSQYNTDTVWIGMDVHQDSITAAVLFGDDKEPKIERLPGDLNAVRRMFRRLSDQGTPRSCYEASGAGFVLQRCLEHDGFHCEVIAPSLVPKKPGDRRKTDRLDAIHLAHHYRAGNLVPVTVPSPHQEEVRQLVRSRLAVQSHVVRLKHRIVRVMATHGHRFTGGKSNWTKKHRVWLRKLHRELDGPLGTVLAHHLEHLEYLEAQKNALEMEIDRYARSGPYRKKVEALCCFRGVKTLTAMTILTELGDIRRFKKATGLMAFAGLVPSERSSGNVRRRGRITKSGSQELRRILVEASWHYRKQATSDLILRRRRMGQNPEVVSIAIKAQHRLQKTYWKIATRKHPCTAVTAVARELCGFIWSALWALESQEG

SEQ ID NO: 414546 - protein, 414 aa, unidentified
MDVLYKVCCGIDVHKKLLVACIRDGKDSKVMKFGATTKEIGKLAELILSSGAEKVAMESTASYWKPVYNILETRGISCIVVNAQHMKNVPGKKTDVKDSEWIADLLQHGLLTSSYIPDRNQRDLRELLVYRQSLVQESSAELNRLQKMLEGGNIKLSGTVSDILGKSSRLFLENLICGKHLSADDIRKLQADGAVSGFLKASPEELSDSLDGCLSQMQRESLRDVMNHIDDLSERISATEKRALDSLSDRQKECVGLLMTVPGIKEISAVCIISVIGTDMSQFPTANHLCSWAGVVPGNNESAGKKRSSRCTKGNQLLRAALSQCANAAARKKGCFFKAQYERLVVRRGKGKAKMAVAHSLLICIYHILKEGIEFKDLGEDYYANYKREATIRSISRKIKQLGISKSEIMEMVE

SEQ ID NO: 414547 - protein, 339 aa, unidentified
MELKRISIDTSKHIFTIHGVDRQEHPVLRREIRRTQFESFFTKIEPTEVALEACAGSHHWGRLLSRMGHRVKLIPPQYVKPFVKRSKNDRNDAEAIGEAASRPAMRTVPLKTTEEQAATIIVKHREMLVAQRTQAINALRGHAAEFGIIAAKGCPNVTALLSVLASDEAIPVSAQVMFREMGQHVADLDAKIEELDRRLLDQHKVNPVSQLLAAIPGVGPITAITMALTVDPSNFESGRHLAAWLGLTPREHSTAGKHRPGKISKAGNERLRQLLVVGAMSVIRVAKPGRQSASGWLLQLLERKPRKLAAVALANKMARVIWAMMARGEAYRRQLVTTA

SEQ ID NO: 414548 - protein, 407 aa, unidentified
MDVLYPRCAGLNVYKDTVVAGVRVASGGAFKSEVGTFSTTTPGLLALSAWLGEHGCTHVAMEATGVYWKPVWWKPVWHILSDSEFTLILANAAHVKNVPGRKTDVADALWLADLLAHGLIRPSFVPEAPTQALRALLRTRKQLVREQASHVQRLQKTLEDAHLKLSSVLTQIMGKSGRAILEALIDGEADPDKLLTLVQRGVKAPPETLRAALQGHVTVRHRFLLRLHLRQVDALNAAIAEIDAEVDRDLDPFRHAVRLLSTIPGVSDLTAQVIASEIGINMSRFPTAGPLISWAGLCPRNDESAGKRRSTRLRKGAPWLKTTLVQCAWAGARKKASYLQAQFQRLRHRRGPKKAICAVAASILTAAYHMLRDGTFYQDLGADHFRRAAPKAQANRLARQIAKLSFT

SEQ ID NO: 414549 - protein, 352 aa, unidentified
MSEYAGQQFVGIDLHRRRSVVVRTTVSGEVLEATQILNDVDRLNSVMERAGERPEVVLEATYGWYWAVDALQEAGARVHLAHPLGVKAFEYRRVKNDLRDATDLADLLRMGRLPESWIAPPATRELRELVRHRAKLVGLRSHCKVEIHAVLAKCGIQVLMSDLFSPAGQDLLDRCPLPGPYAARVQSLLRLIEDLEGEIEVFTRLTRGRLAANPEYLAVQQLPGIGAVLAAVFVAEVGDVTRFRTASQLTCWAGLTPKHHESDTKVHRGRITKQGSRLVRWAAVESVKRLGPTHVVGAYKQQVADRRGKNIGTVAAARKQTEFVFYALRDHHVRALHPPAAPAAAPPGAPAA

SEQ ID NO: 414550 - protein, 306 aa, unidentified
MEEIIMKGCGLDVHQATVVACIQRQGYDKQVKTFGTTTEELESLKQWLKEELITHIAMESTGVFWKPVFNVLEDDQWELLLVNARHIKNVPGRKTDVQDCEWICKLLRAGLLKGSFIPQEDIRQLRTITRHQKAIQHQIQNEKNRVHRLLQECNIKITQVLSDVFGVAGMNILTDMSKGITDANKLAKHMEGNKQLLRKKEQAVACLKGKFTRHHQVMLKIMLDTIAFYQKQIEALDIEAGELLKPYQVEHELLQTIPGVKAKAANHIIAELSANMDAFPDEKHISSWGGLCPGNNESAGKKKVRG

SEQ ID NO: 414551 - protein, 430 aa, unidentified
MKSNTQNAKIEAITEKTLVLGIDVGSETHYARAFDYRGIEYSKKPFKFSNTEVGFVTFKEWILDLKEKHEKDKVVPGMEPTGHYWFNLGKFLQDNEMKPVLVNPHHVKKSKELDDNNPTKNDRKDPKVIAGLVREGRYMIPYLPDGVYADLRTASNIRFQLQAELTRIQNRISRWFNIYFPEYKTVYGKPDAKSGMLILKAAPLPEDILTLGIDGVNQIWRDAKLRAVGKARAKTLIEAAEHSVGSKEGAVSARMEIRMLLEDYESRNTRLQEVMVLIEELVRKIPMAEKLLEIKGVGIRTVSGFLAEVGDISRFNNPKELQKLAGLALVENSSGKHKGETTISRRGRKRLRYLLFEVAMSLVSKNQEFRELHNYYTTRRLNPLKKMQSLMAIAAKLIRVFYAMLTKGVDYDPKKMVSDIKRPAVYLQAA

SEQ ID NO: 414552 - protein, 345 aa, unidentified
MVVLGADLHKRNHTVVVIDETGRKLAEKTIPATDAGHLELRRWASQWPERTWGLEDCRHLSRRLDAELVRAGESVVRVPPKLIACIRRSGREPGKSDPIDALAVARAVLREPDLPRATLDGPDRAIRLLVDHREDLVGERTRHEQRLRWFLVELAVAEPKPRSLDRAIVQAALSTALAGRIEPVARFARDLLARIVELSTTIRALERELEALARDATPTLLAMPGCGPLTAAKIVGEAAGISRFRSKEAFAQHNGTAPLPVWSGNIVRHRLNRGGNRQLNVALHRIAITQVRLGGPGRMYLDHRQACGDTRTEAIRALRRRISDEVFRRLRADEAAGSTGLAVAA
